United States Patent Application Publication US 2008/0050393 A1 - sequence listing, part 5

SEQ ID NO: 13862 - DNA, 1244 bp, Homo sapiens
  misc_feature (1)...(1244): n = a,t,c or g
gcttccggctggagctgctgggcgcgggacctggggcggttaatttggagtggcccctggagtcagtttcctacaccatccgaggccccacccagcacgagctacagcctccaccaggagggcctgggaaccctcagcctggcacttcctcaaccctcaggaagctcagcggtgggcagtcctagtccgaggttgccaccgtggaaggacagaatggcagcaagagtaactcaccaccagccttgggcccagaagcntgncctggnttcctngccnantcccccggaagcctccacactcaagggccctccacctgaggcagatcttcctaggagccctggaaacttgacggagagagaagagctggcagggagcctggcccgggctattgcaggtggagacgagaagggggcagcccaagtggcagccgtcctggcccagcatcgtgtggccctgagtgttcagcttcaggaggcctgcttcccacctggccccatcaggctgcaggtcacacttgaagacgctgcctctgccgcatccgcccgcgtcctctgcacacgttgccctgcaggtccacccccactgcactgttgcagctctccaggagcaggtgttctcagagctcggtttcccgccagccgtgcaacgctgggtcatcggacggtgcctgtgtgtgcctgagcgcagcttgcctcttacggggttcggcaggatggggaccctgctttcctctacttgctgtcagctcctcgagaagccccaggtcagtcctcgatgggggtggggtgtgggaggtggggtgcagccccacagtcctgagctccaccccctcagccacaggacctagccctcagcacccccagaagatggacggggaacttggacgcttgtttcccccatcattggggctacccccaggcccccagcccagctgcctccagcctgcccagtccacttccagcccagctggtcctgtccttcctgcaccttcatcaatgccccagaccgccctggctgtgagatgtgtagcacccagaggccctgcacttgggacccccttgctgcagcttccacctagcagccaccagaggttacaaggggagagtggcccttccctcacaagtccgacatctccaggcccccactgaactccggggacctctactgactgcttgctgggacagtcaccagggttggggggaagggccacaaaatgaaaccattaaagacccttaagagccaaa

SEQ ID NO: 13863 - DNA, 1021 bp, Homo sapiens
tatatatttgtcattttgtataaaatattgtgaaaattgaaggaggacactcagtaaacatcctgggactatttgtaagttatggcaaaaccagatgagagaaaaggggacagtcccctctgtatcctcgttgtctcttagtaacatcaaattgtagttaaaaaaattttaaactatgtacaagctacaaaatagcatctctttcatggtatgtttgagtgtgtaattttagtttcttttctggttgtatttgtggtagtcagatgtgttggattgattccaactggacagagtaaggaattccagcatcctcttcctgcttgctcgtggttaccccacagatcaaaccctcaattctagttggggatgctgtctagccccacaccatgactgaagccttaagcactgttgcgcctccatgtgctttggatcagcaaccccagtggtattctaccagagcattgtgggaaagcagatgtatagtcaggtcccaacagcaaattgttgggtgtgagagttctaaagtataggggtgagggaagagaaggatatgaactcctctgaccttaagccagcatttcatttaaacttttatgtctacttaacaagagaacctggaggaaactaccgtaatccaaggggtttatcccaaatcagtgttttagcccaggcgatgacagagaagcaccattcctcaccctccattcttgtaatgtctgtaataaatttcagtgcgtcaggatggatgaacccaagatccagtgaatgattcagctgttccaagccttacattttccatcattcatcatccattctcattcagtgtaacctcttgcactattgtggttaattttatgtaaaaccagtttatgttttttttttttaatatgtgcctatgtaataaagtctacacactggctatctctgtagaggtgaggttttgtttttagttgttctactgattatatccttttctgagctatgaaaatgaattattcataaaaaatttttgaacaaaata

SEQ ID NO: 13864 - DNA, 1202 bp, Homo sapiens
caggatggagaatggaaggaaagccccccaggcttcgtgaattgcaagaagggacccttccaggatgacactaggaacagggctagggcactcgctcagtccctaggggcttgtttgttctttattattgtgtttaaatccttatagagcaatatcaggatggtgttaataggtctgcctcagaatgagaatcaatccttttagaaaacctttatactaagcctcctcttcaaaattcacagtggcgattagcggactggagtctggtggcgattagcggagctggagtctggggacatccgtggcaaagacaccagctcaactttagtgcttcccaactttatttagaatgacatggggtgggtgtctggtgtgtgtgttttccctacgcacctcccatagctattaacaactgaggaaggccagtgcagaatatttttggagaacgattttttttttaaataatatatcattcctatggggggaaagccttttttttctttttgggctgagttattccctccctcccctcaataccctcagtactgactacttccctttcttttctcaggcctccccccaccgacttttgaggccagggttggccagatttagcaaaaccaaaacagagtgctgagttaaacgcaaatttcaggtaaacaaaagataattttctagcattaatatgccccacgcaatatttggaacacttatgtgaaaaatgatttgtttttctgaaattcacgtttctctctgagtcctgtaactgtccccgaggggattgagcagaagctcgggtatgagccctgaggttgactgccggttatttttctgtcctgggaacagcctgacccacctccctgtctccatgtagccagtggggggagggggagacacagaaccaaccacagccaggggcgtccccatggcgactgtggcccggcccctcctctcttgcctgactctcctctcttgcctgactctagacactaacttagttccaggttcggtgccctgttggtgctcctgtttccaatagcttaggtcccatggtgggggaggaacctcaggggctatgcagcccccgccagctgccctcaaatcccgtccaggccagttccagattctaaactgatttttttcatgatattgtcaaaacagtgaggaaacattaaaaaaaaaagccctaaagcaaaaaaaaa

SEQ ID NO: 13865 - DNA, 2692 bp, Homo sapiens
  misc_feature (1)...(2692): n = a,t,c or g
taacatttattttacaacagtaatctttattttaggccaacattcagacatacaagacggagatcaccatgcggaaccagcctggcccttagatgtgtgtgctcgagccaggatcagccggagtctgacagcgcctgcaccccaacacggtcggattccaggacgccagtgacaaaaccagtgcatggacaagcagcttccatgcgtgtgcatttgatttttaaaaacaatacatatttcagtgttaacttcccccctcacctggcttgaaacattttccccattttccagggaaacaaactctaccaaaagggtgcccgcctgcagaaccccggggcccaggccccttctggaagggtnggtggtgttgtggactcctctggggggccgaaccgggggccagcacagggccccttcccaggccgcccttcagatgcagctttgccactgaccgtatctgctgctcagaaaatcagctttcatgtttcaaggcagggaagggcttccagtcccctcctcgatttcacaccgggacacacacctgggtcaggtgagcatgacacacagccccccaggatgggcacccccaccctgcagagcagaggcccaatgctggtgggggccgtggcagtgccctgggcacacaccctctgcacacagtgggctcagcgcttccttctgtgcacctgctgggaaagcctcctgcaggtccctgcccgactcccaagaaaccagaggccatttcagagccacctttaattgtacttgtcacttcaccaggggacagcagcatgaatgacactcctgctgcgtgatatatacatatacacatatgtacacacacggacacaccacagcccacactcacagcatgtgacgacgcaaactgttgctggtaaggacagtaaaaatgtagcttttgccaattccacaggagaatgatttacaaccaaaataacagacacaggccagtcctgcgccacaggggttcacagctctgaatactgggaaagggtgagatcagtcatttcgtgtcccctcacgagatgtccccacagtaggatgcactgagtcagagctaagggagggtggacaagcgctgaactctgcccgcagcacccggaccctccagtggcagcctgcatgctggtgcccttccttgcagcacaagcctcggcccggaacagaacgcctgagagcagcctcgacggcgtgaggctccagggcctcttctggatggcagcagccgacgtgaagacgaagcttttcctgctggggcacgtgtgcatgccagttcctttttctagtaggtccccactgggtgctggctgcactaacaacatagagaactaggaaagttcacaaacactgagcagtaatatctaaagcagtttaaaaataaagccaaaaggaagacaaaaaaatcccacgtcactgagtggagacaaatctatacagcagcagctgcccgtgataaaggcgcagggccgctcctacgcctcctgcaggtcggaagcagtcagtgctgcccggaccccctcgtgaaccggacgggcctcaaagcacgaaccccagagggcccctggcagcccccagcagcggcgtccaaagggacattctgtgcccatggccacacttgctcacagcattgtctgcggcccgagagtgaggagtcggggtccccgtcactgccaccagcaaaagcaggcaggggtgctgggggcgtcctgatctgttagcacgtggacagggaggcgcggaagctgcccccaggactcaccacctcttttaattatagggaaacagtccactcaagaaagagagaaataaaacccgggaggatctttttccttaaattaagacaaagccttaaagccaacagggcagagcgctgaaaacggttctgcttctaggtcaggcagggggaggaactcccaggccccgagtgtctgggcttcccgggggtcgtctaatcacaatcaccaccgtgagaatggccacaaccatgatttattaggttttacagattctgcaggggactgggttccacaaacctccagacctgctcctctttcccaccctaccccaccttccgcagggagctgcatggttctacaaaatggtccactggactctgtaactgaaaagccacctggcaaggggcccactctgatgggtaccgaagggccttggagtgttctagccacagagctgtgtgcaggcccaacagagggcctggtggggctgagctagggcccccgatgggcagctttctaccttaggtccaagcttagaacctggctcttggccagtctgcggaaaaataactcacgtcctaagctacatctacaaaaattgcaaaggctgagtacagccagcatctcaggctgaacttgctgctgccacgaagcggcacggaggcaccccactgtctcgccacctcacctttcaggatgggccaaacaatgaatttcttattcttttaggagaggtctgattttgataaattatttctaatttaatatcacagtgcatatctctcctcttgtcaaaggtcttcgtgatcattttagtgagaagaaacaaagaaaagtgggacaaacaaagctgcccaggacctagtgctggcagccggctcatggtccacatgcggatctgcagtaggggtcagctgggggccctcaaccagccc

SEQ ID NO: 13866 - DNA, 404 bp, Homo sapiens
ccttgaaatatcttctgttgtttattttttttaattttttttttatggcactctgaacactttcatcttccattggataagcaaagcctgcactagagtcagtgtctattcctatcaagaattcctattccatttgtagtcccccagggctgccagcatcagtctcacttgtcagctatgttcagggccttcccaccaggaaatctttcccatagccagtttctgtctctcttactgagaaacagaacagttcttcctagcattttgtgccttggaattgccatccataaaccaagaagctcttgtttggtcagttgaaagttgtttatttggcactgtagaatccagcagtttctcacacagttccagagtcagtcctaggggaaaagaaattctctgcatgc

SEQ ID NO: 13867 - DNA, 1171 bp, Homo sapiens
ggccgccacggcgcctctggaagggaaccgctctgggccccgcctttgatctcgttggtggggctgggggatgagagctgcaccgcgcgggacaagtcgccggcggcgcccgacggagcagaagagagagcatggagctggagaggatcgtcagtgcagccctccttgcctttgtccagacacacctcccggaggccgacctcagtggcttggatgaggtcatcttctcctatgtgcttggggtcctggaggacctgggcccctcgggcccatcagaggagaacttcgatatggaggctttcactgagatgatggaggcctatgtgcctggcttcgcccacatccccaggggcacaataggggacatgatgcagaagctctcagggcagctgagcgatgccaggaacaaagagaacctgcaaccgcagagctctggtgtccaaggtcaggtgcccatctccccagagcccctgcagcggcctgaaatgctcaaagaagagactaggtcttcggctgctgctgctgcagacacccaagatgaggcaactggcgctgaggaggagcttctgccaggggtggatgtactcctggaggtgttccctacctgttcggtggagcaggcccagtgggtgctggccaaagctcggggggacttggaagaagctgtgcagatgctggtagagggaaaggaagaggggcctgcagccctgggagggccccaaccaggacctgcccagacgcctcagaggcccccaaaaggatgagctgaagtccttcatcctgcagaagtacatgatggtggatagcgcagaggatcagaagattcaccggccatggctcccaaggaggcccccaagaagctgatccgatacatcgacaaccaggtagtgagcaccaaaggggagcgattcaaagatgtgcggaaccctgaggccgaggagatgaaggccacatacatcaacctcaagccagccagaaagtaccgcttccattgaggcactcgcccggactctgcccgagccttctaggctcagatccagagggatgcaggagccctatacccctacacaggggccccctaactcctgtcccccttctctactcctttgctccatagtgttaacctactctcggagctgcctccatgggcacagtaaagggtggcccaagg

SEQ ID NO: 13868 - DNA, 878 bp, Homo sapiens
ggggctgccagcctggatgtcatccaggaggtagaatatgtgaaggaggaggccaagatggtgtacctgctcgagtgcctgcagaagacacccccgcctgtactcatctttgcagagaagaaggcagacgtggacgccatccacgagtacctgctgctcaagggggttgaggccgtagccatccatgggggcaaagaccaggaggaacggactaaggccatcgaggcattccgggagggcaagaaggatgtcctagtagccacagacgttgcctccaagggcctggacttccctgccatccagcacgtcatcaattatgacatgccagaggagattgagaactatgtacaccggattggccgcaccgggcgctcgggaaacacaggcatcgccactaccttcatcaacaaagcgtgtgatgagtcagtgctgatggacctcaaagcgctgctgctagaagccaagcagaaggtgccgcccgtgctgcaggtgctgcattgcggggatgagtccatgctggacattggaggagcagccgcggctgtgccttctgcgggggcctgggtcatcggatcactgactgccccaaactcgaggctatgcagaccaagcaggtcagcaacatcggtcgcaaggactacctggcccacagctccatggacttctgagccgacagtcttcccttctctccaagaggcctcagtccccaagactgccaccagtctacacatacagcagccccctggacagaatcagcatttcagctcagctggcctggaatgggccaggctggtcctggctgcctgttccctgtgctcttcagaattactgtttttgtttccttttaccccagctgccattaaagcccaaacctcttg

SEQ ID NO: 13869 - DNA, 612 bp, Homo sapiens
ttttttaactgtataattattatttttaatgtccagaatgtgtaatacaagggccagagcttcctcctggactcaattttataaattctcaattggttggtgaggccaatagggatactttttcttgtctaatttggtttctgggaaagcttcattcaagtcctcaatggtcatctgatcaaatggaattaagttcttcatcttctccatctctttctcatattctacaatcctggcctttgagagagacacccactcagcacaagatttcacatcttctttttcttcggcatccacctgggcagtatatttatcctctggcacgggaaccttcagcgcattaaacttcttctcaaagtcatccaccaagccagccttggccacattggccttgtagtaagcccagtcgatagctggtggattctcaggtaaagcagccaacctggaggtgagggtctcattccaggatttcagggaactagcaatggccttttggttctggggtatgatctctgcaaaagctacccagtcaatggtttttagagcaagttttcgcccagccattttgggatccttcaccgaccctggctgcccacggtcctccgcagcaag

SEQ ID NO: 13870 - DNA, 334 bp, Homo sapiens
ttaacaccatgtagtaagaggaatagttaagaatcttagtaggcatcgagggactggcactaccggcctaacacctgggagctttttagtaatgtaaaaatgtgggtccccactcctctatcaatcactatctgcgccttaaccagacccctaggtgattcacatgtacatttaacatttagaactctgctttgtaaagctattattacagtaatgccaacaaagagcttgcattacttcaaccttaaagcctaatgtgccaccttctaaagatcctgatattgtcacaataggctagtcagcatagaactgttagaaaaaagtacatactttg

SEQ ID NO: 13871 - DNA, 328 bp, Homo sapiens
  misc_feature (1)...(328): n = a,t,c or g
ctgtggtcgcgctctcaccccttctgctgctctcgtggccccctcgcgatggcgggcatcctgtttgaggatattttcgatgtgaaggatattgacccggagggcaagaagtttgaccgaggtgacaagtttcggttggtcatagctagtaccttgtatgaagatggtaccctggatgatggtgaatacaaccccactgatgataggccttccagggctgaccagtttgagtatgtaatgtatgaaaagtgtacaggattgagggtcgacgcggccgcgaattccnnnnnnnnnnnnnnnnnnnnnnnnnnnnnnnnnnnnnnnnnnn

SEQ ID NO: 13872 - DNA, 761 bp, Homo sapiens
  misc_feature (1)...(761): n = a,t,c or g
ggtggttgacgtctgctggccaggccacatggctggagaggaatttcagggagcatagcatcgggaggatgctacatatccagggactccctcctggccttcctgtgtcacttcacaatgtgacagtccccaggcatgcccacaggccaggcccagtcacagctgggcttccacaggtcagaatatgggacaggacatagggagaggaccctgtgagttggtgacatatatgtggcagagatggtagtgttcagctgcttcagcagtgtccccaaccatcccaatagggtgggggcctgtgggccagaggactccatgacagtagccatggagtcccacctgtgccaggtcagagcccacccggcaggtttcagagtggtcagcccagtttaagggtgggagtctggagccagacagccaagccccttccacatctacagggtcactgtcatcctcaccacagccaggggtgattctcacctctgcctgcttatgtggggtgtggccgattcctccctttagtcattcattcatttagcacatatttattggggcatcggtgatgtgtcagggcacagtccttgggcacacagaattacagcagtgaattaaacaggcaaaaattcctcccctcctgggagctcagtgttcaggaaaggggggtgataaattgacaatcaaatcgacatgggagtttgaggcacntttttattcagccttttgtctgttctttttnagggcgcaacaaggctgggttcttt

SEQ ID NO: 13873 - DNA, 444 bp, Homo sapiens
gaaaatttgctactgttttagaccatattttcctattatttatctgttcaaatttgtattattacaactaatagctcttgaattctttgctaaagggtaaacagcaacacttccagaggcttctaaaacactactgttttgcagggcaggagtattctggaatccttttacttagatataaaataaacctcgaatattaaaaagttgtagccatctgagagaggaaagtttaagtgactgaaaatgtagaatacttcaacgtgcatgttactacttaaaactagtctttctgctggaatctaaggagtatatatatatatgcccccttgtggttaattattgctcctttaataatttttacttgaaatgatccacaattatttcataactttagcagtgtgttttggaactactgtacttaaaggtttgtttgtttgtttttgc

SEQ ID NO: 13874 - DNA, 4804 bp, Homo sapiens
tgctggagggggagccgtgggtgcggggcaccgtgggggccgaggccccgggacgcccgcccggccccaggccccgctcagcccgggcgcccccacgggtgccccccccttcttggtccgagcagtgtgagtgtgccagggagcccggcggcggcggcggcggtggtggcggcggtggcggcggcgtggaatccggcgtgggctggggggtccgagccgcggggggcagtgccatgcacaagcaccagcactgctgtaagtgccctgagtgctatgaggtgacccgcctggccgccctgcggcgcctcgagcctccggggtacggcgactggcaagtccccgacccttacgggccaggtgggggcaacggcgccagcgcgggttatgggggctacagctcgcagaccttgccctcgcaggcgggggccacccccacccctcgcaccaaggccaagctcatccccaccggccgggatgtggggccggtgcctcttaagccagtcccgggcaagagcacccccaaactcaacggcagcggccccagctggtggccagagtgcacctgtaccaaccgggactggtatgagcaggtgaatggcagtgatggcatgttcaaatatgaggaaatcgtacttgagaggggcaactctggcctgggcttcagtatcgcaggtggcatcgacaatccccatgtccctgatgaccctggcatttttattaccaagattatccctggtggagcagctgccatggatgggaggctgggggtgaatgactgtgtgctgcgggtgaatgaggtggaagtgtcggaggtggtacacagccgggcggtggaggcgctgaaagaggcaggccctgtggtgcgattggtggtgcggaggcgacagcctccacccgagaccatcatggaggtcaacctgctcaaagggcccaaaggcctgggtttcagcattgctgggggtattggcaaccagcacatcccaggagacaacagcatctacatcaccaagatcattgaggggggtgctgctcagaaggatggacgcctacagattggggaccggctgctggcggtgaacaacaccaatctgcaggatgtgaggcacgaggaagctgtggcctcactgaagaacacatctgatatggtgtatttgaaggtggccaagccaggcagcctccacctcaacgacatgtacgctccccctgactacgccagcacttttactgccttggctgacaaccacataagccataattccagcctgggttatctcggggctgtggagagcaaggtcagctaccctgctcctcctcaggttccccccacccgctactctcctattcccaggcacatgctggctgaggaggacttcaccagagagcctcgcaagatcatcctgcacaaaggctccacaggcctgggcttcaacatcgtaggaggagaggatggagaaggcatttttgtctccttcatcctggcaggaggcccagctgacctgagtggggagctgcgcaggggagaccggatcttatcggtgaatggagtgaatctgaggaatgcaactcatgagcaggctgcagctgctctgaaacgggccggccagtcagtcaccattgtggcccagtacagacctgaagaatacagtcgctttgaatcgaagatacatgacttacgagaacaaatgatgaacagcagcatgagctctgggtctgggtccctccgaacaagtgaaaagaggtccttgtatgtcagggccctgtttgattatgatcggactcgggacagctgcctgccaagccaggggctcagcttctcttatggtgacattctgcatgtcattaatgcctctgatgatgagtggtggcaggcaaggctggtgaccccacacggagaaagtgagcagatcggtgtgatccccagtaagaagagggtggaaaagaaagaaagagctcgattgaaaactgtgaagttccatgccaggacggggatgattgagtctaacagggacttcccggggttaagtgacgattattatggagcaaagaacctgaaaggacaagaggatgctattttgtcatatgagccagtgacacggcaagaaattcactatgcaaggcctgtgatcatcctgggcccaatgaaggaccgagtcaatgatgacctgatctccgaatttccacataaatttggatcctgtgttgccacatactacccggcctcgacgtgataatgaggtggatggacaagactaccactttgtggtgtcccgagaacaaatggagaaagatattcaggacaacaagttcatcgaggcgggccaatttaatgataacctctatgggaccagcatccagtcagtgcgggcagttgcagagaggggcaagcactgcatcttagatgtttccggcaatgctatcaagagactgcagcaagcacaactttaccccattgccattttcatcaagcccaagtccattgaagcccttatggaaatgaaccgaaggcagacatatgaacaagcaaataagatctatgacaaagccatgaaactggagcaggaatttggagagtactttacagccattgtacagggtgactcactggaagagatttataacaaaatcaaacaaatcattgagggaccagtctgggggcactacatttgggtcccatcccctgaaaaactctgaagggaatcccctccaaccattctcttgtgaacagaagaaatcaagtccctcttccctcctccctcttcattcctgtccccatggggagaacaaatgctactgttcttgtccccttttttagatatgtcatgtcaaaaaaaattaagttttctagtcctgttcttttttttttttaagtttttgtttgtttcagtttattttttgggatgatgccatctcattcatcatgtgactgtgcccattcctgcatgggacctttcccaagcgctagcacaggtgcaaaatccatcagagccattgttttcataaaaaccaagcagaagtgaagagaaaagaggaggactgatggaaagacagactctggacagctgcacggcttgtgaagtgagctaaatgcaccacatgatgagatgctcctgggcatttctccctatctgtactgctgtcttgcagctctgaacggtgcaacgtaatggcgacagaaagtatcttatttatatatagatatatatatgtaatttatataaaatatatagaaattattatatatatatattatacactctcatataatatatatatattcacacacatttgggttagaaaatctatggagacttcatcaatggtactatgttattagagaaatgctttaattttcatattccaatcagatggcatcttctatcccagctggttgggaagggattgaagatggtagcaagtgctgcactaagggcactcgcatttggtcattctcttgagagctaggaggggtcagcctgaggccggagaggaagggcttttgcctggggtgagagggtgagagacttgacctgaaagcagctgctgcccctgaggtgcagccagagtcctgtgtgcggacagagagaatggctaatgatgctccgcgtggaattgcctattgttttatgccacctgatgtgtctgcatgagaggtttcctttttgttcctttttaagctgctgttaaaccaaaaccatgttgtgctactgtgtcagccttttcattattgcaaattttacttttactatttaagtgaatgcatagaatccaatttgccaaggttctaaaggcttatgaggtcctgaaggagccaggccttgtgatggagtaggtgacacaggcctggttgtcctgtcagcagaagggaaagcaggggctgggctgagaggaggacacggagggctctgctgaggttccttcctgggttccaccaacagggacagggagtcacttgccttccagttctgtgctgggatggcgggacagcacttggcttgcttggccagctgcgtcatgagtttgatttggtttttttttttttgcagctgcttcatatgctctgctccagcccctccccaacagctggtagcttatggtttcttcaagaggaaagtagactttatgctgtacatttgagctgtagagctaagattcgcttactggtgagctgtgaaaccttgttgctttttcccagagtctgatggcagtgactgtgatcaagggaatcttcaccgccacaagtgcaggcagcaggtgtggttcaggtccccccccaccccactgtgctcctttgaagccaacgtgcctccctcgcctccatactggagggacgacgcaggggagaacagagaagtgcttggccctaggattgaggcacttgtttcctagcccgctgggttagggctggtgcaagcgaggcaatgttgaggatgctttaagcactaccagccgaatccgggaactctgttaacagttgtccaaccagcagaatgaggctaactgtataaagcatgggacccaggatgaggataaggaaaggacagcggctttccctgggcagtacaatggcttgaaggcaaaaagggataaagtgacagccgactgtgactctggtgaggaggggtgagcagggaggttgattctctgatgttaactaagtggcaaagtctcaaccgtgctcagccctccccctcccagggaagagaaacaaagattcaaagtaagcatgatactagtgggtttaccagtgtttcttccaaggagacatatattttttaataaacgatagttgcaatgaaaaaaaaaa

SEQ ID NO: 13875 - DNA, 1149 bp, Homo sapiens
gccgctcgcttcaatatggctgcccccagggagagacgaggctaccatgaatggagccgagcgcagaccctgagtccgtcacccatggatcgcagcgcggagttcaggaaatggaaggcgcaatgtttgagcaaagcggacctcagccggaagggcagtgttgacgaggatgtggtagagcttgtgcagtttctgaacatgcgagatcagtttttcaccaccagctcctgcgctggccgcatcctactccttgaccggggtataaatggttttgaggttcagaaacaaaactgttgctggctactggttacacacaaactttgtgtaaaagatgatgtgattgtagctctgaagaaagcaaatggtgatgccactttgaaatttgaaccatttgttcttcatgtgcagtgtcgacaattgcaggatgcacagattctgcattccatggcaatagattctggtttcaggaactctggcataacggtgggaaagagaggaaaaactatgttggctgtccggagtacacatggcttagaagttccattaagccataagggaaaactgatggtgacagaggaatatattgacttcctgttaaatgtggcaaatcaaaaaatggaggaaaacaagaaaagaattgagaggttttacaactgcctacagcatgctttggaaagggaaacgatgactaacttacatcccaagatcaaagagaaaaataactcatcatatattcataagaaaaaaagaaacccagaaaaaacacgtgcccagtgtattactaaagaaagtgatgaagaacttgaaaatgatgatgatgatgatctaggaatcaatgttaccatcttccctgaagattactaagctttggttctgatgtgtcttggccgtaatgtttctagtaggttttataaagctgctcttcataagagtattttagtttgttgagtgtatcagccattcataagccagtaatgacaagtgcagagcttcaaactataactttgttgcccagaggatgtgcagttgtcatctaagctctcagcagtacccggcttatcctacgacttcacctgaaatgctatagttatccctacttttttaccagtttctcccagaagcacctgcttaataaatcaaagatgtttg

SEQ ID NO: 13876 - DNA, 502 bp, Homo sapiens
cttcctgttatacatggttatacatggttggggtttaaaagcacaaagagaaacctccccctcctggctttcgtggccatctttgtccatcttaggtggggacttgatcttatttaaggtctccaaatagcccccaccacacttagaacgtgtgttttcttagtgttagaagccaggccctgagtccccagcactcacctgaactgtggctgatttggtcccagtccagctggggaggtgtttggctgacaaggaggcaagagatcccctcccaggggaacaggaggactggggcttagcacagagccatcatcatgttcccaatttgtgaagagactcctaacactgcactaacccatttgtgtacatacatggggctcagcctggggccaaatgtgcctgatgggaacagacttgcagggccatgcaggcaggacttcgtgcctttaactgaagagtgtgcgtgtgtgtgtgtgtgagagagagagagagagaaacacgc

SEQ ID NO: 13877 - DNA, 241 bp, Homo sapiens
  misc_feature (1)...(241): n = a,t,c or g
gtaccccgttttcaataagcttctaaaactggtatttgtatattatttatcttatccccttggattgtaagcaccatgagtgaggactttgtcttgttctcgtctctctctctctatacacacgcacacgcacacgtgactgtaacagtgcctggtgcacaataagggttcgactatttgttgncttaatgagtgaattaatcatgtccagaactgttaacagagaagtttangggagatg

SEQ ID NO: 13878 - DNA, 1400 bp, Homo sapiens
agggagctctatagtcggagtggagaactgcaagggggtcctgatgacaacttaattgaaggtggaggaacaaaatttgtctgcaaacctggagccagaaacattaccgtcatattccacccattactaagatttattcaggagattgagcatgctctgggtcttgcccagccaaacagtgtcctcttcgagagtttctcaccgtgtacatcaaaaacatctttctcaatcaagtcttggctgagatcaacaaggagattgaaggagtcactaaaacatctgaccctttgaagattctggccaacgcagacaccatgaaggtgctgggagtgcagcggcctctcctacagagcacaatcattgtggagaagacagttcaagacctcctgaacctgatgcatgacttgagtgcatattcagatcaattcctcaacatggtgtgcgtaaagctccaggagtacaaggacacctgcactgcagcttacaggggtattgtccagtcagaagaaaaacttgtcatcagtgcatcctgggcaaaagatgatgatatcagcagactcttgaaatctctaccaaactggatgaatatggctcaacccaaacagctgaggccaaaaagagaggaggaagaagatttcataagggcagcttttggcaaggagtctgaagttcttattgggaacctgggtgataaattaatccctccacaagacatccttcgtgacgtcagtgacctcaaagccttggccaacatgcatgaaagcctggaatggttggcaagtcgaacaaagtcagctttctccaatctttctacatcccagatgctttctcctgctcaagacagccacacgaacacggatctccccccagtgtcagagcagatcatgcagactctcagtgaacttgccaaatcgttccagggatatgggctgaccgctgcttgcttgtcttacatctgggaagtgagggttcactgtttccactatcttatccctcttgcaaaggaggggaactatgccattgtggctaatgtggaaagtatggattatgaccccctggtggtcaagctcaacaaagatatcagcgccattgaagaggccatgagcgccagccttcagcagcacaagttccagtatatcttcgaaggcctgggccacctgatctcctgcatcctcattaatggtgcccagtacttcaggcgcatcagtgagtctggcatcaagaaaatgtgtaggaacatttttgttcttcagcagaatttgaccaacatcaccatgtcgcgggaggcagacctggactttgcaaggcagtactacgagatgctttacaacacagctgacgagctcctgaacctggtggtggaccagggtgtgaagtacacggagctggagtacatccac

SEQ ID NO: 13879 - DNA, 1013 bp, Homo sapiens
caggcgagtccacgtgagggaagcccccgctgtgcgcggacgcctctgctgggcggagggggagtgccagcccccaggagctaatccccggctgatggcgcagggccggcggcttggccgtctagtgtgatgaaggaggcgacccccaaggtgggaaggcgcacgggttggggtttgagggtggatgattggtgacggagggtgtatcttcaggaggaggttcgagtgaagatcaaagacttgaatgaacacattgtttgctgcctatgcgccggctacttcgtggatgccaccaccatcacagagtgtcttcatactttctgcaagagttgtattgtgaagtacctccaaactagcaagtactgccccatgtgcaacattaagatccacgagacacagccactgctcaacctcaaactggaccgggtcatgcaggacatcgtgtataagctggtgcctggcttgcaagacagtgaagagaaacggattcgggaattctaccagtcccgaggtttggaccgggtcacccagcccactggggaagagccagcactgagcaacctcggcctccccttcagcagctttgaccactctaaagcccactactatcgctatgatgagcagttgaacctgtgcctggagcggctgagttctggcaaagacaagaataaaagcgtcctgcagaacaagtatgtccgatgttctgttagagctgaggtacgccatctccggagggtcctgtgtcaccgcttgatgctaaaccctcagcatgtgcagctcctttttgacaatgaagttctccctgatcacatgacaatgaagcagatatggctctcccgctggttcggcaagccatcccctttgcttttacaatacagtgtgaaagagaagaggaggtagggggccaagcccccaccccatcccactccccttccctccccagatatttatgtgaaatgaactgcagctttattttttgaaataaaaacttttaaaaagcaaaaaaaaaaaaa

SEQ ID NO: 13880 - DNA, 547 bp, Homo sapiens
aactgactggggtcaattcaagtcatgcaggctgtgagaaacgcggggtcgcggttcctgcggtcctggacttggccccagacagccggcagggtcgtggccagaacgccggccgggaccatctgcacaggcgctcgacagctccaagacgctgcggccaagcagaaagttgaacagaacgcgggctcccagccacaccaagttcagcatttaccctcccattccaggagaggagagctctctgaggtgggcaggaaagaaatttgaggagatcccaattgcacacattaaagcatcccacaacaacacacagatccaggtagtctctgctagtaatgagccccttgcctttgcttcctgttggcacagaagggatttcggaatgccaagaaggggcacagggcttcgcagcacagacagcagggcatagccgcagcggcgagagctaaacaaaagggcgtgatccacatccgagttgtggtgaaaggcctggggccaggacgcttgtctgcccatgcacggactgatcatgggcggcctggaagtg

SEQ ID NO: 13881 - DNA, 681 bp, Homo sapiens
ggacttacaccggggaaggccaatgggaagtaaagaagatcaacaacgctcacaccattggctgcaatgccgtcagctgggcccctgctgttgtacctggaagcctcatagaccacccatcggggcagaaacccaattacatcaagaggtttgcatcaggtggctgtgacaacctcatcaagctgtggaaggaggaggaggacggccagtggaaggaggagcagaagctacaagcgcacagtgactgggttcgagatgtggcctgggccccctccatcggcctgcccaccagcaccatcgccagctgctcccaggatggtcgtgtgttcatttggacctgtgatgatgcctcaagcaatacgtggtcccctaaattgttgcacaagttcaacgatgtggtgtggcatgtgagctggtccatcacagccaacatcctggctgtctctggtggagacaataaggaggagttacagatgcagccacagattgatcatctgccttaacgtgatcggagatgctttgtaatctactgtccagctgaaagcactcatgttacgaggaagaaactacaagtgatgttcaaatctattttgggtcatttttatgtacctttgggttcaggcattatttggggggttttgtttccaaaggaactaaataaagtcatattgcttataaaaa

SEQ ID NO: 13882 - DNA, 604 bp, Homo sapiens
ggtttaaacggaaaagataaaaattcctagaccagcaggagggaggtgtctgttgcccggcagtgtccaggcatcctgttcaggggccaagctgagcacccggtgggccagtgggaaggtcccacaccctccagccgttcccatcctcctgcccttcttcaggatgtgaaggtcttccgggccctgatcctgggggagctggagaaggggcagagtcagttccaggccctctgctttgtcacccagctgcagcacaatgagatcatccccagtgaggccatggccaagctccggcagaaaaatccccgggcagtgcggcaggcggaggaggttcggggtctggagcatctgcacatggatgtcgctgtcaacttcagccagggggccctgctgagcccccatctccacaacgtgtgtgccgaggcccgtggatgccatctacacccgccaggaggatgtccggttctggctggagcaaggtgtggacagttctgtgttcgaggctctgcccaaggcctcagagcaggcggagctgcctcgctgcaggcaggtgggggaccgcgggaagccctgcgtctgccactatggcctgagcctggcctgg

SEQ ID NO: 13883 - DNA, 714 bp, Homo sapiens
tggcgggttcgtggtgagaagccgtcaagcaggagtagaaattggtatgcttagaagcagattctaaaagcagtttctcttcagaacatcttttttcataccacttgataagcatcttgaaacaccatgggctgtagctgcagtaaaatgggtgatgtcaaagagaactatcttgaaacatttatttccagtccaaaatggagctttatattgtgtttgtcataaatctacgtattctcctctaccagatgactataattgcaacgtagagcttgctctgacttctgatggcaggacaatagtatgctaccacccttctgtggacattccatatgaacacacaaaacctatccctcggccagatcctgtgcataataatgaagaaacacatgatcaagtgctgaaaaccagattggaagaaaaagttgaacaccttgaggaaggacctatgatagaacaacttagcaaaatgttctttactactaagcaccgttggtatcctcatggacggtatcacagatgtcgtaagaatctgaatcctccaaaagacagatgatgcggaggttcctgggggaatcaaagagaaatgtgcctcatttgccatttgagaaaatgcagtctggtgtattcagtaatatatagtaaagtaataatgataaaatatcttttcatatattagaatgtgtacttttatataaagtaattctggatttg

SEQ ID NO: 13884 - DNA, 772 bp, Homo sapiens
tatttgggattatactgaacctatttgtccaataacctgagttttcaaataattttagttctataagtactataattatataaatattaatgaattcagattagctgaaaggaaaaaaagtagaagcctgactacttggtgctaactactaaagattttggcagaatcaatgttggatttggctttcctgtcccttccccatgccagccccccagagtgttctgccttgtgctgcctcccttcacctggagtgccacacccctctctctgccagttcagctcttcattcttcaaggcctgaccttgtctgacccttgtgcctctaaacccgtgggccccacctctcttggttcctatgtcaggtgatgtttgtgtttttggttatgcccatctccatagccagaccaagcactctggaagccagggttgggtgcttatttatctgtttgccatgcagaaaatatcttgcacaaaattacctctgttaagggaatctgaagctgaatttagtttggctgagtcagggttgggttttttttaaaggggctgtgggggtgaaatttgactggaagccacccacaaacacacacctgctggtttaggaacccggctgtgggtggttctgagctgtttggcttcagttgacagtttctgattgccctgagcaccaggtctcatcttgcatctcatcctggcctggagaacattcagtttccttccaacccttcccacctttcccccactcccttggaggaactgaagttggggttgg

SEQ ID NO: 13885 - DNA, 1000 bp, Homo sapiens
ttttttccagacagaagaccatctccaaatggttctttattgaacacccactttggctaggcaatatcctccccctgccctctaatccaggctcaggtacccccagtggagtatcctcagaaggcaactcccaagaccaggagtaatgagagattgggcagagggtaagggacagcagggagacggaggaaaatgaagacaccagggaaagaggagaggcctgaactggacagctgatgctttgtcctgcccagcacccattcgtcccttcttcaggtaatatcatctgccaccacaaccaccagcaccaactctcagtctctgtgggtacatgccaggcctgtccatttggtgtattccatcttcctggccacaatgatgacttgaggctggataccttcctcgtctggaccaatgagaaccaaatccagcagttctgtcagcaaaggggagctctttttatcaataactggtgctgtggggccacactgtgaagcccaagaataaagccaactcaaatgaaagcagagctgagagcccaaagagacagatccctgtttggagtcctgggatgcagcctgaagcccaatctagcccatccttttcagctacgtgagccattaaattccctctgccccaagtgaactggaaagagtcccaaccaaggtccttcccatctggttgttcttctggaagtattttgaggacaaggagattttcatctccagggttataaaagtaattgtgtggtgacaggctgttcctaggtccctggggtgagagccaccatggagacagagtccagctcgcctttcctaggatacacactcacgactgtcaacacatcttcgaatacatcagcacataattataaactcctattgtttgtagtagctattgtttttgtcttcccatcaccttgttttggatgaagaaaaggtcatgacccagactggattaatcatgtggccaaacatgcatggccacagtgactgatcca

SEQ ID NO: 13886 - DNA, 1506 bp, Homo sapiens
tcctggcctctccgtgacacaagtcttttccccagccttcctccacaggcttctgccgcccccctcatctcccaccctcccccatatctgtttgcattaggagttccacgaccatggtggaatgttaaggtgaaccccaccccttcttacagatggggacccagagcctgctcttgggaacagccagagtaagattggaacccatacttgcagtccagcgctgtttgcattaaaagggtgggtgagtcaggacccctggctcaggagccgcctctcctaaaagagggtttcaaggccaaatatgtttgtcaacggtgctgtctccctttcttggagatgctcattagcttatcaaagactgagaagtcccgctgttacagaaataatttagtttgctgtattaactgctcctgggcctggagcagtattcccaccttaagattcccagcatccctgtgctgtcccggctctcattcatgccgaagggcccaacccattggctgtgttctgtttgaagatttggggggcgccttctctttcttccccagggaattctctagcagagggaggggacccaccccagtgaggaagtagattgctgcctctagccagagacctgaactggggaatttgaacattcctttacattgttgggagaaatgaagccaaagttatttcagatggttttcccaggctaaaggaaagtcacctgcaagagatcccggcactgatctggagcagctgacagggtgggtctcccttaccaaagagaagaaccactctctggcgctggggtgacctgctgggctggggcctgtaaggtttccatgttgctgaggccatgggagattcccagagctggtcacaccgaccgctctcagggcccgctgccctgggctgggcaacaccattctgggccttggcctgcagaagctttcagagtcttcactggcagtagggggagatggggagaggaatgatctctgcccagccccttcctttccaaaccatgcaatggaagagcccagatgggtgaagattgattttgccttaactcaagagaattcctgttctccttgtgctatgatttggacacaagattctggatacctggaacttagctgtgtactcctgtaccctaaacagtggatttgagttccagcgtttattcttttttccttttttcagatcaccatctaagttacatctttagctcaggtccatccttctcaagatctccttcttaggccccccagcccctggtgcttgtctgtggtcaggtgaccttactcaaggagcagatatcttccttgggccgccatggagcctcatccatccacacgtgcctgtagcattccagagctcactgcccttctagatgtgccttcccgcttggcttccagcgggcttgtgcctcactctgtctgccaggtatgagaagaacacgtaagaccgccaccacactcaccctcccctatggcacagggccttgagggaggctcgtgc

SEQ ID NO: 13887 - DNA, 1032 bp, Homo sapiens
ccttgtcttattctccatttactcagtcactggggctcactcccgtctgatgcactagccaagattgccttagtgtgctccagaaaagaaggccaaatcccaggcattgtcagggcagcagagctctacaggataggcttacctttcccacctgtgtggctagcacttcacagtttacaaattcctcccacctccactcagtgacacatgctgttctaacacaggtcaggcaggcattacagtccccatgttcagaatcaaagacctagcctcagagaagtgaagaaacatcatgccaaggtcattgactgccaagcggtagaggtggggttgcatccagagagcttcccggtatgcctctgcacaatgccattccttggccagctccctccaccccaagggacccagactgcacacttaacaaacaggacacaggtgtctttgaacaaacttttttgtattattatttttacatctagaataaattatttaaattatttcacagcaagggagagggataggtaatttttatcagatatttttttaaaccatctgttttttaaattacatttttgtttatgttcttgagctgatgtagtggaacttgcctagcacattcaggtcccagccagttggcagagcatgctctcatctccttattccataccctgggcgtcccctttctgttgactcaggaactttctgagaatgaggacagcactaggagatgagctttggcaggtatccaccttaacgctacaataattgtgcttcctgaaacaaaacttgagattgtatcatagaaggaaacaggaagtcagaaatcaaatctatgcttttaattgaaaccgtgcctgaaacagtttgaatgattgttttaatgttgtttctgaaattccttgtacctttgtgaaaaataatgataataaataaaagtgaaaataaatagatgtggaatatgcaatggaaataatgtaacaaaataataaacatctggccattttactacaaaaaaaaaaaaaaaaaaaaaaa

SEQ ID NO: 13888 - DNA, 1106 bp, Homo sapiens
  misc_feature (1)...(1106): n = a,t,c or g
tttttttttttaggaacaaaatttattccaatttaaaacagagttcatttcaggagaaagatatgaaaagtcgacttccatcggtgtctggattaagggtcagggccggtgctgctgggaggtgacactgagccgctcctcagcccctcctcccatccccaacgcgcacaacacatgcatttcaaatggtaaaaggcttaaaaacagcttgtatagaatattcttttttaaatagattaaggttgaaattgtctgaaatcaggactgtgtaatatacaagtatcactgggtcccgtccgccaggccggccacaggatctgctgccaccactgggggacattggcacggggatgcctcccttgggggagccgagggacccaggggcattgggtttgcagtggcccgggggctgctgccgcccgggcgtaacatggtcggagaaggtggtcggcactcacgagaaatcgttggcaggtgagattcaccaaggtaaaaacacacaccccacatgcccacgtggccccacacgtggcaagggtgggggttggctgtccttgcccctgggtgccactggcacgagaaccactgcctgggactctcctggggcaggcacccctgccctgggcctgcaacacctacctctgcttttttggggggcaggggatcaggcactcagacccagaggatccaggccacgacgttttggcggtcccagcccggctctgggatgcttggcacgccccctccctgggaaggcctaatactttagccccgcagcgccccggcctgcgtgctgggcgactccaccctcaggccacggccaggtcaccttgtgcaatctgggccctcagagatgccacaagcacaggccccccagagggctccgctgctggaaaaagttgtagcggccctgccaggggtggccccatctgctcccccagggcaccgccggggccccagcactcgccatggggggcttctggcaccaaccctcttaggtagacacctggcacaaaaaaaggacgcttccgggtgagacagaagtggtgtggggaagccggggtgggtatcccgccagccccgtcgtcncatgggctgatcaccag

SEQ ID NO: 13889 - DNA, 518 bp, Homo sapiens
gggagaaccctgggacctcaactctggagatggtgccttctatggacctaagattgacgtgcacctccacgatgccctgggccggccacatcagtgtgggacaattcagcttgacttccaactgcccctgagatttgacctccagtataaggggccactgtggctgtccccgttccaggtggtggtcatccctgtggggagtgagcaagaggaatacgccaaagaggcacagcagagcctgcgggctgcaggacctggtcagtgacctggatgcagactctggactgaccctcagccggagaatccgcccgggcccagcttgcccactacaattttcagtttgtggttggccagaaagagcaaagtaagagaacagtgaacattcggactcgagataatcgtcgccttggggagtgggacttgcctgaggttgtgcagcgacttggttggagctacagaacacgagggtccccaaatgccgaagaaattttctgagccttttgtacatagaatgaagg

SEQ ID NO: 13890 - DNA, 2038 bp, Homo sapiens
  misc_feature (1)...(2038): n = a,t,c or g
aatattctgcttttcctgttatgtgtttcagatttttctacaccaccgccacactcatcatagccttcacctctgcaggctcagccgtgctgctcttcctggccatgccaatgctcaccattgggggaatcctgtttctcatcaccaacctgcagattgggaacctatttggccaacaccgttcgaccatcatcactctgtacaatggagcatttgactcttcctcggcagtcttccttattattaagcttctttatgaaaaaggcatcagcctcagggcctccttcatcttcatctctgtctgcagtacctggcatgtagcacgcactttcctcctgatgccccgggggcacatcccatacccactgccccccaactacagcataggcctgtgccctgggaatggcaccacaaaggaagagaaggaaacagctgagcatgaaaacagggagctacagtcaaaggagttcctttcagcgaaggaagagacccaggggcagggcagaagcaggaactccgctccttctggagctacgctttctctcggcgctttgcctggcacctggtgtggctgtctgtgatacagttgtggcactacctcttcattggcactctcaactccttgctgaccaacatggccggtggggacatggcacgagtcagcacctacacaaatgcctttgccttcactcagttcggagtgctgtgtgccccctggaatggcctgctcatggaccggcttaaacagaagtaccagaaggaagcaagaaagacaggttcctccactttggcggtggccctctgctcgacggtgccttcgctggccctgacatccctgctgtgcctgggcttcgccctctgtgcctcagtccccatcctccctctccagtacctcaccttcatcctgcaagtgatcagccgctccttcctctatgggagcaacgcggcgcttcctcacccttgctttcccttcagagcactttggcaagctctttgggctggtgatggccttgtcggctgtggtgtctctgctccagttccccatcttcaccctcatcaaaggctcccttcagaatgacccattttacgtgaatgtgatgttcatgcttgccattcttctgacattcttccacccctttctggtatatcgggaatgccgtacttggaaagaaagtccctctggcaattgcatagttcagaagccctcacttttcagccccgaggatggttttgttcatcttccaccacctttgaggacctcgtgtcccaaaagactttgcctatcccagnnnnnnnnnnnnnnnnnnnnnnnnnnnnnnnnnntaaagacacacaaggacgtctggcgcagcaagaaaagaatctcagttgccaagcagattgatatcacacagactcaaagcaaaggcatgtggaacttctttatttcaaaacagaagtgtctccttgcacttagccttggcagacccttgactccaggggaggatgacctgggggaggaagtgtgtcaactatttctttaggcctgtttggctccgaagcctatatgtgcctggatcctctgccacgggttaaattttcaggtgaagagtgaggttgtcatggcctcagctatgcttcctggctctccctcaagagtgcagccttggctagagaactcacagctctgggaaaaagaggagcagacagggttccctgggcccagtctcagcccagccactgatgctggatgaccttggcctgaccctggtctggtctcagaatcacttttcccatctgtaaaattgagatgaattttggtgttgaaagttcttcctggagcagatgtcctagaaggttttaggaatagtgacagagtcaggccaccccaagggccatgggagccagctgacctgcttgaccgaaggatttctgacagactatctttggggatgttttcaagaagggatataagttatttactttgggcatttaaaagaaaatttctctcgggaataattttatagaaaaataaagcttctgtgtctaaggcaaaaaa

SEQ ID NO: 13891 - DNA, 571 bp, Homo sapiens
cgtgccagcctcattagttcttaaagtcactaatagcattattttatgcccacgaaccagtaagtcagaccaaagcctgaaatagtgttttctgaaaaatggaaaaggaaatataagaattttaaaaacaaaccttgaaatcagtttctcaagttaaaattctgatggatgtcacaaatagtaaggtcttccttactgagctctgtcatctgttttggcttttatgcatactgtgatttgggaggctgctgctcaacattctagcccatttccagagtgttccattattctaggacatggctgtcatgggagtctgcacaaggcaactaatgctctagatttaactgccttttttaaatcagtagatcattaattgtttcagttacataggagccataggcagtaatagaaacatcacaagtattgtttccaaaaatatacccaagtagagataagaccactaagatgttccctttattacctttcagcatttaatgatacccagcttgtagcttccaaggtgatagagtgtgctgtgtacatacaaggcatagtaaacgtgtatttaaaa

SEQ ID NO: 13892 - DNA, 566 bp, Homo sapiens
  misc_feature (1)...(566): n = a,t,c or g
gacaaaggagcggaggagcagtcgcagctgctttccgaggaagccggtgttgccgagattgccaaaatgctttggagtttttaactgaatctaagaaaagtccaaaatagatttgagactgtaaaaacagaaactgcagcaagggggattcagtgccaatgcatcaacaaaaaagacaaccagagttagtggaaggaaatcttcctgttttcgtgttccccacggagctcatattttatgcagatgatcagtcaacacataagcaagtgttgacactgtacaatccctatgagtttgccttaaagttcaaaggtgagtctcctagctctattttctgggtttttaactggtccctactaattttttacttgtagaaactaatttaaaaaaaaaaaccactaatggccattgtgactttatctntcagttttgtgtactactccaaataagtatgttgtcgttgatgctgcaggtgcagtaaagcctcagtgttgtgtggatatgtaagtcaagancaattcctggtaacacgtnttaagtgtgttaatatttatgtttttaacttg

SEQ ID NO: 13893 - DNA, 429 bp, Homo sapiens
gcatggaggtggagctgatgacattccacgaggtgctagctgctgggaggcacatcacactggaccagcggagagggatccgtacgtagcaaactgtgcccatagtgagcaaacagccttgagccaacagcaacagcactgctgggcacagagggtaaaaataacaactccctactggggttgagtctgccagaccctggcaaagttcatttctttcaataaatccagcagcgtcccctttgataaatactgtcaaagctggaacatgtgatgctaacaaaatatggttttaatttggggcccacttgcgcttcatggttaaatactgcatgtgtgtatacacaaggcagactcacagcggggccaagtttaattttgccgggggttgaggatgggctaaacccttaagggtttcgtttttaccggttt

SEQ ID NO: 13894 - DNA, 1500 bp, Homo sapiens
ggaccctgacagtgaagctgatagcatagacagtgatcaagaagatcccctaaaacatgctggtgtctacacggcagaagaagtggccctgattatgcgtgaaaagctaattcgtttgcagtcgttgtatattgatcagtttaaacgacttcagcatctgctcaaggagaagaagcgccgatacttacataatcgcaaagtggaacatgaagctctaggcagtagtctcctgactggcccagagggacttttggccaaagaacgagagaacttaaagcgattaaaatgtctgcgacgataccgccagcgctatggagtggaagccttactgcataggcagttgaaggaacggagaatgctggccacagatggtgctgcccaacaggcccataccactcgttccagtcagaggtgcttggcctttgtggatgatgttcgttgttccaatcagtctcttccaatgaccagacactgccttacccatatttgtcaggatacgaatcaggttctcttcaagtgctgccagggatctgaagaggtaccctgcaacaaacctgttcctgtaagcctctctgaggatccctgctgcccactgcatttccagttgcctcctcagatgtataagcccgagcaggacttggatgttgtgggtgatggtatgcagtgtcctccttcacctttgctttttgatccttcactaacccttgaagatcatttagtcaaagaaattgctgaagacccagtggatattttgggccagatgcagatggctggagatgggtgcagatcccagggatctcgaaattctgagaaagcctctgcaccattgtctcagagtggattggctactgcaaatgggaagccagaacccacttctattagttgatagtttggggaaccattttactttggtggatttaaatttctcgttcttcaaagaagtatttctgatcatctctcacaaaacacaggcaacccagactaccttgtttttcttctggattgagtattatagtcaaacgtaaagccaaattttgaggacgtggacccgtgggtttcttcccactcagggcaaggaagagaaagagagataatccctatcaaagcttctgggattatttgggactatacctaaaaggaaagtgacatctttgtaatgggatttcccaagtcatggatagaatccacttaagtagctagtgggagctgtctttgtgagtggtgtctttgagatactgatggccctaatatcggttatctctatctgaagacctgcagtttagcttttcttcacctctacttaattgggcagtctttaacccctttccctggtgaactctggctttttatcctctgagaaaacagcccacaggactgggtcctccttatccgtcttgcttttaacctatgtaaatttctgtggttgctatcttatgtaaaatatagtaaaaatttattgtatatagtttctattaaatgttaaagaaaatgttaaaaaaa

SEQ ID NO: 13895 - DNA, 1363 bp, Homo sapiens
ccgcttagacaatgccccggagccgccagaccgtcgcgcccctgccccatcgtagtatatgagctcgcctacacaaggacccgcgctaaaagccagagctcccagtccccgaggcttgaagacggggactcccttctccaccaactctgtcctcggggggtggggccccagccgagatcacagcgcgacaggagtgggggtggccgctggagacaggtgaagaaacaagaaaactaagaaatccgagcggttggagggggagtctgtgtggatgggatggggacgccgggggaggggctgggccgcttgctcccatgccctgattccggggagtcccagagagcctgggcttcgggggaaggtgcgggggctggccttcccgctctggatctggccaaagctcaaagggagcacggggtgctgggaggtaaactgaggcaacgactggggctacagcttgctagaactgccacctgaaggaagtcattgccgctgggaccgctgcttggcgacacggccgtgatccaaggggacacggccctaatcacgcggccctgggagccccgctcgtaggccagaggtcgatggagtccgcaaagccctgcaagacctggggctccgaattgtggaaataggagacgagaacgcgacgctggatggcactgacgttctcttcaccggccgggagtttttcgtaggcctctccaaatggaccaatcaccgaggagctgagatcgtggcggacacgttccgggacttcgccgtctccactgtgccagtctcgggtccctcccacctgcgcggtctctgcggcatggggggacctcgcactgttgtggcaggcagcagcgacgctgcccaaaaggctgtccgggcaatggcagtgctgacagatcacccatatgcctccctgaccctcccagatgacgcagctgctgactgtctctttcttcgtcctgggttgcctggtgtgccccctttcctcctgcaccgtggaggtggggatctgcccaacagccaggaggcactgcagaagctctctgatgtcaccctggtacctgtgtcctgctcagaactggagaaggctggcgccgggctcagctccctctgcttggtgctcagcacacgcccccacagctgagggcctggccttggggtactgctggccaggggtaggatagtataggaagtagaaggggaaggagggttagatagagaatgctgaataggcagtagttgggagagagcctcaatattgggggaggggagagtgtagggaaaaggatccactgggtgaatcctccctctcagaaccaataaaatagaattgaccttttaaaaaaaaaaaaaaaaaaaaagtttt

SEQ ID NO: 13896 - DNA, 918 bp, Homo sapiens
ttttttttttttttttttctgattatcattttaaaaatgtattttattcaacttggaaaatgagtacaaatccctgggtgttttttgtcagggaggagtggggagtaggcaggaaagagaagagggtaggaggcaaggtaaggtatgagcatcacagtggctgcctcaagaccctgcccagggagggtggggtgggctgggggttgagcacggagctcaggtccggaggaacaccatggtgaggaggcccaagacgtaggcggccaccaacttttgtcccagggagacgtgcaggacttgaggcagctggctcgaagcttcgtccgggagtgggagcagcaggaaggccacagacacaatccccgtcagcaagaagaggaggaaggagctggtggccagttgctggcgggggtgctcctggaagtgtctggccgtgggtggtggtgtcccagcaggaggccctgggcgaggcgctggatctggctgtccctgaagctcaagggggtacgctggggctctcagaatggaggtaatgtccttgcgtcccaccactcggccctcagctccttcctcagacagctcaatgcggaagcggtcctggacatcatagtggctgggaatgggtgccacatggcgaatcacaatgtcaatgcaagactggggcttcacatatccctctgcgtcaaacaccgtgtatttggcaggtgctgtgcacaggactcggaagcgaagcgcagttcctgtggggttatagagggtcagcagctgtcggggtccgctccgctggtccgccctgaatactagatccgggggaaagaccaggaccgggacaacgggtcccaagggaggaggggcgccccgggacccccgcccagggggccccggacccaccagctcctggtcctggggcgcccacgg

SEQ ID NO: 13897 - DNA, 1524 bp, Homo sapiens
gtgttggtgtgtttggtttgtgcatagtgagaaccattttctagaaaatcaaatattttatttgcattaaaaaaaaaccttgaataataggaatcattttacacattaatggttgctctttaaaagttagaatctcaagagataccaaaagcacttaagagttaccaccacattttgcccaagttctaaggaaagttctgaaacttagtggtggtgtgtttgtactcagcaagctccagacagtctgagttgctcattccatgaacagaagcttgaaaatgcccttacagttgagatataaacgagggaagaggtgaagctttcaggaagccagagagcccctgcccggtcaggtttcctggaggaaggcaggggtgctctatgctcatcagtcattcaagcttctcaggaaatgtgccccatcatggggaacagcagctatcttccaagcttaaaaattatgaatcccaggaagttaaagccccaacccagccaaaccaccttcaccatcccttctcatactagtagagtcattcaaaaccagcaagtggtgcttctgaggcagcctcaggaaggtctttgggtggctattctagaggtgaacatactggaaaggtttttacctaaattcattttcagttgaaatgaaaaaagaaggaaagctccaaaagtcagtttcaaattctttcagtgctgctcccagagaagtccgtgtgcaaaggtgtgatgttctggtcataagcggcatactcagaggtgccggtactggccagcttgagctgctgggcagcatgggtcagctggaatgcagcatcagggtgggctgtctcaggcagcagtgtgcattccctttccagcatgtcagccacccctttcagcaggtcccaggaaaccaaaggctagagcggcctttcgcaaacggttcagctccttatagaatgtctgtgtttttttccaggtaagtttcccttgccaatttccttaaaaaccttcctgtaacacctgtcctgcaaggcccgcctgggtttgaacccagacagtcacattctgggcaataaactgcgtttgtttttgggctgccagggggaatggactccttattgtcatcctcgcccataagggttttctttagcatctgaaataggacccaactgtgccattttccctagccatgggagaggttctgggcccaggctcaaagagagacatcatgaggtttgatttcttcttgctgtcagcttgggagtagaagcattccatgccattcaggacctaattgaacaatcgctaccattccttccacttttaggctaccatggagcaggacacaaaagttgggtattttgcctgcaatctgattggctgaattttcatcttcattgtcatcagtgatgccagtacccacctcatcaccttctttgttaagtgctataggtaagaccagatgtctggacagaactgggggacttgaaatatcagctatatcaataaatcccactatttccaaatctgtgttaatgactt

SEQ ID NO: 13898 - DNA, 605 bp, Homo sapiens
  misc_feature (1)...(605): n = a,t,c or g
ttttttttttggcattcaggctctttaatgtctgaggatggggggaagaagtcaatggtgaggcttctctgggaaattctgcaggccttgtagttctctaagcccctctagcaacatgtggatatgggctttgatattcatggagtccttggtgaggctgttgctgagccttatgaaaacctatgagttcaacatctgtgaggagagagctcttacgatcaatgaacttgagagcttctgccagtgtcaactccaggaaaaaaccatatcccagggccacatagatgcgtgaagtatctgggaccactgtgtcaaccgaagaagttacagcccaaatccacctgcatatataactccgagtgcttagcttcctggagtcgctcaatgacatttctcagttgaaggtatttggccagctgctcatataccttgtctcgatggtccagcacctttcgcaagtcccgctgcagcacgtcactgatgaaggtctcgtagcgcagcactttctcccccgtggcctccaccgcccgccgcttaggggcgtcgccatgatgggctcctcaggccgccagcaataagaacggttggtagnaaaccgcgnttcc

SEQ ID NO: 13899 - DNA, 1428 bp, Homo sapiens
tgctgggagctgacattcaagaaaagtgcattaaaaattccttgagaaggcatattcttttgagagccgtaaatgaaaagtgcattcacggagaacatgctcctttgttgtgagaggaaagaaaggactgttgttgcctttaaggaacaggtttcccagttccccggaatgtcagggtcacatgaggaatggggtgagcacttagggccaagattgtcgtgtgcttggcccggcagcttctctctaagtgacctctccagcatcactctgtgccagtgctcatatctgaggccacttgagtgtcacgaggcagagcctgggaaacattagctttggaaaccgttccttcctttttatgtggaggaagtaaggtttcacaagacacctaagctgggacatggtgatgtgccacttgggatagttcccaaagcagaaagcagccaggacatcccagtaccccacttctccgtgccgtgtacttttagggaggttttcgaaagctagcttcttaccgatgattttgtctatttttctgttttatgtgaaaaccttcatttataacctgctcttctcagtgttcttctattcagcattcagtatgacttctatgcctctaattgcgactgtatggagaagaactgtttgtcattcagtgccgtgggatataatcagtcctgtaaattcatcagaatgttctgttgcctgattttttttccattgcattttaatttcattaaacatattttagttctacagtaacctaattcctcattgttaccatgagatcctaattctgtagctgtgttctgtaatcccatggggcgtgtaccatttggagacacatgaaggatacagtagacagcacggaaggcagcagcaacacacaggggtgtcctccctccccagagcccagtgtgcacacagaaccaaattcaatctcattcatcgtgagcttgcatggtaactgatccagccactcagtacctccattggataagagatttggccacagattcttctagagaaaatccaaatgtggagggtgcatttgtttctgcacccaaacaaataccttttgagatttcttataggcattcctctcgaagtctcattactctgatcagttattgatcggaggctaccctggctcagtcaccagctgctcactgtgtccttctgtggtctcaggagctgcagttgttgctgttgtatgaatagacgatagttaattagactggatgtgtctgtactggcagtgattttgcaacttcctctgtataagcgatacatttgtaaatcatgggaatgtatttgatggtaattgcctgtggtggttgtatcatgatttaattttattatgagcttttggctttatatatttttctgcctttttatgcattcattaaacagtttaacagacaaaaaaac

SEQ ID NO: 13900 - DNA, 1211 bp, Homo sapiens
  misc_feature (1)...(1211): n = a,t,c or g
gcgaccgcggctgccctctgcccgggttgtccaagatggagggcgctccaccggggtcgctcgccctccggctcctgctgttcgtggcgctacccgcctccggctggctgacgacgggcgcccccgagccgccgccgctgtccggagccccacaggacggcatcagaattaatgtaactacactgaaagatgatggggacatatctaaacagcaggttgttcttaacataacctatgagagtggacaggtgtatgtaaatgacttacctgtaaatagtggtgtaacccgaataagctgtcagactttgatagtgaagaatgaaaatcttgaaaatttggaggaaaaagaatattttggaattgtcagtgtaaggattttagttcatgagtggcctatgacatctggttccagtttgcaactaattgtcattcaagaagaggtagtagagattgatggaaaacaagttcagcaaaaggatgtcactgaaattgatattttagttaagaaccggggagtactcagacattcaaactataccctccctttggaagaaagcatgctctactctatttctcgagacagtgacattttatttacccttcctaacctctccaaaaaagaaagtgttagttcactgcaaaccactaggccagtatcttatcaggaatgtgggaaaccactgtagatgaagatgttttacctggcaagttacctgaaactcctctcagagcagagccgccatcttcatataaggtaatgtgtcagtggatggaaaagtttagaaaagatctgtgtaggttctggagcaacgttttcccagtattctttcagtttttgaacatcatggtggttggaattacaggagcagctgtggtaataaccatcttaaaggtgtttttcccagtttctgaatacaaaggaattcttcagttggataaagtggacgtcatacctgtgacagctatcaacttatatccagatggtccagagaaaagagctgaaaaccttgaagataaaacatgtatttaaaacgccatctcatatcatggactccgaagtagcctgttgcctccaaatttgccacttgaatataattttctttaaatcgttaagaatcagtttatacactagagaaattgctaaactctaagactgcctgaaaattgacctttacagtgccaagttaaagtttaccttattctatnnnaaa

SEQ ID NO: 13901 - DNA, 674 bp, Homo sapiens
  misc_feature (1)...(674): n = a,t,c or g
aaatctgctacttttacaaaaactttaaaataaattcaaatttatctaggaattaatagtagacatttggttcagaaaaaagaagatcagggagtgaaaaatgtagctgtcaggtaagtggggtagcatgcacagaattttatcataagttgtaatattcataacattattagcagatgcatttacaaaacaaagaaattcaaaagtagactttagtatgtataacatttaatgtgtaacaatttcagtattgtacattcttagaggaaacacctaattatggaataaatagcattagccaactaatcagaaataaatgactaacaattcaactttatatcctgtattagtcagggttctctaaagcaagagaaataatagtatatatgtgtatataaaagtgagtttattaggagaattgactcacacggtcacaggatgaagttccacactaggccatttgcaagctgaggagccaggaagccagtccaagtcccaaaaccccaaaagtagggaagctgaccatatagccttcagtctgtggccaaaagcctgagagcccctgacaaatcactggtgtgagtccaagggtttcaaaagcttaagggaacctggaagttcgggtgttttgaggggcagaaagttttcccgncttggggnggaaaggttgaagg

SEQ ID NO: 13902 - DNA, 1423 bp, Homo sapiens
aacatccaggaccaagatgtcctattattgataaaaaagcgtgctccatcaccacttcccaagatggctgatgtctcagcagaagaaaagaaaaaacaagaccagaaagctccagataaagaggccatactgcgggccaccgtcaacctgccctcctacaacatggaccgggccgcggtccagaccaacatgagagacttccagacagaactccggaagatactggtgtctctcatcgaggtggcgcagaagctgttagcgcttgaacccagatgcggtgggaattgtttaaggaaggcgaatgcaatgctggacgaggacgaggatgagcgtgtggacgaggctgccctgcggcagttcacggagatgggctttccggagaacagagccaccaaggcccttcagctgaaccacatgtcgggtgcctcaggccattggaagttggctaatttgaacacgccagaagacccgaccatagacacgcctcttcctgggccaagctcccccagaggcccaagggggccacagcagctgcctccgaggctgccgcgggagccagcgccaccgatgaggaggccagagatgagctgacggaaatcttcaagaagatccggaggaaaagggagtttcgggctgatgctcgggccgtcatttccctgatggagatggggttcgacgagaaagaggtgatagatgccctcagagtgaacaacaaccagcagaatgccgcgtgcgagtggctgctgggggaccggaagccctctccggaggagctggacaagggcatcgaccccgacagtcctctctttcaggccatcctggataacccggtggtgcagctgggcctgaccaacccgaaaacattgctagcatttgaagacatgctggagaacccactgaacagcacccagtggatgaatgatccagaaacggggcctgtcatgctgcagatctctagaatcttccagacactaaatcgcacgtaggtggcgttgttccactcggctatcaggccacagcagccccctgggtgcggcccgagaccgggcagagtggacctcacctggaaactcaccttcagcgcctcagccctggactgttagaggtgctgcagctgctcctgctctctgatcttattgcttataaactttggtgacggtagtgtgtaaggccgtatttttagcatctgacaggtgtttacaaaaaagtggttgtcgcactgggaagtggagtgatggcctcgtctccagtgctcctctgggctcttgagttgctgcttgaattgccgtgtagacatttgcttggagagtccacttgttatttgacggaggtaggtttcaacccagagttaatgtcaagcatgctaatttaactagtcactcacagatgacttttctttaataaagtcccttttcctaaaaaa

SEQ ID NO: 13903 - DNA, 414 bp, Homo sapiens
  misc_feature (1)...(414): n = a,t,c or g
tgaaantcgnannnnnnnnnnnnnnnnnnnnnnnnnnnnnnnnnnnnnnnnnnnnnnnnnnnnnnnnnnnnnnnnggcacgagaaatatactggatttcaaagatttagaatgaaaaaaaatgtaaaatatcttagtatttttcatctttattacattttgaaatattacattaaaataaatttcactcatttctttttattttttaatgtgtgcctgttagatcatttaaaaattacnnnnnnnnnnnnnnnnnnnnnnnnnnnnnnnnnnnnnnnnnnnnnnnnnnnnnnnnnnnnnnnnnnnnnnnnnnnnnnnnngagatcaccctgggcaacaaagcaagtctctattaaatannnnnnnnnnnnnnnnnnnnnnnnnnnnnnnnnnnnnnnnnnnnnntacatacata

SEQ ID NO: 13904 - DNA, 1203 bp, Homo sapiens
ttttttttttttgacacgattcagctttatttttacttaattataacaatttttaaagactccatgactttgtgctatttctaatatttaaataaaaaacatttcaaattttgcacaaataatttaggccaatacataactagatttgaataaagtcagatgaagcaataattcctcctctgtgtttgaaaggaatgagtgtggttacaaagtcacaggatgagtccctgggatctggggtgggagaaggggtggatcaagaatgacttgggcttgtcactccctagcagggctgagggcgtgacacagcagctcggtggcggagaggtctattctagtttctaacactccaatgctaactttttggatgtatttccttctagcatgtagaaagggcttttcttggctgccaggaagtagggagcagggatgtggcatggtgatgaacctgaggaacagcccggcatatgcctccaaacactttggaaaactggggaagggggaacagggagacagaatcttccatcttcttccttttgtgaactggggaggagggtgcttggtgacattttcctgagtataaagaaggaatacaggtttgaaaggtttgtaattgtatatgaaaacaggtattgaaaaccaatactgggggaaaaaaggcattgtaaacacttctatttaaaatgaagatttctggaacaactatactatatagtggtatcacaagtctttagctggtaagatctagcactgaaacaactcttaatttttaacttgtgagggttctttttaaagcaccacttaagacctatatattaaaaaaattaaatatagaaagattgttctatctaataaatgagtttgagaatgcacaggaaacaacaaaacccatttttaacctctggtaactgaagtggagcattaaattcaaagccactttgaggatttcctacattgttcacctaagggaaaacaaatgcagagctatcaaagagcttctcgataaattcccagaccttggagggctacagcttttcataaatatggtcactggactgatgatttctaaattttaaatgtaatacccccaaaaagtaaaatataggatttataagtattttatttttctgagaaatgaccaaaaaattggaaccagttttaacaatctctgaaaactttaaattctagacatgtttattttga

SEQ ID NO: 13905 - DNA, 718 bp, Homo sapiens
taaaatatgtgaaatccccttttgttctgaggattctttagtaggcaggagtgaccagattggaatatgcttggctggaaaaattaagattcaacttaacagactgttaataaccagaaccatcttctcttccgtaatgtggatttgccactgcaggtcaccctacaatgctatgttagaggtacaacactcctaccctcaggctataaacaaggtgaattattatctttatatctcttcatttagccctgatttgctgaagtgaaggcttgcttgagagttggttgcattataatttggtgagaatttaatctctcaatgacaacttacttgattccctcattctctttctgctacatagatcacagtagaccttggcagacagttctgtagttacataggtctgaattcaaaatccaggtctgccacttggtggctgtgtgaacttaagcaagtcaggcaatgcttctgatgtttttttcctcctccacaaagaataattaacatataacaatagggtctcagctagttgttttaaaaatggttagagagatgtgtggaatgaagtaagtgtgcagtaagtgttaactacaaatattattatcttagacatacagatttccatgattcatgaatggtgaagcatcttagaagacatccattccagggccagggcatggtggtgtgcacctatagtccaagttgctcagtagaatga

SEQ ID NO: 13906 - DNA, 6130 bp, Homo sapiens
  misc_feature (1)...(6130): n = a,t,c or g
gttagctcaaataatgtgcttttaaattctcaggctgatgacagagttgtaataaataaaccagaatctgcaggttttagagatgttggctctgaagaaatccaggatgcagaaaatagtgctaaaactcttaaggaaattcggacacttttgatggaggcagaaaatatggcactgaaacgatgcaattttcctgctccccttgcccgtttcagagatattagtgatatttcatttatacaatctaagaaggtggtttgcttcaaagaaccctcttccacgggtgtatctaatggtgatttgcttcacagacagccattcacagaggaaagcccaagcagcaggtgcatacagaaggatattggcacacagacgaatttgaaatgccggagaggcattgaaaattgggagtttattagttcaactacagttagaagtcctctacaggaagcagagagcaaagtcagtatggcattagaagaaactcttaggcaatatcaagcagccaaatctgtaatgaggtctgaacctgaagggtgtagtggaaccattgggaataaaattattatccctatgatgactgtcataaaaagtgattcaagtagtgatgccagtgatggaaatggttcctgctcgtgggacagtaatttaccagagtctttggaatcagtttctgatgttcttctaaacttctttccatatgtttcacccaagacaagtataacagatagcagggaggaagagggtgtgtcagagagtgaggatggtggtggtagcagtgtagattcactggctgcacatgtgaaaaaccttctgcaatgtgaatcctcactgaatcatgctaaagaaatactcagaaatgcagaggaagaggaaagccgggtacgagcacatgcctggaatatgaagttcaatttagcacatgattgtggatactccatttcagaattaaatgaagatgacaggaggaaagtagaagagatcaaggcagagttatttggtcatggaagaacaactgacttgtccaagggtttacagagtccacggggaatgggatgcaagccagaagctgtatgtagtcacattattattgagagccatgaaaagggatgtttccggactctaacttctgaacatccacaactagatagacacccttgtgctttcagatctgctggaccctcagaaatgaccagaggacggcagaacccatcatcatgcagagccaagcatgtcaacctttctgcatccttagaccagaacaactcccatttcaaagtttggaattccttgcagttaaaaagtcattccccatttcagaactttatacctgatgaattcaaaatcagcaaaggtcttcgaatgccattcgatgaaaagatggacccttggctgtcagaattagtagaacctgcttttgtgccacctaaagaagtggattttcattcttcatcacaaatgccgtccccagaacccatgaaaaagtttactacctccatcactttttcatctcaccgacattctaaatgcatttccaattcctctgttgttaaggttggtgttactgaaggtagccagtgtactggagcatctgtgggggtatttaattctcatttcactgaagaacaaaatcctcccagagatcttaaacagaaaacctcttccccttcatcatttaaaatgcatagtaattcacaagataaagaagtgactattttagcagaaggtagaaggcaaagccaaaaattacctgttgattttgagcgttcttttcaagaagaaaaacccttagaaagatcagattttacaggcagtcattctgagcccagtaccagggcaaattgtagcaatttcaaggaaattcagatttctgataaccatacccttattagcatgggcagaccaagttccaccctaggagtaaacagatcgagttccagactaggagtaaaagagaagaatgtaactataactccagatcttccttcttgcatttttcttgaacaacgagagctctttgaacaaagcaaagccccacgtgcagatgaccatgtgaggaaacaccattctccctctcctcaacatcaggattatgtagctccagaccttccttcttgcatttttcttgaacaacgagaactctttgaacagtgcaaagccccatatgtagatcatcaaatgagagaaaaccattctccccttcctcaaggtcaggattctatagcttcagaccttccgtctcccatttctcttgaacaatgccaaagcaaagcgccaggtgtagatgaccaaatgaataaacaccattttccccttcctcaaggtcaggattgtgtagtggaaaagaataatcaacataagcctaaatcacacatttctaatataaatgttgaagccaagttcaatactgtggtctcccagtcagccccaaatcactgtacattagcagcatctgcatctactcctccttcaaatagaaaagcactttcttgtgttcatataactctttgtcccaagacttcttccaagttggatagtggaactttagatgaaagattccattcattggatgctgcttctaaagcgaggatgaatagtgagtttaactttgacttacatactgtatcttcgagatcactggaaccaacctccaaattattgaccagtaaacctgtagcacaggatcaagaatctttaggttttctaggacctaaatcttcactggatttccaagtcgtacagccttctcttccagacagtaacactattactcaggacttgaaaaccataccttctcagaatagccagatagtaacctccaggcaaatacaagtgaacatttcagatttcgaaggacattccaatccagaggggaccccagtatttgcagatcgattaccagagaagatgaagaccccactttctgctttctctgaaaaattgtcatctgatgcagtcactcagataacaacagaaagtccagaaaagaccctattttcatctgagatttttattaatgctgaagatcgtggacatgaaattatagagcctggtaaccagaagctacgcaaagctcctgtcaagtttgcctcatcatcttcagtccaacaggttactttttctcgcggcacagatggccagcctttattattgccatataagccttctggtagtaccaagatgtattatgttccacaattaagacaaattcctccatctccggattccaaatcagataccaccgttgaaagctcccattcaggatccaatgatgccattgctccagacttcccagctcaggtgctaggcacaagagatgatgacctctcagccactgttaacattaaacataaagaaggaatctacagtaagagggtagtgactaaggcatccttgccagtgggagaaaaacccttgcagaatgaaaatgcagatgcctcagttcaagtgctaatcactggggatgagaacctctcagacaaaaaacagcaagagattcacagtacaagggcagtgactgaggctgcccaggctaaagaaaaagaatctttgcagaaagatactgcagattccagtgctgctgctgctgcagagcactcagctcaagtaggagacccagaaatgaagaacttgccagacactaaagccattacacagaaagaggagatccataggaagaagacagttcccgaggaagcctggccaaacaataaagaatccctacagatcaatattgaagagtccgaatgtcattcagaatttgaaaatactacccgttctgtcttcaggtcagcaaagttttacattcatcatcccgtacacctaccaagtgatcaagatatttgccatgaatctttgggaaagagtgttttcatgagacattcttggaaagatttctttcagcatcatccagacaaacatagagaacacatgtgtcttcctcttccttatcaaaacatggacaagactaagacagattataccagaataaagagcctcagcatcaatgtgaatttgggaaacaaagaagtgatggatactactaaaagtcaagttagagattatccaaaacataatggacaaattagtgatccacaaagggatcagaaggtcaccccagagcaaacaactcagcacactgtgagtttgaatgaactgtggaacaagtatcgggagcgacagaggcaacagagacagcctgagttgggtgacaggaaagaactgtccttggtggaccgacttgatcggttggctaaaattcttcagaatccaatcacacattctctccaggtctcagaaagtacacatgatgatagcagaggggaacgaagtgtgaaggaatggagtggtagacaacagcagagaaataagcttcagaaaaagaagcggtttaaaagcctagagaaaagccataaaaatacaggcgagcttaaaaaaagcaaggtgctttctcatcatcgagctgggaggtctaatcaaattaaaattgaacagattaaatttgataaatatattctgagtaaacagccaggttttaattatataagcaacacttcttcggattgtcggccctcagaggagagtgagctgctcacagatactaccaccaacatcctttccggcaccacttctactgtcgaatcagatatattgacccaaacagatagagaggtggctctgcacgaaaggagtagctctgtttccactattgacactgcccggctgattcaagcttttggccatgaaagagtatgcttgtcacccagacgaattaaattatatagcagcatcaccaaccaacagaggagataccttgagaagcggagcaaacacagcaagaaagtgctgaatacaggtcatcccctagtgacttctgagcacaccagaaggagacacatccagcctcccacctctgccacagcctgcaggcaaccactaatgnnnnnnnnnnnnnnnnnnnnnnnnnnnnnnnnnnnnnnnnnnnnnnnnnnnnnncagtctttcgtgactgacttcattcacttaacatagtattttcaaggtagcaaaccatgtgatttcttctgactctatttcctcttctgccagtagtttcctgagctcaaactctactttttgcaacaagcagaatgtacacatgttaaacaagggcatacaagcaggtaacttggagattgtgaacggtgccaaaaaacacactcgagatgttgggataactttcccaactccaagttccagcgaggctaaattggaagagaacagtgatgtgacttcttggtcagaagaaaaacgtgaagagaaaatgctctttaccggttatcctgaggacaggaaagttaaaaaagaacaagaagaattcccatgaaggagtttcctggtttgttcctgtggaaaatgtggagtctagatcaaagaaggaaaacgtgcctaacacttgtggccctggcatctcctggtttgaaccaataaccaagaccagaccctggagggagccactgcgggagcagaactgtcaggggcagcacctggacggtcggggctacctggcaggcccaggcagagaggctggcagagacctactgaagccatttgtgagagcaacccttcaggaatcgcttcagtttcacagacctgacttcatctcccgctctggggagcggataaagcgcctgaagttaatagtccaggagaggaagctgcagagcatgttacagacccgaacgggatgcactattcaacattgacagggaacggcagggccacccagaatcgcatgtgccccgctgcccaagagagtcttccccggctatccagaagaacaagcctatcagcaagaaggaaatgattcagaggtccaaacggtaagaccaagaaaacaagagtacgtatacaagtgtaaaccaggccaccaagtggtcgggagctctggcttgcacccagaataaatgtattatactcaagtttaaacattatgagaaagttgtgagagtcatttctcacttatggcactgaaaaaaaaaaaagcacatcatggtatgaatgactcatatgcaaaagatgaaaaacttctcactaatttgcatgtcttaggctcctctttattagaaacctaaatgtaaataaagaatat

SEQ ID NO: 13907 - DNA, 1205 bp, Homo sapiens
ttgaacatgtaactcaggaccccttttccctcttgcgtctgtgccagctcaaatccagcccctcgccctgtgccaccccaactgtgcctgatagacctgccccagcgttcctgacttcttgctggcctgtggagggtgaggtgtaattatttgtcacctgaacctaatgtatattctccttgagccccagatcccttcaagctggaagggatggggctgttggtggggtcagggtccaagaggaatgggtgttctgtggcctcgagtcctctcctgtttgcgaaaataccagttttgctctctgtgggacaaagcactgctgatgaagtccccgtgggctcatccgggctggaattcttggtttttcagccattccctgcagagtcactcaatcatcaagtccctcacagccatttctgttcccagaggagccaggcctgcagctgggctgctcaggagatggcctcattcctcctgttctcccagtttgctttccacttaagacaaagccttgtctatgtggggggcggggaccggggaaagagggaggctgaaatgtttattctgcttctcccgtgtttcatgccatctcgcgtcccccttcctgcacatgggtgtgaatgcacacacatacgcgtacacacaggacttggtctgcttggcctggcctcttctgcccaggtgggttggaacacgtttgctgcctgagcctgtgccactgagcatgttaggtggagcagttggtgtgggcacgtgcggggtgttggcaccggaggcatggaaaagcacaggctgtactgccaggctgcgatgcgtgctggcccccgcacaggctcctgtgtgcagggactgattcctcagcgacacgaggcttccacaacccaagtctgctccatagcactctggcccaaccctgtctgcaggtgaaacaggagggctgtttgcctctgccccatccccccgactgtgttcaggagtcccaccttgcatttcagacctgggctggcagtctgttggacttctcttcaggaagaaaaagcatcagggggaaatggaatgcccctgcccccaggaacatggcagaagcacaggttctgtacctcagatggactcctgctgggccttcggggtctcagttggcttcccccagattctgattctacagctgcagaatgtatataacgcaataaaagcaaatgtttgaa

SEQ ID NO: 13908 - DNA, 395 bp, Homo sapiens
gtttttttttgagactgcatagggctcggcgtggcctgaggctgagcgaattatctagctcttaacttaaggagtgtctgatggtaaagagagataggaataggcaaatagcactttgcttcttagcaagaaattgcagcaggtaagtttggagtatagaaagaggaaagatggttttaagtgtttaagcaactctccaaagattacaaactttcatgagaataagtgaattttctggttcagagattgcagttgaaatctgttccaccttgtaggcaatttgatccatgccgaacagaaatgtaatagaggaacggaagggcgctaacttaagtcacgacttggattaaattgagaaattcaggtcttgttgttaggaaagtatggctcccatc

SEQ ID NO: 13909 - DNA, 1245 bp, Homo sapiens
gcggccaggagaagctgcggccgctggtggaagtcctacagccgctgcacggacggcatcatctacgtggtggactcggtggacgtggaccggctggaggaggccaagacggagctgcacaaggtgaccaagttcgccgagaaccagggcacgccgctgctggtcatcgccaacaagcaggacctgcccaagtcgctgccggtggcagagcattgagaagcagctggcgctgcacgagcttatcccggccaccacctatcacgtccagccggcgtgcgccatcatcggcgagggcctcaccgagggcatggacaagctctatgagatgatcctgaaacgcaggaagtccctcaagcagaagaagaagcggtaatgcgcccggagcgaccggggagcgagcgagtgcgtcaagaaagaatgaatggatggatggatggttggatggatggatggatggatgagcgagaacccgcgcccgcgaacaaagagcgaaccaaagcgatgcttcgaatttttaaaacggaatctctgcacccaaatgcaggactggtgacttaaggagctgcgaagtctgatttaccggcctactctcgacctgccccccacccccagctcaggggaccttttgtctgaacgccagagctactgaccaggtcggggggccgcggtggggagtggaagagccggtcctgctgtccgccctcccagccccaggtggaaggctcagttgtcggaaagacaaaagcgatttcttcccactcctgcagggccagaagttcaggctgccccgcctccactgggggatcgcacctgtgaattacctgaggtatgcatttcccagaaccgtgggcgtacccaccttggggggcatgttggttctggggggaccacctctccttgcattcaggggctgtgaagctgagtaattttcggtcacagggcaggcccctgttgaaatttcatttgtcctgctctgggcccaaaggtggtggtggtttgggtcatcagaggactgcctgggacggttcagcgggcacggagcgctgtgctggcctggctggggatggccgcggaggtgcccttttcctggtgctttgtggtggctgcagaagaccagttttgttgagaactgcttttcagcctggaatcagacatcttccagatggtttgaccctgtccatgtgtaggtcattatcacacaaagagaccaataaaaataaaaaaaaaaaaaaaaaaatgaggcgc

SEQ ID NO: 13910 - DNA, 412 bp, Homo sapiens
ggtctacaagccagaaggcctaacagtaagagttagaatcctagtcagactgcctaggttcaaatcccggttccagcagttcactgtgggaccttggacaagttattgacctgagattgttacctcatgttactcaggaagtaaatggaaatgctaatagcacccactggagggccatggtgaggattatttgagacaatgcaagcaaagcagttagcacagtgccccgcacacaatagggagctggtacttgttaggcaactgctgatcttgtgggccccaacattgctccttcatcccctgttctctagatccaggactcaaaccatgtgtttctgggaactaattcctggaaataatagaccagaaatatgtatagtgagtgactatgaaaacaagactagctgggtgg

SEQ ID NO: 13911 - DNA, 599 bp, Homo sapiens
gacgttgctcttgtgttctcgcgagaggcgggaaagggcgcagggtttgaaacatggcggacgacgtagaccagcaacaaactaccaacactgtagaggagccccctggatcttatcaggctcagcctagatgagcgaatttatgtgaaaatgagaaatgaccgagagcttcgaggcagattacatgcttatgatcaacatttaaatatgatcttgggagatgtggaagaaactgtgactactatagaaattgatgaagaaacatatgaagagatatataaatcaacggaaacggaatattccaatgctctttgtccggggagatggcgttgtcctggttgcccctccactgagagttggctgaaacaaagaatttgtcctgtatggaaaacgggagactttgtacagtggcctctctaaaagtacaaaacattcataagagaaacctgcatacattttgatattaagaaataattccggggattcttccactcctgaaatgagttgatttgcagataactcacaacttcttaagctaaatggtattttcatttttctcaagctctccaataaatatgaccaccaagatgcaaaaaaaa

SEQ ID NO: 13912 - DNA, 872 bp, Homo sapiens
gctgagagatcctctaccgcagtcgtttgaggaggcggaactgaagttttttcttaattatcatgtgacgggttctggatttaatggggggaaaagggcggaaaaggacaaggatccaaactggcgaatttgctgatcttcgcgtccctctccgctttccggccggcagcgctgccagggtatatttccttttttccgatcctgcaacagcctctttaaactgtttaaatgagaatgtccttggctcagagagtactactcacctgggcttttcacactactcttcttgatcatgttggtgttgaaactggatgagaaagcaccttgggaactggttcctcatatttattccagtctggatatttgatactatccttcttgtcctgctgattgtgaaaatggctgggcggtgtaagtctggctttgaccctcgacatggatcacacaatattaaaaaaaaagcctggtacctcattgcaatgttacttaaattagccttctgcctcgcactctgtgctaaactggaacagtttactaccatgaatctatcctatgtcttcattcctttatggggccttgctggctggggctttaacagaactcggatataatgtcttttttgtgagagactgacttctaagtacatcatctcctttctattgctgttcaacaagttaccattaaagtgttctgaatctgtcaagcttcaagaataccagagaactgagggaaaataccaaatgtagttttatactacttccataaaacaggattggtgaatcacggacttctagtcaacctacagcttaattattcagcatttgagttattgagatccttattatctctatgtaaataaagtttgttttgga

SEQ ID NO: 13913 - DNA, 453 bp, Homo sapiens
ccatttctcaggtgcttgcgaggtgatcagaaggcaaagatgtcggagcgaaaagtattaaacaaatactacccgccggactttgacccatcaaagatccccaaactcaagctccccaaagaccggcagtacgtggtgcggctgatggcccccttcaacatgaggtgtaagacgtgcggagaatacatctacaaggggaagaaattcaatgctcggaaggagacggtgcagaacgaggtctacctgggcctgcccattcttccgcttttacatcaagtggcacgcgctgcctgggcagagatcaccttcaagacagacccttgaaaacacagactacaccatggagcatgggagccacgcggaatttccaggctgagaagctcctggaggaggaggagaagagggtgcagaaggagcgggaggacgagggagctgaacaaccccttgaaggtt

SEQ ID NO: 13914 - DNA, 461 bp, Homo sapiens
cccacgcgtccggtgatgaccaacaagaagacggggaacccctacaccaacggctggaagctaaatccagtggtcggcgcagtctacgggcctgaattctatgcagtgacggggttcccctaccccaccaccggcacagccgttgcctaccggggcgcacatcttcggggccggggccgggccgtgtataatacatttcgggctgcgccacccccaccccccatcccgacttacggagcggtcgtgtatcaggatggattttatggtgctgagatttatggaggctacgcagcctacagatacgctcagcccgctgcagcggcggcagcctacagcgacagttacggcagagtctacgcagctgccgacccgtaccatcacaccatcgggcccgcggcgacctacagcattggaaccatgtgaaaccttccaccgtttccttctcggaccatgaagggcaa

SEQ ID NO: 13915 - DNA, 1012 bp, Homo sapiens
tggaactggaggtagaagatttacacaggaatattccttagagtatgttggaactgtcgttaaaaacaaccaaaatcccgaaactatttagaagcttataatgatgtggatttcatggatacttttcaatgcgtatttttcaaatgcttctcagagagccttgctttggttgaccaaggagtccggatgtaggaatgtttaaatcctcggatacttcagtgacacagcctctgctgccccttgctttgcctgtgtttgctgatgaaaagcagatgcttgtgtttcattttccttcctggtttgtgtgtgttaattctctctctctctctcagacacagaagtctcatgttgcattttccaaattttatgagtgatgatactttttccattactgctgcgtccctgttttacaatgcaaaatttaagtacggtcattgcccatggtgattaaagtgtggttatgggcaggaagacagactgtgtaaaaaaggaatgacatcctggctcctcatcttcttcatcagcaactaccataaccagtttgcgagtcaaatggcatttcctaacggcaggcatggcggcccctgaaagacaacagctccctttctgcttcggacaccactcaaacatttagacgcagctctatcccttttcctagctagagaaggtgatgccttcttccattactcagagatgttgagaccgttttcagaatttcttgttgaaatgaaaaacatcaagataaaggacgcctttcaggcattagctaaacttccacttcataactttcggcgagacatggtgagcctcctggtgtagagttcttttgtctttgtatggaatgactttttgctgtgatggttttgaatgttgggtttctgctgtctgcttagtacccatgcctgaattttttgagattgtaaatatcaaaggagttagattgtgttctgacatggttgtagactttcacctggattattgatattctacttctaataaatttttaataggc

SEQ ID NO: 13916 - DNA, 720 bp, Homo sapiens
cccacgcgtccggataaatccagtaaatggcattgggggacaactgagcaggcatttaggagaaaaagttggacccatcgttcaatcctgacaaaaatatattctggatggaacaaaactttaaaggtaaaaaaatgccatagaagtacgaggataagcataggaaaattctttcatacatccaagtggaggaagcttttctaactataaatcaaaacccagaagtaatcaagaaaacaactagcaattagactacatacaaaaattttaaaatcctttctgatgaaaatcaccgtaaacaaaagataaatgacaaacagggaaaacatttgcaactctgttccctcattcagctactatttattcaatgcctactatatgccagctactcttctaggtgtttgagacatcatagtgaacaaaacagagagttaattgccctaatatacaaagagtttctagaaatcagtttttagataatcaacagcaaatggtataaacagacagcttacagttaaggaaacaagaaacccaataccatgtgaaaaaattttcagccttgcttataaaaagtgacgaaacaagatgaaactacactgaaatacaaattttcacatatcagattagcagaaaccccaaaattgtattgctcacagtgctggtacaagtgtggagcatgggcagcctcatgtgttactggtaggtggtaatggacacatg

SEQ ID NO: 13917 - DNA, 490 bp, Homo sapiens
gacctctttcaggtgtaggcaaaatgttgatggggaggagggaggcctctggggaaattcgaagatggggctctggaatctcattctataggaaagatcaaagcaccccctacccggaatgcagggaggggctgggtagggggtgagttgcaggggctgggacagagcaccagcatcctgcatcattagcagcacgtgggaaccctagtgtatgggtgcaaggccacttgcctcagttttccaggcgttcccaggggcctccatttctcatcttgaaaaaagcagcaaggctttggtaccagagggtcttggtgtaagtgcaaatctgcttcagatatatattagctgtggatttggggctggttacaaggcttatctgagcctcactcttttcttgggagataagggaaaatagtccttgcctgatgggctgcagtgaggattcaattaggcaatgtcccttagagctctggggagctgttgaaaccgg

SEQ ID NO: 13918 - DNA, 1329 bp, Homo sapiens
tcttagatgagaaacctgttataattgccagctgtctacacaaagaatatgcaggccagaagaaaagttgcttttcaaagaggaagaagaaaatagcagcaagaaatatctctttctgtgttcaagaaggtgaaattttgggattgctaggacccaatggtgctggaaaaagttcatctattagaatgatatctgggatcacaaagccaactgctggagaggtggaactgaaagggtagcggtggaggggatgccctggagttcctggggtactgccctcaggagaacgcgctgtggcccatgctgacagtgaggcagcacctggaggtgtacgccgccgtcaaggggctcaggaaaggggatgctgaggttgccatcacacggttagtggatgcgctcaagctgcaggaccagctgaatgttcctgtgaagaccttgtcagagggaataaagagaaagctgtgctttgtcctgagcatactggggaacccgtcagtggtgcttctggatgagccgtcgaccgggatggaccccgaagggcagcagcaaatgttggcaggcaatccaggcagtcgttaaaaacacagagagaggtgtcctcctgaccacccataacctggctgaggcggaagccttgtgtgaccgtgtggccatcatggtgtctggaaggcttagatgcattggctccatccaacacctgaaaaacaaacttggcaaggattacattctagagctaaaagtgaaggaaacgtctcaagtgactttggtccacactgagattctgaagcttttcccacaggctgcagggcagggaaaggtattcctctttgttaacctataagctgccccgtggcagacgtttaccctctatcacagacctttcacaaattagaagcagtgaaagcataactttaacctggaagaatacagcctttctccagtgcacactggagaaggtattcttagagctttctaaagaacaggaagtaggaaattttgatgaagaaattgatacaacaatgagatggaaactcctccctcattcaggtggaaccttaaaacctcaaacctagtaattttttgttgatctcctataaaacttatgttttatgtaataattaatagtatgtttaattttaaagatcatttaaaattaacatcaggtatattttgtaaatttagttaacaaatacataaattttaaaattattcttcctctcaaacataggggtgatagcaaacctgtgataaaggcaatacaaaatattagtaaagtcacccaaagagtcaggcactgggtattgtggaaataaaactatataaacttaa

SEQ ID NO: 13919 - DNA, 1894 bp, Homo sapiens
tttttttttttttttaagagagtacagatgtcatgacatttattaaaaggcatgctacaatgctatatttgttaggaaaagagattagagatatcaagtaatagtcagcaaatatacaaactgaacgaaaatggaatatactgtagtgtacagaagcttgaattaaccatgcactacgcatttagaaaatatgttttttaatattttatcttctctttgcatttataacataattcacttcaacaatcacagactcctttttttccaatgccacagactgttacaaatgaaagctggtactgctgcttatccaaaatatacaagacaattgatgttttatataaaaccactttataagttcatttggttcccaaaaacctttttttctttttttggccttgttaaaaaaaatgttgttacaaatatttacagcattttcttctgttagacgaacattcttaaaaactgaaaaggggaattttgatgaacagaccacgtaaaacaccagacaatgtcagaggctcctagctgtgctattttttttttcttagatacagtactgaaaatgcccatcaaactcgtcatcctaatccattctgttcacactgaaactcacattttctctaagtagtctattcagcagtagaaattgaaagtaaaggccgctctgcactgggtcttctttcagaaaggagcttggggaaaatgcaaaatgctttacagagaggagttaaaaccacaacagtcagtctttggtcagagcaatgaggtgacactttgatgcaaaactttgcttggtcagcaatctttataactggtactttctggatatgggatgaatttttaaaagatctgggaaacaacagtaagggggaaaaaaggccagagtatgatttttttaatggcatcaaaaaaatagctatttaaatatttgttattacaactactacatagatccaagaagtgaaaataatacaacaacaaatcagttgacaatgctgatttaagcatgccataggcatctttcaattatgactatgatcaccaaggtcactggaccagacaaatatccctgttctctggaacatatgcctcaggttacaaaaactaaggaaactaccacaaagattttgagcagctctattcttggacctgcacaatgctctacaatgaatattatgtgataaaggcaaaagtgtaactgagactttatttatagttacaattctttgcttggatgaatagttggtgggacaacattcttttaaaactatatagtacatatttcctgaaaaccagaatactgatactactttagtctcaaataggaagaaaaggtcaattaagactactgaagaaggcacataaactttggtcctgttttttctcccactataaaacccctcaaactaagattttaataattttctatattttaaaccactcacaactagctgttaaaatttgctctgaaaaaagactgctaatagtcttgtagataacaacacaactcttttaaaagacagctgagttatattttcaaattttgtgcaatctaaattgtatttctttcagcacaatagtagagtattttgagtctggcagttttgttctcattaacagatcaagacaaaggaaaggctaagaaaaatgctttacgcatcgtcacgctgtctctttttggttttaaaaatagcagttacacattaggttttctaagggataggtggggaaaaacacatgtacttttgtcaattttttgtccaaaaatatctcgtgggaacagaagagaaactgcatgacaatatgctaaacatgtaagcactgctgactgatggcacggagacactgaaaagaacagagagccaggcgtggtggctcatgcctgtaatcc

SEQ ID NO: 13920 - DNA, 1737 bp, Homo sapiens
tatttttaattttgttaaatttttattattagggtttgaaataaattcagtgttcacatttctataaagaattaacccagtttcaggaaaccctgccccagcagggcaggtaagcaaccctctccctgcccacatctagtttgatttcacgccctgatgcttcaaggtgcccagaaaagcggcacgttgtggaagaggaaatctatgcccggcccgtgcttggggcccagggctcagtaagctttcgagaaagcagaggggaagactagcttactgcaaaaacctttttaaaaaatattcatacacttcagtgagcgcctgttgagacgttaggggaacaagagcttggaaacatcccgtccaggccattgggaggcagcgtcttcctcacaccccgtccctggatgtcgggggtgcagggggaaggtcccggctcttccactggagaaaggagactcacctggcttcctagttcatgtttgactatttcctctaaaacctgtgctgagtctttgactgcatgcacgggaagcacaaacgttcggcttgtatgcaaaaaaagtacaaaaacaactagaatataaaagttttggtaatataaggccatctgttcaagtccaccttggaaacctgtaacagatatttaaatactacagtgaaaaggcatcttaatatactttttaaaaacatctgaagtaatccgctaagattaagtgtgtaaaaaaaaaaattcaattccctttcgagggcactttgtcctttgaagaagggaaagtggggcggggaggcacggggcccaccggttaatgcttcagccacgggtgggcttcaatggaagccttgttgcggtccccatagtcatacaggagctcctccccagccgcgatgtctcgggaggcgatgaggatgaggtgaggtacgccgtcgatgtcgtgcagtttggtttggcagttcccacatttgctgtgattgatcagtcttcctaggcgatttgtctctctagttgcatccacgcagtaggttttgctcagatactgaaaatagtacatgtagcagcccggtggaagggtcctgtgcgtacagagcctcccgtttcttggcgtcggtgatctcgatgaggtccccgtggtattccaccacaaagtcaccccgggagaactgcttggtggcaatcacacccctgcctttgccatcgatgaggtcaatcttcattccttcttccttcccactttcaatcaattcatctattcttttcctttcttcagactgcagctcggctttgctcttcctggagctccttcggacagggtagaaatccgtaagtttgcgattctgttgcgtttttccttgagctttttttcggggggcctgtttgcccttgatgggctttttcagggcttgcttggcgatggctgcattggtggaatcacaagatgagggtggagtttttggaggttctgctgcttcagatttttggtttggaaaaggtaccaggggacctttcctggcgtctttgatcttctgttcctcggacttcatggcgctccgtactgcgttcccagcatttcttttctcttctcgtttcctgtagattccggctaatggtttcccctggcatttgacttcgtgatgtgtaactgagttctcttcctgaagggggaaacgcattccagagcatttgttcgggctcatgtaggaatagatctttgactgcatgcacgggaagcacaaacgttc

SEQ ID NO: 13921 - DNA, 698 bp, Homo sapiens
  misc_feature (1)...(698): n = a,t,c or g
tcgagttttttttttttttttttaaaatttcataaacatttattcacagcccctttaaaagtacagcagtgaagtaaaaccccaattaaacaactgcccattaacttgttacttaaaatttagacttaaaaaccaatagactttttttttggtgtgtatgcaattacttttataaacacagtttaggttggaataaggaagtcctaattcatcatgttggagcttgccctcgctgctgcaggctgttgaagtgagcctccttcaaggtctggttgatatgggagtaaagaccttggcatggtacatacccctcatgcaagaactggggaaagtttgcatcgggttcagtaacaatctggtttaagttgccttctggtccacttgctctctctgggatattaatgcggctgctgctcctttcattatcactccatgaaaactctgtatcttgagaatcctgaaagatagggtttctcttattccttttgggctgggtggaatgatggttgccctctttactgccatttcttcttcttttcaaccaaagaaccagcatgttctttcggagaaggcttcgcgggattttttttcaagcacgaagggcggggcacgaggcaagcanggccgcncaccggccaacactgtcacctgcaggtcatgagagccgagcgccaccaaccccggaagaaaatacatat

SEQ ID NO: 13922 - DNA, 1201 bp, Homo sapiens
ttttttttccaagtacatgagacatctttaatcataacgaaataaaatctgaaaatcggtctaaatcattttaaaaagtaaacatgagtcgtaatactatacctgttgagtgattaattccattcattgtcattagaaaggatgtaaaatatttattaagggctttgcctgcagaggcacaacataaatagcattaagtcctcctgaaatgtaattagtgtacacatcaaccagttgataatttgtggtgggaaaggcaggaactcaagctgggaccaggttcccgcatccgaacttggacgagtgcgtggtgaaggctcggctccagggaccatgcctgcagctgctctctgccatcgcctctgcaaaagtctgttaggcaaatgcaaaagtgcaagcagaacttgcttgaagaacaaccacccccgaggcacagggtgcttaatccaccccttcaaatccttgagcattttccacggccatgagaagtttctctcgtaaatcttcaaaggtttcatatggaggtaagtcaaggcgattaaagcatgtgtgagctctgggcagtttctcaggactgccccattgctctattgtaaacagctgaggaccattggaaccataaagttcggcaaatccattcataggtactcgcgatgtccctgtgacaaactgcagtaaccggatacgcttttcggcgtccatgagtagcacagcccttccagaaccactgaatgacggggtggtttggggcagtagccgttcttgtaaatagaatgctgtctccagtcattcacatccacatcaccgaggccgcacatgagcaactccagctcattttcatcaaaaattttaatcaaatcaataggaagtagttctgtgaatccctccaagaaggcgttcatctgcttctggaccctgttcacaaatctccactggatgactaagtcgatatattcccttttgttttcatttgtgaccattatttctgacccattgggcttcaaatccacttgatatgtctgtccaaagttttcttcgtctatgcagaacatgaggtccagctcagtagggtcattctccaggatccatttcaaagagttgtaatattcactatccacagattccatgtcattcagggttatctgctttcccaacatcatcttgtaaaatggtctaatgaagaaaccatctaagagcttcc

SEQ ID NO: 13923 - DNA, 1887 bp, Homo sapiens
gaatgcattcaagacaatagacttgtggacttacctatttctaaacctttttttaaacttatgtgtatgggtgacattaaaagcaatatgagtaaactgatttatgagtcacgaggtgatagagacttacactgtactgaaagtcagtctgaagcttctacagaagaaggtcatgattcactctcggtaggaagctttgaagaggattcaaaatcagaatttattcttgatccccctaaaccaaaacccccagcttggtttaatggaattttgacttgggaagactttgaattagtaaacccacacagagccagatttttaaaagaaattaaagaccttgctatcaagaggcgccaaattttaagcaacaaaggtctttctgaagatgagaagaacacaaaattacaggaactagtgctgaagaatccatcaggttctgggcctccacttagcatagaggatttaggtttaaatttccagttttgcccttcctcaagaatatatggttttacagctgtggatctcaagccaagtggtgaagatgagatgataacaatggataatgcagaagaatatgtggatttgatgtttgacttttgtatgcatacgggtattcagaaacaaatggaagcctttagagatgggtttaataaagtttttccaatggagaaattaagttccttcagccatgaagaagtccaaatgattctttgtggaaaccagtcaccatcctgggcagcagaggatattatcaattacactgaacctaagctgggttatacacgtgacagccctggtttcctgaggtttgtgagggttttatgtggcatgtcttctgatgaaaggaaagcattcttgcagtttaccactggttgttcaactctacccccaggtggactggctaacctgcatcccaggctcacggttgtacgcaaggttgatgctactgatgcaagctatccatcagtcaatacatgtgtgcattaccttaagttgcctgaatattcttccgaggagatcatgagagagcgcctgctagctgctacaatggagaaaggctttcatctcaattgagctttgaagtgcaatgggagacatcagagactttaaaaatactagtgaagcctcttgtgtttgtgtgcagagaagtatatgatccaccatgctaatgacacttgcctttttttccaccattaaggctttaagaacatgtggaataagttttttagctgctaatgacaaaacaaatcctgtaactacccagccagcaagtatatagcacagaacactgtgttactttacaagggcttatgtgactggaataaggtggtcccacttgactgttccaaagagcagcttctcagatcttcagtgttcactggtaaatttctaacagtgtatttgtgtaaagtttgtcatttcatactccatacactacagttgctgtcactgatccctgttttgctggcttttaagctacttggtcaaaaatcctgcttccttaaaacatagagaattaatgagcatctcaagctttttcttttcctttttaatgatgcctgcactatcaagagtattctagtgttctctctttgtttggcatataatcatgcaccaaactttttatttctttaaggtgggagtatatttttatttcctaaatgccatactatgaagatcaaagtcttaagtgtgtttgcagctcaaaaataaagatgtattaaggggggaaaacctggtctaagtgcaaggcacacttacagcgagttttactttcggttgtattttctttgtatattataaacatttatttaacttgttgccgtttgaagtaaaaaatttccaaaatgtatgctcaacaataatcattaaaatgtttgcagcgta

SEQ ID NO: 13924 - DNA, 822 bp, Homo sapiens
tggtttttgttgttttgtgttttttttccttttttttttttggttcttagaaaatctgagacacgtgaggccagacaaagcaaggccggggctggtgggatggggtgcggttcaggggggcccggtctgccaactcagctcctctgctgcaaaagcggggtgcttgttggggccatctcctggcaatggcaagtgagtctggagcagagaggggagaggggctgggtgggtccccagccgtcaggtggtggtggcgccctctgctggcccctcgcatggcccaggcagttcctggacaaggcacatggggctttggcctggattggggaggccttgaagggacctcagagcaaaggaagagacctgggtgtggtgaggcatcccagggcatggaagggaccggttgtgctgtgggaatccactggcccctccttggttaaaaaagcacaacacatcatacatatttaccagaccagaagcgctggccccaagtctccccaacctggtcgggggaacctcctggccaacccacaaagagagagaggagagagcctgccccagcccctccctgcccacccacccaccccggaggactgcagagagtgctttgcatagatacagagtggaggaatgggactgtggggctgcccaggcccctcctggaggccgtcgggggtgttgggtcaggtctctggggcctcacaggtcgctctcgccatacaaggccgtggagaaggacttgtagtcgagggcaccgggcaaggcgttcagggccctgtattggcgccatgcgggcgatgcagtactcggccttgtccgggg

SEQ ID NO: 13925 - DNA, 399 bp, Homo sapiens
agaaaaaggtgaagcgaagcccaaggacaccatgctaagggcaaaagtaagagacagtctcagaactgagagaatcgtgtcttctgctttttgaagtagactgtcacactcaggcagcctgtcaatgctgaatgttaggacttctgtctccgctggagacacggcctggtgcaagtcagcgtttagtgtttgacagctttctcagcactccctgactccgtttacctttactccgcatcccattctcttactgcctatctgaaggattggatgggcagagtataggtggcggtggttggtcctccccgtatgttgtccatttaattccagagcactgatttttccgaagtgtgctctgccctgggaaaatggacacatgttcctcacaatgggaataac

SEQ ID NO: 13926 - DNA, 1309 bp, Homo sapiens
acctcaagggcattgaaagcatcgaccagactgccagcctgtgccagtctgacctggaggccgtgcgggcggagcggaaaccacactgtcgttcggtgaaaaaggacggttagcttttgagaagatggacaagctctgctcagaacaaagagaagtcttttgccaggaggcagatgttgaaatcacaatattttaaaaaatcctggctgatgagcacaaatctcacatcgttttttttgctgctgcccagcctggacatagcctgcactctgggtaatggtgctgtgactcctccaggagtgtgagctgcccagagctctacctgagactccggccattgacccagccccatgggcatgggctggtcttttgtacagaggcagaaaaaagcaaggcaaaggtacagcattccaggggctgcacggcctcaacagagcgctcaacttctggctgagggtctgtgtgaccttccccgagatgcagagctgagccaaactaggtggccacctacaaaagggccaaggccaggcaagttgaggccctaaataaaaggctccaaggcaagtgtgtagaactccaggcctcgctgccggtcagctgctcggcacttctgcgtcaagaggcactggggatgcagcaggctggcaggtggctggccctgctaatgcaagactgctcaggccatttcagcagcagccaggtgtcaccttggtgagctggggaaggtgggaaggcacaaagccagggtttctacaaccacactctcagcccgactgacttgctgcgagtgctggtggagctcacagacggcggctggtggatggtggactgtgaacctcactttccctatgttcagcagcacaaagggaagaagccaccacatcagcccaggagccctgagcagcacaggcagtagggccacttcactttggccatccgcacccaaatgcaatcaacccagcttcggaagctaccctaggatctcgtcaataaactgctaagaagccatcaactggcctaaagaaagagttcactgaagaacgcaattgctttaaagaaagaaaaattagtttcctatttaagtcttaaaaaaaagcaaaccatgtcctgagatgtctgtgttaatagtgcagagagaacctagggttagaggttgctgtagcaatggcattggagaactttaacttgaacattctcatcgatacttcctggacatattttgtgtttttaacttacttagtatttatttgccttgttcatatgttcaattttctgaaatttcaattaaactattggtgtttcacttttt

SEQ ID NO: 13927 - DNA, 390 bp, Homo sapiens
  misc_feature (1)...(390): n = a,t,c or g
aaactttcgcttttttaagaatttatatgacagtatggaatctaagccttcagtcgactctggtactctggaagataacacctattatacagatttacttcagatgaagctggataacttaaacaaagaaattgaaagcactaaaggtgaattgtccatacagcgaatgaaagcattatttgagagccagcgggctctagatattgagcgaaaactttttgcaaatgaaagatgcctccagctttcagaaagtgaaaatatgaaactgagagctaaactagatgaattgaaactaaaatatgaacctgaagagacagttgaagtgcctgtactgaaaaagaggcgtgactccctgtggatataaccaccgntaaggatgcatgtgtcaca

SEQ ID NO: 13928 - DNA, 5098 bp, Homo sapiens
  misc_feature (1)...(5098): n = a,t,c or g
atccttataagcccctggacatcacaccacctcctgatcagaaggcgagcagttctgaagtgaaaacagaaggtctatgcccggacagtgccacagaggaggaagacactgtggaactcactgagtttggtatgcagaatgttgaaattcctcatcttcctcaagattttgaagttgcaaaatataacaccttggagaaagtgggaatggagggaggccaggaagctgtggtggtggagcttcagtgttcgcgggactccagggactgtcctttcctgatatcctcacacttcctcctggatgatggcatggagactagaagacagtttgctataaagaaaacctctgaagatgcaagtgaatactttgaaaattacattgaagaactgaagaaacaaggatttctactaagagaacatttcacacctgaagcaacccaattagcatctgaacaattgcaagcattgcttttggaggaagtcatgaattcaagcactctgagccaagaggtgagcgatttagtagagatgatttgggcagaggccctgggccacctggaacacatgcttctcaagccagtgaacaggattagcctcaacgatgtgagcaaggcagaggggattctccttctagtaaaggcagcactgaaaaatggagaaacagcagagcaattgcaaaagatgatgacagagttttacagactgatacctcacaaaggcacaatgcccaaagaagtgaacctgggactattggctaagaaagcagacctctgccagctaataagagacatggttaatgtctgtgaaactaatttgtccaaacccaacccaccatccctggccaaataccgagctttgaggtgcaaaattgagcatgttgaacagaatactgaagaatttctcagggttagaaaagaggttttgcagaatcatcacagtaagagcccagtggatgtcttgcagatatttagagttggcagagtgaatgaaaccacagagtttttgagcaaacttggtaatgtgaggcccttgttgcatggttctcctgtacaaaacatcgtgggaatcttgtgtcgagggttgcttttacccaaagtagtggaagatcgtggtgtgcaaagaacagacgtcggaaaccttggaagtgggatttatttcagtgattcgctcagtacaagtatcaagtactcacacccgggagagacagatggcaccagactcctgctcatttgtgacgtagccctcggaaagtgtatggacttacatgagaaggacttttccttaactgaagcaccaccaggctacgacagtgtgcatggagtttcacaaacagcctctgtcaccacagactttgaggatgatgaatttgttgtctataaaaccaatcaggttaaaatgaaatatattattaaattttccatgcctggagatcagataaaggactttcatcctagtgatcatactgaattagaggaatacagacctgagttttcaaatttttcaaaggttgaagattaccagttaccagatgccaaaacttccagcagcaccaaggccggcctccaggatgcttctgggaacttggttcctctggaggatgtccacatcaaagggagaatcatagacactgtagcccaggtcattgtttttcagacatacacaaataaaagtcacgtgcccattgaggcaaaatatatctttcctttggatgacaaggccgctgtgtgtggcttcgaagccttcatcaatgggaagcacatagttggagagattaaagagaaggaagaagcccagcaagagtacctagaagccgtgacccagggccatggcgcttacctgatgagtcaggatgctccggacgtttttactgtaagtgttggaaacttaccccctaaggctaaggttcttataaaaattacctacatcacagaactcagcatcctgggcactgttggtgtctttttcatgcccgccaccgtagcaccctggcaacaggacaaggctttgaatgaaaaccttcaggatacagtagagaagatttgtataaaagaaataggaacaaagcaaagcttctctttgactatgtctattgagatgccgtacgtgattgaattcattttcagtgatactcatgaactgaaacaaaagcgcacagactgcaaagctgtcattagcaccatggaaggcagctccttagacagcagtggattttctctccacatcggtttgtctgctgcctatctcccaagaatgtgggttgaaaaacatccagaaaaagaaagcgaggcttgcatgcttgtctttcaacccgatctcgatgtcgacctccctgacctagccaatgagagcgaagtgattatttgtcttgactgctccagttccatggagggtgtgacattcttgcaagccaaggaaatcgccttgcatgcgctgtccttggtgggtgagaagcagaaagtaaatattatccagttcggcacaggttacaaggagctattttcgtatcctaagcatatcacaagcaataccacggcagcagagttcatcatgtctgccacacctaccatggggaacacagacttctggaaaacactccgatatcttagcttattgtaccctgctcgagggtcacggaacatcctcctggtgtctgatgggcacctccaggatgagagcctgacattacagctcgtgaagaggagccgcccgcacaccaggttattcgcctgcggtatcggttctacagcaaatcgtcacgtcttaaggattttgtcccagtgtggtgccggagtatttgaatattttaatgcaaaatccaagcatagttggagaaaacagatagaagaccaaatgaccaggctatgttctccgagttgccactctgtctccgtcaaatggcagcaactcaatccagattgcgcccgaggccctgcaggccccagcccaggtgccatccttgtttcgcaatgatcgactccttgtctatggattcattcctcactgcacacaggcaactctgtgtgcactaattcaagagaaagaattttgtacaatggtgtcgactactgagcttcagaagacaactggaactatgatccacaagctggcagcccgagctctaatcagagattatgaagatggcattcttcacgaaaatgaaaccagtcatgagatgaaaaaacaaaccttgaaatctctgattattaaactcagtaaagaaaactctctcataacacaatttacaagctttgtggcagttgagaaaagggatgagaatgagtcaccttttcctgatattccaaaagtttctgaacttattgccaaagaagatgtagacttcctgccctacatgagctggcagggggaaccccaagaagccgtcaggaaccagtctcttttagcatcctctgagtggccagaattacgtttatccaaacgaaaacataggaaaattccattttccaaaagaaaaatggaattatctcagccagaagtttctgaagattttgaagaggatggcttaggtgtactaccagctttcacatcaaatttggaacgtggaggtgtggaaaagctattggatttaagttggacagagtcatgtaaaccaacagcaactgaaccactatttaagaaagtcagtccatgggaaacatctacttctagcttttttcctattttggctccggccgttggttcctatcttcccccgactgcccgcgctcacagtcctgcttccttgtcttttgcctcatatcgtcaggtagctagtttcggttcagctgctcctcccagacagtttgatgcatctcaattcagccaaggccctgtgcctggcacttgtgctggactgggancccacagtcggcgtctttgttcccacaggaccttccccagaacccaccttctgcaccctattgtggcattgttttttcagggagctcattaagctctgcacagtctgctccactgcaacatcctggaggctttactaccaggccttctgctgggaaccttccctgagctgggattctccccagcttcatttctctcttcctacagaccctgatcccatcagaggttttgggtcttatcatccctctgcttactctccttttcattttcaaccttccgcagcctctttgactgccaaccttaggctgccaatggcctctgctttacctgaggctctttgcagtcagtcccggactaccccagtagatctctgtcttctagaagaatcagtaggcagtctcgaaggaagtcgatgtcctgtctttgcttttcaaagttctgacacagaaagtgatgagctatcagaagtacttcaagacagctgctttttacaaataaaatgtgatacaaaagatgacagtatcccgtgctttctggaagtaaaagaagaggatgaaatagtgtgcacacaacactggcaggatgctgtgccttggacagaactcctcagtctacagacagaggatggcttctggaaacttacaccagaactgggacttatattaaatcttaatacaaatggtttgcacagctttcttaaacaaaaaggcattcaatctctaggtgtaaaaggaagagaatgtctcctggacctaattgccagcagtgctggtactacagtttattcgcaccaggttggaaaaagagggaatagtgttcaaatcactgatgaaaatggatgacccttctatttccaggaatattccctgggcttttgaggcaataaagccaaggcaagtgaatgggtaagaagaactgaaggacagtacccatctatctgcccacgggcttgaactggggaacgactgggactctgccaccaagcagttgctgggactccagccccataagcactgtgtcccctcttcatagagtcctccattacagtcaaggctaagtcaaatgaaactgaattttaaactttttgcatgcttctatgtagaaaataatcaaatgataatagatacttataatgaaacttcattaaggtttcattcagtgtagcaattactgtctttaaaaattaagtggaagaagaattactttaatcaactaacaagcaataataaaatgaaacttaaaat

SEQ ID NO: 13929 - DNA, 427 bp, Homo sapiens
  misc_feature (1)...(427): n = a,t,c or g
ggcaactcagaccgcgnnnnnnnnnnnnnnnnnnnnnnnnnnnnnnnnnnnnnnnnnnnnnnnnnnnnnnnnnnnnnnnnnnnnnnnnnnnnnnnnnnnnnnnnnntccgaccgcgnnnnnnnnnnnnnnnnnnnnnnnnnnnnnnnnnnnnnnnnnnnnnnnnnnnnnnnnnnnnnnnnnnnnnnnnnnnnnnnagggaagaacctccggacacttctgaacatctgagggacctcgggacacgccatcttaagaaactgttaacactcacttgcgggggtctgnggnttcattcctgacgtcagcnanaccagaacccnccggaaggaaccagttcnanactnactgggaccggnngganacgtnggtaaacctgacatgccatttttaggananncttggaaaaaccctgccaaatngggggtt

SEQ ID NO: 13930 - DNA, 2449 bp, Homo sapiens
  misc_feature (1)...(2449): n = a,t,c or g
ttctcttttcccccctggactgtgaagctggannccgaaccgcagaggtggnnanagttctcctttctttttgacacagcgcactgcagtgcttccaaggaacaacttctgccttggtgtggaagacaccgtggacaagctcaagatgctggaaggccgcaagaccagcatccgcaagncagtgcaggtggcctatgaccgtgcgatgatccacctgagcagagtccgggggccccactccttcgtcacttccagctacctgtaagggcagggctggcctgcatccgcttgccctgcctccatcccgcaggggacagagaagcctcttctgcccctgccagatgtatggccggcagcttccccctctcatggtaggccagggactgggctttctccccactaagggcaagggcccagttttgaccaatcgcatggttctcctggcaggcctgctgtgtgccaaaaactcccacccaagtcctcaggggatatttcactgaagaaccagttagaagtagaaacagctgtggggcttgggcccagcttaggagattgcccagatggcaagaggtcctgggctccttcttgaggggctgcctggcccgctccatcctactcccactaactacacctcagggcgggtgaggttccgacactgatcccagagatgccgtggatacgccagggtcccagggggaatctccccaagctcacactctctcccgcttatcgcctattctcacacctcttctcggtcccatcttctgcacccattgcccagtcttgctttctctttcccatattccttttctttttctcttgtgccaaactgacagaaaccgtcaccacactggtctttttctttaatgtctcattccccttgaggccagctgctatgccaggtggtgtctctgccaggctcctcaggcccagacagaggccagcccacaacctatgaccccctcccccaggacaccacctcccacccacagaccttccctttagctgttgacacaacttcccagctctgcaagtgtgccccctggatcaaggcgggtcccctcttgtttttttctttgctgccacgaggtggtccaagccttcagggtgggctcctatcaggctgggtgtgcgagtgtccatctgtccacatggatgtcgagggtggtttgtgtggagctgtgctcgcagctgggtctgccctcttccccttttctccttcttctctcctcatggactttttctgcaattgcagtcttaagcttcactctccaccacctggatggcatggcgcctgccaccaaacatcttcctggcctgcgctctgccctgccctgcctagcctctgctactcccacttcccaactccagggaatgcattacttttatttcaaaccctctgcctccttccttctttctcttcaaccccctccccaccttcaccttctcaaaaatggaaggaaaaaaaaactgtgaatggggaatgctgactgacaaaccaacacaactttcagaggcttcagtgtctgttctctggacatttcttttcacctcctgagcaccaaagtcgcagggccagttgcaggccgctgattgccatgttgatttttaacctgatattctttttaattgttttaaatttttcataggggagttttggacaaaacagtcactggggagatcactgccatttttacacacttgactttttaaaaatacaaccaaccaaccaccacaacttcttatacatttgggacatgagccagagtttaaaagggaaccaacaaaacactataacttaaaaggatggggttttggattttgtataataataaaaacaatacagcatatggctagggaaggacatggtgtatataattgtaaaatactgttctaaattattcaggcctatagtttccattactgggagtcctccattgtgtggccacacagtgtcgttgatttaaaggagccagtgcttcccctctccccaggtagttggtcagctgtggactctgtgacctttgtctaaacctgtgttgtaagatcttgggacttcctctctttctatgtctatctcttccccccaacactttctcttcttagtctctctctttatttttcaatctctgaatattttagtctctctctgagtctcattttttaaaatgctcttttagaacggggaaacggctcagatcctgctgtggcacggggcctatgtgtctctgtcgcgtctgctgtgaagcacatgatgctctatttattgtagagagtgactttatttgctttctagaattgtttataacagatggtataagagaggtaataaacagagaaaaatctatgcttgtaaagaatacaaaagttaattttacctactataatatgactgtctgaaacttatttgtctctctgagaaataaatgttctaatgggcaaaaaaaaa

SEQ ID NO: 13931 - DNA, 931 bp, Homo sapiens
gaggggggatcgctgggagcggttgcggcgtgcggggagctgagttatagctgtgacttctgccctgccaggccgcacacaagctggctgacccggtttgtaaaaatggaatttcaagcagtagtgatggcagtaggtggaggatctcggatgacagacctaacttccagcattcccaaacctctgcttccagttgggaacaaacctttaatttggtacccattgaacctgcttgagcgtgttggatttgaagaagtcattgtggttacaaccagggatgttcaaaaggctctatgtgcagaattcaagatgaaaatgaagccagatattgtgtgtattcctgatgacgctgacatgggaactgcagattctttgcgctacatatatccaaaacttaagacagatgtgctggtgctgagctgtgatctgataacagacgttgccttacatgaggttgtggacctgtttagagcttatgatgcatcacttgctatgttgatgagaaaaggccaagatagcatagaacctgttcccggtcaaaaggggaaaaaaaaagcagtggagcagcgtgacttcattggagtggacagcacaggaaagaggctgctcttcatggctaatgaagcagacttggatgaagagctggtcattaagggatccatcctacagaagcatcctagaatacgtttccacacgggtcttgtggatgcccacctctactgtttgaaaaaatacatcgtggatttcctaatggaaaatgggtcaataacttctatccggagtgaactgattccatatttagtgagaaaacagttttcctcagcttcctcacaacaggggacaaggaaggaaaaagagggagggtctaaaggaaaaaggggcttgaagtcctttaggatatcttacagtttttatttaaaaggaaggccat

SEQ ID NO: 13932 - DNA, 823 bp, Homo sapiens
ccgggctgtcgggtgtgttttgctctccatcctccgtctgtctctgcagcactccgggttctcctccagagcgctagtcccaggagctcggaatgttcgtggaacttaataacctgcttaacaccacccccgacaggcggagcaggggaaactgactctactctgtgatgccaagacagatgggagtttccttgtacaccactttctctccttctatctcaaagctaattgtaaagtctgctttgtggcactcatccagtccttcagccactacagtatcgtgggacagaagctgggtgtcagcctgaccatggcgcgggagcgtgggcagcttgtgttccttgagggactcaagtctgcagtggacgtcgtcttccaggctcaaaaggagccacaccccctgcagtttctcagggaggctaatgctgggaacttgaaaccattgtttgagtttgtacgggaggccctgaagccagtagacagtggagaggctcggtggacgtacccggtgctgttggtggacgacctcagtgtgctcctgagcctgggcatgggggcggtggctgtgctagacttcattcactactgcagagccaccgtgtgctgggaactaaaggtactcatggaactgccttctctgcgcccacctgtgacctccaagaactcagacaggtccagacctcacttgcttgctgtgatctttttatttgcttggggttttggctttactctggcaggcccagaaagcttttgcagccaccctgttttcccttacctgccattgctgaaaagtaaagccccccaaaataaagggatgatcaac

SEQ ID NO: 13933 - DNA, 2260 bp, Homo sapiens
gccattttagaaagctctgatgtgaattcaaattttacctctgttacttaaagccaacaattttaaggcagtagttttactggccatttaagctctttgtacagtgtcaatttgtaaaaaagaaaaaacgaaaaaaaatctcaaataaaacatgagataacattttaagacttccaaatcagagaagtgcttcaaattattctgtttggattaatttttaaaatgtaaagcatatacttgttgcttagttatttgtttattgagcattaatgttaacacttttaaattaagtattcacttacgaattttgtcactgtcctatcaacggacataatagaaaatattgcacagaactcaaacatgaaaataataaacaaaataactaagcaacaagtatatgctttacattttaaaaattaatccaaacaaaataatttgaagcacttctctgatttggaagtcttaaaatgttatctcatgttttatttgagattttttttcgttttttcttttttacaaattgacactgtacaaagagcttaaatggccagtaaaactactgccttaaaattgttggctttaagtaacagaggtaaaatttgaattcacatcagagctttctaaaatggcaatagtacaagcaaatgactttctctagtatccaaaacctgcgctggctctcccttggctagaaacaagacagccttctaaagctgccataatgtcctaaaatgctctgaaagaagttggtatacttcattccccagcttaccttggtaacactggactaaacagaaaatgaagaaaattcagtcaatagtaacttaaacagtactaagttagctctggacttagaaggtttggtaaagttgatgacattcagaataaggttctcagaagaaaagcagttttccaaaaataggctaaaaagcctatattaaagaaaaaatgccaagagtgaattgaatacttaagtttatctgttccctagaagactatgaacaccacaatgggagctgaaacactatatataatttagaatgcattctcccagagcaagtttataaggtttatagaatagtaatggcctttctaaattttcacttgatatttaaaattttataagtgatttattatgtcatcaaattaagccaattccattaactatatccaagtaggaataacttcagaaatgctttgaaaaaggacaatgacagacctatagacatgaaaagcaaacagcctttgcaaagctcatctccaaatctatcaattctcaattcttcttaaaataaaagactaaccacatgttcagccattccatcttattcaagtttagcattacgacagaaatctcaaagggctgcatgttgctaaacactgtcagtatttcctatatgcaccatttagactatacctcacttttttttacttcccttataatattaaaataatgaataaatatggtcctttagttaaggtcctccaccttaagtgaaatacaaaataaggtagttttattaatttcttactagaattggcttaaaatctatttaccaaataagaaatagtaaacttttaagttttacccagaaagcagaagtattccgatccactcctaatgtctacataaaatagttcatcattttagttcagtttatgacattttttggactagtattaatgctgtacctcagaaaaaaatccaatcaaccaactgcagaaagtatgcttaattgttaaccttttgaaagaggcaaaaaaattatttacgaaaacctaaaataatctgattaacaattgatgctgaaaaggtcattaaaaactgaggaataacaaatgtagttttccctgtatttcaccctattattaatggaaaacagaatggcaaaaatttcttaaatggaatatgttaaaagtacaagaaccgaaaacacttggtaacatttcctttgccttctgacagcaacattttcttaggataaaaacagtgacatgtagttttagagaatctgaaatttctacattcaagaatggaattaaaattcaatgtgaggggaaaaaagcaaaatatagctagtggtatccaaactttaaataaaacctcaaaggtaagtatggctgctgttttgttccagtcattgtttcacaaaatgttggctgtgtcataaggtatctcctgtgctttctatcaaccgagggctgctgaagtataagacattcctctgtaaaggaactgacactgaattcctttgtaaat

SEQ ID NO: 13934 - DNA, 785 bp, Homo sapiens
  misc_feature (1)...(785): n = a,t,c or g
gggaagacatcgtttggaatgtcagtgttcaacctcagcaacgccatcatgggcagcggcatcctggggctggcctatgccatggcccacacgggggtcatcttcttcctggccctgctgctgtgcattgcgcttctgtcgtcctactccatccacctcctgctgacctgtgctggtattgcagggactggttcttgaagggaaacctcctcatcatcatcgtcagtgtgttaatcatcctgcccctcgccctcatgaaacacttgggctacctggggtacaccagtggtctctctctgacctgcatgctgtttttccttgtttcggtcatctacaagaagttccaacttggctgtgctataggccacaatgaaacagcaatggagagtgaagctctcgtgggactccccagccaaggactcaacagcagctgtgaggcccagatgttcacagttgactcacagatgtcctacacagtgcccattatggcttttgcttttgtctgccaccctgaggtgctgcccatctatacggagctctgccggccctccaagcgcaggatgcaggccgtggccaacgtgtccattggggccatgttctgcatgtatgggctcacagcaacctttggatacctcaccttctacagcagtgtgaaggcggagatgctgcacatgtacagccagaaggacccgctcatcctctgtgtgcgcctggccgtgcttgctcgcgggtgaccctnaattgtgcccagtcgtggcttgttcccttatcccggccggggccct

SEQ ID NO: 13935 - DNA, 609 bp, Homo sapiens
ttacaatctgaagccggaggggccgcggtttataatgttgaatttctgtaaaataaactgtatttgcaaatccaacattgagcttctggactacgctgactccactgctgaatcctcaatggaaagggtcgactggttgcagttgaaatgacctgaaatgtagcctctgtccttgtaagtcagttgacttgccgcacatctctttgtgtacttgtacggtactggcagaaaagtcatttttcaaaagccataggcttttccttgcccttagctgtaataatgcatctgattttgatttcctccagagctgtgtttctgtccatcacctgtgtattggccctgtgtttaccactctggcccactcctcacccccttgctcccctggtcttctggagtttgtgacattgatttgaaatggatggtgttctcttgagagcaagtgagattgttagaattaagttccaactatacagttttctaacatagctataaggtccttgttgctgtttgtgataactgatagataactcattggaaacgtgcatacatttatattcagatgaaattatggtttgcactgtctattaaatatctcgattaattttcata

SEQ ID NO: 13936 - DNA, 692 bp, Homo sapiens
ttttttttttttttcaatttcaatataattttatgcaaatttgccatataccagcaatgctcaatagaaaatacagttcatgtgccacttaccaatgtatggcctctcagcccaaacacatccttttcgttctgctttgtgatactgagctggatcacatctaagctttgggtgagatccagtgtgatacccagctggaccctgtatacagttccttgctagccagcttgatgttgttcttcgctaatacagggcgatggatgaacactgtcaggtcagagcaggagggaggggctgtcttctccactgtggccagcggagggcaggagaggtaaccagcggccttcagttccactgtcctcaccttggtccggctcctgccctttccactgtccgctagctgtgagttctcggggcacccactccctcttctgaggtccagtctccacctactagttggcaaagaaagaccgtggcagaaggaagaggccgctccagcgcatcccttcgggcggacgagaagctccacttgtggctaggccatgtgccctctccgttcctcgggccagccttgcgttcccctttttgtcgctcaagggccagggtcgcaaggaaatgtgaaaaaaagcggagacaaaagagaacgaggtaaatctagatgcagagcctcgccgtcgacgcggccgcatata

SEQ ID NO: 13937 - DNA, 659 bp, Homo sapiens
ctggaatgtgatgtcttggtcctcttaaaagcagatcagccatgactgaaactcaaggcttagctggtatctatgttgtgctacattaggtgactagaagccacttcttagtgtaatcagctcctgtttccctgtgagccttagttatattttaattcagtggctttgagtcaaggccggttctaattgaggggacccagtgtgcttcagtgttaagagtggggcaatgaagagtgaaccccaatgaagagtgatcccaactttggaaactatctggtcattcatgaccttaaaaagctgccatggtggtcaaatggcatgtgtttgcacaaaaatgaccgatgtgtttaaccaaagctttgaaatgtgatgaagccaccaacataagcacttgcctaacagaaatcagtatttcttcctacttagaaggcttggggcccagggtaatgaggcaccagatgaagataagatctgcatcaaggaattaaatttccagtttgtccttggggttctttctgcttatgttttttcccccccatctggtaatagtcctcttctgaggattgaaagggagggcacaggaagtttgcggaggaaaggacccagttcccccagtcttttgccaccctttgcacctgggttgttttcggggttccttt

SEQ ID NO: 13938 - DNA, 373 bp, Homo sapiens
atgtgtgagtgtgggagagaataatgagggtataaatatcttaggggctgagcatgagtaaggtgggagctgcttttctattctatggctgcagtgaagctatgattgcactactgtgctcccagcttgggcaacagagtgagatcttgtctcccaaaagtccttgaaggattttaggaagttgttaaaagtcttgaaacgatgtttgggggcatgttagggttcttgaatgtttaattcctctaataactgcttattcaagagaagcatttctgactgggtgcagggcagtggctcatgcccataatcccagtacttttggggaggctgaggccaggagcattgctttgagcccagggactttcaagaccca

SEQ ID NO: 13939 - DNA, 99 bp, Homo sapiens
taagggtactgacggttgcagggggaggtggggatggttaatgggtacaaaaacaaataagataaaaagaatgatttaatatctgatagcacaatagag

SEQ ID NO: 13940 - DNA, 1641 bp, Homo sapiens
ggcttgcagtagtgttagactgaagataaagtaagtgctgtttgggctaacaggatctcctcttgcagtctgcagcccaggacgctgattccagcagcgccttaccgcgcagcccgaagattcactatggtgaaaatcgccttcaatacccctaccgccgtgcaaaaggaggaggcgcggcaagacgtgggaggccctcctgagccgcacggtcagaactcagatactgaccggcaaggagctccgagttgccacccagggaaaaaggagggctcctctgggagatgtatgcttactctcttaggcctttcattcatcttggcaggacttattgttggtggagcctgcatttacaagtacttcatgcccaagagcaccatttaccgtggagagatgtgcttttttgattctgaggatcctgcaaattcccttcgtggaggagagcctaacttcctgcctgtgactgaggaggctgacattcgtgaggatgacaacattgcaatcattgatgtgcctgtccccagtttctctgatagtgaccctgcagcaattattcatgactttgaaaagggaatgactgcttacctggacttgttgctggggaactgctatctgatgcccctcaatacttctattgttatgcctccaaaaaatctggtagagctctttggcaaactggcgagtggcagatatctgcctcaaacttatgtggttcgagaagacctagttgctgtggaggaaattcgtgatgttagtaaccttggcatctttatttaccaactttgcaataacagaaagtccttccgccttcgtcgcagagacctcttgctgggtttcaacaaacgtgccattgataaatgctggaagattagacacttccccaacgaatttattgttgagaccaagatctgtcaagagtaagaggcaacagatagagtgtccttggtaataagaagtcagagatttacaatatgactttaacattaaggtttatgggatactcaagatatttactcatgcatttactctattgcttatgctttaaagaaaggaaaaaaaaaaaactactaaccactgcaagctcttgtcaaatcttagtttaattggcattgcttgttttttgaaactgaaattacctgagtttcattttttctttgaatttatagggtttagatttctgaaagcagcatgaatatatcacctaacatcctgacaataaattccatccgttgttttttttgtttgtttgttttttcttttcctttaagtaagctctttattcatcttatggtgcagcaattttaaaatttgaaatattttaaattgtttttgaactttttgtgtaaaatatatcagatctcaacattgttggtttcttttgtttttcattttgtacaactttcttgaatttagaaattacatctttgcagttctgttaggtgctctgtaattaacctgacttatatgtgaacaattttcatgagacagtcatttttaactaatgcagtgattctttctcactactatctgtattgtggaatgcacaaaattgtgtaggtgctgaatgctgtaaggagtttaggttgtatgaattctacaaccctataataaattttactctatacaaaaaaaaagtcgacc

SEQ ID NO: 13941 - DNA, 992 bp, Homo sapiens
gatgctgtctgtggcaacccacacctgctgggagggttccctctctgccttcctgccgtccctcaacctggcccccaggctgtctgtgcccaacccctggatccgctcctacacactggcaggaaaagaggagtgggaggtcaatcccctttactgtgacacagtgaaacagatctacccgtacaagcaacagccagcggctcctcaatgtcatcgacatggccatcttcgacttcttgatagggaatatggaccggcaccattatgagatgttcaccaagttcggggatgatgggttccttattcaccttgacaacgccagagggttcggacgacactcccatgatgaaatctccatcctctcgcctctctcccagtgctgcatgataaaaaagaaaacacttttgcacctgcagctgctggcccaagctgactacagactcagcgatgtgatgcgagaatcactgctggaagaccagctcagccctgtcctcactgaaccccacctccttgccctggatcgaaggctccaaaccatcctaaggacagtggaggggtgcatagtggcccatggacagcagagtgtcatagtcgacggcccagtggaacagtcggccccagactctggccaggctaacttgacaagctaagggctggcagagtccagtttcagaaaatacgcctggagccagagcagtcgactcgagtgccgaccctgcgtcctcactcccacctgttactgctgggagtcaagtcagctaggaaggaagcaggacattttctcaaacagcaagtggggcccatggaactgaatctttactccttggtgcaccgcttctgtcgtgcgttgccttgctccgtttttcccaaaaagcactggcttcatcaaggccaccgacgatctcctgagtgcactgggaaatctgggtataggtcgagcttggcagccttgatcccaggagagtactaatggtaacaagtcaaataaaagg

SEQ ID NO: 13942 - DNA, 635 bp, Homo sapiens
  misc_feature (1)...(635): n = a,t,c or g
gatcagttccggacattgggttgttttagaaaattgcctgcaagtgtcagggtgataagttaaagctttgtcttttgccctcagaggagctatcccatagtgagtagaagccagagaagctgaccccaggagtccttctttccagcagcaggtcttgagctgcacttctctgtagctacaatccaggcaggaacaagccctaggtacctccggagaggagggcaagagaggaagaatgagttcagctactctagccaccaaactgattatgaattgccctgaaatctgaaaaatttcaattccaatcgtaagtttgttttgtttcattttgttttcttaaattgtatatttgaaagatggcattaactaaagatatatattcaatatagagtggaaaaaatggaatacttgcatagtatcttttacttataggtgatttatgatggggagtggggtggataggttggcagttcccccaagaagttgggaatgaagtttgtccnctgtgagttgaacctaattaggatccacaagtaatgaaagccgtatttatgttgtaggttaaggagccacactctagggacccagattgccttaggttttccaattcccggggtcntgcccttttaattatt

SEQ ID NO: 13943 - DNA, 1359 bp, Homo sapiens
gccgggccaccttgaatatatatatatagccaagaatagttggctatactttcatctttgcctagttctaagtaattgattggtttcaggatccaataaactctacaggtaaatccactaaggtaatggtctataccggtggttcctgaacttgagtgtggagcagaattacctggaaggcttcttaaaacacagatttctgtccccacctcccaggatttgattcaggcggcctgctgtggagcctgagaatgtacatttctaacaagttaccaggtactacagatgcttctgttctggagactgtgctgagaaccactatgctatatctttccagggacagtaaggatcccactaaaaagacaagaattcgatttttatcagtttactaaatcaacatcttatatttctatactaaacactagccactacttgaggtttattactgttgtgattatgtttataaaacagggacatcttgcatacccctaatggtgtgaataaaatcaactgtgtcagtacctttgagcacttcataacttaaaattctaaaaaattgagatttggacctacagtttgctatttaacagaccaggtctggtcttgacagtaaagccaccatcaaaagctgcattaagaacctcatccaggcagcttgctgtgacaaaacttaaatcctgtcgtacgttgcctgggattccctcaaggtctttttcatttctccgaggaataatgacttgcttcagtcccgctctgtgtgccgccagcactttgtctttaattccacccactggaagaacaagacctctcagtgtaatttctccagtcatggctacatctgaacgtaccagccgcccactaaaaagtgaggcgagacaggttactatggtaactccagcagatggtccatcttttgtgacagctccagctgggaagtgcagatggatgtctgtgttgtcaagaagatcaaaacttccaaaagcattggtcagctggtacttctttgcgttgctgcggagcccagctgatagcgaggtgggcggactccttcatcacgtccccgagctggccggtcagagttaactggccctcgccatccattcgactcgcctccacgaacatgatttctccacctaagggagtccaagccaaacctattgctactcctggctgactcaaacgctgagataccttgaaagaagaagaatgatcagagttgggttggcaaatgctaaaggtgactgataccacacaatcctgcaagagtcggctgactccacagaagacttcagccacttacctcaaagtccttgttacctaacatgattctgcgtcacattcagcacttactctctggct

SEQ ID NO: 13944 - DNA, 460 bp, Homo sapiens
gcggatggcaagagacctgatcggaccggccctgccgcccggcttcaaggcccgcggaacagcggaggacgaagagcgggacccgagccctgttgcaggaccagctctgccccctaattataaaagcagtagttcagattcatcagacagcgatgaagacagtagttctttgtacgaagaaggaaatcaagaatctgaagaagatgacagtggtccaactgcaagaaaacagaggaaaaatcaggatgatgacgatgatgatgatgatgggttttttggaccagcccttcctcctggatttaaaaagcaggatgattctcctccaaggcccataataggtcctgcattgccacctggtttcattaaatctacacagaaaagtgacaagggcagagatgatccaggacaacaggaaacagacagcagtgaagaatgaggatattattggaccaatgcctgc

SEQ ID NO: 13945 - DNA, 442 bp, Homo sapiens
  misc_feature (1)...(442): n = a,t,c or g
gaaaacactgttctccaaagctaggttactatagtatagttaatatattttcttcctcaatccatttagtgtggtttcctcattcatttgtaatacagctatgcttatttattagtgcttatatttcattttggattctgcacacatgttgattgattttgattatttattgggagaacgtgaaatattactgattataagagtgaaagctgttatacaaaaaggcattctacttggtttaacaagtccaaaagagaattcctgattttcttccccaaacctgctttttcacctaaccttctttatctcagtaagtaacactctcccaaagcaacatgcagcccattaataagttctgtttgttctattccaaaatgcattcaaagtaggattggcttgttggacatctcaggnggctacagctcaactctagggnaggctg

SEQ ID NO: 13946 - DNA, 396 bp, Homo sapiens
ggtggactgtccacagtgttcatgtgctggagtcagggacggccgcacctgcctccgccggctccagtgtgcggggagcctctgcctgagtgtgcaccaggcccatgtttattgaccacagtctgagggggggggaaggggactgcggtggacaccagaggaagctgtttcctgttgtgatgttggacctgtagtaggacatggtgatttgttaatttccatgggaagccatgatggcctagcatggagggaatctgttcccaggccctgcctggaagttgagggaaagtttagacatctgcagagaggcaggcagcccagcccaggggacccgttcctcttgaaccagtcattgctgtggcaaatgtgtgtatgaaaatgtggggggggtgaggg

SEQ ID NO: 13947 - DNA, 416 bp, Homo sapiens
  misc_feature (1)...(416): n = a,t,c or g
ggtgtcacagacgtgcatccgcagccttggaaaaatttcactttcctaattacctgagacctttctctagatattcggggttcaaatagggatgaataagaagaggcagagtgggaacaatgcagtcttgggctaaggaggcttcttggaagctctgctaaagtggggtcttgcccttagctgcagtctagagccccctgggaagctttcaccagcctgggccccactctagatgnnnnnnnnnnnnnnnnnnnnnnnnnnnnnnnnnaagtggcacttttacggactcttcaggtgattctagtttatacctggggttaagaaccaccacattctagcctcaccatttgctggtttcagaagaaaaannnnnaaanaaaaagnatntttaattaaggggcccgaaagctttttcc

SEQ ID NO: 13948 - DNA, 860 bp, Homo sapiens
  misc_feature (1)...(860): n = a,t,c or g
cattgacttgtccgatcatagtcactgaattagttgaaaaggcaagtctaggaccagtcaagtcttctggatcccaatccccacccacacacccaaatattacacagataggtgcaggcatggcggagaggggcccagggggaattaagggctttgtaaccagcagtgaattgccaaggaatcccagggaaccataaaaatgtcagtgagtgaaaccgggttttgctaaaagagtatgtgtttttcaaaaaagattccaatttctaatgggcattagtattccaaggcaggctggaatcccgggctgggaaaaagggtacaaatgatgattgctcattagcaaatagaatacagatgttcggttcattttgcctgagtgcaccagcacctcagggagccaccagcatagcgagccaggcccggcagcagtgctgcaggctcagcattggggagggctcccacaaacaggagggaagtgggtcactgcaaagctggcggggactggactttgttccttccctttggtagtttgttgggacccatgggtgggcatgggaagctgacatttccaaaggaactaccaagactattttaaatataatttttaattgtgcttttaaagaagatgtaattcttcaccacctccctatgaactagggtgcatggtcccctttggagaggaaactgaagctcagagaagtgaagtgggttgcccaaaagcacacagcaagtgaatgaaatggcgaattagaaccagatgtgtttggtccangactctgatcttggactcctcntactacantangcgtggcaaagtgaagacacattagaacatttgaggcagcgtggtggccatcctt

SEQ ID NO: 13949 - DNA, 363 bp, Homo sapiens
ctggagcggcgcagccggagtggggccgtgaggagaataaaggcagccccgttgatgactgaaaatgacaaagcatccacctaacagacgaggaatcagctttgaagtgggagcccagttggaagcccgggaccgtttaaaaaactggtatccagctcacatagaagacattgactacgaggaaggaaaagtactcatccatttcaagcgttgggaaccatcgttatgatgagtggttctgctgggacagtccttatttacgccctttaggaggaaaatacagcttgagggaaaggagggcttgcattgaaggaggatggatcttctgaatttcaaataaatgaagcaggtccttgcttgctg

SEQ ID NO: 13950 - DNA, 1474 bp, Homo sapiens
  misc_feature (1)...(1474): n = a,t,c or g
ggcagatccctaaccatgagcaccagccaaccaggggcctgcccatgccagggagctgcaagccgccccgccattctctacgcacttctgagctccagcctcaaggctgtcccccgaccccgtagccgctgcctatgtaggcagcaccggcccgtccagctatgtgcacctcatcgcacctgccgggaggccttggatgttctggccaagacagtggccttcctcaggaacctgccatccttctggcagctgcctccccagggaccagcgggcggctgctgcagggttgctggggccccctcttcctgcttgggttggcccaagatgctgtgacctttgaggtggctgaggccccggtgcccagcatactcaagaagattctgctggaggagcccagcagcagtggaggcagtggccaactgccagacagaccccagccctccctggctgcggtgcagtggcttcaatgctgtctggagtccttctggagcctggagcttagccccaaggaatatgcctgcctgaaagggaccatcctcttcaaccccgataaagaaactgaagcccnnnnnnnnnnnnnnnnnnnnnnnnnnnnnnnnnnnnnnnnnnnnnnnnnnnnnnnnnnnnnnnnnnaagcctaattcttaaccattactccacactgcctcttcataaatggatggatgaatacattgaaaattgataaataaattacctcctctaaaggaggaggtagtagtgggacctcaaaggccgagcaaaggaggcagaggggtgtctctgatggcccagatcttgggccagtcttgtcctttggtggctgggagtagggtgctcaccagccctcttctccctctctgcccacagatgtgccaggcctccaagccgcctcccacattgggcacctgcagcaggaggctcactgggtgctgtgtgaagtcctggaaccctggtgcccagcagcccaaggccgcctgacccgtgtcctcctcacggcctccaccctcaagtccattccgaccagcctgcttggggacctcttctttcgccctatcattggagatgttgacatcgctggccttcttggggacatgcttttgctcaggtgacctgttccagcccaggcagagatcaggtgggcagaggctggcagtgctgattcagcctggccatccccagaggtgacccaatgctcctggaggggcaagcctgtatagacagcacttggctccttaggaacagctcttcactcagccacaccccacattggacttccttggtttggacacagtgctccagctgcctgggaggcttttggtggtccccacagcctctgggccaagactcctgtcccttcttgggatgagaatgaaagcttaggctgcttattggaccagaagtcctatcgactttatacagaactgaattaagttattgatttttgtaataaaaggtatgaaacactaaaaaaaaa

SEQ ID NO: 13951 - DNA, 637 bp, Homo sapiens
  misc_feature (1)...(637): n = a,t,c or g
gttaagcagggattcggggtggacgtgggggtgggccgaagcgaagccggaaacaggaaactacaactcccacaaggcctagggccacgtcccgccgtcctcggctgctgagcctgatgggacaagtagttttgcgaacggcttaacctacagattgaagaggtcggaagctctgaggcccggggcttccggaggtcgcggagatggaattggagcagagagaagggaccatggcagccgtgggctttgaggagttctcagcgccgccaggctcagagttggcgttgcctcccctatttggtggccacatcctggagagcgagctggagacggaagtggagtttgtgtcaggtggtctgggcggctcagggctccgggagcgagatgaagaggaagaggcagcccgggggtcggcggcggcgccagcgggaaattaaaatcggcagaaaagtaccaggcactaggtcggccgctgccgggaagatcgagcaggttaaccaaccgggtcctgaacaaggctccatcaaggttgcaagaaggataactccggaggcttgcaagcaggaaccggaagtttcctccattgaaaattgcttggacttcctacgggggatnactacccgggcccaanccagtt

SEQ ID NO: 13952 - DNA, 1904 bp, Homo sapiens
cacgtcgcgagaagcagcggcccggggcgactgagcggacaaacggaagtgtcaggttacggtctgagacatcaccgccaagctgggcatcggggagatggccgagactgaccccaagaccgtgcaggacctcacctcggtggtgcagacactcctgcagcagatgcaagataaatttcagaccatgtctgaccagatcattgggagaattgatgatatgagtagtcgcattgatgatctggaaaagaatatcgcggacctcatgacacaggctggggtggaagaactggaaagtgaaaacaagatacctgccacgcaaaagagttgaaggttgctaataatttatactggaatctggcatttttccaagccaagagaagatcgaatggctttttgcagctaactactatgtgtagacaggttttatattataaagtatgcattcttatcacctagtatatagttagtttgtagagtgatttccccccagtttcttgaacatggtatcttcacatcttggaccttggtcagttgtgctattcattattaaacactaaaactttggcggttcttgcataacattgtcagattttttagtgtatttctgtgaagtcattttttttcttgtcattccttttgtagtagttgctgtttggataaaagttgatgtgtgattttttattaaacaaatagtaaacccttcaattatagttagtcttggtgaagtaagatgtttgtagactttagagttctttaattcttggcacaacgtgactgttgagctaacaccaaatagtgtgttggcaatacttttcaaatggctgaaaacacctaaaaattgttcattcagaaatatctgtcactgctctgttgccaaaactcagaatagaacttagacgtatgtctgagtccctgagatcacatgctaaagtcgatgaaaagtaaccactgccactgtcttgtgtcagaacttttacagtacagaaaataacagaatagccttctgtaatgaggcgtttgttagagttttgcatgagattctaatacttcagtagggaccctacctacgtggttcatctacaatggttaccataaaaaatctggcaggattttaaaactcaatcagtctttcctttgagctagtgacttgaaaagaaagagagaaggaaaagagaccatattaagtccatgccagttgcttggctagaatatgatcaacgacttgtagtagactcaagtttttaaaaaacactattttacttaaactgtttcttatctaaattcttgcagagtgtcaatgttatcattgattatagaagacagggataatacctttatctctggccactcaaaaatgcagtgccaggagtgctaaacctagaggccaatactgatgacctggaaggtgatccatatgattgtcaccacaaagtgcttttacacaaaaacttgaaaatttgaaaaacatgatttttttaagtttctcatctcaccagtcttggtgtttatattgcaaatctatcaaagtaagaaataatttgtgctgtatacaaattacatggggaacataaaggagtgagatccttctgtgataaaatgaattcaccactctggttacccaactacagaacctcctttgatcaggccagtaggttgtgatgcaggctggagcccccgaatgccccacacacactgcagcattgaccagaccatccgaaacctgcgtccctggtgatgttctcaagcctcggaagtggcaaatggaaatgatatggccggttgcggttgtaggagagttgtgacttaggcaggagtcgacctcctcaagtaatggaacgatttcaaaggcaggctgccctgaccaaaaatatctgccatgaataaaggtgcctgaaatcctgcta

SEQ ID NO: 13953 - DNA, 1061 bp, Homo sapiens
cagtctcgtaactcgtatgtggaggctgagatccacgtgccaaccctggaagaattggggacacagctggaggagagtggggcaactttccacacttacctgaaccatctcatccagggcctccagaaagaagccaaggagaagttcaaaggatgggtcacgtgctccagcacggaccaatacagatcttgctttcaaaaaggtgggcgacgggaacccgctgaagctgtggaaggcttctgtggaggtggaagcacccccctcagtggtcctgaaccgcgtgctgagagagcgccacctgtgggacgaggactttgtgcagtggaaggttgtggaaactctagacaggcaaacagagatctaccagtatgtgctgaacagcatggctccccatccttccagagactttgtggttctcaggacctggaaaactgatttgcccaaaggaatgtgtaccctggtgtccctctccgtggagcatgaggaagcccagcttcctgggtggtgtgcgagcagtggtgatggactcgcagtacttgatagaaccgtgtggctctggcaagtcaagactgactcacatctgcaggatagacctgaaaggtcactccccagaatggtacagcaaaggctttggacatctgtgtgcagcagaagttgccaggattagaaactctttccagcccgtcattgctgagggcccagaaactaaaatctgagttttgcccagtgtgacatcaaactcagggaagaggaagctaaagtgacgagtgtggcagagagtgtgcatgtgagaaagcgagagaaagaggaactgaaggacgcggttaatgcctaaaaatggaaacgttaagaagttggaatgttggagatgcaagaatttccaagaactttcttagccttcctggagatggctacatccctactaatataattttaaaatgagaactttatatatattacttaaaattaaatggactattccttgtgcattgcctaatttgctatttaaaggcttctaagaagcgtatacctaactgtaaataaatgtatgtatagcataa

SEQ ID NO: 13954 - DNA, 1158 bp, Homo sapiens
tttttttttgagaactgttaattgattactttatttcatataaaagttacattgaaagaagaggttgaaaagtcaagtatacttgatttgcacacacttgccaagtctcacaggattcaaccacttggataattgttttattgataacaggatatacatattaaaagcctcacactgaagcccacacgcatgtccaacccagacaacaatgtgcaaatgaatatgcagaacaatctcggaaactggcgtctccaggatcacccacactttgtccctctggctgtgacgcagctcttcccccaacggcgcacacgcttctgcggtgaccaagtccacttccaaaccccctgcaggtttgctcgcttggctaggacggtggctcaggtaggtccctttgtggttttgcatcagcagtggtagaagccctgattcggatggggtacagagtaattaaaaacaaaaaacagttcacagatgaacagaaaggcaaaacaattcccaggagggagacgccaacttctcttagtgtggagggcaagcataaaggaagaccctcagactttgtcacagattgcttcttgatgcgtccggcaaaaaatgtacaaaccaggcaagtttaaggcaaggccccacgaggggagctgttggctttctggcataattttaagctccgcaccaaggatcctattttatcacctgtgccgtgggtggagaagaaaacgtaaaagctaaccaaaaactccaacaagagggcgccatcctggccattcccgactggagcgctgcctgcggtggcacagtcgcccctgccaggggctggctgcctcatggtcccctccccttcccagaggtgcccaatggctgggccctgcctctccagtaaggatgcctcccctgccccacacacagcatcgggctgccccaagtatcaagtcaccgagccgcagctctgctcttacctaggtgccatttatacactgctaatttggctggaacaaaaaaaaaaaaatcagttccaaggccctcaagcactcaagatttctttaaaaaatgaaagcaggagggcaacgaagggccgcacaggaacggctgttctttggatcgagatgtcctccaacagcaatacattcatagtaaccacgggcaggaccccgcggc

SEQ ID NO: 13955 - DNA, 1842 bp, Homo sapiens
gtagctgcgcgcgggtggcggcctggggcggaaaactgcgacgggggctcgctgtcagccgacacgtgtgcggagtcccggccccttggcagcggcagtggcggcgcggcctggcaggagcaggagcggcctggcaccacagccgcgtcagtgttgcggcgcgggatggcagttttacagtctccgcacagaaaaatgttgaacatggaataatatatattgggaaaccgtctcttcgtaagcagcgcttcatgcagttttcttcactcgaacatgaaggagaatattatatgacaccacgagacttcctcttctcagtgatgtttgagcaaatggaacgtaaaacttcagtcaagaagctgacaaaaaaggacatcgaggatacactgtcagggatccaaacagctggctgtggatcaacttttttcagagaccttggcgataaagggctaatttcatataccgagtatcttttcttgcttacaatcctcactaaaccccattctggatttcatgttgcttttaaaatgctggatacagatggtaatgagatgattgaaaaaagggaattttttaagctgcagaagatcataagtaaacaagatgacttgatgacagtgaaaactaatgaaactggatatcaggaagcaatagtgaaagaacctgaaattaacacaactcttcagatgcgtttctttggaaaaagaggacaaagaaaacttcattataaagaatttcgaagatttatggaaaatttacaaacagagattcaagaaatggaattccttcagttttctaaaggtttgagtttcatgagaaaagaagactttgcagagtggctactttttttcactaacactgaaaataaagatatttattggaaaaatgtgagagagaagttgtcagcaggagagagcattagtttggatgaattcaagtcattttgccattttacaacccacttggaagactttgctattgccatgcagatgttcagtttagctcatcgtcctgtcagactagcggagtttaagagagctgtgaaagtagcaacaggacaagaactctcaaacaatattttggacactgtctttaagatctttgatttggatggtgatgaatgtcttagtcatgaagagtttcttggggtgttaaaaaacagaatgcatcgaggtttagtgggtaccacaacatcagagtatacaagaatactggaagtgtgtgaagaaagaaagcattaaaggagtaaaagaagtctggaaacaagctggaaaaggtcttttttaataaaagatataatagtatggcaattatattgttccaaatgtcaaaatttgtgattttttagaagtacttgctatttatcttcttaagtcttcattgatattctgtgtgaaataagcatgtcttgtacttgctttctgattcataattttatgaaagaacttagtagaaagaaaagtaagtataaaaatagatattggattctgtcagaaggcctagatttgaaataatgttttgtacttcggtaagatggaaaacttagtgattccactgatttcttagacactctaatatgatatgctttctggaaggataaaacgaaatacatatgggaaaaagtaccttgagaccaaggcccagcatcaattccagacatcttcatgttcctaataggctaaatgaagttaaaaacttatttcagatttttctcatctgtaccttatatctcataaatttattgtatattttatgtcagtagcttagctgtttattgtctttaaaataacatgtaaacttcaatgttctatctggaagcagaataaaatatttacatagata

SEQ ID NO: 13956 - DNA, 552 bp, Homo sapiens
  misc_feature (1)...(552): n = a,t,c or g
ggatagatacactaaaagccaagacttcaccactacatgtaaaaaagttacacttgtaccccataaatttatacaaataataaaagattccttaaaccacagcatacatagttacgtttactgtttcaagtgcaaatactagtcataattttagtctcacttcagacacttgaaatatgcacgtttgtaaagtggtttctagagtgttactttatgttacttgctttggtggcaaagttggcagtcagacctaggttgggtgttccaaatggaagactccatgttaggtaaaaggtaaattaccactgatggttatattataggaatctttgttacgtagtgtttagaataactcagtttttcttactgtttcacactacaacagtcaacacagaaggtttctgtgacactaaaataagtggagatttctccccaccagcaagcaggcagtggacatcagttgggtgcctccaatccaattcggatgctctacctggagataaggcagatcccacaggtcgaangctcattcccaaaacagcctacatttcc

SEQ ID NO: 13957 - DNA, 873 bp, Homo sapiens
gcgggtgctgctagcggaggcgccatattggaggggacaaaactccggcgacagagttgacacaaataaacccctggacccccttgttccctcagctctaagggccgcgatgttgtacctagaagactatctggaaatgattgagcagcttcctatggatctgcgggaccgcttcacggaaatgcgcgagatggacctgcaggtgcagaatgcaatggatcaactagaacaaagagtcagtgaattctttatgaatgcaaagaaaaataaacctgagtggagggaagagcaaatggcatccatcaaaaaagactactataaagctttggaagatgcagatgagaaggttcagttggcaaaccagatatatgacttggtagatcgacacttgagaaagcctggatcaggaactggctaagtttaaaatggagctggaagctgataatgctggaattacagaaatattagagaggcgatctttggaattagacactccttcacagccagtgaacaatcaccatgctcattcacatactccagtggaaaaaaggaaatataatccaacttctcaccatacgacaacagatcatattcctgaaaagaaatttaaatctgaagctcttctatccacccttacgtcagatgcctcttaagggaaaatacactaggttgtcgaaataataattgccacagcctcttctaacaatgcctacaatgtgaattcctcccaacctctggggatcctataacattggctcgttatcttcaggaactggtgcaggggcaattaccatggcagctgctcaagcagttcaggctacagctcagatgaaggagggacgaagaacatcaagtttaaaagccagttatgaa

SEQ ID NO: 13958 - DNA, 434 bp, Homo sapiens
  misc_feature (1)...(434): n = a,t,c or g
gccaatacataacagaaaacaaagctgctctgattgaagacagacaacagacctgcccagcctcaagttcccctttctttcccttccccaagatgttccctaagagggctcctcagaatccccaagacttcaaagaatgcagtttaacaccaactcatttgatggtaccaaatggataagcagaagattgtttggttacattttgtggagcagacactgagatggaatttggggtacaacatgagaaagaagcggggatcaggaagaactgagcagaagaccaattaatatgataccgtatgatcaggccgttcaaaactttggccaacctagcagggaattctggaatgagtaatacccgcatagatgtctcatgttgggccaaactggtcagactttatattnctggcatacttgggcaccagatgtggctg

SEQ ID NO: 13959 - DNA, 414 bp, Homo sapiens
ggttaactaataggaacaataagtcattcatttatagatttactaaatttgtaagtttctcatatgtatcagggttatacaaaccacacctaagtggtctgctaacttctgaagcactcccagccactttaagaaacattttatgcaagtcaatgtgttgatcgtagatgatgcttacctgcacatttagtcacttggagtcaactattagcaatttttttcaactgaaatatctgtactaaaaaaatgcgtttggcctgagatctaagttagtgtacggcacaaggggggaactcaatacatatttgttgattgaaagaatacataaaagaagtctggagttagtgatcttttcccggtctggttggggagatatcatgcaggtagccaggattgtgctggattgtgacatgg

SEQ ID NO: 13960 - DNA, 1938 bp, Homo sapiens
gaacaaccccctctttgtcaacctcaataatgagctcactgtggaggagcaggtggagatccgcagtggcttcctggcagctcgggcacagctccccgtcatggtcattgttaccccccaagaccgcaaaaactctgtgtggacacaggatggaccctcagcccagatcctgcagcagcttgtggtcctggcagctgaagccctgcccatgttagagaagcagctcatggatccccggggacctggggacatcaggacagtgttccggccgcccttggacatttacgacgtgctgattcgcctgtctcctcgccatatcccgcggcaccgccaggcttgtggactcgccagctgcctccttctgccggggcctgctcagccagccggggccctcatccctgatgcccgtgctgggctatgatcctcctcagctctatctgacgcagctcagggaggcctttggggatctggcccttttcttctatgaccagcatggtggagaggtgattggtgtcctctggaagcccaccagcttccagccgcagcccttcaaggcctccagcacaaaggggcgcatggtgatgtctcgaggtggggagctagtaatggtgcccaatgttgaagcaatcctggaggactttgctgtgctgggtgaaggcctggtgcagactgtggaggcccgaagtgagaggtggactgtgtgatcccagctctggagcaagctgtagacggacagcaggacattggacctctagagcaagatgtcagtaggatgacctccaccctccttggacatgaatcctccatggagggcctgctggctgaacatgctgaatcatctccaacaaaacccagccccaactttctctctgatgctccagcattggggcaggggcatggtggcccatgtagtctcctgggcctcaccatcccagaagaggagtgggagccagctcagagaaggaactgaacccaggagatccatccacctattagccctgggcctggacctccctgcgatttcccactcctttcttagtcttcttccagaaacagagaaggggatgtgtgcctgggagaggctctgtctccttcctgctgccaggacctgtgcctagacttagcatgcccttcactgcagtgtcaggcctttagatgggacccagcgaaaatgtggcccttctgagtcacatcaccgacactgagcagtggaaaggggctatatgtgtatgaatagaccacattgaaggagcacaatgccctcctgtgttgatgccacttcccagggtggagacagtggaaaagaaccgaggacaggaaaggattgggtaggtgaaggggtcaggggactggtagtcacccaatcttggagaggtgcaaaaagcactgggggctacccgttagctgcatctgccctggctgtttgcccgttcatgtcacaaactgccactactatgtacctgcagtggggttgcagagatgggggagactcaagtcttactccccaggagctcccagggcccaaggaggagaatgctgcctcctttcagtctggtctacacccactttctggtagcctctctgcttcctgtaattctggctgtttttccagactcagctcaaatagtgcccctccttaagcccatccctcgcccccagcctgaggtgatctttccctcctctgaactattagagcagttactgtctgttcagttcgtttggcaggcacacacagtggcataaattctattgttttgaactctgatttaaaattaaattgcagctgggcgtggtggcttatgcttgtaatcccaacacttagggagtcaggagaatcacttgagctcaggagttctagaccaatctggggcaacagagagaccccatctctttaaataaaaagttaaattgcttaatttcccccgtaaaaaaaaaaaa

SEQ ID NO: 13961 - DNA, 489 bp, Homo sapiens
ttttggcttccaataaaaaataattcaactttattagtatgaaatattttgagataattagtgacccaaatgcatgattctccaatatgaaaggtgttcagcataagcatacaatcatttagtaaaactgctctttatgagacccccagaaaagctggaggcacttcctctttttggtggagagagaagacactacttaactggccatttccttgctggagtttattccgattcccttttgtctgattcttcctcctcaaactcgactaaaggagtgtgtctgttggcctgagcaccttctctgtagaacactttctttactgtgccatcctttggagactttatggtatgctccatcttcatggcgatcataaccatgagggaatctcccgctttcactttgtctccagctttgacaaacaccttttcaatggttccagtcataggagctaaggggccgccctgagtttcttgtgagctcacagaaga

SEQ ID NO: 13962 - DNA, 806 bp, Homo sapiens
ggctggagcggctctgggctccggaatcgcccgcagccggtgctgcgggacccactgcggatatggctgtcttggctggatccctgttgggccccacgagtaggtcggcagcgttgctgggtggcaggtggctccagccccgggcctggctggggttcccagacgcctggggcctccccaccccgcagcaggcccggggcaaggctcgcgggaatgagtatcagccgagcaacatcaaacgcaagaacaagcacggctgggtccggcgcctgagcacgccggccggcgtgcaggtcatccttcgccgaatgctcaagggccgcaagtcgctgagcccattgaggatcgcgacgcagtcggcgggaccctcatggaagcatcgccctcgcctcggaccttgcctggcgctatttttgcagggagctggggagcaggaacgcctcggacctgagtgctctccatattgtggggttgaagtctggatgggagcttgccaagtccctttttaggctttttaattaggaagcatttcgaacctgcgcaacagaccaaagaacagtacaaagaacatccgtgtacccagtaccctgactaccgactacctacaacccgtccctgccccatcctgagttcttttgaagctgatctcaggcatcggattatttcttctgtaaatatttcagaatgtatctctccaagatgagagctcattaaaagataattacaaagcttatcacatccaaaagaattatcaataattttgaaatattattaaacgtgtaataaatgttcaaagttccacttgc

SEQ ID NO: 13963 - DNA, 389 bp, Homo sapiens
gtcctttttgaggagctgctgctcttcagcaagcctcgccatgggcccacaggggttgacacatttgcctacaagcgctccttcaagatggcagaccttggtctcactgagtgctgtgggaacagcaacctgcgcttcgagatctggttccgccgccgcaaggccagggacacctttgtgctgcaggcctccagcctggctatcaagcaggcctggacagctgacatctcccacctgctttggaggcaggccgtccacaacaaggaggtgcgcatggctgagatggtgtccatgggtgtggggaacaaggccttccgagacattgctcccagcgaggaagccatcaacgaccgcaccgtcaactatgtcctgaagtgccgagaagttcg

SEQ ID NO: 13964 - DNA, 1069 bp, Homo sapiens
gggaaaatggcgcctcacgacccgggtagtcttacgaccctggtgccctgggctgccgccctgctcctcgctctgggcgtggaaagggctctggcgctacccgaggtacagaagcaagtttgaggtcgggctgaagcagggtcgctggccagccagtgcgtcgcgctcgccagcggctgcccccttctcctcggcgggcctgcggttctgatttcgtccctgacgcttcccgaccctgcccagccagatatgcacccaatgtccagggagcgtgcaaaatttgtcaaaagtggccttttattgtaaaacgacacgagagctaatgcttgcatgccccgttgctgcctgaatcagaagggcaccatcttggggctggatctccagaactgttctctggaggaccctggtccaaactttcatcaggcacataccactgtcatcatagacctgcaagcaaaccccctcaaaggtgacttggccaacaccttccgtggctttactcagctccagactctgatactgccacaacatgtcaactgtcctggaggaattaatgcctggaatactatcacctcttatatagacaaccaaatctgtcaagggcaaaagaacctttgcaataacactggggacccagaaatgtgtcctgagaatggatcttgtgtacctgatggtccaggtcttttgcagtgtgtttgtgctgatggtttccatggatacaagtgtatgcgccagggctcgttctcactgcttatgttcttcgggattctgggatccaccactctatccgtctccattctgctttgggcgacccagcgccgaaaagccaagacttcatgaactacataggtcttaccattgacctaagatcaatctgaactatcttagcccagtcagggagctctgcttcctagaaaggcatctttcgccagtggattcgcctcaaggttgaggccgccattggaagatgaaaaattgcactcccttggtgtagacaaataccagttcccattggtgttgttgcctataataaacacttttttctttttaaaaaaaaaaaaaaaagtcg

SEQ ID NO: 13965 - DNA, 799 bp, Homo sapiens
ttttttgttcattaagatgtatggcttttcttgtggttgttattacaatccataaataaagtctttactgtttgactgaaaaaggtttttacaaaactgcacttccaaaattaacatttttattaaatcaagttaaaaaaaatgttcagtgtagaaaagtcaacaagggttttaacaaaaccaaaatatacctttttatacaatatatgtatatattagcagcaaactacttctgagattctctttcttttatgttcttctagttattttaaagaaagcataaacaatgtatattagtatggaatgtcagcaaatccactcttagtcctttattctgtgatttgggccttctacaaaatactttgtgattctcactaatgaatattaagaacatacccaattttaactaaaaagtagtgaaacagtggttggtagaatctttctcactatatcacggtcacacattatatttgagaataacaaatgagcaccatataaacaggtaattgtgtgtgtgtaaactcaatttttaaggtgtaatagtagccaactagataacttagcactgtgactatcactttttaaaaatttggtgatatacaaaattttaaacaaatcagataaacacttcaaccccctattgcttgtccatttaaaaaatccttaatagaaattctatatataacctgacaaactgcatacacacatatgtgtatatatacacacaaaagtatatgtatatatacatctttagctttgaataaatttctaaactgagatgaagccaaacctctcattt

SEQ ID NO: 13966 - DNA, 2356 bp, Homo sapiens
ggcgacaatgctgagattgattgggaagatttaaggaagcacacagtctactacggtggttttccatggaagtcacagagtcatcatctggctctggaatattctggcctctgacttcacaccggatgagagagctatgtttctgaagttcgtgaccagctgctccagacccccgctcctgggattcgcctacctcaagcctccattctccatccgctgcgtggaggtgtcggacgatcaggacaccggggacactctgggcagcgtcctccggggcttcttcacacatgccaagcgggcagccaggcggccgcctgcccacctcctccacctgcttcaacctgctcaagctgcccaactacagcaagaagagcgtcctccgcgaggaagctgctacgccatcagcatgaacacgggctttgaactctcctagctcctgtcccgagccctgcctcccagggctcctgggctgccagggaccttcagctcccagaggcagtgtggtcctgggaatgtgaccaacatgccaggtgacattggcccctagaccctctctatagccatgagactccttgtggcctcaagaaatttagacgcccacgacagcactacacagcatctccaggtgatcccaaggcacagggctgcagaaaataaacctccagattccaccaacacggggtccattcttcctggtgatggcagaggggcttcttttagctagtttgatcttttgggagtctgtctttccttagccgtctgagtgagctgtgtatgaacaagtcccaggagttccaagagtctagagtggtttttgcagcatgggttgagtgtacaaagcctactgtgcgtgagatcctctccttccgtttctgaaatctcttactcaggtaaggcctcgccaagcctctatgcaccccacaaagtttctgcctccatgccgtccacagcgcctcttcccagacagccaggcccatctgctgcccagggaagcgcaggcgccttgctagggacgctatggacaccggtgagtccaaggccgctgctcctgccttgaagccacgcgctccacgccgcggccctcccattttctgcgtcctcagcggggctgagctgccagagagccttcccggacctattcccgtcctatgcattcacattggcatcctggtttgggggaagaaaaacaacggcccttagcagcagccccgtttccagaatgtgctgcctgttccccaaagcctgcttgtcccgcggaggacggctgcctttgaccctgcttatttgtctcactggttatctaatgaggaacaaacactaacctaaggtacacatcccatctgggcggtggcttcactcctgagtctgcaaaatcccaggaaacttgggtcttgctgcccatccttcctcagcacagggaacccggaagcccgttgcactgacagaggctcacaccctctgggttttttgttttttttttaaacttcatttctcttccaacccattgtgttcctctgccctcattctttacctttgttgtaagaactttagctccagggaactgaggcagaggccctgtttgtggtctgtgttgacagccacccaccctctcccacctcatgctcctgcacctgcaccaccaaggttgatgccggattcgaagccaggaaggcccagtccctcctctgctctcctcaaagacgcaaaacattttccaacaagagctgtcacagtggcagcaaagcaggggccacccgtctccacagtccttcagagtttcagctgcatcctggtgtcccacccaggtcgagcccccaggcttctggaaaacaatgtgtgctctactttgatggaaacatggcaaggaatttaaagacaggaatgtattaatattattgaaggtgtgttcgtaacctctgattctgtggacttgccactttctccaaacgctcggttcctttgaagatttcttctgaacgtgtgtgcgcacgctgggcgggttcgtgcatacatgcggggaccccagactgtcagcacagggaagatggatcccatcctaatttttatcacctgaaggttggaaccagtgagggactgggagagagtgatttataagcaccaatatcaacttcatgtggatttttgacgaggggtagtttgtaatttcatttaaattcttttcagcagctggaaatattgcactatctgaaacactgaatctccttttgtaactggtgttcactgacaccttgatggctcttgatggctctaaaaagttgtaggattttttgtttttgtagctaacttatggattgagatgtgatcaaaggctttattaaatttgtacttcagcata

SEQ ID NO: 13967 - DNA, 442 bp, Homo sapiens
tttcggctttgacattttattgagaaacatttttattttaaatgatagtacaaaaactgtatatataatatagatctgtataagtatatatacatacaaatgctcatacacacatatacacacaaacttgctcatcagaataaaaccctaaataaagaagtatatttaagtttttctaaaaatacgctgtacataaagctgtcagacaacctgaaaaactgaggacattgtgagaacagtctgggcgcatccccccacacacacacctgccgcagtacacacacaaatggccttgacagaaggagagcacatggggcaaggtcagggagagagctgctaccatcattgttgctagaacaagatgtctaaagccaactagaaagcacaggatatagaaggtgacctagattaactttcagaaacaaaccacctcagaataaac

SEQ ID NO: 13968 - DNA, 1163 bp, Homo sapiens
tcatttcttggggcctgaaccccagtggtccaaagtattgcttgtgaaatttaaaaaatgtgaatatgatgtggggatgggcctcttctacattaccttggcccagggggatcagctggctgggaggattagtgagcacctctgtattttgaggtctgagtcttctggagctgtgtagttaatcttcggtttctgataacccctgggtccatctggccatcagcctcagcagtgagcaaagcaataccatactcatttctatgttcctgttccttcctctgctcctcctttggagaagcaataattcatgggggatgatacagtagcactttacaaatggctccatgtcattcatcccaggggccataatctcttgcaccacctattcttacttcctgttcagctcctttacagcttttattttcaactgcttcccaacttggtggggcctcctttaaggatgagccaatagtaagaatgtggctgtaatcagcagagacccctctgaggggtatctgttctgcagcccctagtgaaatcatgtgatgtgagacagaaacctaaacatggtacttgattctaaacctgtgccagtctatagcctctgcctccccaagcagagctcaagccaaacgcttctgtcctctttccttctgcattaaccctttgctgatcctcaggggccactcccccaacacccctgtacttgggtgagggatgttggacagagcctgttttcatgtactgcaggtgggggtgtgctgacatgtttgctcttggttgatggagaaggtacagaggccagggagtgaaaatggttgacagaagagggaagagttaggtgtctcatagtcactcatagtggggtggtcaggggtaatggcatctccccactttaggcttctcaaacagacttttgacacctctcaagttcagagctctgatgtggaaagacaggaggtgtggggaaggagggggatttcgtgtgtttgcatgagtgtgcgcttcaggccttgggagttggcaagagggagggaaggaaggagagcaaaatcttcggaaggtgtttcttgtacctgagggatcctgccctgaatctccatagtctccactgtgaactgaggaggggaggggtgtgctggggaataaatcttgtatgagaa

SEQ ID NO: 13969 - DNA, 459 bp, Homo sapiens
  misc_feature (1)...(459): n = a,t,c or g
ggtgtgttcacatgtgtttggactcaggcttaattttaagtcttatgaggtaaaattatcaaggtagctggttatattctcattactactgtgcagctaaaatttgagaaaagatgaaaaattcacatttgtcttaccatggtcacagaatgttttgtgtttattattatgcaataaattattgaccggaagagtaggcttacttctaaaacagagaaaatatatctttgaatcaggtgataatagtgtagaaggaatttgattaaatgcatacaaccaatatgatttctagcattaaattgcaatgtatattgtgttagtgaaaaaatcattagtaaaaatatagtccagtggtgtatcctgcttgaatagagcaggctggatgcggnggtttgctccctgtaatcccagcacctagggaggcagggggcancagatggcttgagctcaaaagtcatg

SEQ ID NO: 13970 - DNA, 670 bp, Homo sapiens
gagtaaatgagcttcaagggtgagaattgttccccacagaaagccacccactactctgcactttatgtgcaggaggtaatccaggctgtgataccacacccagggagaaagccatccaaaagaaacagagcaaaaggaaacaaagatatgcaagaatcaaaggtctacaccatctcaaagtaagaggttttaaactcttcctttgtttcctggaccagaccttcacaccttcatcctcctctgcatggcagagcccagaacactcaggattccacaaacacatcgtatgtaacagaaaaggtgactgagccccagaaggcttacatggcttccccagtgtcaaacgggcagtagggaagggagcccaaatctggtgctcctcagtcctgtgcacagcaataccttgtacatttcccattttcctctcactaggcttagaccactctacagaaattacttgacttatctcaagggtacctgaacagagttcacccaataagaaaaaacagaagatgaaaacagaaaagaataacagcaaatgaaggtggtgattttttaaactatagggattgaaggaatccactcttgaaataactaccctgatgctttaaaaccttcagggcaaggatttcttgagaattttattgggaagacagccttcttgtgtttt

SEQ ID NO: 13971 - DNA, 1191 bp, Homo sapiens
ggcggcggcggcggcggcggtcatggaacgccaagaggagtctctgtccgcgcggccggccctggagaccgaggggctgcgcttcctgcacaccacggtgggctccctgctggccacctatggctggtacatcgtcttcagctgcatccttctctacgtggtctttcagaagctttccgcccggctaagagccttgaggcagaggcagctggaccgagctgcggctgctgtggaacctgatgttgttgttaaacgacaagaagctttagcagctgctcgactgaaaatgcaagaagaactaaatgcgcaagttgaaaagcataaggaaaaactgaaacaacttgaagaagaaaaaaggagacagaagattgaaatgtgggacagcatgcaagaaggaaaaagttacaaaggaaatgcaaagaagccccagggaggaagacagtcctgggccttccacttcatctgtcctgaaacggaaatcggacagaaagcctttgcggggaggaggttataacccgttgtctggtgaaggaggcggagcttgctcctgggagacctgggacgcagaggcccgtcatctggcggatgaggctaagaatcttgttagtgtcacttttgacattagcaagatgaacccttaaccctcgattcaattgccttacgcacgcttttcacagtgactagccaaggggaggtggggttgatttctgttcctaactacacctgcatatgtcagggctccagtcagcaaaaggtatagatgttgcctctaggcatgaggtcattggtcacattctacttggagacagtgattgcattcattgatttcatggttaattgctagttggtaggtaaaggcctctagatgattagcaatcttgataaaagaggcctagtaatgttcttttgaggttagaaatccttgctgctaggacagtctctgtgacaggttgcgttgaatgatgtcttccttatcaatggtgagcccaccagtgaggattactgatgtggacagttgatggggtttgtttctgtatatttatttttatgtacagaactttgtaaaaacgaaactatttaaaaaacaagaataacatttttagcatctttattcaaggagatttatggacttcaatttgtctatcaaacattaaatagctttttattacaacctccaaaaaaaaaaaaaaa

SEQ ID NO: 13972 - DNA, 300 bp, Homo sapiens
gctgcatactctaatttctattctctggctgaatatattgttagacctcatagaggtagtggaaagaacacaggctttggagccaaacaatctaggttccagctccatctccccctttcctgactagcagttcagcaggtttctaatggctgtgagtctgttttcttactacaaaatatatcagtgtgttaggattatagagttgatttttctgattcaataaacaatcatcttgcattgcatttctggacagtttctccttatcacttaaactacccttaaaacttcccaaatacttta

SEQ ID NO: 13973 - DNA, 958 bp, Homo sapiens
  misc_feature (1)...(958): n = a,t,c or g
ccagatttaaaatattttgacaacaaagatgatgattctgataccgagacgtcaaatgacttgccaaaatttgcagatggaatcaaggccagaaacagaaatcagaactacctggttcccagtcctgtacttagaattctagaccacactgccttttctacagaaaaatctgctgatattgtaatttgtgatgaagagtgtgactcacctgaatcagtcaaccagcaaacccaagaggagagtcctatagaagttcacactgctgaagatgttccaattgctgtagaagtgcatgcgatttctgaggattatgatatagagacagaaaacaattcctctgagagtctccaagaccaaactgatgaagaaccgccagctaaactttgtaaaattcttgacaagagccaagctttgaatgtgactgcccagcagaaatggcctttactgagagctaatagcagtggcctctataaatgtgaactttgtgagtttaacagcaaatatttttctgacttaaagcagcatatgatcctgaagcataaacgtactgattcaaatgtgtgtcgagtatgcaaggaaagtttctctaccaatatgcttctgatagaacatgccaaactgcatgaagaggatccctacatttgtaaatactgtgattataagacagtaatttttgagaacctcagccagcacattgcagacacccattttaggtgatcacctctattggtgtgaacagtgtgatgtacagttctcctcaagcagtgaactctacctacatttccaggagcacagctgtgatgaacagtacttgtgtcagttctgtgaacatgaaaactaatgatccagaagacttgcatagccatgtgggtaaatgaggcatgcatgtaaattaataggagttaagtgataaggtattaacaatgggtggaacatgggacagtattagncctcttta

SEQ ID NO: 13974 - DNA, 506 bp, Homo sapiens
gcttagaagcaggacagggctgtgagatgactgtatttacgtacctttcccacacacgtaacttgggcacaaatgtttctagcaacatcagatggagtgctggtattcctttacctcgagtatggtacaggggctaatacgggctctggaatttatatcatgtgagatcctgaaagttatgcaaatttcctgtgcctttatttcctcatatgtgaacaaaaatgtggggatagcgatcgaaccatctcataagagtgtggtgaggatgatatgagacacttcatgcagagccccgaggcctgttccactgctcattaagattcctctgtgtcttggccagtgatgaccagatcctggaatggtgtggggaggacgccatccactacctgtccttccagaggcacatcatcttcctgttggtggtggtcagctttttgtccctgtgtgtcatcctgcctgtcaacctctcaggggacttgctgggtaatgaccctcctcacccttgt

SEQ ID NO: 13975 - DNA, 1547 bp, Homo sapiens
  misc_feature (1)...(1547): n = a,t,c or g
tttttccagatcaggaagttttattgctgacatgcaggaagagtccccatgtagtacaaaaatatgtctttatacaaacttttttgtgactttttccgtttctttacaataggacttctctcagtgtgtgacacccagtgagggctgacccatcctcctctcctttgcttcaccaggaatgtcatcagacacatggcttgaccttggaagggcccagtctgtctgacagggctttgcagacccggcggctattgctttgaaaacggaggagaaagaccacggcacgggcagcagcctgggaggggacccggtgggctgctgcagagcggggctccccttgcgacgggccctggcccagccttcaggccctcacaggagggacagtcaaggctgggaccctagggccggactgcattatccgctccagcaggagactttctatgaaataaatatagaaaagagggcatcccccagccccacagcacaagaccctggccctcagcgctggacagctgagacagacgcaggctcgctgctcagggggagtaagtgctgggctccagtaggctcccacaggcccactgaggcagaggcatgagtcgcccaagtgctggatggggcatggggagaaaggggcgtgggcagccctgctactgctggcaagaggtggccccattnnnnnnnnnnnnnnnnnnnnnnnnnnnnnnnnnnnnnnnnnnnnnnnnnnnnnnnntcacagtgagtcagctttttagggggaggagagcggctcacactctgggaaacacagtcacctccccactggggagcagggccaggcaggaggggcctcagggcccatgactgcctggaggggacactcagcctctctgaggacatatggggggtaggcctctggggaagggtctttgcttggcatcaggcagggccaagtccagtaagggcaaggggagggggcattctggtgagaacagcatttctggcaagacgggcattccacttcaaaatctcggctcaaaagggcagcagggctgttctcaatgccaggcaggccagggtcccccaatccctacaattctcctgagtccctcaccaccatggaggacccttgctagggtctaccgggagagtcaccacatctattatgaggcaagggcactgggatatgttcccaccatcccctaaacacaagagtaggctaggggagcgtgcaggcagcccccgctcacggccaggcctgcagcccaacccatgggccccttcgcactgggagtccacgtgagctcagtaccacggggaaggatagagaagggaacaggttaacgcgcgtgtacagcacctcagagaagccactgagacgggagagaaagagccaggtctagaaaggcctcccatcaccggcagcagagagggactggtgggctgaaaggggacagggactggcaggaggggcttccctgcctgggggtgaggagggagctcacgtgtgggctgtggattccttgctgtccagccaggctgggggcagggagtggccatggactgag

SEQ ID NO: 13976 - DNA, 1205 bp, Homo sapiens
tttttcagtaagtatttgctgttttttaatgggatagtaataaggttgaggtttttgttaagggacgtttacttatcatcaaactctatacttactactacaaggaaactccaagtacattaaacactatgttttataattctttgccacactgccaataaattctgttcacattttaaggatgacaagtccactatatgtaacacgtaagaatgctatcctggcagtagacacagggccagaataaactggcaagttttcattccacacaagtgtgggaaaaaaatgactacaacttaaactttatttacttgattgagagcttattgcacatgaaatgttttatgtggttgatcttaacttcgtttacattgacttcttttctatgctcaagattgttcaattgctgctgctgccgttgtgttttctttcaggatcgaggtgggtaccttcatataatatcttctttttaatttcttctctggcaattctttcctggattctttgctttgcataattatacctacaatgaaaccagcatcccaaagtcaccaagataaaccctcctactccaacatcacatgatcttctaattctactagtgaacaaaaaatgtccaaagccagccacaacagatcctaatgaaccatacaatattgaatgccgggcgcagggagtattttcaacatctaaaaatcctaggagcttaagggactagaatgaaaaaaaagaacctagattgagtaagaaagtatttcattttggggtgctttggcaaaaatgacaatacaccatttcttttcttgtagttgagggtttaaactagagttatgtgccacgtgacaacctaaatcagcttgcgttgctctttgtccacctttggtatgcagtctgaatctttaaatccgaaaaccttacaaattggaccggaaaacccttaagcagtagggtaacttggagctgtatcttaatttgctaatcaactgacttggaaataggataattcattttatgagctctttaaatgagtttatttgggaatatgcctatcattggaattgaaagcagcatagcttgcttcagtaactccaataatttgggaagcagaaatggaaaaagtaatttgagtcatgtttgcttatgtagtgccgtttaaaattcccctagtaattacctttcatattttattaactaggttaacatca

SEQ ID NO: 13977 - DNA, 580 bp, Homo sapiens
aatttgcaaaaaaaatcttttattggcatgaaaataatgttgtaaatggcaccaaatattccactttaaatgcatatacagtattagagtcaaaaactattttatccctctttgctgtttttcccccttctgcccactttcctgggtgttgggggggcccgctgacaacagtcacaaatccagcgacctgatggaatagcaccaaggcccacacaaaaagtatgataacctctgtcacacatatcacagaacatcatttcttcttcatggtggggttgtccacatataatgcatgttttacattccatacactgccatgggtaggtcttaatcatagaaacaagctccattgtcatatccaggcaagaaggatggccactattctcacattgggagcagtgtataagtgattcagcctttcctttcttgttggactccttacccttcagacaaattccacatatagcatttggaatgacctttggcttgtacccaggaactgacttggacagtacagaacgtttgggaccatcttttcttggagtggcagcttccgtcttttgatttctgtcttccctgg

SEQ ID NO: 13978 - DNA, 524 bp, Homo sapiens
gcggcctcctgctcttcatggatgaagcagacgccttccttcggaagcgagccactgaggagataagcaaggacctcagagccacactgaacgccttcctgtaccacatgggccaacacagcaacaaattcatgctggtcctggccagcaatctgccatgagcagttcgactgtgccatcaacagccgcattgacgtgatggtccacttcgacctgccgcagcagaaggaagccgggacgccctgggttgagactgcatttttgacaactgtgttcttaagccgggccacagaaggaaaacggcgcctgaagctggcccagtttgactacgggaggaagtgctcggaggtcgctcggctgacggagggcatgtcgggccgggagatcgctcagctggccgtgtcctggcaggccacggcgtatgcctccgaggacggggtcctgaccgaggccatgatggacacccgcgtgcaagatgctgtccagcagcaccagcagaagatgtgctggctgaaggcggaagg

SEQ ID NO: 13979 - DNA, 441 bp, Homo sapiens
  misc_feature (1)...(441): n = a,t,c or g
gataaatactttattccacacaataaggaaattgaacttttcagaagaatgatatagaacatctaaaataggttaaacttggaggaattatactgtccattgtaaaattggagccactcttgaaaaattgctgcatgccccactgaatgctagctagagcaggacatgcagtcccagctccaggggcttccagagtgattgaggcagggctgtgggctgctttcctgaagcctgactcctttctttcctcattacactgccacagatggtggcagatacagcatggattggcataagtcactctctactacctgcagaataaaggcccaatttcctagtgcagcttgcaaagtccttctcatctgccaccttccctgcctttgtgatttctcctcctgggactcctgcaccccctttttttttttaannctctttcttttt

SEQ ID NO: 13980 - DNA, 1313 bp, Homo sapiens
  misc_feature (1)...(1313): n = a,t,c or g
ttttttttttactgcaaactggtttattttttataggaaagtgtcaacatgtttattgctaatataagcatttaatgtccaaagaaatgaaggtaattttacaaactcagtttttgtaagtacatgaagtttctatttgattatgtggttttatatcacattcgttcaaatgcatttctctcccttagagggactattccaacatcactcctttggaattatttcagtcatccttaacatgtgactttaccaaagaccttgaagctaaacaaacaagcaaaacaaaatttcaatgactcttagatgaatggaataagaaatagtcatcacatgtcaattagggatgttcatctccaaccaagacactgtcaaaatgtttcttctgatacagcagttataagtcagagccttcaaaaaacaagggcagaacaagagtacaataaaagaagcatctgcaacttaagcctcccacagtcctaagcctggatatgcgcaaagcaaagcctctttcccgcaaactaaattccatccatttgagctttcagagatcgatgcccaagagctatcattaatatatacagcatattgactctagttgcatcaattatgcctgaagagtttaatacccatccaagtccaaaggtggaagaatacatacactggtatggtaataggcaagagcaggctgtaaaagcaaaggctggctgtgctagtgcagccctgtgggaagttttcttccacagaggctgagtagaacagtcctgctaaagaaaccagtggaataagaacagtcaacgtaggaagagacagaaacattcttctcttccacttattacctgccactgtgttttaaaaggtatatggtattaagaaaagttggctgttgccgtttttttaatttttttaaattatgaactagcgctgctccacttcttcttgcttcttactttgacgtgtcatcctagctgcctgtggtatcatattagggatcccatcaatgattggataagctattcccaactcttcattaatcaattcgtttgttgatgcttcatatctgagcggcttcttggagagcgggcacaccaggaactccagcagcgccggatcgaagtcgcggggcggctcctcagtcttcttgcacccgcgtgccaaaggccgcgaccccgacgcgtgcaggcacctacgggcgaccgcggacggcggcgcgacgttccgccgcagcgctgaggcgagcctgcagcgtgctccactcagcatggtctggcagccggagaccaggcctcaccgcagcctcncaccngtgccgagct

SEQ ID NO: 13981 - DNA, 1004 bp, Homo sapiens
accttaccaaatcactcttgaacattcatgataaacaacttcaacatgacccagctcctgctcacacttccataatgagctatctaaataagttagaaacaaattacagttttacacattcagagccactttctacaattaaaaatgaggaaaccatagagccagacaaaacctatgaaaatgttctgtcctccagaggccctcaaaatagtaacactaggggcatggaggaagcatctgcacctggaattatttctgccctttcaaaacaggattctgatgaagggagtgaaactatggctttaatagaagatgagcataatttggataatacaatttacattccttttgctagaagcactcctgaaaagaaatcaccactttctaagagactatcccctcagccacaaataagagcagctacaacacagctagtcagcaacagcggacttgctgtctctggaaaagaaaataaactgtgtacacctgtaatctgttcctcttcaacaaaggaagcagaagatgcacctgaaaaactttccagagcatctggatatgaaggacacacagctcctcaagaaaataaaggaagcaattggtaagatccctgctgccaccaaggagccagaggaacaaactgcatgtcatggcccatcaggttgtcttaggcaacagccttcaagtgaaaggcaatactgtctgtgatggtagtgttttcacttctgacttgatgtctgactggagcatctcttcgttttcaacgttcacttctcgtgatgaacaagacttcagaaatgggccttgcggcattagatgccaacatagctagactccagaagtctttaaggactggtcttctggagaaatgaattcagaagaaaactcatcaggtgcttctttttaaaactagaacttggctatattgaatgtgtatttttctttagtgaaatgatgttttatgttattatgtgtgaagtaatatattgtacaagtaataaatgtat

SEQ ID NO: 13982 - DNA, 3985 bp, Homo sapiens
cgggacgacgccccctcctgcggcgtggactccgtcagtggcccaccaagaaggaggaggaatatggaatccaagggggccagttcctgccgtctgctcttctgcctcttgatctccgccaccgtcttcaggccaggccttggatggtatactgtaaattcagcatatggagataccattatcataccttgccgacttgacgtacctcagaatctcatgtttggcaaatggaaatatgaaaagcccgatggctccccagtatttattgccttcagatcctctacaaagaaaagtgtgcagtacgacgatgtaccagaatacaaagacagattgaacctctcagaaaactacactttgtctatcagtaatgcaaggatcagtgatgaaaagagatttgtgtgcatgctagtaactgaggacaacgtgtttgaggcacctacaatagtcaaggtgttcaagcaaccatctaaacctgaaattgtaagcaaagcactgtttctcgaaacagagcagctaaaaaagttgggtgactgcatttcagaagacagttatccagatggcaatatcacatggtacaggaatggaaaagtgctacatccccttgaaggagcggtggtcataatttttaaaaaggaaatggacccagtgactcagctctataccatgacttccaccctggagtacaagacaaccaaggctgacatacaaatgccattcacctgctcggtgacatattatggaccatctggccagaaaacaattcattctgaacaggcagtatttgatatttactatcctacagagcaggtgacaatacaagtgctgccaccaaaaaatgccatcaaagaaggggataacatcactcttaaatgcttagggaatggcaaccctcccccagaggaatttttgttttacttaccaggacagcccgaaggaataagaagctcaaatacttacacactgatggatgtgaggcgcaatgcaacaggagactacaagtgttccctgatagacaaaaaaagcatgattgcttcaacagccatcacagttcactatttggatttgtccttaaacccaagtggagaagtgactagacagattggtgatgccctacccgtgtcatgcacaatatctgctagcaggaatgcaactgtggtatggatgaaagataacatcaggcttcgatctagcccgtcattttctagtcttcattatcaggatgctggaaactatgtctgcgaaactgctctgcaggaggttgaaggactaaagaaaagagagtcattgactctcattgtagaaggcaaacctcaaataaaaatgacaaagaaaactgatcccagtggactatctaaaacaataatctgccatgtggaaggttttccaaagccagccattcagtggacaattactggcagtggaagcgtcataaaccaaacagaggaatctccttatattaatggcaggtattatagtaaaattatcatttcccctgaagagaatgttacattaacttgcacagcagaaaaccaactggagagaacagtaaactccttgaatgtctctgctataagtattccagaacacgatgaggcagacgagataagtgatgaaaacagagaaaaggtgaatgaccaggcaaaactaattgtgggaatcgttgttggtctcctccttgctgcccttgttgctggtgtcgtctactggctgtacatgaagaagtcaaagactgcatcaaaacatgtaaacaaggacctcggtaatatggaagaaaacaaaaagttagaagaaaacaatcacaaaactgaagcctaagagagaaactgtcctagttgtccagagataaaaatcatatagaccaattgaagcatgaacgtggattgtatttaagacataaacaaagacattgacagcaattcatggttcaagtattaagcagttcattctaccaagctgtcacaggttttcagagaattatctcaagtaaaacaaatgaaatttaattacaaacaataagaacaagttttggcagccatgataataggtcatatgttgtgtttggttcaattttttttccgtaaatgtctgcactgaggatttctttttggtttgccttttatgtaaattttttacgtagctatttttatacactgtaagctttgttctgggagttgctgttaatctgatgtataatgtaatgtttttatttcaattgtttatatggataatctgagcaggtacatttctgattctgattgctatcaggcaatgcccccaaactttctcataagcacctaaaacccaaaggtggcagcttgtgaagattggggacactcatattgccctaattaaaaactgtgatttttatcacaagggaggggaggccgagagtcagactgatagacaccataggagccgactctttgatatgccaccagcgaactctcagaaataaatcacagatgcatatagacacacatacataatggtactcccaaactgacaattttacctattctgaaaaagacataaaacagaatttggtagcacttacctctacagacacctgctaataaattattttctgtcaaaagaaaaaacacaagcatgtgtgagagacagtttggaaaaatcatggtcaacattcccattttcatagatcacaatgtaaatcactataattacaaattggtgttaaatcctttgggttatccactgccttaaaattatacctatttcatgtttaaaaagatatcaatcagaattggagtttttaacagtggtcattatcaaagctgtgttattttccacagaatatagaatatatatttttttcgtgtgtgtttttgttaactaccctacagatattgaatgcaccttgagataatttagtgtttttaactgatacataatttatcaagcagtacatgaaagtgtaataataaaatgtctatgtatctttagttacattcaaatttgtaactttataaacatgttttatgcttgaggaaatttttaaggtggtagtataaatggaaactttttgaagtagaccagatatgggctacttgtgactagacttttaaactttgctctttcaagcagaagcctggtttctgggagaacactgcacagcgatttctttcccaggatttacacaactttaaagggaagataaatgaacatcagatttctaggtatagaactatgttattgaaaggaaaaggaaaactggtgtttgtttcttagactcatgaaataaaaaattatgaaggcaatgaaaaataaattgaaaattaaagtcagatgagaataggaataatactttgccacttctgcattatttagaaacatacgttattgtacatttgtaaaccatttactgtctgggcaatagtgactccgtttaataaaagcttccgtagtgcattggtatggattaaatgcataaaatattcttagactcgatgctgtataaaatattatgggaaaaaaagaaaatacgttattttgcctctaaacttttattgaagttttatttggcaggaaaaaaaattgaatcttggtcaacatttaaacccaaagtaaaaggggaaaaaccaaagttatttgttttgcatggctaagccattctgttatctctgtaaatactgtgatttcttttttattttctctttagaattttgttaaagaaattctaaaatttttaaacacctgctctccacaataaatcacaaacactaaaataaaattacttccatataaatattattttctcttttggtgtgggagatcaaaggtttaaagtctaacttctaagatatatttgcagaaagaagcaacatgacaatagagagagttatgctacaattatttcttggtttccacttgcaatggttaattaagtccaaaaacagctgtcagaacctcgagagcagaacatgagaaactcagagctctggaccgaaagcagaaagtttgccgg

SEQ ID NO: 13983 - DNA, 953 bp, Homo sapiens
atcacatgcaaatcgcatgcaaatcaccacccatttcttaagcctcgacagcgctggcatgttctgaaataataatgttggacctgtcccttgatgatgacctgggtcgggaggtgcacggccttttccttcctccgtcttcccttcccttcccttcccttcccatctgttctcccttccttcgcccccttcctttcctctccctccctatcttccatttttctcttcttccttcacatcatttgtccaagacctccctggcctgagataaacataagttgcaaaagtggcttcctgcagcccattttccaggttgggaaactgaggcatgggcctaaggtcccacagccacaccgaggaaagcagcccccactgaatgtcaccatggcaccaaagtgcatgttcctcgtgacacaaagaggggagatgacagtggctggagttgtcagagctgctttgaggaagctccaggcctgataggctttgacagggccaaggggaactattgtggaatgtcttggccttgaatgacaggctgctgattttggatctggagaaagctcacactgactcttcctgctcccccagtctgtttttctcctgctactccatccatgtatccctgagtttgggccacagtccctccacttggtttgcatgtcccaccttctttgtttggcaagctcctattcatccttcaaagccctagcttcaatacctgctacttcatgcagccattgcttatccttcaaggagagcctacttccctcaaggaccctgctgcttccagtctcaccttctgactcactcgggatccactgaactgggaggtctgtgtctcctcccagcagagtcatcactacctttggggccgcaggatcacccagcttgggaactagatacagaaatgctgttttgagagtgtactgaataaaagattacatgtttgaaaa

SEQ ID NO: 13984 - DNA, 1290 bp, Homo sapiens
tgcctgcggttggggaccagtgcagggaccgggtcgcgccgtgctatggccctgtaccacactgaggagcgcggccagccctgctcgcagaattaccgcctcttctttaagaatgtaactggtcactacatttccccctttcatgatattcctctgaaggtgaactctaaagaggaaaatggcattcctatgaagaaagcacgaaatgatgaatatgagaatctgtttaatatgattgtagaaatacctcggtggacaaatgctaaaatggagattgccaccaaggagccaatgaatcccattaaacaatatgtaaaggatggaaagctacgctatgtggcgaatatcttcccttacaagggttatatatggaattatggtaccctccctcagacttggggaagacccaggggcacaatgataaacatactgggctgttgtgggtgacaatgacccaattgatgtgtgtgaaattggaagcaaggtatgtgcaagaggtgaaataattggcgtgaaagttctagggcatattggctatgattgacgaaggggaaaccgactggaaagtcattgccattaatgtggatgatcctgatgcagccaattataatgatatcaatgatgtcaaacggctgaaacctgggctacttagaagctactgtggactggtttagaaggtataaggttcctgatggaaaaccagaaaatgagtttgcgtttaatgcagaatttaaagataaggactttgccattgatattattaaaagcactcatgaccattggaaagcattagtgactaagaaaacgaatggaaaaggaatcagttgcatgaatacaactttgtctgagagccccttcaagtgtgatcctgatgctgccagagccattgtgggatgctttaccaccaccctgtgaatctgcctgcacagtaccaacagacgtggataagtggttccatcaccagaaaaactaatgagatttctctggaatacaagctgatattgctacatcgtgttcatctggatgtattagaagtaaaagtagtagcttttcaaagctttaaatttgtagaactcatctaactaaagtaaattctgctgtgactaatccaatatactcagaatgttatccatctaaagcatttttcatatctcaactaagataacttttagcacatgcttaaatatcaaagcagttgtcatttggaagtcacttgtgaatagatgtgcaaggggagcacatattggatgtatatgttaccatatgttaggaaataaaattattttgctg

SEQ ID NO: 13985 - DNA, 558 bp, Homo sapiens
  misc_feature (1)...(558): n = a,t,c or g
gtgaggcgctgagacggctttggcggtgagtcctgggccaggcgcagctgaaaggcccgcaacccgggaaacgtcaaaacaaacagaaggacttgggattccggagcagtcgccccctatcgctgctcctgcagttgcggacgccaccgaccccgccgccggaggactgggcactgaaaggcctctaggcctaggcgcggcccgcggagccagacgtgttgctgccgtgagtaaaacgagcgccctctccgcactcgtttacaaattaaaatggaggaaatttcgttggccaacctggatactaacaagctagaggccatcgctcaggagatttacgtagacctgatagaggattcttgtttgggattctgctttgaggtgcaccgggcagtcaagtgtggctacttctacctggagttcgcagagactggtagcgtgaaggattttggattcagccagtggaagacaaaggagcgtgccgcctcccgctttgctcccttcccggagaacctgggaatggcctgatcaacanctgcagcgctcactccggaattcaat

SEQ ID NO: 13986 - DNA, 641 bp, Homo sapiens
ttttttttttttttttcaagactctcagacacatctatctttatttgtttcctgtcagaaaatttcaagaattacaccaaaaaatacttccgcctctgctacctactgacaaaaatacaccacaaaattataaagcgctcagcggttttgctagggacaacttgttattccgctttgaatgacaaatgaatttacaggtgactcagggtgattggaggttgggggagaagggaggaaaaatcagatgagagcgtttggcaggatagtttgagctatgctagtcttattacccagctgttgcatacgatgatctcagcaacacagcaagccacaaaaaaataccctttacatggcctgtgggagacttgtgaggaagcagtaccacatctcaaataaccaattctcccagctggttctggccctgtgggtcctggagctgacaccctgcagaactggcctccctgaaacatttgtgagaggcaggcgaatgcgattacggttcccagggaactgggaggcctggtcaaggctggatgctgccctccttgtcaggagcttctagaactcggttggggagtttggacaaatgtccccttttaacacaacgaagtgggcaaaagacagtcccatttttcagcttc

SEQ ID NO: 13987 - DNA, 2097 bp, Homo sapiens
  misc_feature (1)...(2097): n = a,t,c or g
taacacgttgcgcccggcctcggcagccgcctgtcgccgcgggagcagccgctatctctgtgtgtccgcgtgtgcgcccggtccccgcctgccgcaccatggagagctaccacaagcctgaccagcagaagctgcaggccttgaaggacacggccaaccgcctacgtatcagctccatccaggccaccacggcggcgggctctggccaccccacgtcatgctgcagcgccgcagagatcatggctgtcctctttttccacaccatgcgctacaagtcccaggacccccggaatccgcacaatgaccgctttgtgctctccaagggccatgcagctcccatcctctacgcggtctgggctgaagctggtttcctgggcngaggcggagctgctgaacctgaggaagatcagctccgacttggacgggcacccggtcccgaaacaagctttcaccgacgtggccactggctccctgggccaggggcttcggggccgcttgtgggatggcctacaccggcaaatacttcgacaaggccagctaccgagtctattgcttgctgggagacggggagctgtcagagggctctgtatgggaggccatggccttcgccagcatctataagctggacaaccttgtggccattctagacatcaatcgcctgggccagagtgacccggccccactgcagcaccagatggacatctaccagaagcggtgcgaggccttcggttggcatgccatcatcgtggatggacacagcgtggaggagctgtgcaaggcctttggccaggccaagcaccagccaacagccatcattgccaagaccttcaagggccgagggatcacgggggtagaagataaggagtcttggcatgggaagcccctccccaaaaacatggctgagcagatcatccaggagatctacagccagatccagagcaaaaagaagatcctggcaacccctccacaggaggacgcaccctcagtggacattgccaacatccgcatggtccagcctgcccagctacaaagttggggacaagatagccacccgcaaggcctacgggcagggcactggccaagctggggccatgccagtgaccgcatcatcgccctggatggggacaccaaaaattccaccttctcggagatcttcaaaaaggagcacccggaccgcttcatcgagtgctacattgctgagcagaacatggtgagcatcgcgctcgggctgtgccacccgcaacaggacggtgcccttctgcagcacttttgcagccttcttcacgcgggcctttgaccagattcgcatggccgccatctccgagagcaacatcaacctctgcgggctcccactgcggcgtttccatcggggaagacgggccctcccagatggccctagaagatctggctatgtttcggtcagtccccacatcaactgtcttttacccaagtgatggcgttgctacagagaaggcagtgtaattagccgccaatacaaagggtatctgcttcatccggaccagccgcccagaaaatgccatcatctataacaacaatgaggacttccaggtcggacaagccaaggtggtcctgaagagcaaggatgaccaggtgaccgttatcggggctggggtgaccctgcacgaggccttggccgctgccgaactgctgaagaaagaaaagatcaacatccgcgtgctggacccccttcaccatcaagcccctggacagaaaactcattctcgacagcgctcgtgccaccaagggcaggatcctcaccgtggaggaccattattatgaaggtggcattggtgaggctgtgtccagtgcagtagtgggcgagcctggcatcactgtcacccacctggcagttaaccgggtaccaagaagtgggaagccggctgagctgctgaagatgtttggtatcgacagggatgccattgcacaagctgtgaggggcctcatcaccaaggcctagggcgggtatgaagtgtggggcgggggtctatacattcctgagattctgggaaaggtgctcaaagatgtactgagaggaggggtaaatatatgttttgagaaaaatgaaaaaaaaaaaaa

SEQ ID NO: 13988 - DNA, 833 bp, Homo sapiens
  misc_feature (1)...(833): n = a,t,c or g
gggggacaagaaaagggatcagatacctgctccantgtctncgtgaggccactgtgtctcaggggactccagggaggagcagaaagagggatcccacgaagttattcttacgcagctggggccaggagggtcagagtggtgccaggtgcaagttaggctaaagaagccaccactattcctctctcttgcccattgtgggggggcaaaggccattggtcaccaagagtcttgcagggggacccacagatatgccatgtccttcacacgtgcttgggctccttaacctgaaggcaaattgctacttgcaagactgactgacttcaaggaatcagaaattacctagaagcaccatgttttttctatgaccttttcagtccttcaggtcattttaaggtccactgcagggggttagtgagaaagggtatactttgtggtatgttttgctttcctaatagggacatgaaggaaacccagcaatttgctgttatgtgaatggcctgtagagcagagtcaagagcggtgtgctttgccccgactgctcccatcaggaataggagagtagacagagatcttccacatcccaggcttctgctgctgctttaaaagctctgtccttggagcctcccgctccctgaagtgtctcgccccctgcacagcactggcctttcggaagcatcccagtagggttttctgaggctcgctggtgactcatgccctaattgcaatcctctgcttttatcttgactttgaaggatctaacactgctctctcttccaaaggggaaaaaaagattcatttgttttgagcaataaactaatacaaaatgatggcca

SEQ ID NO: 13989 - DNA, 372 bp, Homo sapiens
gaagaaaattagtacacatagaacaaagccagaggctgttcatcaggacaagggagaaaaactccaaagccatttcagagatcttcaagactgcccctcccattactggcccagagctctaagagggcagaatggtttggaatgaccagctgctgcccagggctgccttgggtctcgtctccccacatttctggtgcagcattcctcagccatcccagctgtggttcaggtggccacaggtgtgatgtggaaggtaaaagtcataaaccttgggcagcatacacatgggcactaatttttgcaggtgtgcaggaatgcaaaaagcttgagggggcatgccttctttcccaccttacattttcaaaggggtgc

SEQ ID NO: 13990 - DNA, 308 bp, Homo sapiens
ccgctgcgtgcctgcggttggggaccagtgcagggaccgggtcgcgccgtgctatggccctgtaccacactgaggagcgcggccagccctgctcgcagaattaccgcctcttctttagaaaatggcattcctatgaagaaagcacgaaatgatgaatatgagaatctgtttaatatgattgtagaaatacctcggtggacaaatgctaaaatggagattgccaccaaggagccaatgaatcccattaaacaatatgtaaaggatggaaagctacgctatgtggcgaatatcttcccttacaagggtta

SEQ ID NO: 13991 - DNA, 1325 bp, Homo sapiens
actttttcctagtcttatggaaagcaaatatacaatgattttcagtaggcttctggaatagaaacagtggtttgaagaccccactgccacctttatggactggcccctttgagtctgaatccccggcctctgtcacctgagacccaacccctagctgggccaactccagtgaattcacccatttttcttcttcagaaggcctttcctgtgtgagacccacatattttaaccttttgctcctatcccatttttaaagaattagagaataaaccagggcctgtttcttttcccctgaaatccctgcctctggcttcctaaacccatcatctaaggtgacagagcagtgctgggaatagcatctcctttcactttcccaaaactgccacagatagctgccactggcatgctctttgattcctggaaggcaaacgtgggactgtcggaggaaagggattgttctggtcttactcataactgggtggtttgagggtgactgaagtcgtgcttttcctgtgtgtgctgccagcacagggctgtaaatgcagatattgcgcctgtgtgcgtgtgtataagtcaagctccaagaggctcctgaatgtgactggccgtgctgagaatgtgtttacgctgtttaatgtctgccaggtgagggttacactgaagatgcacaatccctaaaataaagatcaccacttccccaaagaagcagccctcgggtccatgtgttgttcagacatgtgaagagaagcaagacagagggtctcagatggacgagggctctccaagggaatgcctggggattcacccagtggtccccagaggtgctccatggaggcaacaagtcattccatgaagccccagaggtagaagggacctcaagcaccacgccctccagggcagccgtgcagacgaccttggttcacttttcaggggtcgtcccaactctgtatctccagccactccaactgtggaggctgtaaatccagattttcactgttccagtctcctttgcagcttaggatggctatgtgatcaggtgtggccaatgaaattgaagaggaagtctacctgggcttctgggaaagcttttccaataaaagacacaggcatggctaacacctccctgggcctcttcttcctaccttgattgagggtgtgatgcctggagccacagcagccactttgctaccatgacaaaaaggccaagagaatcacagagtcattgaccctatcattatttcaccaagccaataccagccgccatccttctccagaattcttgtaaataaaataaatccctctttgtttaaaaaaaaaaaaaaaaa

SEQ ID NO: 13992 - DNA, 431 bp, Homo sapiens
ttctggttaaaggcaatatttatatgcacagatgtataattatattgtgtatgtacacatagggcagacattacacattaagaatcagggaactttactctgtaatttttagctggagttatgacttcctgccactgacattaaggctgacagatgaggctctgaaaatgccacagatttaaacggatggaacccgagggctttagctgagctgttccttgagcccagcgggacggggtagttacaacatgcaggccatcacctacgaaggcctctgcttccagctgtggcagctggcctgaagccttttggggtagagcccagctctgcagagggcggggagtgtgaggaaccccacccttcctgccagcccctccctcacttactggcagcacacctgaccctcagccatactggtccctgcaggggct

SEQ ID NO: 13993 - DNA, 585 bp, Homo sapiens
  misc_feature (1)...(585): n = a,t,c or g
cccaatggcagggcctgggggagttctaacctcccgtgcccaagcctgactnccctnccctctccagatactgaggaaagtgggttggaggtgggccatgagggtggggganagggggagggagagccatttcctaagaagagcccaggttgtntnagcccagggagactggtttcaggagctgttccttcagaaaggacgatggaaatggaagtcacagcagggctggggaactggggactggttaggttggacccatgggtgcagcaccctccaaactggtgtcagagcctgcagatgagtcccgggaggagcggccctgcaggaagcggatgatcttctcaatggtggcctcctggtattcgtgggaccacctgtgggcacaggagccaatgtggttcagacagctgggcagagggagctgctagtcagctgtttgcccacactctgcctgtcatggtgatttgtaccctacccccctggtcccagggccctggggctcacttgataccgttgaaagtaagcacagcctgcatgtcctcaggcaggacctggggctcaggccactcgaagccatcaatgatg

SEQ ID NO: 13994 - DNA, 1155 bp, Homo sapiens
  misc_feature (1)...(1155): n = a,t,c or g
ggctatattgcccaggctagcctcaagcttgagggctcaaagtgatcttcctgcctccacctcctaggtgttgagactataggtatgagccactnggcctgggccctttgaagtccctttgcatgatagaacttcaacccttggagccccagaggatccaggcagtatcaagtcaccatccatgttatagatgagaccatgtataacatcaccatctttaacaccaccatccagccttcagatgagatcacagccctgactgcaacctctctgaccacagctcagagagggcatgtggcatgctcacaaacagtctgttaggggcttcccctgggtcagaactcagacccctcggctcttagtccaatgctcctctcctaacccaggttgcctttggggaccttgggggggtctctcatttcattgggaatgcctaatggattggttgccacgtgttgccattgttggtgtatgtaagtcgctcttctgtcctcatatccccactctgtcgtcctgccccttcttgggggtggatcctgcaggagagggggaagcagccaagcaaggcttcatttctacttttccatctgcaggacccagggctgggcacatttggtgcaacaggctggaaatattctcccctaccccaccctccccatccctcctcagaggcactgggccggggactggagcctgtggtgaggtccttccccttcaaagcctgtcgggggcagccactaaatggccccaagatcccatggactcaagggattccatgtggcatcccttcccgtgctgcagaggctgggaaacttaaccacatttccagactctcttgcagctagtgtttctgatggcatggaaatcctgccattgaatgcaaacgcacaagactagaatttggaactgagtttcgtggggagagaggcagggcatggagcatccaagcatccattttgctgtgtggatggtggtagagtgcaggcctaatgctggagctggcagttgtaatggtggcttctgaattccacagcttcttgatggaggcaggagccctggcatcttagcccagttcagcagcgttttaggcagctttcctggatgctcagacacttagtaataatatgcttgaaaaaaaaaagccctttttttccc

SEQ ID NO: 13995 - DNA, 970 bp, Homo sapiens
  misc_feature (1)...(970): n = a,t,c or g
ctctatcactatcctcggagtcatggggcagtcacatcatccctgtctctgtaatggtagctgcccctggataagtgttattaggtgattcagaagggtgggctgttgcctntgcctgaggttgcagtctgcggttcccaagccccaagacccgcctcagaactaactgcatttgcttttgactcctggcctttctctagggttgggaagaacatggaaagtgacctccctgccaaataactcagaagaggagtgtcggtagccaaatgtttcttcagaatacgtgtaaaagaaatgtttttcttccatctaggaagatgttaccgagtacttcagtgaattccttagtgcaggggaacggagtcttgaattccagggatgcggcaagacacacagccggagcgaaacgctacaaatatctgagaaggcttttccgctttcggcaaatggactttgaatttgctgcctggcagatgctctacctgttcacatccccacagagagtttacagaaattttcattatcgaaaacagacgaaggaccagtgggccagagatgaccctgctttcttggtcctgttaagtatctggctctgtgtgtccactataggatttggctttgtgctggacatgggattctttgagacaataaagcttctcctttgggttgtactcatagattgtgtaggcgttggtcttctgatagcaactttaatgtggttcatctctaacaagtatttagtgaaacgacagagcagagactatgatgtggaatggggctatgcttttgatgtgcatctcaatgctttttatccactcctggtcattttgcattttatccagcttttttcatcaaccatgttatcctgacagacacatttattggatatttagttggaaataccttatggttggttgcagttggctattatatctatgtaactttcctgggatacagtgcattgccattt

SEQ ID NO: 13996 - DNA, 626 bp, Homo sapiens
  misc_feature (1)...(626): n = a,t,c or g
tccccctcctaatcctcccctctttgcaacagcagcacatgggtctgcctcctacgtaataccataaaggctgaaaagatccctaaaaaaactgttcaacagggctgcgcaatcattgctcactactgtgagaacagcataatgcagcacacaaataaaaaactgtttttagtcacaatttaaggtggagccccagcaacatctcgtagagccccaggtgagaaacccacctccaacaccaaatgacttcctatgagaagtcattttcatttgacttggatccttctgtggcttgacttgcaagttcaggtttggctcctccctcatttaccacctgtggattagacgttggttttgtctgccccagctcctcagtattatctggtacctgctggttattttttccttctgctgtgttgttttggtctgatttgtccgcagattccagtttagcttctttcccatttccctgctttgagttaagctgtgacggatccttagggctcttcaccacctcctggagattgtattttctaaacaacatgtaatctttcacaacactcaggcaacagacagctttgatgatttcatactancactgtgtactgtggattggtgagatccac

SEQ ID NO: 13997 - DNA, 1637 bp, Homo sapiens
tttttttttttttttaactacttcaaacatatttattatttttacagactcaaaatacactaataatcctgcaatgcatgctggtgtcatgtgacaccaggcctggaatcacacctctgtccagcaggcacttgtctcaggtgaggcagttttctgagggggctcccaggagcagcatctcaggacacctgagagggagggggctgcaaggaacacctctgtgtgcacacgcctgtgctgtgctggagatgagctgtcaccttgaggtggcgtcagaccttgactctggcttgggagccccaaggttaagggaaggttaagacatgatcaaggtgcccatgagattgtgacagggacatgctggggtttctgtggcttgactgcttggatgaacatctcatttttcaatcacacagttgcagtgcagaaaggcatcaggaggcttggtctggtattaggaactgaagaagcagcccaatccctgaccagaacggtagcatcaaatgccttgtggtttccaggtggctgtggtagtgactcaggagtcctttagtgtgttctcgtgaacaccaggttatgtggatggcaccttatacttttcaaagctctttcaatctgtccgctcattctcttctaggcattgtagcttataccccttcctctcaccgacgctggtttagacctgtcaagttcttgagcgtcactgctgcacccatgagtccttgcaccagtgcctctcctgtggactttacctgcttggcagtgtggcccatgttcattgcatcattaacccggttttccaggaagcgccaagtgtcctcaaagtctggagaggagtcctgcatcatcaccagctctgttgtgttgtagatggcagccagcatggctcggcgggtgtaccagttaaaatcagtggactggtccccagcgtaatgccacatgtcatccaccatgctggtgagcaggctcaggctggacgggatgttgtgagggagcatgaggatgctgagggcccggggccagtgctcaatgtatgggatcagcattctcagtctggtttccactgcatccctcaggaactggtctgtcttcctcttctccgcctggcccaactgtaccagcttctgctcctcttctagcacacgtgtgagccgggtattgcactgggtcacaaaatgcagtattagctcactgccatccttcccgaacatgctggctgctgccactggagagacccagagactgggctccttctgcaatcgccctctgctgtccacccgtgggcgggcacaaactcaagggctgccgtcaggcatgcggtgctgcaactgctcctcactttcatagtcctcctcctcctcgccgccctggtctgtatacctggggggtgaatgagaagactctggatcaggtttttctgccccctgtgtctcagaatgctgctgagaaaatgagttgggaggctgctgcttctgctcatctgaagaccttagccccacagctgaagcatggaaggcacgcggcaccagggcttgtcggcaacgggccacgggcaggcatcgcagctgcaggagcctccagcccgcccggccaagcgcaccagataccgccgccgccgccattttggaagcgggcac

SEQ ID NO: 13998 - DNA, 277 bp, Homo sapiens
  misc_feature (1)...(277): n = a,t,c or g
ggatatttnnnnnnnnnnnnnnnnnnnnnnnnnnnnnnnnnnnnnnnnnnnnnnnnnnattgnnnnnnnnnnnnnnnnnnnnnnnnnnnnnnnnnnnnnnnnnnnnnnnnnnnnnnnnnnnnnnnnnnnncagtacagttggctcttcatatctgtaggttccacatctcccaattcaaccaatcatgagttgaaaatattaaaataaaaaataacaatacaacaataaaataatataaaatttaaagtatagaacaggctggccatggtagctcac

SEQ ID NO: 13999 - DNA, 626 bp, Homo sapiens
aaatatatattaaattaatattttgataagttactcaaagtgctacataaaacaaaattatagaaaatagtactttggtaactgtttcgttttatcattgctttcattatttctctgttaacctcagtttacaactgaaaaagacaaattgtatattattcaggcaatttattaaacattacctatagaatattatgatctgtattttacagaagttaaaaagtgatgtattagtattcataacaactgctccatgcaggagtaatagaagtcaacattaagcccaactctattttcagaccaaccatgcaactttagatcagaggacacatgggactctgcatcttaattcctaaatttacagtcaaagacattttcagagataagtattatgaattcaataagaatctaaagtaagttcttaaggcaaatagctataaaagagaagaatccttagtctctcatcttctaaaaacagcttcacaaataatttggaaaatcagcctaaaggtaaatagaaactgcatttcccctccattcttgaagccaatctttttcaagaaatgactaagcagcacctgttgttgaagacagcaataaagcctgaacctgacactcaaaaaaaa

SEQ ID NO: 14000 - DNA, 874 bp, Homo sapiens
aattcggcacgtgggggatcttaactcatctaaaggtttccttctcaagagatgctcctgtaggggaggaggaagccccagcaaagtatgtacaagacaacatccagcttcatggccagcaggtggcgagaatcctcctccaggagaacggccatatttatgtgtgtggagatgcaaagaatatggccaaggatgtacatgatgcccttgtgcaaataataagcaaagaggttggagttgaaaaactagaagcaatgaaaaccctggccactttaaaagaagaaaaacgctaccttcaggatatttggtcataaaaccagaaattaaagaaagaggattaagcttttttgactgaaagtactaaaagtcagctttactagtgccaaacctttaaattttcaaaagaaaattttctttcaacatttcttgaaggacatggagtggagattggatcatttaacaatataacaaaacttcctgatttgattttacgtatcttctatctacgcccttcctgtgcctgtgactctccccaaattgccctgttgccttgagctcttctgagctaaggcagccttcagtccctatcagcgcctcctttacttcccagagaacttcacagagactctgtccttccatgcaaaggcttcctgaaatagggagactgactgagtagctcattcttgtgacttacagtgccaacatttaaaaaagtatgaaaatgatttatttttatatgatgtatacccataaagaatgctcatattaatgtacttaaattacacatgtagagcatatctgttatatgtttatgtaactatcaaatggttatttgttactaaagctatatttctaataaaaaatattttaggat

SEQ ID NO: 14001 - DNA, 1328 bp, Homo sapiens
tggccgcagcggcgaatggcggcagcggcaaggttggaggggctggcgcggcccgctccctctcgcgcttccgaggctgcctggctggcgcgctgctcggggactgcgtgggctccttctacgaggcccacgacaccgtcgacctgacgtcagtcctgcgtcatgtccagagtctggagccggaccccggcacgccccgggagtgagcggacagaagcctttgtactacacagatgacacagccatggccagggcccctggtgcagtccctgctagccaaggaggcctttgacgaggtggacatggctcacagatttgctcaggagtacaagaaagaccctgacaggggctatggtgctggagtagtcactgtcttcaagaagctcctgaaccccaaatgtcgcgatgtctttgagcctgcccgggcccagtttaacgggaaaggctcctatggcaatggaggtgccatgcgggtggctggcatctccctggcctatagcagtgtccaggatgtgcagaagtttgcccggctctcggcccagctgacacacgcctcctccctgggttacaatggccgccatcctgcaggccctggctgtgcacctggccttgcagggcgagtcttccagcgagcactttctcaagcaactcctgggccacatggaggatctggagggtgatgcccagtccgtcttggatgccagggagttgggcatggaggagcgtccatactccagccgcctgaagaagattggagagcttctagaccaggcatcggtgaccagggaggaagtggtgtctgagctagggaatggcattgctgcctttgagtcggtacccaccgccatctactgcttcctacgctgcatggagccagaccctgagatcccttctgccttcaatagcctccaaaggactctcatttattccatctcacttggtggggacacagacaccattgccaccatggctggggccattgctggtgcctactatgggatggatcaggtgcccagagagctggcagcaaagctgtgaaggctacgaggagacagacatcctggcccaaagcctgcaccgtgtcttccagaagagttgatgagggctacagctgttggggctctgccaggtcccctgggacatacgtacagctccaatcagaaaccctgcgcttccttgagtgtggcttcccacttttcctgcattgtggagctgactgagtacaccggtgaggctggggtctctgcaggggaggtcactggaacagcgagcaagggactggtgcctcgctggtgctgggtctctggtttgctgcagagccgtaggac

SEQ ID NO: 14002 - DNA, 765 bp, Homo sapiens
cctcgaggccaagaattcggcacgagggaatgccgctagtctctgagggagaccgagggagcccctttcaggaggaggaggggagtgctctgaagacctcttgggcaggggctcctgttcacctgggccagggtcagttcctgaagttcactcagagggaaggagatagagagtcctggtcctcaggggaggactaggaaaagaccatctgcccggcactggggacttaggggtgcggggaggggaaggacgcctccaagcccgctccctgctcaggagcagcactcttaacttacgatctcttgacatatggtttctggctgagaggcctggcccgctaaggtgaaaaggggtgtggcaaaggagcctactccaagaatggaggctgtaggaatataacctcccaccctgcaaagggaatctcttgcctgctccatctcataggctaagtcagctgaatcccgatagtactaggtccccttccctccgcatcccgtcagctggaaaaggcctgtggcccagaggcttctccaaagggagggtgacatgctggcttttgtgcccaagctcaccagccctgcgccacctcactgcagtagtgcaccatctcactgcagtagcaacccctcctgggccgtctggcctgtggctaatggaggtgacggcactcccatgtgctgactccccccatccctcgcacgctgtggccctgcctggctagtccctgcctgaataaagtaatgcctccgcttcaaaaaaaaaaaa

SEQ ID NO: 14003 - DNA, 994 bp, Homo sapiens
  misc_feature (1)...(994): n = a,t,c or g
agcttttagaaaacaatttttatttaaaaaatcataaaaagtactggaatgaaaatacaggtaaagcatttgaaaattatttttctggcttagactgtttactggctcgattctagctctgtcctggtaaaggcctccagaaccttcacctactattatcaagtctggcctcatagggagggacttttactgtactgaaaggaagccagctgaagccgagatctgaagcgctcagcttccagttcccggaagaaaacatcatcatcattctgtgttatcatgtcctgcagctgctgaatttccttctccatcttagatctcagctccctcttcaccttatgtaatgtctgggcctgagatttctctctggctttaagttcttgatgttcctgtgatatggcttctgccagcaatgaaaactggtccttatagtagttctccatggagtccagttcatcctggtggcgtctcctttgttcatctcgcttttctttggcatagtttcttaggtctcgtaatctttgcttttgaatgtttaaaccttcttcaaacagtttcttaaatatcatttcttcccgggtcctcattctcatcatttttgcacacaactgaactctataatcatcataatattttcgagcacgaacgatttgctgtcgattttcttttatctttgattgggtcaacctttgcctacgaatgcagtccttgaagtcttgcagtctcttgttatgttcatattctttcttgacaagggtagtaaggaggtcatgccttcttagggcttcttctatttcatcttggagtttcttctttgatcgattttctctacatgcttctttcttaagctgttcaacctgtgcaatttgctgtttccacattttgcttagtgttgggccagaaacataaagaaacggaaactgctccagcataaggggcaggagactgtgttcacttactttcattggaactgcnttatttggcttctcgtgcc

SEQ ID NO: 14004 - DNA, 1278 bp, Homo sapiens
gtaaggagtaagaacaagtaagggaagacagctaagagaacatactatgacatatcatagaattgggatacatttttgttgcactggatttcaggctatactgctaaaataatttctacctgttaaattttgtgagagggtttttgacatcagaatttttgtatttctggtcaaattggtcttggaaatccctatggtctctaatttcagctcttgctgtaaactgcaagccaaatgctctttctcagaaagagctatatttttctcttcttacaggcaacccaatatttatttcataaagtgttataaatattgagaagatacactggggagatagcatataaaaatgatgctccaaaatgagaattctatatggggctttccctaagaagaatccatcccagcacatattttgaaaaggtgctgaattaaaaagtacaagagtttgctcatataaatcaagttgcccaggaaacctgaggtgatgctatcatttgtctcataatttagaaacgtgatctcttgagagagagactacgcattgcctgggcactttcagattccttaggaagtgcccctttgatatttggaatgtggatatatttataaaacaaatggattgttattccaaatccacatggatttataaccaagccccagaagaataggcagctttgaaatagctagttcgtggaattgaacagaaccttgatggaatgcagttgcctgtgtgaggacagaaaacaaaggaggctgcctcagaccacatgcctatctagagattaagtgaatttgtgagggacattttgtggatgccttaaagatgaccagtggtgggttctgatgggaatatatacactcatctgggactaggccaatggaagcagtctctttcagttcacctccgtacagcacaagttgttcctgctcatgaccctcattgaggaaaatgagaattgtggtgctggtgactttcatgtgtcttgggaggttgaggtgttcaacatcgttaaggcactcccaaaacgcaaacctccttttttaaatgccaattgtacatctacattaattcatctatgcaaacttgtgttttcatggtttgttttttacactatatttctcattaggttctttaaacatcaggtttaatattgatattatgaataatttttaaaccaaagtattctataagtctgtgtgctttgttttcctggatggtttgaccaaggtaaacatcagtcttgtccttctctcttaataaagtcatccatttgttaa

SEQ ID NO: 14005 - DNA, 2062 bp, Homo sapiens
ttttttttttagcccaattctaaaaatgctcagtaacactttttaatatacaagaatcaaaagtacagcagttttacaatgtaggaaaatttaatacatactatataaacaacattatttacatcagaaatcactaggacagtggcatttttcacaaatataaattaattactgtttagtcaacaggttttaaaagtccacaattttacaaaaaaaaaaaaccatctgtccccagatgagtggggcacagatggcctaaagcagcctggacccttggcatggctcccctcgcccaacgtggcagccctcagaggagccggaagaccgctggtgctgggcctgggctgctgctcctgctgacaagtggattttggtctgtaggatttcagtgtcattgtgtgacttccctaaatcaactgtgtttgcaccgtgaggactgatgcaactttcagacacaccaggccagaatgtctgcagcacagcgtgcaaagtgtttgggcttcccttcgaagggctgaggaatgactgaaaggagagtgagccccgggctctggctggcacctgtctgtccggctctgaaagaccgcagtgattagcttggggtttcacctggcccttttctaaggccatagtgtatcatgtcaacccttgttcacgtgcaggttttaggtgatgctaactccctctttctcaacctgttatttctaccaacaatgaaatctttcaaagccagactccagggaataccatcctcacagattcctggggcagcttctcccattcacaagtgagagaatttacctgtgcaaattttttatttaggcatataatattcatactgatttaaatcaatgaagaaatgcttcctttttcccagcacactcttcaaacatactccagcacctaaaatagttgtctaatggggacactgtaattttagaatcaatgtaacactgatctggccgatactgccttttgctacttcatatggcactgagagtcctgaatgtgaacaaaaggaagtttctttttcctcacgataagacatctctgggcataactcacatctcctatcagcaactcaagagagaagccctgatgactgtggaaaccctgatggaaatgcaggacctctggtgactcctttgcccctcctttcattcctgaaggacactacccaactctctgcaggggctcacctccttcccaccccatctcccaacgctcaagggctcgacaagccaacctaaccttcctctttggcttgggcaaggcaatcatgggctagagtcagtattatcggcaagaagctccatctgtggtttcctcatcactgtgtggcctaagtggagacacagccctgccctctccactgagcgtcacggcaggccctccatgggaggactgtggccaggtggctcatgcagtcaccggagctttgcttcaggacatgtgtgctacaagtccaggctggacaaccccaagaactgtgagggttcagcaagcggggtgggtccactgagctctcaacacaagcttccgggacccagaccctcatctggaaaccacacaggcccagcccctgcgatgcctctgtgtagcagggagcaagggtcacaccacagccacatctgcttcattcgggggatccaacttggcatgtcttggtaaaggcattcatggtgctgcccaggacaccagcaagcactgaagtcctcacaagttacttcaggagtttaaccctgcacacgcccaacagaagggttttcaccagctctgagcctggacaccttacaggcacactgtatgttcaagtcagttattctgtctccatctagaaaggcctttggatactcttaacaatactggcaatctatactgagaataaaactgaaggccccagcatcagtcaattgaaaagagcctgcttaattgatgcaaccaaacttgcttcctaaacctgactcaggttcaactctcggtatgatttttactatctatagctcaagtcactgtgtctttggatgctccttgtttggaaaaagtttaacttaggtttata

SEQ ID NO: 14006 - DNA, 707 bp, Homo sapiens
ggaagaaggaaagcgggtccggttccttcaggacccgcttcagggggcaccgcggcggcttggggaccatttggagccccgtcctggggagaaaacagctcacgtctatggccctgactgcttaggcgggagctgcgtgcagctcagcttctccggggcatttttttctacacgctgggtgagctatgaacaggccaactgcaagggcgagcagtttgtgtttgagaagggcgagtacgcccactgggactggtggaccagcagccagaggacagactcagcagcctgaggcccatcaaagtggacagccaagagcacaagatcatcctctatgaaaaccccaacttcaccgggaagaagatggaaatcatagatgacgatgtacccagcttccacgcccatggctaccaggagaaggtgtcatctgtgtgggtgcggagtggcacgtgggttggctactagtaccctggctaccgtgggctgcagtacctgctggagaagggagactacaaggacagcagcgactttggggcccgtcaccctcaggtacagtccgtgcgctgcatccacgacatgcagtggcaccaatgtggtgccttccacccctccaactagtgcccaccccaccatgcctccttcccaggacccaggtctgctgcccaggaaccctccagacctcccagagagtgaataaagtgtgacttgca

SEQ ID NO: 14007 - DNA, 1858 bp, Homo sapiens
gcagccaaagccccaggagccctaggttccaaccaactgatgcccctgtgcccactggcccacgccatgcagccccagtccgttctgcacagcggctacttccacccactacttcgggcctggcagacagccaccaccaccctcaatgcctccaacctcatctaccccatctttgtcacggatgttcctgatgacatacagcctatcaccagcctcccaggagtggccaggtatggtgtgaagcggctggaagagatgctgaggcccttggtggaagagggcctacgctgtgtcttgatctttggcgtccccagcagagttcccaaggacgagcggggttccgcagctgactccgaggagtccccagctattgaggcaatccatctgttgaggaagaccttccccaacctcctggtggcctgtgatgtctgcctgtgtccctacacctcccatggtcactgcgggctcctgagtgaaaacggagcattccgggctgaggagagccgccagcggctggctgaggtggcattggcgtatgccaaggcaggatgtcaggtggtagccccgtcggacatgatggatggacgcgtggaagccatcaaagaggccctgatggcacatggacttggcaacagggtatcggtgatgagctacagtgccaaatttgcttcctgtttctatggccctttccgggatgcagctaagtcaagcccagcttttggggaccgccgctgctaccagctgccccctggagcacgaggcctggctctccgagctgtggaccgggatgtacgggaaggagctgacatgctcatggtgaagccgggaatgccctacctggacatcgtgcgggaggtaaaggacaagcaccctgacctccctctcgccgtgtaccacgtctctggagagtttgccatgctgtggcatggagcccaggccggggcatttgatctcaaggctgccgtactggaggccatgactgccttccgcagagcaggtgctgacatcatcatcacctactacacaccgcagctgctgcagtggctgaaggaggaatgatggagacagtgccaggcccaagaactagaactttaaaacgttcccggggcctcagacaagtgaaaaccaaagtaaatgctgcttttagaactgtgccctcatgccctcttcctgctcacatgctagcggggcccagcagccctgggtggttttgccagcatgctaactcttgtaactcgcagctgcatcctatgagctctcccaagcttccccgcccctcccctgggtcagccgtgaggcccacctttgccaccctcagctctttcctctggtgtggcttcagcttgaaagcaacctggagtcgggggcacagcctttggggcctggctgggagagggtcttggagcattaggggaagaagagagcagtgggatcttggggcctgagaagccttggaacgcttctggcagccagagctgggtgtgggaatgaggcctagatcgatatccctgggttagagttgaaatttgctgcaattccactggaaggcatttcccacgaggccagaggttgccaggctgcctgaggtctcctattctactctgaaccataaacccagagaagaattactcattaaccagcataaatactgcctgaggatcaaaactcagaggcaaagagggagttcctgactgctagaggtgccaccaccacaaacactttttattcaggagatactttttgagaatctctgctctgttcctaggttcagtgctgggtcctgggaatacagcaggacagacctcagcttatctcttcatagaaattatacaaagagaattggggagacagctaagaa

SEQ ID NO: 14008 - DNA, 654 bp, Homo sapiens
gcctggaggttcctaacctccatgaaaccctcaaaccacaacctccctcattttgcctaacatgaagtggatcacaggtaacatggcatcctcaggatcacaccataagcaccagatggagaagggttttgcctgggatgagtcaaggtattacattaatgggaccagcttgggccagccactggctgggatcccttctcgtcacatggaatcccttccttattctctttcctcccatgactggtatggttagaccatcctggggacaaactcacccttctcttcactagaggaagggtggtgggagaggaaataacttcttctgcagccttagaggtgagacccagaggacccacaggaatgggcctggagggcaagtggccatagctgagactttaaaccagagaagaaagagggcaaggaaaccagatcagtcaccaatgctaatgtcctctgggcatgtcaacactaagaagatgaaaatggaaaacatgaaaaggaagtatcacttctggcttatgttatgtacttggcacagtgttaatttccatccttgcaccttccccgtgcccttctctgcttcacaggggcctaattaacacacagtgtcctataggcctcagatgaaagctattataaaagtgcagaaacggt

SEQ ID NO: 14009 - DNA, 703 bp, Homo sapiens
ggtagctactctggggtcccacacaagctgacctggcagcaggggctttgcggccccttccttgctcagctgcctgtttcccctagactacctctgctcccctgaggagaatatctacaagatcgactttgtcaggtttaagattcgggacatggactcaggcactgtcctctttgaaatcaagaagcccccagtctcagaacggttgcccatcaaccggcgggacctgggaccccaatgctgggcgctttgtccgctaccagttcacgcctgccttcctccgcctgaggcaggtgggagccacggtggagtttcacagtgggagacaagcctgtcaacaacttccgcatgatcgagaggcactacttccgcaaccagctactcaaaagcttcgacttccactttggcttctgcatccccagcagcaagaacacctgcgagcacatttacgacttcccccctctctccgaggagctgatcagcgagatgatccgccacccgtatgagacccagtctgacagcttctacttcgtggatgaccggctggtgatgcacaataaagcagactattcctacagcgggacaccctgatcccacggctgccctgaccccaggaggctccagttctgggctgggagctgtgacctccccaacgctcacccctcaaccccaagtcctctgcttggggagttctccaggagct

SEQ ID NO: 14010 - DNA, 320 bp, Homo sapiens
aaatattagttgtgagggcccgtgttgtgcattgtaggttggttagcagcgttctcggcctctacaccctctcagttgtgaaaaccaaaaatgtgtattgagatcagccctggttgagaatcaccaagctagacctctttgggttttgttgggcaatttaacggaactctggctatgccttttttgaggcagttgtagctagcttggttcattgaagctaggtttgaaatcattcataactaagttatgatgttaggaattcgacagtccatgcattgtttcatctgaaaaacaactactctacctgcacgacaacacat

SEQ ID NO: 14011 - DNA, 671 bp, Homo sapiens
tgcctgtgcctcagtaaataaggaaaatgctttcttagaaggctgctccagtaactgcatattccttgccatcctctacagaaatcaccatctgctctcctaagttcttctggaaagagcaccgtaaccatgtcatcctaacagcaatgccatgaagaaagggaggcagctccctccacgtcctggctccagtgcccactcccgtgccccctccatggcccacgcagcctggccacctgggtgacatctggtccctgtgtcactttctgcaagacaaggaccagcctcaaagaggagagcatggtgtcctgaaggagatggcggccaccatcacctgtcctgtggctttcctctgactgcccaggtgggggcccagaggcggcggcctctcagtccagctttgagtggagttacataatttccaggcttccctgcagttctcgcctccccatccctgaactgtttacacagtagctctcacccacaaagagtccgcatgatggcttttcctctgtttggaagatgtggatggctgtgtcccaagtttttcctacctaagatccttttcagtaggggatggatttggtctatctgatgatcaagagttcagggtggcctttgtgatagtgttacaccccctcccaggtccaataaacagtcttctgacaaat

SEQ ID NO: 14012 - DNA, 318 bp, Homo sapiens
gctgcacttctcagcaagttaaaagattaggcagttaatctttattcatttgggcctttgtgaatttgtatttaaattatttttttcagggattgggcaaattattcttgtttctcctttacaaaaaaataaatgcggatattttgttcaatgacccccaaacccacttgaaacttaggtggtcatattggcttgcaaagcaatgtccctaattgtaccagtcagtcacacaagtggattcaaggacctgctttgccagattgacctgtcaccaagctcacaacacatatcctccacaaacaacatgtgttatgtgaa

SEQ ID NO: 14013 - DNA, 414 bp, Homo sapiens
gtacaggcgtgagccactatgcccggcccgtaagtcagtttttgaaatataaaagtggtataggctagatgtgacaaaaaacagtcaaatgatacaagagcttataaagtcatatggcaagttcctccccaccaatcatgcagtgaagtgagggtcatgtgtgtccttggaagagtcacctccagttcttgcagggggatgttttcctaaaactttctgagcattgctcttctctgctcaagccacttcaatacacctcaggcagcaaagtcttcagcttttgagccgtggtctctgaggggtgttggatgtggaacgaaattcaaatcggtacaatgatgactgtgggcaagtgcgatgaaggaacgaacctgcagggcgcagaaagacgtgttctgggggccctgccttggt

SEQ ID NO: 14014 - DNA, 953 bp, Homo sapiens
gagattttcataattcaggggctgtggataggattgttcctctgtttccctaatcattcatctgttcatgtgtccctcttgtgccagtcagcctaaggtatacagatgccatgctccacaccacgagcagtgtacaaatctggctgccgtttactttctgagcaagcactggagtccactccgacctttttctttgaacatgcatgctgctggaatatgtataaatcagactagcagaagtacagagtgatgggagcaaaataggcactgaattcgtcaactcttttttgtgagcctacttgtgaatattacctcagatacctgttgtcactcttcacaggttatttaagtttttgaagctgggaggagaaagatggagtagcttggaaagattccagcactgagccgtgggccggtcatgagccacgataaaaaatgccagtttggcaaactcagcactcctgttccctgctcaggtatatgcgatctctactgagaagcaagcacaaaagtagacaaaagtattaatgagtatttcctttctccataagtgcaggactgttactcactactaaactctaccaagaatggaaacaaagaatattttctgaagatttttttgaagattaatttataccctataaaataaaacttgttagcttcgatgaagtcacttcatcttctctcctaccttatttttttaaataagtttttaggtcctgacactgacatcaaatacatgcacaccagaaaggcatttccaccaccgtccccactcattagcgtccagagtgcctttctctctcggctttttttcccccctgagctctagttttaaactttctcctgttaaaaaaattgtacttttatttcatgtaaactgcccctctgaggatttgggcatattttttggaaggtgcctaatgcttaggatagtctctagggtgatgcac

SEQ ID NO: 14015 - DNA, 403 bp, Homo sapiens
ggacagacggagtgacagacggactgaccatggccgaccagccaaaacccatcagcccgctcaagaacctgctggccggcggctttggcggcgtgtgcctggtgttcgtcggtcaccctctggacacggtcaaggtccgactgcagacacagccaccgagtttgcctggacaacctcccatgtactctgggacctttgactgtttccggaagactctttttagagagggcatcacggggctatatcggggaatggctgcccctatcatcggggtcactcccatgtttgccgtgtgcttctttggggtttcgtttggggaagaaactacaacagaaacacccagaagatgtgctcagctatccccagctttttgcagctgggatgttatctggcgtattcacca

SEQ ID NO: 14016 - DNA, 818 bp, Homo sapiens
tttttttttttttatttaaattattttattgaaggagataagttactcagatattaactggttgtaggcaaagggaataaacatggtgaagtcaggtttgctggtaaaggggagacagtactaaacgccctgcccaacaaatactcagaatccagggttttcatatttctccatggttcaatctctcacaggtcactttccattcaaaggattatggagaccaaataagacaggattctttcaggtatcaacccagagtctttaggtcttctctcagccaaggcatcgagtgaaaatacaatttatttttcggattcctctggaggattaaaaagtttctttccgcattgcaatgcccatgctccctgctcttgggtcctgttttctacgtactcattcttcaggcattttctcaactcccgatcaacatcattacaataaccaaaaaatttcagaatgttgtgatttttgtgacattccttaagcaagttaatcaagacgttgcattcttcaggcattttctcaactcccgatcaacatcattacaataaccaaaaaatttcagaatgttgtgatttttgtgacattccttaagcaagttaatcaagacgttgcattcttcagtgtgcaagtgtggagataagtcaggatgcatctttaggagatgaggatggatcacagcagtgcaacccgactcgtggccacaccgggagaactgaagcggcagtagccggcggagacgcccgacccgaaggccggctgctagggagcagacagctgaaccgcttgccagacgccgaaacccagtgacgccctcc

SEQ ID NO: 14017 - DNA, 1371 bp, Homo sapiens
tctggttcggcccacctctgaaggttccagaatcgatagtggagtaacttggctccgggggctccgctcgccgtgcccacacgccgcccgccacccaggaccgcgccgccggcctccgccgctagcaaacccttccgacggccctcgctgcgcaagccgggacgcctctcccccctccgcccccgccgcggaaagttaagtttgaagaggggggaagaggggaacatggacatgaagaggaggatccacctggagctgaggaaccggaccccggcagctgttcgagaacttgtcttggacaattgcaaatcaaatgatggaaaaattgagggcttaacagctgaatttgtgaacttagagttcctcagtttaataaatgtaggcttgatctcagtttcaaatctccccaagctgcctaaattgaaaaagcttgaactcagtgaaaatagaatctttggaggtctggacatgttagctgaaaaacttccaaatctcacacatctaaacttaagtggaaataaactgaaagatatcagcaccttggaacctttgaaaaagttagaatgtctgaaaagcctggacctctttaactgtgaggttaccaacctgaatgactaccgagagagtgtcttcaagctcctgccccagcttacctacttggatggctatgaccgagaggaccaggaagcacctgactcagatgccgaggtggatggtgtggatgaagaggaggaggacgaagaaggagaagatgaggaagacgaggacgatgaggatggtgaagaagaggagtttgatgaagaagatgatgaagatgaagatgtagaaggggatgaggacgacgatgaagtcagtgaggaggaagaagaatttggacttgatgaagaagatgaagatgaggatgaggatgaagaggaggaagaaggtgggaaaggtgaaaagaggaagagagaaacagatgatgaaggagaagatgattaagaccccagatgacctgcagaaacagaactgttcagtattggttggactgctcatggattttgtagctgtttaaaaaaaaaaaaaaggtagctgtgatacaaaccccaggacacccacccacccaaagagccaaagaatagttcctgtgacattccgccttccttccatgtagtccctcttggtaatctaccaccaagcttgtggacttcaccccaacaaaattgtaagcgttgttaggtttttgtgtaagattcttgctgtagcgtggatagctgtgattggtgagtcaaccgtctgtggctaccagttacactgagattgtaacagcatttttactttctgtacaacaaaaaagctttgtaaataaaatcttaacattttgggtcaaaa

SEQ ID NO: 14018 - DNA, 621 bp, Homo sapiens
ggcccataggggaagatggcggctgctcctttggaggagcgggattgagaggatcggggtggggagaccaaacaagagagacatttctggctctgaaggcgaacgcttcgctggccatttaggagctctgctcaaagccagacgtatcctagaaggaaaacatcaccatggctacagaaattggttctcctcctcgttttttccatatgccaaggttccagcaccaggcacctcgacagctgttttataagcgacctgattttgcacaacagcaagcaatgcaacagcttacttttgatggaaaacgaatgagaaaagctgtgaaccgaaaaaccatagactacaatccatctgtaattaagtatttggagaacagaatatggcaaagagaccagagagatatgcgggcaattcagcctgatgcagggttattacaatgatctggtcccacctataggaatgttgaataatcctatgaatgcagtaacaacaaaatttgttcggacatcaacacataaagtaaagtgtcctgtatttgttgttaggtggactccagaaggaagacgcttggtcactggagcttctagtggggagtttaccctgtggaatggactcactttt

SEQ ID NO: 14019 - DNA, 897 bp, Homo sapiens
ttccattttgatggtcgtttgtatacattctgctaaaaatcatgtatgaaaagttttcatttttggttgaaagaggggccacttaaactttgccatgctcaaatgtgtaaagccaccctcgtataagggaacatgccaataccgtgcagaactcacgtgacagccatctcctcacggtggcacagtaatagatttagagacctgacagctggggggccggagagagcactgtgtccctctcctcatgttatggatgaggaaactgagacccaccagtggtgagttgagtatctcatggtcacagcatcagtcactgaagatccaagactcaaccaggcctcctaacttcccggaaatattcttttccccaaccctggctacctgtttcatggacttgaaatctggaaaccaatcactgccctgctgacagctcaggattatgattacatgcctcgaatcaccacgggcccaggagacaggagcaacttgtctggagaaggctgctttctgggtctgcagttgacatatctgagcgagcacagatggtcctctgaccccgccagagagttgaagaccaatgtggaacttgaacatcatcatcaaggatttattaaatgcccactgtgttcaaagccctgtgttaagctcttggggaatttcaaagaaaatctaagctgtgatctcaagcgaagaatagctttcattatagaggggagcaagacacagtgcaatttaacacttatcaataatgaaacaacttatcagaaaaaaagaatataaaaatgaaaggcaatgaccaacagagaaagcaacagagttgcagaaacttcacagagtgccatgagatcatcttctaaatctcagctgctgtttcacgatgattaaaacaccagggac

SEQ ID NO: 14020 - DNA, 1059 bp, Homo sapiens
  misc_feature (1)...(1059): n = a,t,c or g
tttttttttttctcaattaaagatttgatttattcaagtatgtgaaaacattctacaatggaaactcttattagatgctgcatgtactgtgctatggaccacgcacatacagccatgctgtttcagaagacttgaaatgccattgatagtttaaaaactctacacccgatggagaatcgaggaagacaatttaatgtttcatctgaatccagaggtgcatcaaattaaatgacagctccacttggcaaataatagctgttacttgatggtatccaagaagaaatggttggtgatggataaattcagaaatgcttccccaaaggtgggtggtttttaaaaagtttcaggtcacaacccttgcagaaaacactgatgcccaacacactgattcgcggtccaggaaacacgggtcttccaagttccaaggggctggggttccccaacgatcaagttcctgtgctgtaatcaagagggtcctttggactggatagggagcacttgggagctgtacaccatcagtcataatggatggcagtgtaaaagatgatccaaatgaccatgaacaaggcaaaagaggtcataaacccttccttcgtgagctcccacgtgccaccatattcttcctcatcaatctgtaggtaattgctgaagtagaggtacaggactcctgcattgatcaggcagaatcctgctattcccaagaaccctcgtaatggcaaaactccccaaatgacacccaggaccacagcaatgatctgtcggaaccagtagatcacatctaaaaattcatccttatcctcccaggccgcgtctccgcagcaccttactccagacggagactttgagggccccgttggccagctgcggctgaggcggctcctccttccgccgcccgccgctcatcctcccgtcgcgccnccgggccgggcctggggcgcgcgggctgagccaaagggagtcggggtctagggtcgcaggtcacgggcggggcggctgcaggctcagcggcccggtcctgcgggcgctgcggttcctcacaacctggccaagctacccggt

SEQ ID NO: 14021 - DNA, 461 bp, Homo sapiens
ggtaaaaacagggaaaacatttttaaatgacaacttgttcaaaatctaaactttaaaaactaagctctagaaattcaaggaaaataataagatgacattttgttttgcctcaagccctgaacacatcattggtataatcatttagctaatgtcaaacaacatagtgtctggcaagattttagctaggagtcaactatcaactctccacagcttatcactgaaataacaagcttcgtgtgaccatattaaaaattatcagttttacatttgaaaggcccagtgccaacctggaaaaaattgcttgcattgatgagtaataaattctacattttgcatattctcacaactgcatgaattcatttcacaatgttggcaaataatctgaattcttggtggcacgggtcctccgtatgctgagcgccggtcccctgggcccacttttctttctctatactttgtgt

SEQ ID NO: 14022 - DNA, 790 bp, Homo sapiens
agccggtggcacgacagttgctgcagggaatcttttaaacgagagcgagaaggactgcgggcaggaccggcgggctcctggggttcagccgtgccgcctcgttacgatgaccagtgtggttaagacagtgtatagcctgcagcccccctctgcgctgagcggcggccagccggcagacacacaaactcgggccacttctaagagtctcttacctgttaggtccaaagaagtcgatgtttccaaacagcttcattcaggaggtccagagaatgatgttacaaaaatcaccaaacttgagacgagagaatgggcaaatgaaagctactgacactgccaccagaaggaatgtcagaaaaggctacaaaccactgagtaagcaaaaatcagaggaagagctcaaggacaagaaccagctgttagaagccgtcaacaagcagttgcaccagaagttgactgaaactcagggagagctgaaggacctgacccagaaggtagagctgctggagaagtttcgggacaactgtttggcaattttggagagcaagggccttgatccagctttaggcagtgagaccctggcatcacgacaagaatccactactgatcacatggactctatgttgctgttagaaactttgcaagaggagctgaagctttttaacgaaacagccaaaaagcagatgggagggagttacaggcctttaaaggtaaagctgggagatgaaaggagggaaagggttcccgatttcctaggaaccaggcaaaccttttgttaacattcaagttaatt

SEQ ID NO: 14023 - DNA, 214 bp, Homo sapiens
caaagcagcgccctgcggaaggcagccctcgtgaactcagaagttagttttcgtctctggacctttttataatcggacttcagcccatcactgtctcgttttgtcctcagaaacggcgacagcagcctcttcccaatgttgagagcaaaaagtgtgaacccagaaattccgagacagatctcaattacttgccaaggttgaggacgcgcgcgtg

SEQ ID NO: 14024 - DNA, 2742 bp, Homo sapiens
gtcgactacaaggtggctacgagttttccagatttaggagacttcagaaaggtggggcagatagaatggagatggcaaagatctctttgggcatatatgggcctggcgaagtaatggaataatttctaattttcggagaaggcaagtgccctcatgccgggatggcagaagatgagcctgatgctaagagccccaagactgggggaagggcccccccaggtggtgctgaggctggggaacctaccacccttcttcagaggctccgaggtaccatttccaaggccgtgcagaacaaagtagaggggatcctgcaagatgtacagaaattttctgacaatgacaagctgtatctctaccttcagctcccctcaggacccaccactggagacaaaagctcagagccaagtacactgagcaatgaggagtacatgtatgcctataggtggatccgcaaccacctggaagagcacactgacacctgtctgccaaagcaaagtgtttatgatgcctatcggaagtactgtgagagtcttgcctgttgccgcccactcagcacagccaactttggcaagatcatcagagagatcttccctgacatcaaagctcgaaggcttggtggccggggccagtccaaatattgctacagtggcataaggaggaagaccttggtgtctatgccacccctgcctggacttgacctaaagggttctgagagtccagaaatgggcccagaagtaaccccagcacctcgagatgaactggtggaggcagcgtgtgccctgacctgtgactgggcagagcggatcctgaaacggtccttcagttccatcgttgaggtcgcccgcttcctgctacagcagcatctcatctctgcccgatctgcacatgcccatgtgcttaaggccatggggcttgctgaagaggacgaacatgcacctcgggaacggtcatctaaaccaaagaatggtttagagaacccagagggtggagcccacaagaagccagagagactggcccagcctcctaaggatctggaagcccgaactggggccggtcctctcgcacgtggagagcggaagaagagtgtagttgagagctcggccccaggagccaataacctgcaggttaatgccctagtggctcggctgcctctgctccttccccgggcccctcgctcactaattccgccaatcccagtctctccacctattctggcccccaggctttcttcaggtgccctgaaagtggctacactgcctctgtctagtagggccggggcacccccagcagctgtgcccatcattaacatgatcttaccaactgttcctgctttgcctggacctggacctgggcctgggcgagctccacctgggggactcactcagccccggggcacagagaacagagaggtaggcataggtggtgaccaaggaccacatgacaagggtgtcaagaggacagctgaagtacctgtgagtgaggccagtgggcaggctccaccagctaaagcagcaaagcaggatatagaggatacagcaagtgatgccaaaaggaaacgggggcgccctcgaaaaaagtcaggtggaagtggggaaaggaattctacccctctcaagtcagcagctgccatggaatctgcccagtcctcaaggttaccatgggagacatggggctcaggaggggaaggcaactcagctggaggggcagagaggccagggccaatgggagaggctgaaaagggggcagtacttgcccaggggtcagggagatggtactgtttccaaaggaggaaggggccccggttcccagcataccaaagaagcagaagataaaattcccttggtcccctcaaaagtgagtgtcatcaagggcagcagaagccaaaaggaggcttttcctttggcaaagggagaggtagacactgcaccacagggtaataaagacttaaaggagcatgtgcttcaaagttccttatcccaggagcataaagacccaaaagcaacacccccatgatacaggtctgtggggaagagtgtttatatccctacgttaactttgcctagtagaggcccttctttgcacttgcttctcatttggctattcttttcctaaggaagtccattctcctctgtacagacagctgagtcacccagtctacttagtacctggttgctgcctctgaccttttcagcttgataccctgggctttagtgtaaccaataaatctgtagtgaccttacctgtattccctgtgctatcctgtgggaaggtaggaatgggctaagtatgatgaatgtataggttagggatcttttggttttaaatcacagaaaacctaattcaaactggcttaaaataaaaaggatttattggttcatgtaactagaaagtccataggtagtgctggctccaggtgaagacttgacccagtagttcagtatgtctctaaataccggactgacttttttctcactgttgcatcttctgtaggaccatttaagtctgggccacttaatggctgccagcattcctaagattacacttttccccatttatgtccaatcagaaaaagaaggcatctttgtaccagaaatctcagcaaaagccctaatattcacactgattaggcctgggtcacatgtccaccctgaccaatcactgtggccaggaggatgatacatgctaatttgcttattctatatcatggacaacacctttggggaaaagggtgggggtcagcct

SEQ ID NO: 14025 - DNA, 901 bp, Homo sapiens
tttgttattatgatctgacatttgttttattaaccattagaaaagatttgaaaaaacgaattccattttaatagtgagacaacacagtagagctaatcatggaatattaatgttttgctattcgggaattactaagggggaaatttgcaggaaactttaaggcaagaatattgcaaataagttgccaaaaatatatgcttatagccatagcaaaatgaagatttagcatgcttgtctttgctcccaaatatttttaaatgcagctttattaaactataatgtttttaaaattaatacttgtgcttatataaaattcagtgatttaagtacatgatactcatttggtcacattttctgctattactgttcggcttcccaagaatttcattcaatcagcaagtttagttcacacaaacgttaaggcacagagtcatgaaacgaactgattttaattctgaagtgtgttaaagtaatctgctcccctctgccccaaacacatatacatagctgcttattcatacctgtttgctaaaaactcatgtgcacctccttacgtttaaatataatttgggaaattaatgatgtaaaatgtaaatcataattataattccttttaaggaaattagtatttttctttagttacttcaagccacaatccttaattcaatgatcccagaattctttacaaaaccatccttggtatatgaatatcttagacccaaaaatatctgtgattatgatgaatttatgatgatgaaaaaagacaccaacttttatagagatccctgaatatacgagagctaaggaggcacaaggattaaactttctatgacttgctgtagaatgtgtgccttgctaagtagggattagcttctgaataaaatgtgaaaactgagatcac

SEQ ID NO: 14026 - DNA, 1217 bp, Homo sapiens
tttttttttttctcagttcatataatttattgcagttagcacacagtttaaaaattcaccaacacaccaatagtacaaaactaaacagcattataagttattccccctcaggaaaataaaacatactatgattgtcaaagctagatgtcagtctaagttttagaacaaaggaagaatgtgaaactaagaaaaggaaaaagcaatcactcacaatgaccacaaaaagaaaatccaaaagaaagtccgttttctcacagacattgattgtcttctctaaattaataaaaattattttaacataaactgtattttaaaaaaactagaaactcttcaagtaactaaagataatgctccaaggccattttcacagctttttttgtttgttcgtttgctttaaatgccattacagccaaattaacacacatttaaccaaatatttccaaaacagtccagcaacacacaatggagttttccattcagtatcttaagcacaaaaataggctatgtttacagtagttaaggcgatcaaattttaaacaaaagcaattaaaaaaaaaagggaaaaacagcaaacgttttccatgctactcccatagaccttatttgtaagtgcaagacaggaaaacaaacactgtgcaaaatgcttttgccttgcgtgctggtcattaaaaccacacgttaggctgcagcctctgctgccgcaatccacatagtctactaacccccttccccatgtcaatcaaggcagtccagtcctttcagcctggggctttttcagtccatagaatcttttcatgagttgggggtggagggtggtggtggggggggagagtaagggagggagggtaaggaggaaggggagaaaaagaaaaagggagcaaacaaaaaaaaagagagaacgacctattgtcaacttgtgcagtagttattctaagaacgctcaactgggtaaatgtgtacacctaaactctgagctggcatgggttttgtgcaattagaagtttgttataaatgcacactgcacatgcaaatctttaagctgtttgtaaacatttatattttccttgttatgtagcgaagttatcaatttgcagcttaagtttttattcagcttaacagtttcaacttaaagacagtgggaaagtcaatttaaattatataaaataaaaataaaaacagtgcatttacggttctttcataacacccagttttttttt

SEQ ID NO: 14027 - DNA, 479 bp, Homo sapiens
  misc_feature (1)...(479): n = a,t,c or g
ggagnnnnnttggnattggnnaacagctatgacnnnnnnnnnnnnnnnnnnnnnnnnnnnnnnnnnnnnnnnnnnnnnnnnnnnnnnnnnnggcacgagtctctctctctccctctctctctgtctctctcaatcacacacacacctgcttgtctgtctgtctctctctctaaaaatctgtccttcggatgctccatacaggctgcatgagctgttccctatctgcttctacttcctctcataccagactttcaaccacccttcacagcccagcctcacttgccatggtttaacagcttgaacaaaccacactcctttctgctgcaagcccccttgcacatgctatttcctctgctcggaccagtctctggatttttaaaaatctagttaattcccattcatccttcagatttccatcatcgttttccccaaggaaactttttctccctccctgaacttcaaagcatttatcacatctg

SEQ ID NO: 14028 - DNA, 500 bp, Homo sapiens
  misc_feature (1)...(500): n = a,t,c or g
atagcatcataggaaactttgcaacttctgctgctttattgaaaggatgatttttagtctctaagctgtgtcaagttgttattctttattgtgaaaggacaggaaggggaggggagggaacaggaataaagaaatctgtaaaaacagatgcctgattaaatccctgacctaataaagtccctcgcctgtactcggtgtctcccaccttacaaagcaatttactttaagctttgatgaatccaggtccttacggcaatcctgggaaggagacaccccatttcacaacccagacacccagggcctagtgaagccgggcttatgggcctgggagcctatggcatccaaggcgcagaactgcaacgtgacccagtattcagattctctgtccactctctctcctatgcccacttcacctcagcagggccctcctggggcaagggccgaggaacctggggtttttgaaggccgggtcccacaggtgncaaggctggcaatttttt

SEQ ID NO: 14029 - DNA, 283 bp, Homo sapiens
gaactggaaggctcaaaatagaaaaattattaatcatccctaagttgatatgcaggtttaatgcaattcctatcaaaatcccagcaagactatttgtagagcgagaagataattctaaaatttgtgtggaaaggcaaaagaactagaagaatatttaaacaaagtaaaagcaattactctacctaattttatgacttattacatagtctgacatagtaatcaagaccatgtggtaatggtgggagacagaaacactgatcaatgggaacagaacagaggaccc

SEQ ID NO: 14030 - DNA, 784 bp, Homo sapiens
ctgatatgtaaaattttacctctatttcagatagaagccaaagtaaaacatgaggaataaaaacatttatctatgtattcagaatcacacacaagttacctttacagttcaatttactatatagaaatcattgggttttatatttgcagttaacttttgaactgagattacaatattataacaaaaaactttacattaattcagaactttttagcataccaaattgaaatacataggttcaaatttcagatttatggcaaacagtcttcaaatacaatacagacatttcttaaaagttaccgtatcattcacatgtgatatttgcaactctgagctatttcatatagaacagctctcctgcagatatggcaaagttgatatgccatgaagttcaaggcctgtatagtcaagccaaggactcaaagttgcaccatctttaaaaaggtttggcatttctggaccacaacaatgcacaacatgtaaagaaggtaggaaacagttccccctccttgttaaatggttaaaaaaagttacatggtagcttggaattttgcataaaaccccataatataccttggaaaagtccaagggcaatttgatggcaatggattggggccctatatatatatttttttaatagaacccatgagatttaaatgggcattaatcaaatcaaaaaatattaagcacctactggtttaagagatttaaatttattagagattcatgatcaatttctttccacctcgaaatcaaggtgtaaaaaccagctattaagtgcaat

SEQ ID NO: 14031 - DNA, 425 bp, Homo sapiens
  misc_feature (1)...(425): n = a,t,c or g
gctttttagtttacagttttccaactaaaaatataagaatacagacctacgtatgtactttttatttattcaactaatatttattgaatacctgtgtaaaaagcacgtatttgtagtttgtgtttggcaaaaagaatgagagatgcaaattggtttgttttactaatctaaagcaactttgttgaacttgcacataatttctaaagattgatggttatctttggagtttagtatggtagccatgtctcctattagcagcattaagcttacctacagcttacatttctaattgtctgtaaatcctatattgtgatataatagtttaacacatttttgtagctgtccaatgtgaaagaaaacccattgaagtatcacgagaaaaatcttncactggccggttcaacagaaaaaatctatttccgaag

SEQ ID NO: 14032 - DNA, 775 bp, Homo sapiens
tgcccatttttaattattagtttttccacaattgagttgtaagagtctcttattgaaagtctgctggtattacaggtttatagctcagttttgtgagctttattataaatctgactttcagaaatagatctgcttcccttaaaaaaatctagttcctggatgaggctgatagacctttgatcaaagtccattctccttggtaatgaatgctccttgtttcttaggacagccaactggtatatccttagacaaactcctaattctctatgcaaagccattatcatggttttctataataaataagataaacaagcaggaactaatagaaatttaatgttgttttaagataatacttaaatattaagaaagctaaaatttaaaatgtgttgactaggtttttctacacattatatttacataatgactaaggtaaaacctttccacaaatagttgcccaggaggaagaaaaagcaacctacaacagtctctggggcttgcactgccttctcaggccagctataccctagctgagcaaagaactgaagaagcaagtgtccactccccacccctctcccctgccccccttttgttacttgaagtgtttctgagtaacaaatgcaaaactaggtttgaatataaaagctagacgaccacgccaattcaggattgtgtttcatctgaggagacctggcatagaaaaaacaagaattctctctcatttacaaggatactgtgatgaaagtcaaagatcacacataaatttatgatctctgag

SEQ ID NO: 14033 - DNA, 571 bp, Homo sapiens
ggaatcacatgttcttcatcgcgataacgaagaaacctgaggttccattttttgggcctctgtttgatggagccatagtgagtgggaagctgctgccaagccttgtatgtgccacgtgcatcaacgccagcagggctgtgaagtgcctcatcccactctaccagagcttctatgaagagcgagctctgtatctcgaagcaataattcagaaccaccgcgaagtaatgacattcgaggatttcgcagcccaagtcttttctccctctcccagctactccctcagcggaacggattaaaacacgtaaaggtcttcatttcaatatttgagcaaggggccctggcctccagtctgagtgctgacctcgaagagcccctgagtgaggaggagacagaacaccctctcctgcctctgccccgagccactaaacccagaatctccaggaaatttcgttgctgtactagtgccctcagcaggtcttcccattagtggacttctgaagcccatggtgaatgccactaccgtgtctcagatgggactcaaactaggctgtatcatcttgtcctgaaacct

SEQ ID NO: 14034 - DNA, 1743 bp, Homo sapiens
ttttttaggggagaaaattaaaccttatttatttttaaagtcaaaccactaggaaaatatatcacagcctggaaacagcaaacggacaggctatattataatttcaagtaataagttggtgaaaattcaacgaagttgctatcaaaacaataaggtgccatgcttggggcaggaacactgccagctgcacaagccccaggcaaaaatggtatttggtaatgggggctgtctctcctttgctctaagggagtcagctcatcctagcccaagttgcttactttttctcccttgaatttcctgttgccaggggtttgtctcaattgggctctgttaattcagggggctaagtaggcaatgctaggtgtaggctttcattccatatgttctaataaaaccaggttttcccaaatccagtacttcatttactctgttgtaatcaagtagccaactgctcctcttttactgttcattcctagatactagtatatatcacaatcaaaacccccttctcttcaaggggaaagtgttactgcaagattgtcctgtcattttgttacacacagcctccaggggccatcagccagtaattctgcttcccataattagtgtgtcatcacctctcatgtttctgcacagtctccaggctgaaagatgcagcatgtaataattttaagaaatgtacatccacatcttgatgaccagaaatggggatccacaaggaacatttcaaagttcttatccaaactagtctacctcccagttccacatcttaaaatcaacttgtatgcccttgtataaattaccccaaatcaagaaaacaaagacccagaaaactttctttcccttctaagttagtgacctcattgattttgtttcacagcttatggaagatggtggggtgacacttttggtaaacaggatgttggcaacaaagagaaaatatctctcctcagactccaccaactctaacctgccagcctgttagtacctgtgtagtaagaagagtctggtaccttggagggctctggcttgttacaggggaaagccttactgccaggacaagcactggccacaggaaataataagctctaaaactctcctgtaatatctctgactcgatttagcaccacttttttccatttcattttttagggactgaaacataaaataaccagtgtccagaggcaagtgacatatgccttacgcttgtggccatccttcatttcttcattcgtaaactttgcttaaaagactaaaattcccaattccttataaaaaatatattcttgccctcagccctgatggccactggcaaatacttttattttccaattgataagagagcctccttcatcttcttggtcatagttgggatgaggtgcatgtggtcatccacacacttggtcacacaactgtccagctgctgcttcacctgaagctccttactcccagcatctattgaatctttggctttgtcgttgcaatgcatggtgcaccgggccaggcggtcctggaacttctccagctcactggtgaccaaagcctgggcttgagccagaggcacatggcagcgctcgatgcactggtgcacctgcttcatggaggcctggctgtcctcacaacagctggcgctgcaccggaacatgagaccctgcatcttccagatgttctctctctccagactcttcaccatggactcgaccgcctcctgcacccggagctgctgcagctcagccatgcgac

SEQ ID NO: 14035 - DNA, 655 bp, Homo sapiens
gatcccggtgccagggaccctgcccagttccaggcgtcgcctaacccagaaacgactgggcgccgcgtcctggaaaggccccagcgcacggacatctgaggagctgtttccgttcctctgcccgccatgcccgttcctggagctggacacgaatttgcccgccaaccgagtgcccgcggggctggagaaacgactctgcgccgccgctgcctccatcctgggcaaacctgcggaccgcgtgaacgtgacggtacggccgggcctggccatggcgctgagcgggtccaccgagccctgcgcgcagctgtccatctcctccatcggcgtagtgggcaccgccgaggacaaccgcagccacagcgcccacttctttgagtttctcaccaaggagctagccctgggccaggaccggatacttatccgctttttccccttggagtcctggcagattggcaagatagggacggtcatgacttttttatgattgggcacggagggatccagggcatctgtgaactggctgcttcttccagagagatctcttggcagagtgagggcctggagataaccagctttggattatcccgcatgcaacattcctgtgatcacataatcctcttcttcatcctcatatgaaataaatgaagagaagctt

SEQ ID NO: 14036 - DNA, 450 bp, Homo sapiens
ggggatcttccttgtgactgccccttgacacacgccctcctcaaatcctaggggaggccattcccatgagactgcctgtcactggaggatggcctgctcttgaggtatccaggcagcaccactgatggctcctctgctcccatagtgggtccccagtttccaagtcacctaggccttgggcagtgcctcctcctgggcctgggtctggaagttggcaggaacagacacactccatgtttgtcccacactcactcactttcctaggagcccacttctcatccaacttttcccttctcagttcctctctcgaaagtcttaattctgtgtcagtaagtctttaacacgtagcagtgtccctgagaacacagacaatgaccactaccctgggtgtgatatcacaggaggccaagaagagaggcaaaggctcaggccaagagccaacgctgttgg

SEQ ID NO: 14037 - DNA, 415 bp, Homo sapiens
ctatttagaagctctaatgtatacctagattaaatcaaatcacagttttatgcttttaaaatatatgtatttcaaactgtatattttaatttctgagtgcatgttatatagtatttaatacttcagatgtcttggcaaattcaatataagtatttattcccacaagcgatatatgggatatctcttaaaaattatgaatatgtaccatttccttcaaagtcatcctagcctatgctgtatcaaaagtattgtatattttatggagatttagtgatatacatgtaaatgttttttaagttattttattgaagttcaatctttacataaaattaaaatctttttttaaaaaaagtgtcagtgccagaactgtaaatgaaaataatcaaataaaagttaaaataattcattactcatt

SEQ ID NO: 14038 - DNA, 460 bp, Homo sapiens
ggcacgagaatggggaaaatggggaattctttcgatatagaagggtgtggaaaagagcagagagaacagatctcccctttcccatcttagatctccatttttatgttcctgttgtcgagtggtttgtcatggtaaagaaaaaatgcttttaaatgtgagtgtatatatatcatctatatgttgcaaaatgtcctccttcgtgattcagcaacctgatcttacttcagtgctactccttcctgtgtaattaagcctcagctccagctctctgtattgcactcactagtcatcaggttgggaaggtcctggggttcctgtgtcctgttggggcaaccgcatggataggaacttttaatggctaactttcctggggcattagccagggaggatggaaaggaggcaggggggggaaggaaaaccttcaattcttaacccacggaatttttatttttccctgtgt

SEQ ID NO: 14039 - DNA, 1348 bp, Homo sapiens
  misc_feature (1)...(1348): n = a,t,c or g
gtgagattgttttctttttctaccttaaagggagatggtaagaaacaatgaatgtcttttttcaaactttattgacaagtgattttcaagtctgtgttcaaaaatatattcatgtacctgtgatccagcaagaagggagttccagtcaagagtcactacaactgattagttgtttagagaatgagaaatggaacagtgaggaatggaggccatatttccatgacttcccttgtaaacagaagcaacagaagggacaagaggctggcctctacatcactctcaccttccaaatcttgtggaagtgcatctacttgccagaaccaaattaacttacttccaagttctggctgcttgcaggtggaactccagctgcaagggagttagggaaatgaaggtctttttttaaaagcttctcagccttcctagggaacagacattgggtgagccaatctgcaatttctactacaggcattgagaccagttagattattgaaatattatagagagttatgaacacttaaattatgatagtggtatgacattggatagaacatgggatactttagaagtagaattgacagggcatattagttgatgaaatggagtcatttgagtctcttaatagccatgtatcataattaccaagtgaagctggtggaacatatggtctccattttacagttaaggaatataatggacagattaatattgttctctgtcatgcccacaatccctttctaaggaagactgccctactatagcagtttttatatttgtcaatttatgaatataatgaatgaggagttctggtacctcctgtctttacaaatattgggtgttgtccagtatttttcctnnnnnnnnnnnnnnnnnnnnnnnnnnnnnnnnnnnnnnnnnnnnnnnnnnnnnnnnnnnnnnnnagctataattgggtcatagaaattctttatacattctagatgcaagtctcttgtcggatatacgtattgagatattacacctagtctgtggcttgactgttttctttatgtcttttgatgaatagaagttttaaattttgacaaggtcaaatttatttttttcttttgtttgatattttttctctccaatttaaccccaagatttcagatattctgctctattatataaactttatatttttatatttgtgatctaccttgaattgatatgtatgttgtgaattatggatcagggttctttttttcccccatacaagtatccagtcattgtaacactgtttattgaaagaattatcctttcctcattaaattaccttgccaattagtaaaaaatcaattaaccataaaaaaaaaaaaagtcgacgcgg

SEQ ID NO: 14040 - DNA, 2386 bp, Homo sapiens
caaatgatggttatacaatttaatgacctgaaattcaaacaaggagataacaggagtttttaatagctgaaatggtggttgacacatatatttatcatgtcaccagagcactgtttctcacttcccttgtgtctatgggctcacaattattaattcaatcaagctacgaacctactcattagaaaactggacacagaagcacaagtttacaatttcaggagagtcacaaataataccccaaaatcttaaggatcctaaattaaagcctgttactgtagtatcttgtatcatgaggaaatctaatattcttgggctctctttctatgtaagcatgagtgtggcaactaagtactagttttttctcttcatcaatacattgatgtcctcctatttagaaatgcattttttgagagcttgtcacaaagcctttattaacaggctgttaaggaaagttgcagtgtttcctttaaaaaggtgctttattgactttaaatttataaaaggttaacatgtcttgatctagttgaaattatgatttatatcaacatgataattatgtgtacagtttatattccactcatactgtacaccagtaaaagcaaatattcaaagggttctctaagtttcaagattaaaaaccataatgccttgactgaatatcatgattacaaaacaggtattaagaactgtgaaggtatatgctcacaacatatcccttctcccattctcactttattccaaaatctcatttatttcactgacaatttgtttatactttcaaaaatccttttataatttttatagatataactcaaaatgactgcttgggtctttaaaaaattaacagattaaaaagcaatacaagtgcacttaacactgatcaaagtctgaaatgccaaaaagcaaaataaaaatcctctgaaatatatatgtatttttaaatatagaaaaactccaccaatagtagaaacaaagtatgtttaatggttgctttggaaaggggaagtgggcacctcatgccagggagatttaaaaatgagacttttcaagcaagcactgccctatagcatagtctcatattttgaaaatttaaacctaattttaattatatataaagaactattttaaaaaatcacacccacaagtaaaaaactggtaatctgtttacaaagtgcagcgtcagtacagcaaactcatctcaacaaaagattatgtgtggtttctcgggctttaaaactcccctggtttccatttaaatgctttaacattgagtcatcctgcatacatgaaaagcctgtgtaatgaagcctgggtcctttaacacctgctattaattaattccaacataagtgagtatgagacctgggaagtaaattgtcatcatctgattgatgaggtacagattatctgaataaaatttctgacctggttatgagtcagtaatcccaacacaaactactgctttgtaatgaattctggtatgctttgcatgtccttcaataactgaagattttttctccttttttctccaggtctcagtttcataaaatctttcttatttgtggtccctgtgattccagaacggctgctgctgtttctttcttcatcaagagtctttttggtagcttttaattccttcttctgcttctctaacttctgtttctccagctgggcttggtattttcgaactttagttatttggttggcttttgcttccatccttcccactaatgcctccaattcacactccaacttgtctttcagttcaacggttggcgactcctggataagttttgcaagctgctggtgatcaaagctcatttgcccaaattcatcctgtaaagtctgtaagacttctgacaactcctcattaataccgttggaggagggaggtgttactgacaacttcttacttttaccacctcgtgaagatacttgctttgccaaaggaatactgttgatgactcgatcattgcacaaagctttactgtgttgcttcattagatgcaagacaagctgaacattggctaccacggcatggctagggcttgtggacttttctggtggttttgacttcttttttttaattcttcttgcattgggaacacacggagttgccttatcttcaaagataagtctatttgtttctagaccagtctgcaactcagctgccttagcttgcatgcgtttcctttcctgttcttcttcatggagttttgcttccaactcttgcatttttttttctgcaagggcctgcattgtggtaagtttgttatactcctgttcaagaagatccaatttttcaagttggctctgaacatgtgtttgatcatgttgtcgttctctttctagggaaacttgtttctctaagacagatgtcctctcc

SEQ ID NO: 14041 - DNA, 1402 bp, Homo sapiens
tttttttttttttttgaacacttacatccatttatttgggaaattgcttcacctgtaaactcacaactgataaggcacattattgcaaaactgtcggggtggagggagggaggcaactctaaggatcctgaaaaggggcaaagggcacacacttgcgatgatgtggaaaacatgtttctccttccctccccctactccagaacaccaaaggccacagtcttcaaagtctgctgcctccttcccccactctcgttatcaaggcttcttttaaagaaacacgttttaaacaatgaaatcctcggtgtgaaaggatcataccataaccaaaaaccatcacctggggatgcactcttcctatggaacgtgagtaattcccaagaattcatgtagaacaagaggcatagattaaagtcttggcaagactcttggccaaaccaaatcatcaacccagcagatgatgcccaaaagcagcagtctggtaagtcctgatgagttactcctgtggggtgcaggatcacagggctggtcagtttaggtgccaaggtccttctgtctttggaagcattaatccaggtctgtaacaattctgtactgcagctacaggaagtaatgacagctataggccattaagatacaacacaacaaagttatcagaagccaaggtttcctctttgaattaaaagataaattaaaagatacaattgtttagttactctaagcaaatacaacaatgaaaaacattcagagggtatactgcctgatggccccatatactgaacccattctcctagcatgacacagaacggattcctgcagaaaggacagataaaatgtttgcctggtcatgattcaggtgagtcaagggccctgccccatccagatgggtaagaatttctccagaacatatccatgacatacagcgtttgctccattcatatttaatagtctgtttgcaatcagcttaactgtcaggacatgcgatcataaggaggtctgacatacatggtaatgtcagtgtgtctgaacacaagagcgtgacagaaatcatcatgtatgtgagcaacacgtggaagtcctaggcagttcgtcaacttgtttcacttggcttatgaagaggtaggtcatcagcaaagaagtacaaaaaaatgctcttcaagagactaacagaagatgaagagcggtgtcagtgatgtgagttcccgtgtcatcattggtactaaacatccacaaagatgcaacaggaggacatctgtcccagcagcctgtcactctgcaaaagcagtactctggacaaggacaatcagcatcttctcccaaggcagctcaggggctggcatgaggcaaatacaacaggctatcccgaactccttattagaccacaaaatacaaacagcattttctt

SEQ ID NO: 14042 - DNA, 457 bp, Homo sapiens
  misc_feature (1)...(457): n = a,t,c or g
tctggtaagggctcaggaagcttgcagtcatggcagaaggcaaaagggtaatcagcatatcacattggcgagagagaacaaagagctgccaggctttttaaagcaaccagatctcatgtgaacttagagagtgagaatgtaaggttagccgagagaaaggaccagagagagagagccccaagttcaggcaagcctttattaacctgtcggctgcccccttaacagtcagagaggaagcagccccaaacttacagaaggaggggtttatattggggaggggagtttgagggagttctttggtatggccgcatcccggggttgtttgctggttaattttgccacatatcaccgtgtgacgtttatggtagcagctagatgaacaggaacttacaggagggtgtaggtaaagtttgtttatgcttcccatgacctccccntgtgccgtctggatggtttg

SEQ ID NO: 14043 - DNA, 622 bp, Homo sapiens
tttttttttacataattttttttattaaaatcatagaggttatgtaaaaatggcaataattcctgttgttgggtgtttaggtttctgatttttgggaaacacttttggaaaatgaagcagttcataagctgctgttctgataatgaaaggatctaatattcggatttgataaggtttataaatcaggtttaaggctggtttcttccaaaaaccattagtgtttattttgtcacccatcaacaattccaacagccaccttaaatcatgtggcttaaaagcagtgagaatcactgtcgtattagggtcattgtgaataggatctgaaaaaacagattctggataaaaaagtcggaaggttgtccttctcccaacttcttcttcatgtcctaaaacaggaccattattcattcttattattacatcataggagtcgattttttctcctaatgtcttattcttcaaaactcctccattaccaaccaccacacactttttacagggtatgcagtggcacaggttggtaaggacttgggggcggggagggctgtccagcagatgctccttcagtgtgtgcctgaaacctcgccttgtggacacatctcatgtcacagtaggttccagc

SEQ ID NO: 14044 - DNA, 817 bp, Homo sapiens
ggcgatcattcaatatggctttattttctcatcggccggctgcatcccacaccagcctgagccccagacggtcagtcagtgcatccatcctgacgacctgtccaggaaggaaggaaggaagctccctccaaaatgctggccccgtggcacccagacaggagcctgctggctagcatgcaagcactccccaaattctctcatggtgacaaggtggcagctgcctgggtcccagagtctcagcacaagtgcccagaggccagtggtgatgggcccttgggcaagtctctggaggaggcgggcaacccgcagggcagacgggagaagagggtcccctgccaacctggaggaaagaggggtggttgtcccctcacccctccaggctgcaggttctggagggcagaggtgctggccgaagaactggtggccaaagtgagaccccctggtcctatctggacagaaccccaggctcccatgggccggcccaagtgcttcggacagcaaacacctccctgggccacggaagggagacggctgcgggtgccaggccaggacttgcccagctcaagtcccttccccaccaagcctgctcggcacgcactgggtaggttatattgctaaagaacggacacaccggggtctccctgagctcaacacgggcctccttctctcccacacacacacgacgcctggtctgcggggtggagggttctgtccaaggcttcccgagggcccggaccttcctctctgagttccaggaagggtgccccagagccatgccccaagtcctctccttcccagcaaacgttctcacctgacg

SEQ ID NO: 14045 - DNA, 555 bp, Homo sapiens
gggcgtttctatcttaggctgacacttgactccttgcctacatctatagcttggcacagagagattcacgcaccctcaagagtgtgggtgagacatatacagcctgttagacctgaaggcagatggctcttcttaaggccaataaggatctcatttccgcaggattgaaggagttcagcgttctgctgaatcagcaggtcttcaatgatcctctcgtctctgaagaagacatggtgactgtggtggaggactggatgaacttctacatcaactattacaggcagcaggtgacaggggagccccaagagcgagacaaggctctgcaggagcttcggcaagagctgaacactctggccaaccctttcctggccaagtacagggacttcctgaagtctcatgagctcccgagtcacccaccgccctcctcctagctcagggacccagcccctcctctctgagaaactctgaccttcatgtccttaggctgtgctcctgccactctaccctgacacctcaataaagaccagtgctggttttgttggaaaaaaaaaaaaa

SEQ ID NO: 14046 - DNA, 359 bp, Homo sapiens
gcgaagaatcacagaaagcagataaactagattttgaatataagcggctaaaagaaaaagttgacagtcttcaaaaagaaaaggacaggctgagaacagaaagggattctctgaaggaaaccattgaagagcttcgttgtgtacaagctcaagaagggcagctcacaacacaagggttaatgcctcttggaagtcaggagtcttcagacagtctagctgcagagattgttacacctgaaatcaggtaaggagattgtggtgttcacacttacactgcacagtattcttggagaaaacgtacttctctacaatatgaagaagataatttccttattctttctcaccgacactttcaacat

SEQ ID NO: 14047 - DNA, 1465 bp, Homo sapiens
tttttttgttgttttgttggcattgggcagctttcatctgtgtttattttttttcatataaaagttacatgtttgaaatgtctgcaggaagatgccaccatcagacaggttagctggggcatatatattacaatgtaaccctgtggaggtcgtggggccggagcgggaagatgctccccagaatcgggttcaggtcagacatggtgtgtgcctggcccctccttgcccccccccaccccgacacctgcaggtgaggactgacctctgcaaggaacgagtcctccgcctggctcacgtctgtctgtgaagactgattcccacaacccgcccgggccccccaaaggaacagacgagccacggccaggccgcagcactgagcacagagctcagcaataaccagggccaggcttagggggcacagggggctgcctgccatcaataagttagacatacatcgcaccttgccgtcctcacgcagggagcccctgggcactgctcatgtgctgcctgggccctgctgctcagaacatcaagggctcccaatgagggcctggggaattgcctgggcacactggggccaggcacagggtctgttctgaattcagggaaggtgaagagaccccacctctatccagctcaagcccaagaacaaggcagacagagctgtggacagcacccgaccacagacacggttctgcctgctgctggagtgagaggcctggtttctgaggctgcagcatggcactggcattgcctgtgctacagatggggactcctgcgagtctcacaaatacagggagaatttcagttcacacaacccaagggccctgtgtgcagagcggccctcacacgcgcacagcagcattcaacagagctgggcaagggaaggggagagagagtcaaggattgaaatgaagggacttcaaaaagaaggaacaaactaaaaacccaacccacacacaatactgttaataagccagcgactctacacacacactccttaaataataaagtgacaggtcccggctggccccgcaagaccaccgcaagagggggtcccgccaccagagggggtcgccgcctgccactgcacggctttcctccctctatctacaggacaaacaaaacacgggagaggggaaaaagcccacattttcttcttgataaatgctgttcaaaaacccatgaaggactcaaagtgacatggtggtttaaaaaaaaacctaaatgatcaacagatgttgctttctatatttttcctttgttctgtttgaactgggctaagtaagcacagttagaccctgctgttcacttgaccacgtcctaaacccgggacaagtgagcactcattcatgcacagcagacccggaggcatgggctggggcagcacaactgggttcccgcagcgcccctgcctgcaggctcatgctggaggccacggaaccaggcggcacagggcagattc

SEQ ID NO: 14048 - DNA, 471 bp, Homo sapiens
tttttttcccatggtatgtttttaattctgaaaattaactgaaggagacaagagacaatttaaaattacagcacctctgatgaatagttaaatggatcatttatcctacagggataaactgtaaccaaaacagattgtggggctctagactccggacagcaccaaaaattcaagttgcatatgaagtcctaatacttacagttgatttccattcagtattcggtattttgctcacctgagaatagatactccccagagtgtatagaggcccctgtatattcaatgatgaccacaaagaatcaaacagaaatcagaaatgacagtccatggctctatggtttttaatgaatagtttgtgtagattttcccatgaaacacccctgatcttagttgggtgatttatagacctatgatgttggtggtgatcagctaagcaaactagccaaacagaagtaatttcaaattaagtca

SEQ ID NO: 14049 - DNA, 488 bp, Homo sapiens
tttttttttaaaaaggactttagtaataatttaatccaatcctgaatcaatgcaatacacacacaaaaaaatgtttggatcacttaataagttataacattctatgttttaacattaataacaaggacataaatgatcatttcctgagttaacagtgcaaggtaaaatttaatctgtattgctaataagacattttacagcatagaaacatgatcgaagtgatcatttactttatcatgtcataaaacacaagtgcttattgtagaacagtgatataatttaaatggcaaggaaatttgtgattcataacaaagaatcctgtatgtatttgttgccatgattaactttccaggtcaaatatcagtagtaaaataagttgtggtacaaaagaaagccaagaagttacctgtactgaaggaacatttgatttcatttaagaaactgaaggctggattctagttaaccttttgttatgtacaaaaatgttc

SEQ ID NO: 14050 - DNA, 942 bp, Homo sapiens
gtttttttgctgcttccaccgccccttaaagttagtcagtttttcttctcttctttgacattctaagaacttatagataacttaaaacttttgtgaggaagattaatgtggccaataaaacctttaaatgttaagtgtcaagaaactgcactctcccttcttaagaactgcctaaagtgtaaaatacatttgaatgcaatttttggaagattttttaatgttcgtttattaaactaaccctaagtgatttcttcaaggactgcaatcagcgtatcaatttgctttcccaaaggctcttccaacccgtgggttttggggtccaccgccaccaccagagaggcttttgaacaggtgcctggctgtgttcagaaggaagctggcctgtgtgcttctctccggtgggctcagccgacgtgtgagacttgttctgttaccaaatgaaccgggctgccacgctgtgacaggcgtttgtcctctgctttatttttactttgaagctcaaatgcgagtactaagtgttcacctcagcgttcgaatcattggcctgtaaccctgtgggctgcttcacgagaattcaggacctgcattttcattctaaaaagaaatgaacagcttgtgaaggagttttttggcttcatagtttctattcatgaggtagtgttacttctttatccccctaaagacaaaatgaagataaagggggattgccaggaatgggtttaaaagcacaaatgtggtagcttatcatctacaccatggagagtgaacccttacgaaatgaaagtcaaatgagaccatccgagaaaaagatgcgcataggcatttgtaccatgatcaaccccacgcacatgaaaactgtgaccaagtgacgtgcctgggagctttgacacacgagccgtgtgaattcactaggaaacatgtaataaagtcatggaagagaaa

SEQ ID NO: 14051 - DNA, 1121 bp, Homo sapiens
gtgggctattcagaagaaaaagtcagtgacagagagaccagaacccattggttcaagagacctgcagggattataactctttactctgtgagcagcggtgtttcgtgccctgtctctgcctgtgtgtttttactaagaattccagaaatcctgtaatttgtaaatgggaaacagaggaaccagattgttttatagctgataagaaacagtctgttttagaaacatctgtttggaaagtattactcatgtattcacaaagtcatatttataacactagtcttctttgactgtattcaacaaaaggcagtttcaccattaatttcatagtaagcttttttaaaggattctagatctaaattgcctaagaatgttaaccacattcttgttttaaactctctaatttaataaatgtaattattttatagtcttttatagacttacattttcttcatactaaaggtaatgataatatagtcatttgccagtactttaaggtattcaggcatttgagacaagaaagctgtcttgtagaatagtccaattgctttcttaaacagtactggtttcatttagacagtttctaagccagcaaaggtgtcaattttaatgccaacttgacagtttaacagttagtgtttgtaagcagtttagcctgaattatcccatactgctgtagaggagaattgttagtaacatcaaaggtcagaatgcttcaggtgactaataagaatggaaagagactgagtaggttttttgtttcttttccctgtctttgagtaactttgaatgactaaaattagtatgaaactaggttttgggacccccttctcacctcacccggatgtaatgccaccaatttcaaataactaaaatgtgaccaattactttgcttcaagttctatacaaatatctctgaaatctgtaagccatatttcagctattctggtttttataatacattctaccctaaattaaccaaaggactttttattcagtgtattccatgtttcagcataaggaaagtttgtgcctgatatggcaggagaaggaaccactatggtaatttcatggttacttcaggtctctttcaatctggaagaactgggttggtctgggagaat

SEQ ID NO: 14052 - DNA, 934 bp, Homo sapiens
tcgaatacagaccgtgaaagcggggcctcacgatccttctgaccttttgggttttaagcaggaggtgtcagaaaagttaccacagggataactggcttgtggcggccaagcgttcatagcgacgtcgctttttgatccttcgatgtcggctcttcctatcattgtgaagcagaattcaccaagcgttggattgttcacccactaatagggaacgtgagctgggttagaccgtcgtgagacaggttagttttaccctactgatgatgtgttgttgccatggtaatcctgctcagtacgagaggaaccgcaggttcagacatttggtgtatgtgcttggctatccgaggccaaccgaggctccgcggccgctgccgtatcgttccgcctgggcgggattctgacttagaggcgttcagtcataatcccacagatggtagcttcgccccattggctcctcagccaagcacatacaccaaatgtctgaacctgcggttcctctcgtactgagcaggattaccatggcaacaacacatcatcagtagggtaaaactaacctgtctcacgacggtctaaacccagctcacgttccctattagtgggtgaacaatccaacgcttggtgaattctgcttcacaatgataggaagagccgacatcgaaggatcaaaaagcgacgtcgctatgaacgcttggccgccacaagccagttatccctgtggtaacttttctgacacctcctgcttaaaacccaaaaggtcagaaggatcgtgaggccccgctttcacggtctgtattcgtactgaaaatcaagatcaagcgagcttttgcccttctgctccacgggaggtttctgtcctccctgagctcgccttaggacacctgcgttaccgtttgacaggtgtaccgccccagtcaaactccccacctggtcgagc

SEQ ID NO: 14053 - DNA, 1748 bp, Homo sapiens
tttttttttttttgccagtggttaaaaagaaatctttattttacaaaattaaaaacataaatagtatttacaagcatcttaaataccagcttataatacttgacattttctaatcatttcaaattgagtttcccataagcttttaaaatgcaagaccattcattcacttgagtgagttaccagtttttacttccaccaatccaaagtgggttttggtttttgaaattgtccatactgtagtcattcaaaaaaatacaatatgcttttgaaatgactagctttaaagaaaaaagtcctgagcttcctaccccagttgtgggatattactccaaaacaactcaagaacccaaattatcttactgcctgattaaatgtaaccactctagctttttaaagacacattcctgttactcacattaatccatctccctcacgtttcaggtttgctggaaggaaaagtagagaaataatggagtagagaagtgggagaatccagatgaccatctgaaatcacattactgaaaatacaacagacatgacccaaaaatctgatcttactagtttccttcaggatcaaatccaggatattttattgtacaaaaatttcaaatgatttcagatgatgcatatgtgacagcaaacctgaatggcacaatggaacacagacttaaaagatgcttcagtggtcaacactcattctggagttctcatgaatgaagggtagacagattcagtaaaattgtttgcttttcagtttcattatctggtcttcaaatttcagcacagagcaattcatttccatatagtaatatgtaaagagagactacaaaagtgtgaggaaagcaaatgtcctcgagaagggtcagaaaaggaaaggaagactcagtatctacaacccattacctaagaacaccattttgttccattttccctggaagccctcacagctcagctgagaatcagagtaagaatcttcattatcagagattagcaacaaatttaaaagaaaaagaatgacaacaggtaagagttatatacattttactactttgtttcagacttgtcctgatatttaaaaaggtgtcaaatgagccatggatgctggtggcaggaggcaaccagagaggagaggctcgagtatgaggaatggggaagacttatttacaaattcagagcaaactcctctcttctgggtctaaaataaaaacatcttttgtcttcagtaaaacaaaagtctttctgctcaatgcagatggtaggtacagtgtgctcaaaagaagcattttctcttggggaagataagtacacagtcagcacagtaagcaccactctgggatcaggcccaccctgcagagcctggcgccatcactgctgcatgttgttgataatcgccaggatgctcatcttctcctgggcagagtccacatcctcattctgcttctgggccactcctgtgcctaagccatagagccgcccacagtacttggcatcatcaatgctgtcctcaaaaaacaactctttcatcctaaagaaagccattcctgtcagcagtgagtctgagcctgcctggtgctgccttccaatcctctgcaaatccaactgatcagcaacttcctgaagacctcccttaagatttttgcagctcttcatcaggtatttcacatcataaatggatgggaagaaaaggttcagaatatgaaagaattcatgttcctcttgtggcaaacgagaatctgtaagcaactttc

SEQ ID NO: 14054 - DNA, 246 bp, Homo sapiens
aattaaaaattttaaaaaccaaaaaaaattcaacataatcatttaagaaagtactaaactgagagtttaaaatatttcaattctgtcactgaaaattaatataaggaggccaggcatgattataattacactttacatatacaattaaatgaacaccagcaactactcatgaatgtctaaatataccccaacttggagcgtgacagaaagaacgtaaactcttacattttttcctgatcttaacag

SEQ ID NO: 14055 - DNA, 418 bp, Homo sapiens
gaatttacatgttttcccttttaaaatcttaaaccaggtgtgaaaatcacatcaacactgcaagtgttgaagcttatcaagcaggctggtgaccgagtcctggtgtactatgaaaggcctgttggcagtagtaatcaaggtgcagtgctgcaagataactttggccagttggaagaaaactttttgtcaagctcatgccaatcgggttatgaagaggaagctgccgggttgacagtagatactgaaagtagagagctggattctgaatttgaagacttggcaagtgatgtcagagcacaaaatgagttcaaagatgaggcacaatcattaagtcatagtcccaaacgtgttccaacaacactttctattaaaccccttggaggctatatcaccagttttaaaccggaaattagctgta

SEQ ID NO: 14056 - DNA, 1639 bp, Homo sapiens
taagccactgaaagaacatgtggatgccctgcgcatgactctgggcctgcagaggctccctgacttgtgtgaagaagaggagaagctttccttggattactttgagaagcagaaagcagaatggcagacagaacctcaggagccccccatccctgagtccctggccgctgcagccgctgccgcccaacagctccaagtggctaggaagcaggatactcggcagacggccaccttcaggcagcagcccccacctatgaaggcctgcttgtcatgtcaccagcaaattcaccggaatgcacctatatgccctctttgcaaggccaagagtcggtcccggaaccccaaaaagccgaaacggaagcaggatgaataaagaaagggagagcacatgaagctttgctaattataacccctaccttgaccagagtcattgatgtcctgatgtgaaacaacccttgcccaaccccacgaagtctcctatttaatgtgatggaagcacaacccctctctcactttgctcctatttctttctgctcttgggatttctggtttaggaagagatgtggttcaggtgctaaacagtgtgtctgatgatcccttctctcccactcacatttcaacccctgcccttgtttggagctaagggaagggcaaaaggctcagatatgattctctatctcttgtgcctgaggcctggagcctaaggagctgtagggtctgaggggcaggggaggcccatatcttgtttcaggtaaaggacccagtatttcccctccttgtacttttgccttaggttctcaagggacaatagtcttcatgttggattctccaacaggctgggtgcatgtatccccctactcctaccctcatctcatccttaaggcccagaggtaggcttggacaagccctccttttcataatcatttgggaggcatggctgtaattctttagctttctccacttctgtctcccacatatactaaaattcttaggtactaggctgtgtgtcttgggatcttaagatcaatgaacctttccccaatatctagtctttgcaaattctagtagaagatttccacagtgaaatcagtgagccagaccaactctacatctcctgcctaacctactgcctaagtcattagggctgagggctcggctgtaggggcttccttaggctgagagtgcccccaggctgacatctgtgttggcttttgttcagaaccattactctggcacatgctcaatggtatattgcagggaggagaggagtagatttagatttgagtaaatgccaatcactttacacatgaaggtgggtgggactttccttccctttcatcccttgctctcttggatctgaactcttctgggagcctcagctcaggatagctgctggccactcctgtcctgtggattgtgcaggtggcctttcctcccaaaagaaaaggcatcaggctccccaagccccacagctctcctttccaccaaagcccaggtttcctggtaaggtcactcgaagataagggatggggatgggggctgactgacaaaaaattttagccccaggtctcagtacctggctggggagggggatatttttccttccttaagtagttttacattgccacagtgtgtatgt

SEQ ID NO: 14057 - DNA, 1000 bp, Homo sapiens
ttacaaactcatggcaagtttcccccctaccccaccctctttgaaaagacaaagctctgcctacatagaagactttttttattttaaccaaagttactgttgtttacagtgagtttggggaaaaaaaataaaataaaaatggctttcccagtccttgcatcaacgggatgccacatttcataactgtttttaatggtaaaaaaaaaaaaaaaaaatacaaaaaaaaattctgaaggacaaaaaaggtgactgctgaactgtgtgtggtttattgttgtacattcacaatcttgcaggagccaagaagttcgcagttgtgaacagaccctgttcactggagaggcctgtgcagtagagtgtagaccctttcatgtactgtactgtacacctgatactgtaaacatactgtaataataatgtctcacatggaaacagaaaacgctgggtcagcagcaagctgtagtttttaaaaatgtttttagttaaacgttgaggagaaaaaaaaaaaaggcttttcccccaaagtatcatgtgtgaacctacaacaccctgacctctttctctcctccttgattgtatgaataaccctgagatcacctcttagaactggttttaacctttagctgcagcggctacgctgccacgtgtgtatatatatgacgttgtacattgcacatacccttggatccccacagtttggtcctcctcccagctacccctttatagtatgacgagttaacaagttggtgacctgcacaaagcgagacacagctatttaatctcttgccagatatcgcccctcttggtgcgatgctgtacaggtctctgtaaaaagtccttgctgtctcagcagccaatcaacttatagtttatttttttctgggtttttgttttgttttgttttctttctaatcgaggtgtgaaaaagttctaggttcagttgaagttctgatgaagaaacacaattgagattttttcagtgataaaatctgcatatttg

SEQ ID NO: 14058 - DNA, 754 bp, Homo sapiens
ggagagctagtaaaaatattctcttaacttactgagagttcagttttaataggtgatgttaattagaaaggatctatactgtctagtttatggaggtattaaagaatttgacaattagataaaatagaaaataattgcaaaaataaatatatgtttctttttatcagctcacctttgagtttgtagttttccaaatgaaatttagttcgtatatagtctttgtactcaggaactttgggatgggagataaattactactaaatggaagcggcagaatgaatacttcatcaacatgtcaggaaaatgcaaaggtcagtctttaggaatattggacacctaggcttttttctatttcagacattcaggaaaaaataaagctcatcatctgttatttgaattccttattaaaaatctctgaattattattttaatgtaggaacagcctatcagtgaagcaaaacatgccttacaggtccttatgggaaaattctgtttccacttccgtttcccattgcagagcaccttctctcagggctgttctcaggacttctccctgggcctcctgcaatgaggctggagggccgagctcctcctctctgtgagggtgggagcctctgccacctctgaccagtgtcaacctcagtggacctttccttaagcaggggaattttgtgtttgggataggactgcttcagtaaggcgcagaggtcagaatgatacccatccttgccgagtttttttttcttcgtgtgtg

SEQ ID NO: 14059 - DNA, 348 bp, Homo sapiens
agcccgggagccgctttgcttaccgtcctgccggtcccagccgtcgctaggaggtccgcgggccctgcggcaaccctcgctacagacgctgggcgggcggcgacacctggctcatggcccccgcggcggctccgtcctccttggccgtcagggcctcaagccccgccgcgacacccacctcgtacggcgtcttctgcaaggggctctcccgcaccctgctcgccttcttcgagctggcctggcagctgcgcatgaacttcccgtacttctacgtcgcgggctcggtgatcctcaacatccgattgcaggtacatatttagagccatgactaagctaacggcctccggg

SEQ ID NO: 14060 - DNA, 338 bp, Homo sapiens
gaactgaagagtcatggttggggcccgggcctaccgctgctgccgctgtcgaagagcggcagagaaagcttcaggagtaccttgcagccaagggaaaactgaagagccaaaacaccaagccttatctaaaatccaagaataattgccagaatcaaccaccttctaaatctactattagacctcaaaaatgaatgttaccaaccatgttgttttgcctgtcaaacctaaaaggtccatcagcattaaactccagcccagaccacctaatactgcagggtcccagaagccgaagttggagacaccaaaacttctgggcaaaaggctgacttcagaatgtg

SEQ ID NO: 14061 - DNA, 564 bp, Homo sapiens
tccacccctacaagttaaaggctcagtcccacaatacttccctacttcagatgtcagctgtaaatggggtgcccaggtgatccacatttctgcccaggtgactacaaatttgggggttcccatggccccttcccctcagtttctataatttgctagaatgcctcacagaactcagcaaagccctgaagcactgattattctcattttattataaaagataacagctcaggcctggcacggtggctcacacctatagtctcagtaacttgggaggttgaggtgggagtattagagcaggtagttagacgtgagcagggcaggggagggcctcctccatccaccagggatgtcaggtgaccatcaggtgatggttaggcagttgtcacactgcctctctaaaataataattggtcatagccagcaccagggaaactgaagctggtgatcagcagcttcccgataagatctcaggaattgggcaagtgggctcaagcatgtgcactaaggcacagaatggtggagtttaactggtatatgaccttccaggtactttacaccgggaag

SEQ ID NO: 14062 - DNA, 543 bp, Homo sapiens
ggtgcgttcttcccaaagtgggcacgactcccagctggctttttgcttcttgacctggccaggctgcatccctggactgtgcagctgtgtgttcacatgggattggagtccaaacacaataagaagagttatatccgctgcggaagcagcagcttatctggaaggagggacgagggcagcgatggaagctcatgatgtcatatgccaaaccacattacatgttgggtttgctatgcagagtggattgttcacataatatgtttctaatttttcatgcttgatttttgcctgtatgtttgtactctgacatgtttgtattcatccacccgtcaattcatttgttcatccattccacaagtattcacaaagcccctggtcctgtgtgtgttccctgctggtgaggtctcagcgacaggtagtgggcacccttcccaatgcttacggttggtagaacacggggcaattgcatgaaaacactgcacttttataatgtattttttaaaagagcccacatagaccagttttcctaattgtctctggaaa

SEQ ID NO: 14063 - DNA, 423 bp, Homo sapiens
gaaggaccgttggatcagactcttttcccagttttgtaacaaaacagccaatgaagaggaggaaattgtccataaacttctgggagacaaattcaagggccaactggaacttctgcggagactcttcacagaggccctctatgaggaagcagtcagccagtggttcactccagatggattccggtctctctttgctcttgttgggaccaatggccaaggaatcgggaccagctccctaagccagtgggtccatgcctgtgacactctggagttgaagcctcaggaccgtgagcagcttgacgccttcattgaccagctatacaaggacatcgaggcagcaactggagagtttcttaactgtgaaggatctggcctctttgtgcttcagagctgctgcaaccacagttgtgtgcccaatgcaga

SEQ ID NO: 14064 - DNA, 999 bp, Homo sapiens
  misc_feature (1)...(999): n = a,t,c or g
ccagggcggggtcttccctgctcgattttggacgaggcctaagtagaccccctatggccctgccccagccctggctctttcctaaccccctcaacggtgggaggaactggcagagggtgcgcctgggccacagcctccccgcatctaaaggccccttcagttcttgaccaaaggtgctacgagaacctgccgtggaaacttccagttgtgcgtctgccccactcgctgtgtttgtccgtgggttcatacatgcattgggtgctaggccccagggttgccgggtggcaccctttacagttcctttgaacaggggcattgaaggcctggactgcctctcgcctcagtaggcctggggaccaggcttgggtctggaggtttgctgtggaagtcaccaggcctcccctcctggcccaggtgtgctgggggcaccgtgccccccacccccctgccctcctcagggtggtcagcccaacctgtcggaccttcacttcacatcatggtggggaccgagatagagagggagaccccattccaagctccctcttcctcccggtgtttggggaggatgctgaagaatccattcccgagggcctcccggcttgtcccagcccctcttttgcttctgaccacggaggctttctcacagcccagcctgcctgaagcaaaggaggctcccgtgtcctgggcagcttctgtttccctctgctgcctgggagctgaggcacccgtgccagtggcagaggccacagccccagccttaggccaggccctgggagggcaggcaggcaaaggggagaccagagggtctgtgttctccaggagaatgagggtgttggtcccagaattgggaccggggccccgctggccagccctgggccacttcccgggtcttcattgtgcgtgggtggcgtgttccaggcgtggctggagctggcttctggctgtgctgcatgggcccctccctcanaagcacgttggcaggaggccgatcataaccct

SEQ ID NO: 14065 - DNA, 535 bp, Homo sapiens
tgtggtccttgacaagcagacactttggggatagagagcccccccagggtagggttcttgcccagcccgtatatcagctgtgagaccttgggcaagtgctctagtttctctgaaccttggtttctccttctgtgtaaaattaggatactaggacctattcttaaatgtagaaccaagaggattaaatgagataatgtgtgaaacactcatcatggtacctggtacatagtaagcactcaataaatagacccaaagggtaggggccagcaaatgttgattgagaatgcatggaagccactgctgagcagcaggagggcccagctggggccagagctttaagccaaaggaacaaaagttaattttgagaaactcagcattaatcagcagttgggagacatctcccaaccccttcagctctgtgtgacatccaaaccaagggtaggcatgggggcttaattgtcaagtgatgaggacttggataacttggtttctaatgcagaccacagtcctgtggatctcttccagttctcgtgcc

SEQ ID NO: 14066 - DNA, 339 bp, Homo sapiens
  misc_feature (1)...(339): n = a,t,c or g
ggagagaaccgtttctgaacattgcaatacttctgcaaagtaggttgtgtcggtctgttttgtgttgcaataaaggaatacctgaggctgggtaatttgtttnnnnnnnnnnnnnnnnnnnnnnnnnnnnnnnnnnnnnnnnnnnnnnnnnnnnnnnnnnnnnnnnnnnnnnnnnnnnnnnnnnnnnnnnnnnnnnnnnnnnnnnnnnnnnnnnnnnnnnnnnnnnnnnnnnnnnnnnnnnnnnnnnnnnnnnnnaagtggggaggaccaggctccttgaaacaaccaggtcatagagtgagaacacactcattcctgccagggggcacccaagccatt

SEQ ID NO: 14067 - DNA, 1525 bp, Homo sapiens
  misc_feature (1)...(1525): n = a,t,c or g
ctgttctaatagtccacctaaagtaaagaaagctccgagggtaggaccttccaatcagccatctacatcagctcgtgcccgtcttattgatcctggctttggaatatataagatacccagaaagcggtactctagaaatgaatgtcaaggatcttagaccacgagctagaaccattttgaaatggaatgaactaaatgttggtgatgtggtaatggttaattataatgtagaaagtcctggacaaagaggattctggtttgatgcagaaattaccacattgaagacaatctcaaggaccaaaaaagaacttcgtgtgaaaattttcctggggggttctgaaggaacattaaatgactgcaagataatatctgtagatgaaatcttcaagattgagagacctggagcccatcccctttcatttgcagatggaaagtttttaaggcgaaatgaccctgaatgtgacctgtgtggtggagacccagaaaagaaatgtcattcttgctcctgtcgtgtatgtggtgggaaacatgaacccaacatgcagcttctgtgtgatgaatgtaatgtggcttatcatatttactgtctgaatccacctttggataaagtcccagaagaggaatactggtattgtccttcttgtaaaactgattccagtgaagttgtaaaggctggtgaaagactcaagatgagtaaaaagaaagcaaagatgccgtcagctagtactgaaagccgaagagactggggcaggggaatggcttgtgttggtcgtacgagagaatgtactattgtcccttctaatcattatggacccattcctggtattcctgttggatcaacttggagatttagagttcaggtgagcgaagagngtgttcacagaccccatgttggtggaattcatggtcgaagtaatgatggggcttattctcttgtactggctggtggatttgcggatgaagtcgaccgaggtgatgagttcacatacactggaagcggtggtaaaaatcttgctggtaacaaaagaattggtgcaccttcagctgatcaaacattaacaaacatgaacagggcattggccctaaactgtgatgctccattggatgataaaattggagcagagtctcggaattggagagctggtaagccagtcagagtgatacgcagttttaaagggaggaagatcagcaaatatgctcctgaagaaggcaacagatatgatggcatttataaggtggtgaaatactggccagagatttcatcaagccatggattcttggtttggcgctatcttttaagaagagatgatgttgaacctgctccttggacctctgaaggaatagaacggtcaaggagattatgtctacgtttacagtatccagcaggttacccttcagataaagaagggaagaagcctaaaggacagtcaaagaagcagcccagtggaaccacaaaaaggccaatttcagatgatgactgtccaagtgcctccaaagtgtcaaagcatcagattcagcagaagca

SEQ ID NO: 14068 - DNA, 184 bp, Homo sapiens
  misc_feature (1)...(184): n = a,t,c or g
tagcaatttgaaaggcaaggtaagaggatcgcttgagcttgagtctgaggccgcagtgagctntgaccacaccactgcaccccantctgggtgacagcgcangaccccaactccaaaanggaaaaagaaaaatcacaaggaattgcatgtcagagtgcctgtctttcacagctttaactgctgc

SEQ ID NO: 14069 - DNA, 276 bp, Homo sapiens
gactgaatatgcaatgcaattgtggggggatagttacctttcattacctaggtttctgttccttcttttaagtgtaatttaaatctggctgtcatgaaggtttggcgctcaaacagattttagcgtctgtttaatgtagaagtggactggaactagcattctgaaaatgtagtctgaacccaaagaaatcccatgactctccttttctgtcctatcatagaaacagataattacatttttaaagtttttgtgtgtgggtgtgtgtgttgtcatttt

SEQ ID NO: 14070 - DNA, 819 bp, Homo sapiens
tttttttttttttttccattgagaaaagttttatatggaaacacatactgatcatgaacacaataaacagggagggaagcttgggctcagccaggaaacctgccacaaggaagatgtttggaactatccaggagtagtgtcaaacactaacaccatatttacaagtctaatttggaacctggccctttttaagtgcaggaggaagttggaggagaagccatgcatgaagtaaaaaatacatatacacagacataaacacccacattttcacacttcttttgcccatttgttccacaaggaacaaatgagagagagaagcccagcctctctccctggagtccgtatacttactacagatttgttagagaagccccagatggggcttggattcaaggagcagacttcactcttactggccccactcacgtgacaattcaccaagggaatgcttgggacacaagcatgaatgtccggaagaggcaagaaaatatatggctcacttaacttacacattacacataagaggcctcagtttctccaagtactttcacatttgatctttagcagacttctaacctgcagagacagagctcagccaagctgtgagacacagaggaaagcagcattttgatccagtgtgcactgggtcagtcacttcatccgagacagtcacacatgccagccccaggtaagtccctgggggcttgcagctgttttctttgtggagtggaaatttgggttttttccctcagtggatttctccctgctgctgtcactgagctccacgctgctcgctctggacccgagacagctgctcgg

SEQ ID NO: 14071 - DNA, 307 bp, Homo sapiens
accaaagccgtagaagacacaaagcttcaaaagaaaatcagacaagagcaaaagaatctgatttttcagatactctgagtccaagcaaggaaaaaagcagtgacgacactacagacgcccaaatggatgagcaagacctaaatgagcctcttgccaaagtgtcccttttaaaagatgacttgcagggtgcacagtcagaaattgaggcaaagcaagaaatacagcatcttcgaaaggaattgatcgaagcccaggagctagctagaacaagtaaacaaaaatgctttgaacttcaagctcttttgga

SEQ ID NO: 14072 - DNA, 621 bp, Homo sapiens
  misc_feature (1)...(621): n = a,t,c or g
caccctctctccagcattaagcagcttctgtgagatgcaggtattgcgcacgatggcacggccatcaagtaccacttttctcagcccatccgcttgcgaaacattccttttaatttaaccaagaccatacagcaagatgagtggcacctgcttcatttaagaagaatcactgctggcttcctcggcatggccgtagccgtccttctctgcggctgcattgtggccacagtcagtttcttctgggaggagagcttgacccagcacgtggctggactcctgttcctcatgacagggatattttgcaccatttccctctggtacttatgccgccagtatctcgtatgatttgaaccgggctcccaaagctaatttatagcctgcctggttgatgtggaacatggttacagctggtccatcttttgcgcctggtgcagtttaggctttattgtggcagctggaggtctctgcatcgcttatccgtttattagccggaccaagattgcacaggctaaaagtctggcagagactccacggtatgactgtcctcactgggcctgtcacagtgcgagcgactcctgaggggaacagcgcggaattcangagtccaagccaaaangggct

SEQ ID NO: 14073 - DNA, 1388 bp, Homo sapiens
attcggcacagggccccttatggatctttcgactctcatgtctatttagatgcaattggagtcccacgaagaataccagatcaatttaaagcttgaaatcaaatagttacaggatttaagtcaatattttagtagatgacagttaataaaaatgtagattagataaactacatctattacaaccaacagcaatgagcttttcatgagttaaaaagaaaaactcatgtcggccccagccctgaggctacctgacctgacaaaactctttacactctatgtgtcagaaagagaaaaaatggcagttggagttttaacccagactgtggggccctgaccaaggccagtggccttagctctcaaaacaactagacggggtttccaaaggctggcccccatgtccaagggtcctggcagcaactgccctgttagcacaagaagcaaataagctaactcttagacaaaacctaaacataaagtccccccatgctatggtaactttaataaataccaaaggacatcattagctaatgaatgctagattaaccaagtaccaaagcttgctatgtgaaaatccccacataaccactgaagtttgcaacaccctaaaccccaccaccttgctcctggtatcagagagcctagttgaacatactgtgtagaggtgttggactcagtttattctagcaggcccaacctccgagactatccttaaacatcagtagactgtgaggggtacgtggacgggagtagcttcgccaacccctgcaaagtgactctgaagaagacgacaagctctgctccagtcacacccggaagctgactggtccacgcacggccgaagcatgagaaaactcattgcggaactcattttccttaaaatttggacttataccatagggacttcaactgaccttcctcagactggggactgttcccagtgtattcatcaggtcactgaggtaggacagcaaattaaaacagtcctattattttatggttattataagtgtaccaggactctaaaagaaacttgtttgtataatgctattctatccaaggtatgtagcccaggaaataaccaacttgatgcgtgttatgacccattttaagcctcccatgatcacagtttttaaaatacaattaaggactggtccttttctaggtgacacaagaaaggtaatagctagaacagaagaaagaggggtccccaaaaatgtaaccttaaaatttgacacttgtgccactattgatagtaagcagcatggatgaggatgtggttctctaaattggaaaaaaaagttacacagtaaaaaaaaataagtatatctgtcaaaaatcatatttatgcgagatgtgtcaatactggtcttgtgtcatttgagctactt

SEQ ID NO: 14074 - DNA, 2033 bp, Homo sapiens
  misc_feature (1)...(2033): n = a,t,c or g
ttttttaccaaaatactttctacagaattccaaaccaaaatgtactgtttaaggcatcttttttataacattttctcttcactcaaagatgatagtcatgcagcagtttaatgataaaaatatattaatattttactatacagcagcaagaagttagttgtcaattaaaagcacacaaacatctttaaaggaaaacctgtaaaagactatcgttacaaacaatttcagtttggaggacaccagcttggtaaagtgctctcctaaactttgcattttcataccctacaccttgaatatatgagttatagaacatacttttgatagaaggcttgtacacttggggaacacaaatacacttagcatataatgtagccagtaataactagcaccacagctacatggaaatcctttacatacaccaacttggctttcacttttaaaacaaaactcagaatccatggctcagtaggataactataattgtgttgctctgctttttaacaggtctacataagttaatagcactagcaaaaatcaaagaatagcttcagacctcttacaagtttaggagacagtgctagtgaccacaaatagactcactacctgatgtccaagtacaggttcactggaaattgctgcacgttagttttttaaaatctttctacacataataaaaaaaatatattatgaacgatacaagtacatctcatatacacaataatgacaaaacgcctactcagtcaaagcaaacagatgcagaaaaatattatgggagatctcctttttctttctttttccttttactatttgaataactttggttccaaccataaaaatcacaacttagcaaatttcatttaaatgccttttttaataatttcttcatgttcacagaagtttcactgaccatttttataagtttaaggtccagatgcaatgcatattgtataaaagagagcacttattgtttaccttgcatgaattaaacctacgtacctttaactctacaaacttctgcataacatttagacaaagctcagacacacagcatgcctagccctcatatatatacacatctctaatcacaggtatatagggtgtcaaatatactataataacctccatgtaaggtttgaaatttggtaacaaaatgagaaaaactaaaaatattattttacgtgttctaaaatatctcttttttgtgctaaagtcaaatgttagctcaacatgaaaaggacttttatataattcagcaatattataatcttgaccattttgcaaacactttttaataataatagcttaaacgtgtacaaaagttcttggttaattagggaaataaacactcagttctttatattttttaatcaagtaggaaacacagttcatataatgttattactttttgtattttttttgtttttagcagctgcttactgttttatatggtggataaagtggacaacatccagcgatgggtggcaagtcaagaagagaaactgtcagttggtggaggttctgtgggtggtgctcccttggagttaacaggtttttttttttttttaactttttaactttttattttctctctttctttacagtatannnnnnnnnnnnnnnnnnnnnnnnnnnnnnnnnnnnnnnnnnnnnnnnnnnggggtttcattcagtttgatcaatcttcttctaaatgtggccattttggcattgaatcattccctcctcccttccttctctgccttcaatccagtggacaagtacaggcacgtgtaatgcttagagatggtcaaacaaattcctatgcaaaagtctttacagaagacaagttttcctacgaatttcaacacaaagtgtacaaaatatgctaattttactcctttgtcatacactggcaacctctttaacatctagagactagatgttgaaaaattaggactatttgtccattatatatactatatacagagcaaaacaaaatgcacaaaacatatagaaaaatggtgtctgaaaatgtcgtcgacgcggccgcgaat

SEQ ID NO: 14075 - DNA, 554 bp, Homo sapiens
cgagccttcctcgacttccatgccctgccctaccaggtggtggaggtgaaccctgtgcgcagggcctgagatcaagttctcctcctacagaaaggtgcccatcctggtggcccaggaaggagaaagctcgcaacaactaaatgactcctctgtcatcatcagcgccctcaagacctacctggtgtcggggcagcccctggaagagatcatcacctactacccagccatgaaggctgtgaacgagcagggcaaggaggtgaccgagttcggcaataagtactggctcatgctcaacgagaaggaggcccagcaagtgtatggtgggaaggaggccaggacggaggagatgaagtggcggcagtgggcggacgactggctggtgcacctgatctcccccaatgtgtaccgcacgcccaccgaggctctggcgtcctttgactacattgtccgcgagggcaagttcggagccgtggagggtgccgtggccaagtacatgggtgcagcggccatgtacctcatcagcaaagcgactcaagagcaggcaccgcttccaa

SEQ ID NO: 14076 - DNA, 5636 bp, Homo sapiens
ctggtatcctggctgctctgcttcatcttcacggtgacagacgtcttccctcccgacagcacaaagtatggcttctatgctcgcacagatgccaggcaaggcgtgcttctggtagccccgtggtttaaggttccatacccatttcagtggggactgcccaccgtgtctgcggccggtgtcatcggcatgctcagtgccgtggtcgccagcatcatcgagtctattggtgactactacgcctgtgcacggctgtcctgtgccccacccccccccatccacgcaataaacaggggaattttcgtggaaggcctctcctgtgttcttgatggcatatttggtactgggaatggctctacttcatccagtcccaacattggagttttgggaattacaaaggtcggcagccgccgcgtgatacagtgcggagcagccctcatgctcgctctgggcatgatcgggaagttcagcgccctctttgcgtcccttccggatcctgtgctgggagccctgttctgcacgctctttggaatgatcacagctgttggcctctctaacctgcagttcattgatttaaattcttcccggaacctctttgtgcttggattttcgatcttctttgggctcgtccttccaagttacctcagacagaaccctctggtcacagggataacaggaatcgatcaagtgttgaacgtccttctcacaactgctatgtttgtagggggctgtgtggcttttatcctggataacaccatcccaggcactccagaggaaagaggaatccggaaatggaagaagggtgtgggcaaagggaacaaatcactcgacggcatggagtcgtacaatttgccatttggcatgaacattataaaaaaatacagatgcttcagctacttacccatcagcccaacctttgtgggctacacatggaaaggcctcaggaagagcgacaacagccggagttcagatgaagactcccaggccacgggatagcctttgctgtgccctgtggcctggccgcagtgaggcatgtatctgtagttccttgctgagtaacaagaagtaaaatacatgtttgtatatctacatttacattctgcgccccagagctaagacagactgcgaatcacttttctgctgtgagggtgatggtgcctgatgcggtgtctcgcctatctccttatttaagcccttaactccttgccctttgagagtgtccattgctggccatggtcactaaatttgaagttccagtcctccctttggagtggacatttaaaatctgcagccattccttgcttcagttcccttccaccacccaggggctggctttcctataagccacctccagggtccaggggctttctctctctctccgaagcccctggacctgtttccttgtcatttgaccctcagtctgtgcccgcggagacctcctctgaccaaggggcactagtatgccttgcgctatcatgactgactggcccagtatgattctgttgtcgctgatctcccggaggaggaggctgttgacctgaaaacagtggcgcggctccccctgtgcccagatctggccatgggtgaggcctgcacagatgttgaatgaacatctgtttggggcattggagggaaaaggaaaggaccctgaagccaatatctgattctcggctgcaccttctcttggccaccctggccctgaccgggccagcaccgtgcacactggcctcttttcatttcactagtggccgagacaccctctctggcatttatcactgttggccggtgtgatgagtatagagtgccacccaaggcaccagtcacacaagctgatgggcgtcttggctctgccgtcatgtggatgttattgtcgcgcgcgtctataattacaaggttttattcctatttaatgttattgactatagcagattttggaaatcagtgttttccatgtgaccctctttccttgcatccctattccttgtcccccacccactcttccccccatcaagaaaagaaccagcatttgtaaagctgtggacaccatcagggaagcttgttgtaacggcttttgaaggccagtaaccattgttgtggttgtgttttgtattgcttgataccatgaaagtgtaaatactgtaatgcctaatctatttatcaaaactgactactggaccggagcccagaaaccatgggtcaagttacacgtgaatttgttttgtgaagaagggaagctggggcaggtaacacgcagagccgccacgtggaacggtctgtccgccggtctgtcccgcttgccgggcttctgttgcaagtcttggcttaaggagacttcctgtgggttgccatgtcgcacgtccgttagatcttgattttacaggtgagggtggttgccaaaggtgataagaaaagcagccaacaggctccctctcacttaagagagttctaattaataacactaaattcttcctgagaaatgactcctcttggtttggtttgaagtttttcagtgaaggaaaaggcctgagataggaagcagtgccctcgcttcatgaggtggcacatcttcggtgggccgttggcctggtcgagctttggtcagctgcgtgggtgcctgtctcctgtctccagcggcagggcatggttcttggcagcctggtgtccacaccggtgcattcctgtccccctcggccccaggctggctcagctctccagtgctgcggcgctgtctttgcagcattgccatgtcaccgtagcccccttcactcttggaagtttggggcttcaaggtttattctggcaagaacacctcggagccactgcattgttttgccaaaaacttactgcagattaagtaaagaacttagatgctaaattacatctaattttgtatgtttttttaaatgtgtctttgatgcatactttagaagcacactggctcgcggtttccatccctcttgccttgggacactcttgaggctggcagccctcctgcaatgagttgctctcagttccttctgtttggattttgctcaacatctccagtttctctgctctgaaaaatggggaaaactgctaaacatcccagagatttgcaatcttctagctctccaggtgagcagaaagaccaaatatccaaataaaagcctgaaagccattggtgatccaggggcaccttctcttcagcttgactgggcgtcttccgctgcataacactcaaggtgtctgctctagtcatccagaaacccactcccttctgaagcccctccttgggccgggttgtatcaggaggattcaaccccgctaacatgtggggtgccctctgtaggccttcacacagggaaggaagccctaccctttcaactcctgttggaatgagagtttcctgttctgattccactgtggccaacccaataattctgtccgaggaggggtaagggaataggaggtggggagcaaagagggcagcctgactagatgcccctgctgaatctggtactttctgcacagccttgagtgattggagtcccctaatgactaataaacttgaacatgtaacacacacacacacacacacacaccattttaggaagtggttctcctactggaaaatatgctacagaatgaaagtttgtaattgaaagaaaaagaatgtattcatctgcttcttgggtttaagcacacacctgaaggggagatattgggggacacggtggccactcgtggtctgtgtcatgacacttcccattcacatcattggcctgcgttgctggggctttgaaccaccaccccgtactttgttttgcctgtagagtgttgtaaaatattttggatgtgaatgtccttgcaggccggttagtctccagtttccacagagaccacctacccaccaccttcccagggtcacctgcctgggtccctgaaagaaagcatttgtgtggggcaatcccaacatggaaatgttaggacagcgttgaatacgggacagggagggtgatggccatatttcacagtgggggatggagggcccccacccctgcttcacagaataatgggaagtgactctagtctttgtaagcaattttcattctcattaggaagttaaatgtagattcacagatacatttactttcagaatcctcaagaggatttcaaatgctaacttttagtttcttgggattgatcaaggcaagagaagtggctttaaccatgccagccagaatgaagcatcatgggtcctgatggtttcccgttttcatggtaacaaattcgcacagaggttttgctttatactgtagaataccgactttcatgatgacaacttggtttatgcatgaatattgcagtatttccatatagcaaaataacatttctacccaggataatagtcacagttttccagggagggaatgatataattttcatgacaatgtcatgtgatgatagaatttctccattgatgaatctctagtatgtgtgtatactttatttacccatacgtatattttatgaccatgagctaagttgttatttctttcattcatatccctgctgaaatattggtactagcaacttaaagttgggcaagtcttcatcttcagtaatacggatgccatgggagtggccagggccagattgaaggtgaatatggagcagtagcagaagcctcattccagaacccatctggccagagaagcagcagcatcctgggggatggcccgtgcatggggtgtacactcgctataggcataggcccggcatggctgtcgctggacgccagctgtgcacacccagccacacctgctgcacgccgcgttagtgtgcggctccgggcctgagcattcgcaaagctcgcttctccagggagcctcctcttggctttggaaaagagcccagggacttaacgtgctgcctgttgtactctgtcccctcatgactttttagacacagggactaggacatcgaccaccctctgcccctcctgcagtcagaacccgagtagtgcaagaacggccacccggttttgccagcgttcagcgtctgcccatggacccataaggcacattagcgttgggggtctcttttcagcagcctcacagacattcccgtcctttctggttggtgttgactgtgtttcagcatcactctaccctcccatgtccttagcattgctgtgcgtgtttccaggcacttaggacacccttccccacgttgccatcttactgacagttcaaatgactctccttttttgttcgttagtaacaatcttcatttgacaccttaatacatttctgactgttcttaaaacagtggggatgcctatattttccttgagtttttgtgactgactttggctatatatacctttctggggttttgtttgttttttatttttattttgattaccgagggtatttggggtggggttgttttttgagatgtgtaattcttttatggagtttttaaaaagaattttcatattgtttttctaacatggcttcattaaacgtttaagtattttaaaaatatgtaatatttggaccagatgttgtgaataatagtagagataaagctattttattctgtatttttaaaactgttccgtacaaataaaagctctcctggacacaaaaaaaaaa

SEQ ID NO: 14077 - DNA, 1297 bp, Homo sapiens
  misc_feature (1)...(1297): n = a,t,c or g
cttaatttaagtttgcactttaataccaaacttaaaaccaaacactcatttaaaagtaggttaagtgatcatggatcattgttattagctttgtggctttgtgaaattctaaaggaatcaaataattcatcatgatttaaattttctagagattttgatttttttataatgtttctttcctgtagatcagtgnnnnnnnnnnnnnnnnnnnnnnnnnnnnnnnnnnnnnnnnnnnnntccccactcttcctttctcctttgctttttcttctctttcatacatatatgcgtgcctagttctaggaggaaacgggttaaaaattgttttaaactacatcttgaaaatattgaagaatttgttttaggtagagtggtcagttgaaccttacagtaaagtatagaaatatatttaatgtggaatgtcaatgccaggatttctcattancaatattttatctcaactttggttcctgtgatacatttctgaatgggcaattccagaaatcttagtagcccatgttaagcttctattttttacttgttttcggggagaaataagaattagacatcttcagatttaagttaaataatcccattctttataatcctctgtaaaaagatccctgagattattccttcttctagttttatgcgacagcttttactttaaaattcaagttatacatcttgggagtacaatggcccgacatttcttcataggtagaaacaaatacttgactcagtgatactcatgaccattagaatagtcatacctggaatgtgtcaaattataagagacagacacttggttagtggctgcctcatatagcacttttgaagaggcctaagtcaaaacttgcaatataacattctattgactttcttaaaaatattttttctgtacctaacttgagcataagggttatttgagcaagtaacattaactcagtggaaggcattgtcctgtgaaatattctttaggcagatctgccccacatctttattgaacttgaaatctaatatttctagtatttgaacaaagcagaaggttaagtcagggaagagcagtgctgtccatgatgtaatggaagctaccaggggaggcagtgtctggatgatgctgtgctacctacccctgcacgaancatgctggctcagtctgagctgtgggccacatcagctagtggctcttctcatgcatcagttaggtgggtctgggtgagagttatagtgagggaatggtcactaaagtatcctgacaagttcctaggaaaaaaggaataaagtttttttcctt

SEQ ID NO: 14078 - DNA, 470 bp, Homo sapiens
gggcaaaagcaggcttgtgttgctgtcaaagcggacacatggcatctccagccaagggaatgggcaggtggaggtcatgctccaccggcggctgtggaacaacttcgactgggacctgggctacaacctcacgctgaacgacacctcagtcgtccacccagtgctctggcttctgctgggatcctggtcctcaccactgccctgcgccagaggagcgcacctggcgctgcagcacaggcccgtggtgctgttcggagacctcgctgggactgcgccgaagctcccaggaccccagcagcaagaggccgtgacgctgcccccgaatcttcacctgcagatcctgagcatccctggctggcgctacagctccaaccacatggagcactctcagaatctccggaaaggccatcgaggggaagcccaggctgacctccgccgtgtcctgctgcggctctaccacctgtatgaag

SEQ ID NO: 14079 - DNA, 2457 bp, Homo sapiens
cctgctcgttcctgacagaattaacggcacagccaacaagatgaacggagctttggatcactcagaccaaccagacccagatgccattaagatgtttgtcggacagatcccccggtcatggtcggaaaaggagctgaaagaactttttgagccttacggagccgtctaccagatcaacgtcctccgggaccggagtcagaaccctccgcagagtaaaggttgttgtttcgtaacattttatacaagaaaagctgcacttgaggcccagaatgcactgcacaatattaaaactttacctggggatgcatcatcccattcagatgaaacctgcagatagtgaaaagtccaacgctgtggaagacagaaaattgttcataggaatggtatcgaagaaatgtaatgagaacgacatcagggtgatgttctctccatttggccagatagaagaatgccggatcctccggggacctgatgggctgagtcgaggctgtgcgtttgtcacattttctacaagggcaatggcacagaatgcaatcaaagccatgcatcagtctcagaccatggagggctgctcttcacctatcgtggtgaagtttgctgacactcagaaggacaaagagcaaaggcgcctccagcagcagctcgctcagcagatgcagcagctcaacactgccacctgggggaacctgacagggctgggcggactgaccccacagtatctggcgctcctgcagcaggccacctcctccagcaacctgggtgcgttcagcggcattcaacaaatggcaggcatgaatgctttacagttgcagaacctggcgacgctggctgctgctgcagctgcggcccagacctcagccaccagcaccaatgcaaaccctctctctaccacgagcagcgccctgggagccctcacgagtcccgtggctgcttcaacccccaactccactgctggtgcagccatgaactccttgacctctctcgggactctgcaaggactggctggagccactgttggactgaataatattaatgcactagcagttgctcaaatgctctcaggtatggcggctctgaatggaggacttggcgccacaggcttgacgaatggcacggctggcaccatggacgccctcacccaggcctactcaggaattcaacagtacgcagccgccgcgctgcccactctgtacagccagagcctgctgcagcagcagagcgctgcaggcagccagaaggaaggtccagagggggcaaacctctttatttaccaccttccacaggaatttggagaccagcacattctgcagatgttcatgccttttggaaatgttatctctgctaaagtcttcattgacaaacagaccaatctgagcaagtgctttggttttgttagctacgacaatccagtctctgcacaagctgctatccaagctatgaatggctttcagatcggcatgaaacgcttgaaggtgcagctgaagcgttccaaaaacgacagcaaaccttactgatcctaaccccagaggctccctgctctcattttagctttcttaggacatcttcatgcccgttagttcatcgtttgcctagcatgtccctgtggcgtctcaaaaaaaagtttcatcgtcccgtcattgtttctgatgtctttctgacctcacatcatatttggttctcctactgacctttgatctagtttgacctttgaaatttgcatgtgacctcatctagctatgaattctgggaagtcaatgtgaaaaacattgctgcattcatgcaagactgaaatttattattagacaaattcattatagaaaaaacctgtggcaaaaacgtttctttcttattttttttcttttcctaaaacagacttgaaagtattatacagggattggcattcttcccggtcactggtaacaatagcaatatgtgtccagggacacagaatgttggtttctaacagactacttccaaaaacagtttgagaaaaaaactgtctgattttaagtctctagaggtctgtaatagtttttacatttttcaggcagtgtaaagttttttgataaggccattttaggtggctcactttctcattaagatatatatatagaaccactttttgtagattagtataagaaaaatatttaccctgttttggggcaaatgctacctatttgtgtcaccttttgctgaactcacagttagacaatccatggtttaatgcacatgaaattacctatattttatactgtttcaatgtacaggagaaaggttactgtaaactgtgttatgttggtgcttctgtgaattaagttgtggtttcatcatgagtcttaatgttctttgttgataagacaagtttagaattggtttacttaatacaaaaaaaaaaaaaagaatttcaaaaaaaaaagttgtttgcttaaaaaaaatttcatgtgagggaaaaaaaaa

SEQ ID NO: 14080 - DNA, 2265 bp, Homo sapiens
  misc_feature (1)...(2265): n = a,t,c or g
aagggactttgcagatgtaactaaaatttctaaaatagagatattatcctggattacctgggggaacccagtgtaattacatgaacccttaaaaatggaagaggatgcaggagtcagattcaaaggaaggcccaaggtgctattgctgacttgaagatagaggggccatgtggaaatcaagagaaggaagtgaatccttccagtgagcttggaagagagcaccttgaggcacagatgagaagcttggccttacctgatgccttgattttagcctggtgagaccctgagcatataaatttgctgtgctatgccacacttctcacctacagaaacttannnnnnnnnnnnnnnnnnnnnnnnnnnnnnnnggctttaggcccctgagggtagagatttatggcttgtgttacaagtagagagcagtggagagttgggctttgtaattctttcaagggtgattgtagttctggagtcctatctacctgggttcagatctttgttggccagtccctggctgtgtgacttcactgctttaagcctctgtcttcatcccttaaagtggcgatgatagtacctacctcactctgatctctgaataacacatgtaagacacttagcacagttcctggtgctcaaagagttccaacacctgaaagcaccatggccctgtttgtttttcagtcaagatttctaaaagccgttattaccagaggttcagtgagaacatgggcagggtaaactcaaaatggagaacataaaaactgggactcccagaccagtcacttagaagactgctgcaggaagtaccaaggtcgttaagaatcagtaataataataagtaatgtgtgaatccattagaatgttgagaagtagacctttgacatttcagaaaaatgtatatctcagacacagccatatgtattgttatccctgagttggaagagcatcacagggcatagtttcacaaaagcttcaaaaaatatactaattgctggtaatatgtgaactaacagaaaaaaatagccatgttaaaataggagtgcctgacaattagctctattcatcttgtctcctagctgtaagcaccctagattcaaattatgcacctagaaaactaaattactatgtatgttataggcctttgaaatggatacatgaaaattagtgaaatcagaatgaacgtttcgcctgccaaagatatgtatttttataagtgatacaagggccccatgagctccatggccacatctgtacaaaacaggccctcctttcaggaactggtctcgagagagccaaaggggtcaactccctaaatgggcagctgagacagtcctccctggtgggcatgggccctgtttcctgtttgatatggtgatagttggagagtcaaatttttaccagaatttgtgaatatcatctctggttaatgattacacaaaaccttttaaaattttaaaaaattatttctaattctataaataaactctgcagttgtacagccactgtacagctaacatctcaacactggaaatgaggctggtttcttccagtttggctcagattcttcagggaagcccagttaagacaaacagctctctatactcaatccttactttgctgagaagatacaggcctgcccactcgctcccacctgctcttcatgaggagtcctttattcctgcatgtttcctgttctttgggacctttaggagctaacctccacagatgctgatagtctgtagagtcaggaataccatgtaacatgttgaagtagactaaagattagttctttggcaatagcccagtctggacttactatgtacttttgaaaataaaactgcttatttgtaaactctgtaattaggaccttttgctatttgagttatattcctttctaacttcaaacgtctgcattcatgtataatagccattttatgcacagatgaggtgattcccacacttcttttcgcagatgtttcattatctggatgagtgtattacataataaatttgaataatggtagtcttccaaacgacaaaaagcaagctagttgatttgtcaattttgagtttaaatgttttgactgcttatcagcaaaaaaatcaaagaatagcatactaatattaatggaaatgcagagtatatttaattggcatgattttttcatggatgtgtgcttcatttgatctattgtatgtagctcgtgatcacattttctgttggttaacattgttcctagcttatatgatggaattaaatatatt

SEQ ID NO: 14081 - DNA, 710 bp, Homo sapiens
  misc_feature (1)...(710): n = a,t,c or g
tcggangggatgggactggggagtcagctgctcatctgcaggctaatggcaggaaatggtcatatttggggtttttccctaatttttttaaacaaaaattacattacaagatccaggttcttcccccccacactcaatcaagccagccctctcctcttctgtcacgtaaaggatatttggcacactcatgcgtcattcattcacaaaacacaaacccaggactttctgcctaaggcagagcacaagactcacagcagcaccgaagcgcatctgccgtccgggccctgccaggcttgccaggctgccagtggtaactgtggacctactgcgtgccacgtgttttcatagactcatcccatggctgggcaacagccctgcaaggggctttgggctctgccacagggcagggagaggaagttgtagcgcctagcgagagttccagccccagacgcccacctgtgcctcaggggaaccgcctgcccgaggcagagaagggcacagcagccgtcagagtccatgagaggtgaaaccacacagcagggatgtccaatatcagaactattaatatcaataaaagtataaccttcccaggtctatgcccaagagaattgaaaacatccatccacacaatacctgtgctcccgcgttcatagcagcattactcaaaagtcaaacggtagcaacaacccaaatgtccatccacagatgaa

SEQ ID NO: 14082 - DNA, 3353 bp, Homo sapiens
gaattccactttctacctcgtgttggcgttggaacaagttttggattgcctcaaaccagacgtatttcattagctagtccacgtcagctttttaaggcttctaatatgacccagcgatggcaacacagagagatatctaattttgagtacttgatgtttctcaacacgatagcaggacggagttataatgacttaaatcagtatccagtgtttccttgggtcatcactaattatgaatcagaagaactggatcttaccttgcccaccaacttcagagatttgtccaagccaataggagctctgaacccaaaaagagcagcattcttcgctgagcgttatgaatcatgggaagatgatcaagttccaaagtttcactatggtactcattactcaactgcaagttttgttcttgcatggctgctaagaatagaaccctttacaacttatttcctaaatttgcaaggaggcaaatttgatcatgcagatcgaactttttcatcaatttccagagcttggcgaaacagtcagcgtgatacctctgatattaaggagttgatccctgaattttattatctccctgagatgtttgtcaacttcaataattataatcttggagtgatggatgatgggacagtagtgtctgatgtcgaacttcctccttgggccaaaacctcagaagaatttgttcacataaacagattggccctggagagtgaatttgtttcctgccagcttcaccaatggattgatctcatttttggctataaacagcaaggaccagaagctgtccgagccctcaatgtgttctattacttgacctatgaaggagctgtcaatctgaattcaataactgatcctgtgttgagagaggctgttgaagctcaaatccgaagttttggacagactccttctcaactactcatagagccccatcctcccagaggttctgccatgcaagtgagtccattgatgttcacagacaaagcccagcaggatgttatcatggtcctcaagtttccctccaactcccctgttactcacgtggcagccaacacccagcctggtttggcaactcccgctgtgatcacagtcactgctaacaggttatttgcggtgaacaaatggcacaaccttcctgctcatcaaggtgctgtacaagaccagccataccagctgccagtggaaatcgatcctctcatagccagcaatacaggaatgcacaggaggcaaatcactgaccttttagaccaaagtattcaagtgcattcccagtgctttgtcatcacttcagacaaccgctatattctcgtctgtggcttctgggataaaagtttcagagtctattctacagacacaggaagattgatccaagtggtgtttggccattgggatgtcgtcacttgccttgctcgttctgagtcatatattgggggaaattgctacattctctcagggtcacgtgatgcaactcttttgctgtggtattggaatggaaaatgcagtgggattggagataacccaggcagtgagactgctgctcctcgggccattttgaccggccatgactatgaggtcacatgtgctgcggtgtgtgcggagctaggcctggtgttgagtggttcacaagaaggaccatgtctcatacattccatgaatggagacttgttgaggaccttggagggtcctgaaaactgcctgaaaccaaaactcattcaggcttcaagagagggtcattgtgtcatattctatgaaaacggcctcttctgtacattcagtgtgaatggaaaactccaggccacgatggaaacagatgataacataagagccatccagctgagccgagatggggcagtacctgctcacagggaggagacagaggagtggtcgtggtccggcaggtgtcggacctcaagcagctctttgcctatccaggatgtgacgctggaatccgggccatggcgcctgtcttacgaccagaggtgcatcatttctggcatggcttcaggaagcattgtgctattttacaacgactttaaccggtggcatcatgaataccaaacccgctactgatggtgacagctgtacatcaactctgcccctaggatgagcagaagtacctggagcatcattctcttctaccacatctgaatgtaacttaaatttgctcaaagaagcaaaatattttttaaagttattaataattgctatttttgtagtctttgcttgacttttttgggggggattagcaaagcagaaaactggctgctgggttctgtagttttaaaaaatctatatttttagtcataatgagaagtctattttcaccaattatggaaacatacagtggagcaagtaaaccacttattccagctataatattatgaagaacatttcccatgcatctacaagcttgagaaataggattttcacagtggggaagtgggttacaatattggaataggaaaatttgatgctgtaatttgggtcctgtatttttccaaacaactgtgcttcttcagcactaatatttctgggatttaaatagtaatgtttaaattatggtaaatgtaatttaaaacatctcaattaagtctgtctatcaatattgttcttcaagcatgttttagacctagaaaagtatggtttgggggaggctattttattgtgtggttagcacaaggaatctaatttatagcaagtgtgaaatagttaccattttttcctgatctgtcatcttcatagcacaacaaaacggaaatgatggaaatgctcttgagctcacaacatttgtttttcttttaaagtaaatgcaagtacccaaagctcactactgcggtttgcctgtgcctggacaatgaggcggagccactgttggggcacccccttcccctccccgggtttgcaaatagaggctacccgggtgctgtattcagcaacacctgttttacctatttgttattaaactatcatctccaccttccttttgattagcaatttgtactaagaaacgaaacaatgttatttggtggtgtataattctacttttctagtagattactgtgtggaattctgtgaaaaatatttgagaaaaggcctgtattgcataaataaattctttgtatgttgtgaactttgatctctatttctcttgcaacagacttcaagtggtccctctttttttcctacacactcagctcttctctaaaagcaaggatttggaatgaacaattcagtttgacagaaaaagctgaataaaatggcatctgtaattgaattgttggaaatgccttttttgctcctaaattttaaacatcattaataaaataatgattcacaaagaaagaaaaaaaaaa

SEQ ID NO: 14083 - DNA, 673 bp, Homo sapiens
gtacgttcattcgttatttatttgtgtgcgaccccggctccccgcagcctccacccctcccgcgtcccgctttcagaaggaacgcggccctcagctccctccgaagaggccccgggtcaggggctgcagccgggtccccgtgcgtcggcccagctcgtccagcaccgccttctccttctggaacatctgctgccactctgcctccgtgccgtgtgtgaatcccagcaagtgacagagtccgtgggtggccgtcacagtcaggacgtcattgtaatcttcattttctttacactgatggaagatatactccactcctaggaaaatgtctcccaaattgtagtcatctggaaaatcaggctggggaaattcacctgctttcagatgctcatgaaatggaaaagaaagcacatcggttgggacatttctatctctgtagattctattaatgtgctgaatattcttgttgtcaacacagatgatccccaggtcaaatttctgcactcctaaaatcctccttacaatctcgatcttactgcgaagtggcgctctcctgatggggatgactcgctgcagatttctaatcaccaaactcatttcaggaagaataaccagccctttaaaaatgtttgcaacggaaccggtgtctggacccagcaaaggacgcgaagctggc

SEQ ID NO: 14084 - DNA, 1656 bp, Homo sapiens
gaagactaccaaaaggaagcgtggctacattaaaaataagctggtttttaagaaaggcaagaaaatatctaagaagactgtttaaatgcactgttctggttcctaacttgaagcagttgtccttgtgagaaccggtctttgcctttagctcatgtcgtgtttcacagcaaagagggtacagaaccatcactggtccaggttaatgtacaaaattttctgggcaatgcctgattaaaaaaataaaattggcttgttgagaacagctgttttcgatttctaatgtgaagcaagacagagcactgctgtaaatgtctagcagcagatttttttttttattggtacatattatccttcaaatctgagaatttggactaactgcaccaaagaaccctctaatttggtccctgggcacatgcatacttgtcaatgtttttattcttttacaagacctgcattttatttgaattacccgaatagcaatatgtaaaatacaagtgacaaaatgtgatgagagcttcttgaaccggtaaactagtacaggtctgagaaagacatattagaagaatcattatacttccttgaattatatttattttcatgtttctctaatgcaaagaatgtttcatcaaatgtatattttctgttgcttactgtttgctctgagaagaagctgctgtttcaaagatggacctctgagtagctaattgattcaagtagtttttttatgttgacacattattactgctgttagcagtcgttttcaccaggtacttacagagcagatttcatacatcattcattcaagggctaaatttatattttttggaaatcatggcaactacacaggatgttgcttaccaggacggagttttggtatcttagtactgaagttagcactatgtttacatgcaaaagattaaggaaaaaacccttaaagtggacaggtatccaaagttcattttctgtgactcatcaaagtgacaaaagacttgtaacaactttgcctggacttttttcattttacaacagttcatccattcacaatgattttgttctctgctccatattttttaatcccttaagcatttgatgaaacactctttagtgctatatgcattttcttacttttgttaaaaatgtgacaattgtcaaaaaatgcactaaaatgtaaatggagattgaacaagttcactttccagcttataggcaactttatacagacttgaacattttctccagttgtttagtaaaagtgaaagagaaagggtttttcctgccacaggatataacttttttttatataacaagcataacacaccactgcttttggtggaaaagtgcagaatagtatgtaccttttatgaagaaaaatgtaatttacaatattcagtgagaatgttactgctgattttcttttccaaggtgtagaatattctttgatttatagaattcatttttgacccagatgatggttcctttacagaacaataaaatggctgaacattttcacaaatagagtgtaacgaagtctggatttctgataccttgtcatttgggggattttattttactttgttgctttaaaattcaatgcagagaagttgttgactgtaggggaaataaagttaattcaaattttgaaaaaaaaaaaaaaaa

SEQ ID NO: 14085 - DNA, 694 bp, Homo sapiens
  misc_feature (1)...(694): n = a,t,c or g
ctcaggaccctcatcggggatgtctgtgtcctggaggacatgaccgtccacctcccgatcatcgagatccgcatcgtggagtgccgagatgatgggattgatgttcgtctccgaggggtcaagatcaagtcatctagacagcgggaactagggttgaatgcagacctgttccagccaactagtctggtgcgatatccacgcctagtaaggcaccgaccctgaagtactgtaccgcagagctgtcctcctgcagagattcatcaagatcctcgatagtgtcctgcaccacctggtacctgcctgggaccacacactgggcaccttcagtgagattaagcaagtgaagcagttcctactgctgtcccgccagcggccaggcctggtggctcagtgcctgcgtgactctgagagcagcaagcccagcttcatgccacgcctatacatcaaccgccgtcttgccatggaacaccgtgcctgcccctctcgagaccctgcctgcaagaatgcagtcttcacccagggtatatggaaggccttcaagccctcttgacaaatattgaaaagccctgggattacaggtgggcccatggcgttatgaccagtgggtngggagtgttaanttttatttgcaggaagggattcatttgaccaaggtgagggccttgaggggagggttttnaaagggtgcttgttt

SEQ ID NO: 14086 - DNA, 168 bp, Homo sapiens
gcggcacgagaccatccacactcttagggagaccaagccttccatttgtgcgctgcattccattttctttggcctactgaaggacatccatctctgctagatgtttcgtatcagcatataaacatgccacaactgcatttctctcttcccagtctctctctctctctc

SEQ ID NO: 14087 - DNA, 426 bp, Homo sapiens
gcatggagtcactcaccttagagtctgaattctgctaagtcaccatccacttcaaaaacgagttaactgaatccaaaggcctaaaaacagaatcttgggggagggggacaaagacaacagggggtctgtaagagcatttatgtaactaggaacatctgttttgggggctctttcgtagtattgtgtggaaataagttcaactactaaactctaaccataaaacagacacaaaaatctaatacagaaagctctttagagatcatccatcagagtagaaccttagtcataggaaactcgctcagaacatacccaatcttaaataacccaaactttccaagtgccaataaagatatatcaaatatgaactcttttggctataagtctgaggctcattacatccttctctgctttttaaaccatgtctga

SEQ ID NO: 14088 - DNA, 901 bp, Homo sapiens
gggagatggcggagctgtacgtgaagccgggcaacaaggaacgcggctggaacgacccgccgcagttctcatacgggctgcagacccaggccggcggacccaggcgctcgctgcttaccaagagggtagccgcaccccaggatggatcccccagagtccccgcatcagagacttctcctgggcctcccccaatggggcctccacctccttcaagtaaggctcccaggtccccacctgtggggagtggtcctgcctctggcgtggagcccacaagtttcccagtcgagtctgaggctcgactgatggaggatgtgctgagacctttggaacaggcattggaagactgccgtggccacacaaggaagcaggtatgtgatgacatcagccgacgcctggcactgctgcaggaacagtgggctggaggaaagttgtcaatacctgtaaagaagagaatggctctactggtgcaagagctttcaagccaccggtgggacgcagcagatgacatccaccgctccctcatggttgaccatgtgactgaggtcagtcagtggatggtaggagttaaaagattaattgcagaaaagaggagtctgttttcagaggaggcagccaatgaagagaaatctgcagccacagctgagaagaaccataccataccaggcttccagcaggctttcataatcctccgggttccccagacttcaccgggacaccatctcctatgccttggagaccttctgtcacttggctcccttcttaccaccaccaagactgtcccactgggcctgacccacctatgagggaagaagtcccacctgggccagagggagttcatgtgttactcataacatgcatttcaataaaaacatctctgcggtgaaaaaaaaaaaaaaaaaaa

SEQ ID NO: 14089 - DNA, 317 bp, Homo sapiens
gctccaagttactggacaccaggacaaaccaggtagatcactgcatccggttcctcctctttctgccgactctcccgggcaaccgttctgattcctggcatggagttgggggcgagctcatcagtacccagagcgcctggtgtgcagccaaaggcccccattttattagtcggtgtgttcagtatcacgctcaagacaagggccaacctattacttcacacacctcaaatacaaaaagtgcctgggaacgtcgatgaggtattaaaggaaaccactggtcttgtcagtcatgtacacacagaaaaaaaaaccagtca

SEQ ID NO: 14090 - DNA, 442 bp, Homo sapiens
agacaatcagtgcacatgcacacaccccacacgcatacacacatgaacacatgcacatgtgcacacacaagtaagatggcttcagagagggagaagcactgtgaggcctccagaggatgtggcagtgagggacgatggggtgaagtcagctgggcattcaaagaagctagactgagaacgcctgagaagaaccagctacgggaagagcttttgggaagcaaaggcagaggccctggggtgggagcaggcttgttttattggaaggaccagaaaactggtaagtgtgacccagatcaagtgtgaggagatgaggctggggatagtcaggggctggatcacccaaggccttgtgggccccacatagggttttgggttttattctcagggcaatgggaagctgttggatggtttgatgaaggggagtgacaggatccgatgtacc

SEQ ID NO: 14091 - DNA, 881 bp, Homo sapiens
ggaaagcgtggcggctgctgctagagcctttccctttaccgcacccaaggagctggagcgacaacaacgacgtcgtttccgtttccaccacctcttcctgttcccgtccttgaggacgccgtgccgggtcagtgttagcctccagccctggttgtggaaggcgacagaagtcatggcgatgtttgagcagatgagagccaacgtgggcaagttgctcaagggtatcgacaggtacaatcctgagaacctggccaccctggagcgctatgtagagacgcaggccaaggaaaatgcctatgatctggaagccaacctggctgtcctgaagctgtaccagttcaacccagccttctttcagaccacggtcaccgcccagatcctgctgaaggccctcaccaacttgccgcacacagacttcaccctgtgcaagtgcatgatcgaccaggcacatcaagaagaacggccaatccgacagattttgtacctcggggacctgcttggagacctgccatttcccaggccttctggcaagccctgggatgaaaacatggacctctttggaaggtataactggcttttgaagactctgtccgaaagtttatctgccatgttgtgggtatcacttaccagcacattgaccgcttggctgctggccgagatgctcggggatctgtcggacagccagctaaaggtgtggatgagcaaatacggctggagtgccgacgagtcggggcagatcttcatctgtagccaagaagagagcattaaacccaagaacattgtggagaagattgactttgacagtgtgtccagcatcatggcctcctcccagtaacttcaggtgtttaataaagatgtgttgactcagcaaaaaaaaaaaa

SEQ ID NO: 14092 - DNA, 1274 bp, Homo sapiens
gcagggtatgcagtgataactctggacactgttgttgaaaccaggtcgttgccctaggccacttcagcccagaaagctgaactcaatgctttcatttgggccttagaactcagtgagggtgagactgtcaacacttacactgattctcggtatgtctttttaacccttcaagtgcatggagtgtgatagaaagaaaagggcctattgaattctggggggaaagacagaaaatatccacaagaaatcttgcaatgattagaagcagtacggaaaccccacaaggtggcagttatgcattgcaaaggacaccagcgagcttccaccttggtgggtttggggaattcccgcactgactcagagtctccaaaagcagcatctgcccctttgcgggcatcagtcacagcccctctgctccctcaagcacctgatcttgtacctacttattctaaagaagaaaaggactttctccaggcagagagaggacaagtgatggaggaaggatgcattcggttactagatgggagagtagctgtgccacagctgctaggagctgcaattgtactggctgtgcatgaaaccacccatcttaggtcaggagttcacttggaaagttgttaggccagttattttctaccatctcgcattttgtcagcctttgccaaaatggtgacgcagtggtgtgttacctgccgacagcataatgcgaggcaaggtccagccgttccacccggcatacaagcttatgggagcagcctcctttgaagatctccaggtggacttcacagagatgtcaaagtgtagaggtgatcgagtgtggatcaaggactggaacgtagcctctttgtgtccactgtggaaaggaccccagactgtcgttctgagcactcccaccgctgtgaaggtagaaggaatcccagcctggatccaccacagccatgtaaaacctgcagcgcctgaaacctgggaggcaagaccaagcccagacaacccctgcagagtgaccctgaagaagacgacaagccctgctccagtcacacccggaagctgactggtccacgcacggccgaagcctgaggaagctcatcatgagattcatttttcttaaattttggacttatacagtaagggcttcaactgatcttactcaaactggggactgttcccagtgtactcatcaggtcaccgaagtaggacagcaaattaaaacaatctttctgttctatagttattatgaatgtgtggaaacaataaaagaaacttgtttgtataaaaaa

SEQ ID NO: 14093 - DNA, 2369 bp, Homo sapiens
gagtttcctacctcgagtttcaggattacatagccatgcaccaagcaaggctttgaaaaataaagatacacagataaattatttggatagatgatcagacaagcctcagtaaaaacagccaagacaatcaggatataatgtgaccataggaagctggggagacagtaggcaatgtgcatccatgggacagcatagaaaggaggggcaaagtggagagagagcaacagacactgggatggtgaccccaaaacaatgagggcctagaatgacatagttgtgcttcattacggcccattcccagggctctctctcacacacacagagcccctaccagaaccagacagctctcagagcaaccctggctccaacccctcttccctttccagaggacctgaacaaggtgttcccacccgaggtcgctgtgtttgagccatcagaagcagagatctcccacacccaaaaggccacactggtgtgcctggccacagggtatcttccctgaccacgtggagctgagctggtgggtgaatgggaaggaggtgcacagtggggtcagcacggacccgcagcccctcaaggagcagcccgccctcaatgactccagatactgcctgagcagccgcctgagggtctcggccaccttctggcagaacccccgcaaccacttccgctgtcaagtccagttctacgggctctcggagaatgacgagtggacccaggatagggccaaacccgtcacccagatcgtcagcgccgaggcctggggtagagcaggtgagtggggcctggggagatgcctggaggagattaggtgagaccagctaccagggaaaatggaaagatccaggtagcagacaagactagatccaaaaagaaaggaaccagcgcacaccatgaaggagaattgggcacctgtggttcattcttctcccagattctcagcccaacagagccaagcagctgggtcccctttctatgtggcctgtgtaactctcatctgggtggtgccccccagccccctcagtgctgccacatgccatggattgcaaggacaatgtggctgacatctgcatggcagaagaaaggaggtgctgggctgtcagaggaagctggtctgggcctgggagtctgtgccaactgcaaatctgactttacttttaattgcctatgaaaataaggtctctcatttattttcctctccctgctttctttcagactgtggctttacctcgggtaagtaagcccttccttttcctctccctctctcatggttcttgacctagaaccaaggcatgaagaactcacagacactggagggtggagggtgggagagaccagagctacctgtgcacaggtacccacctgtccttcctccgtgccaacagtgtcctaccagcaaggggtcctgtctgccaccatcctctatgagatcctgctagggaaggccaccctgtatgctgtgctggtcagcgcccttgtgttgatggccatggtaagcaggagggcaggatggggccagcaggctggaggtgacacactgacaccaagcacccagaagtatagagtccctgccaggattggagctgggcagtagggagggaagagatttcattcaggtgcctcagaagataacttgcacctctgtaggatcacagtggaagggtcatgctgggaaggagaagctggagtcaccagaaaacccaatggatgttgtgatgagccttactatttgtgtggtcaatgggccctactactttctctcaatcctcacaactcctggctcttaataacccccaaaactttctcttctgcaggtcaagagaaaggatttctgaaggcagccctggaagtggagttaggagcttctaacccgtcatggtttcaatacacattcttcttttgccagcgcttctgaagagctgctctcacctctctgcatcccaatagatatccccctatgtgcatgcacacctgcacactcacggctgaaatctccctaacccagggggaccttagcatgcctaagtgactaaaccaataaaaatgttctggtctggcctgactctgacttgtgaatgtctggatagctccttggctgtctctgaactccctgtgactctccccattcagtcaggatagaaacaagaggtattcaaggaaaatgcagactcttcacgtaagagggatgaggggcccaccttgagatcaatagcagaggttaattcagcgtgaaaggcagtgatggagctgaagaggttacttctagaacagtctaggaagacacagatgttgagtataggaattttctatatccaactatactgttctgcccaggaaagacgtgctcagaggaaggccaacctatacag

SEQ ID NO: 14094 - DNA, 630 bp, Homo sapiens
ctaattcttccaatttcttcatgatggctggatcaatataatcagctatattatggccttcccagatttctggtatcttatcatgtttttcagacaaattcattaaatcccagtacttctgaagatccaaaatataatcatctcccatttccagctcaagatctcgttccctcttcttcctggactcctcagtttccatcctcttcctgcgagccaccactccttcagggatgaaagggggcctctccttatcgtccctcctggttgggatagccaggtgcagtctattcagcacctcattcactttatttcccttcattttggtttccactcgatgagccaaaagcctatcgcaagcctctgttttaactttaataacaccttcctcagtcagggtgctggtctctattacagggaatccttcagactgcaaatctgtaaatattttctgatcatcttcagaaagttcagctattctcttcacatcacatttgttggctacaactatgagaggcttgttgatgaagagaggtctgatgttctggaagagttctagctgctccctcagcccatgcccacactgctcaggtcgacgcggccggaaattttagtagtagtaggcgggccgct

SEQ ID NO: 14095 - DNA, 1373 bp, Homo sapiens
ttttaccacaaaaacacttgtagagcctgtttattgcataactagcaggcacaaattccaaaacgattttacaacacttaaagggcacaataattacaggaatagaatgtacaataaaaagtacagaataatgagtgacagggatcaaacacgttggaataaaaggcatctcagttttcctatgcagcattttcttttctaggaacacgttaccttcaaccaggacaaggaaagaaagaaaactatactattggaaagctcatgggtgccattgaggacaaaaacaggcgagttttgctcttggttctgcaactgaatcacttgagaaggccgttgcacagctcccgagttgtgcgtttagaattctgattacatgaaatgctgtgtttgatctttgggcccaattcactgttctttggcaaataagaactatttgcattccaaggcagatgacgatttctgtgaaaggagcttagaggtacagctgtttccttctgttcagtcaagtgccagtttcataaagtgcacctctgcccctatcagctttgggggaagggtggcatatggggaggaaagggatcattgagaatacagggtgaaaaaagaacgaacatttactgaaaggtagacattgctagtgcaaggtacggaatcccatgtgcaaaaggtggctggaacaaatgttcagataaggtgcgatttgcccaacaggagcagagaactctgacaccagatctcagatgaggccaaggaaatgcgcggggcacatacagagaggacgacctgcagccctccaatggccacgtcattccaccggggaacttgtttggagttttggcaccgtgggctaaccgagcactcttctgacatattcttacaactggaaatgctttgttggtccccatgttccttgactttctctagggccataaaggcaacatcttctattgcaggtcctcaaacattccaaggaaaacactgcttcacctcctgcagacagctcatttccccagaagcctctacagaagcccgtcctcccctgggacagcaggggccaggggtttgcaagataaaggagggtcagctaaggacatgaagcctgcagaaaaggctatcagatggcgcctgaacttaaggtgggaggcccccttctagaaggcatcccgggagcatcccaacagcaatgtggcacttagggctgtgggacaaacaagtggaagagtcttttggagacgtggacccttttcccatgctactcacagtgaagcaaaatgcgacaaaagcatccacacacggtgacttagtaaagcaagcaccgtcggggtgctactttcatgacagcatatggtcaagctataaaggtgtgcatcgat

SEQ ID NO: 14096 - DNA, 1194 bp, Homo sapiens
ttttttttttttttttaaaccacagaatatatttaattcaaattaaacatgaaactagaataatgttcggtccttatcaagtagcaattacattgtttaaaaaaaaaaaaaagaacagtacatttctgtctacattccgacaatccaacgaggcggcatgggtcacatccagtttgatgaggtgacagagccagcagtcaccatccatgggcatggttctgaggggactggggagacacagaccatacatgatacaaaatgattctgcagcaagtctgaaggagcgcagcctccctcctaatacataagaatgaacgtccaggtagcagagagtaggcgacttgcataatgagcgcattttattaaatagatagttaacgcactgcttcttactcattccaagttgctgtaggtgctgcccgcattaacagcagggacaaaagcttcctatgcgcgtttcagcaggaatactctctccactccaggtacttctttgttttggatttttttggcatgatttccttcccatgtaaagaaagccaacttcttcaagacacaggtcattcagctttagtggtggcctccaggttctccttgggccgtgcagaaggccaggtcccgcacagtgaggccctcctttgtcctccactgaaagcttttcactgttcggtctgcaaagaaagaggttcgcctgcccctgctccactcgccagggtggaagtggtggagggctgggaaagggctttcttcacagggcagtgctctcggtatcattgtctatatccagcaggatgcggccaggcacgtctttgctggctgagtctgagtgcatttcaggaaagatgctgcgatgcggttctgaaaccctggaattggagtctgttactatcttggaagctgttggtgctgtgttggtgaggctgctgtccccagctgagtggacaccaggaggttgggggggtgggggcacgctgggccggttccttggctttggtactggtctcggtctcggtaaggttccagcatgtggctgtgcagtttcagggttaccccctgccagggtctgaggagctggcagactggggttctgttttcctaggggcggagtactggggggcgttggagtctggggaggggtgtgagatggctgctcaagtccatgctcactgggcaatgccatggggttgggagggc

SEQ ID NO: 14097 - DNA, 811 bp, Homo sapiens
gctgattagagagctcatcagaggggcctggagagcgtgagcaagtaccagtgacaatggccatttaagaattctcaggccccatgtgccagccttcttgggaactgagctggctttctgggttttctcatgcctggtcttactgcttcttcctcagggctcttgttctcccagaagcctcagggtaatgtgttggttagcacgtaactactaggattggggccctagggattatagccaggactctaatctgcctaccatgccatttaacaagagatcccactctccagctgccttgtgtccctagggtcctggccatgtgtttagtgtgctaaactttctcctttgttctcaggccttccaggtagtccccttcctggacttaagagtgcaaactcttctctgtggttctagccttgggcagaattatatcccagagaccacagagcaactgtcaagctgcttaccccctcacccagggctacagcctgtgcccagccctctaatttgtgcctctcttgtgttggtggtggtgggggttattcctttccctttcctgctctggcctccttgaaagttcagagtacccagtacaagtcagctttaaagtacagcttttagtgtttcctgggttgtttctctggggctttagtgagggacctttgccctctggtttttcttgcctcctggtttagggagcatctcacacttgttagtatctggttgttgggccagccgtgcctcctctagatctggaagccagggccagggcaggggcaacgtgtgggcaagttcagccactaacaagatt

SEQ ID NO: 14098 - DNA, 658 bp, Homo sapiens
tttttaacttttcacttcttttatttgttaaaatagtcacatccatatacatgaaaagatttgaccataatgcattcattgattgtggctcttgccatctcgtggcatccaggatcctggctgaaaggttttaccagtgctgctgggagccactgagggttcttcctttccaaagtatggagcagaggcatggcctttaatttgagtttgaactggtggaggcaggagttcctcactggtctctttactaaggagtttttctttttcataaaaatcttggctttttattttgatttcttctctgtgtttttcattctttagtatttcctccatagtaggtggagtctttcttgttcttctaatccaagcttcccattctgttggaatatcccctgcttcatagtctacttcttttttatttgctgcttctacaattcttttctctcgaatagtttgtcctctccagttcttgtactgcgggatgtagtagtatttgttcccgaattggtccatgcccacgtgctctttcacttcccttgacagcgatctccacaaggcgcggaacaaatcctgagaccaacccatgccgtccacccagtttccagcgctgccagcagcgggacccgcagtaggggtaatgctccagcggacgcgtggg

SEQ ID NO: 14099 - DNA, 699 bp, Homo sapiens
gaacatttcaacatgtaatcagtaaaaaacattgctgagatattttactcgcttttttggtacagagtgttccaaatccggcgtctgttaccttcgcagcacatctgggttcagccgcatgtggcgaattggagagcagggctttagggggttctctttgaggcctctcctaaagtggggtccagccctgttttttttttaggtggggaaattgagaagggacggtgagctcaggttgctccagcagagccaaggcttaaagccagaaccactacaaagtttagagtttgctggagcaaacctctttttccccagtgtgaccccagctgcaccattgagcccttaatggggcgtccatcctttgtcactggagtgaagccttatagcaagcagagagtgaggccacagactcttgagatattctaggccattgcttcgaggtcgtatgtgagatatgaacgtaagaccatttgaacccccaaagtctgggattttaaccctcaagggcaatttgatactgagaggttaagggcacagacttctgaatcatttcctggctgtgttgccttgagtacattcaggagtccctctaagcctcagcttcctcacctggagaacctggagaggttgggaggatcccaggagatgatgccagtaaaaggcagatcacagaccctggcaggttctcagaaaaaaaaa

SEQ ID NO: 14100 - DNA, 866 bp, Homo sapiens
gactacggatccgcagaaggaggcagttgggggccaggggcccagtagaggaggctgagctccttccaactcctcagaacctccactctatggatctggacctctggattcggctttctccctgggcactgccttcaggaagacgttgagaattgaccttacacaatcccagcgccctcctcacaggagcctttcactttacagtggcaaggggctggttctggagaactggctgatgctctgaatttcttcatataccccacatttgactttggcttacactgtacaattggagatgttgctacaggtccctgagatgcaatcagattaagcgtagcaagcattgccaatgggaaagtcaaaataatttattttttttccctttccccctaccccatccccagccaagaatttcttttcaagatatcgtcatcattcttaaacaacattcttaacccccagctggggtccccattttaatagatgtcattgcttcaagtctaacggcgccgggaggcctgtttgagggaaaacattagtttgaaaaatccccgttcccttcatccactgcccttgttctccacgtgggagtgtgcttgtggcccctcagaaagatagtctgctggctcctaggggttggggtgggggacacacctttttctcaggaagaggtgatggcaatgtaaaacatctaagcaaagttttaaatgaaaaaaaggaaacacatttaaacatcctgataatggagggaaggggggcacatttacacatagcccagaacttgtagaattctgcatagtgaatgtatattgaattagtctcctgccttatacattcaggaggaataaatttccataatgtaaggc

SEQ ID NO: 14101 - DNA, 1604 bp, Homo sapiens
atatctcatcacagttttattttaaagaactatgatatccagtatttttccatgagagatattgatcgacttggtatccagaaggtcatggaacgaacatttgatctgctgattggcaagtaagtaactataactgatgtcagggcaaacccccaatgggcaacacacttttagcctgtttcttgaggacagcagctttacttttaaaatacaaagcaaaaacatacacataattttaaatagttcagaaaggcaaaatttgaaacacaggtcatattcttcctctggggtttttgggaggaggtttcctctaaatcattgcctagatcttctgtctcatgaatttttctttatctccatctttaatgcttatcttctgagatgacaagcatttattgtttcaactgtcccattcttcccagcctcacgattgtttcatctgagttttatattaagcaaatcttggcagtgtagaaagatggcagatgaatactaatcaaatggtaattttaagagcattttcccaataccaagtctttacttctgggtgattaatgtcagaattgttatctggtagtatgtcatttcataagctgttaagaaacttagttgttagcttcagcctttggacactggggctataatgaagttagaaatggaagatgttaaaactgcagacctaaaattagagttcacttcagctgctgttacgttcagagaataagagcaaccataacttacatcaagccaatttaaattagactaatttaaattgtctaattaaattgtctctagatgagagcccaatctcatctagaagtgaagaaatctctctattgacagttattagtataagaggttctaatacccagtgtaaggcagaaatatacattggagttagtctgtctgaggtatgccagaacaaatggcagtatccatgaagtggtatgtaggaagttaaataattgcccaatcctcagtaacttcccaagaataggaaccctggaaatgtattaacagctttattaacaaagtactaggactaatagcaacaaaatcaaggagttgcaaccataagaaggatgagtgtccaaggacaaccagttaagtattattttaagtattattttatcctcttcctttttaggagacaaagaccaatccatttgagttttgatattgatgcatttgaccctacactggctccagccacaggaactcctgttgtcgggggactaacctatcgagaaggcatgtatattgctgaggaaatacacaatacaggtatgtagcaaccaggtctgcagcctgttaactacataggtaaatatgctagagtctcttgcctgcaaagggatcttttctgctattccacatcattgcagagtttgtttttgcttaaacttttgtagctaaaaattatatggccatgctaataaaaaggatatagtcctttagagtcatgcttggacatggctcttaccaaattacactaaggtaataatgagtaaaaaattgtatatttaaacaattaaatacaagaataaattgtcaaactgatgcagttctttgagttatctaaaggcagattaagataagaaggc

SEQ ID NO: 14102 - DNA, 1989 bp, Homo sapiens
ctggatggaggtgcgttcctttctgtggctggcgctggatccaccctgggtctccaaccagggctgcagagagggtagagccgtttcttaggccagagtggagtgggacaggaggtgccgagagaggactgaggtggcttgggacatggaagcgctgcagccttcgagcccggcatccagcattgcagccgccgcggcggcctaagagctcgaaccctttcacacgcgcgcaggaggaggagcggcggcggcagaacaagacgaccctcacttacgtggccgctgtcgccgtgggcatgctgggggcgtcctacgctgccgtacccctttatcggctctattgccagactactggacttggaggatcagcagttgcaggtcatgcctcagacaagattgaaaacatggtgcctgttaaagatcgaatcattaaaattagctttaatgcagatgtgcatgcaagtctccagtggaactttagacctcagcaaacagaaatatatgtggtgccaggagagactgcactggcgttttacagagctaagaatcctactgacaaaccagtaattggaatttctacatacaatattgttccatttgaagctggacagtatttcaataaaatacagtgcttctgttttgaagaacaaaggcttaatccccaagagggaagtaggatatgccagtgtttttctacattgatcctggaatttgctggaagatccaaggaatggatttaaagttgatcttatcactctttctttacactttttttgaagcaaaggaagggcacaagttgccagttccaggatataattgaagtcagcaactaagtcttccttcaaagttgtgatttttgggaaaatcatatatcctatcttctcaaaggagaaatattgtacaataatatgaaggcttatattttaaataattattttttctcaactaatttttttcacttaaacttgagagaacaagttcagcttttatcataagaaactcatatgcctagctagaatatatgactgactattcaataccatactgaagagtttgatactattaaaataagccgctttgttttttaaatatgcaggcatgggttcagcttaattccataattcccttccagattattaactcttcatacttacagcaatgaatctgacaatgtttttcaaaaatgtatgctcagggttatttgtttcaagtcataggccagaacttctaaccatgtttattgtgtctaaaagagttggttgctattttccttcattatgaatagtcagtattttaaaagctcaaagtagaagaggagtcactaagccctaacagcttgtccaaagatttaaattcttatttcaaatttgatttgtcctttaaggtttagggctattttatattcagagttctgaataattactttgaaattgtagtatcataaaattgaaataaaatacatctactaggctgttagccaaagcatcaccattacaagtccatgaatgttaaaatgtacaggtgggattgtgaagatttactgacatcaaaagttcttctggaaacaaacctttgttaaaaaaaaaagtattaaattattttaatagtgatttatttgtcatcaaatgtacaacttattctaaatattttcattttctgtgttctaaatagaaatattaagttgcagtaaaaagagaaaaaaaggctatttagcattacaaagaatcatatttaaaggctgcccaatgtagagtctagtgacctgttcaggacacctgaaatataattaaatgacaattatcaaggttttaacaatttataattctaaaccagaggattataaagaagtgcaaattgacttttacattcaactttagttaaatgaaggcactcagtattcttcctgaataatacattcagtttctcacattttatgctttcatctattcagaattatttcatagtaaaataatctactcttatcacagc

SEQ ID NO: 14103 - DNA, 456 bp, Homo sapiens
  misc_feature (1)...(456): n = a,t,c or g
gctggagaaacagaaacctttacataatggacttcatctgttgagaaatgtatggatataatatttggttcatgacacactttcatcactggtccatgcttaggcttttatttaacttttgtatttatgtattcatatttaatattcaaaaaactgccatgaaccaaccacctaacacaactgactaatgtagtnnnnnnnnnnnnnnnnnnnnnnnnnnnnnnnnnnnnnnnnnnnnnnnnnnnnnnnnnnnnnnnnnnnnnnnnnnnnnnnnnnnnnnnnnnnnnnnnnnnnnnnttcagttactcatggaacgccagccacatttcaaggactcaataatcacatgggactagtaggctaccatactgtacagaacagattacagaacatttccatcactgcagaaagttctactgcggacgggtatggtggcttgcacctgtaaccagctgt

SEQ ID NO: 14104 - DNA, 913 bp, Homo sapiens
tttcccacacaatgaacatttgaactgtgtttatgaaaattttctggtttgcaccatgaatttgtcaaatggatatttataggaatatattcactactttgtatactttgcaaatttgtctctctggctttacccaagttctgaatgcattgtaattaaaatttaagtttttcttttcccccattagtaaacatttagtgctacatatgataactgcccaatatttattctatttacttagctaaatatttgcattcttgtaatcttctatggtgttttgtggctcttatcttgtggaccataaataacacggcccaataactctttgtgtttatggagtgttgttttcttagaataatggagatgcagatatagataccatagtcaaggtaccgccttgctgaagtatttatttataaagaatattctgtagaacctctactaccagctatatttttaaatcctgtttatttgtaaagctaatatgctcctcaatgtaattattaaaaattctcaagtcacagctaaacttactaattctgattttagtgtagcccctaaattaaaaatggcttccatatgccactctgtaccccaaagagagttctcatgaaatattctccagaatgtattcattatcaagaaaatgtcaatcgtcacttcctcgttttaactcagctgaaacaccaggacccaatagagagggcaagctgagcatctgtatttccagataaaagttgttattgatgtataaactcgttgcgtgattagtgatgttggaagcattttagcacaaaacagccttgtgtcttagatgatatctgtaaccagtttctgaatcccgttggataaaactgtattgtgatatctatttgatgttaataaagttattggcatacaaaaaaaaaaaaaa

SEQ ID NO: 14105 - DNA, 1674 bp, Homo sapiens
ggaattccaggcatgagccactgcgcccagtctacacactaattcttgttagcccaacagctgttctgttctatctacccctcatttcacgctcaaggagtcatacctagaatagttacacacaagagggaaactggaagccaaacactgtacagtattgtgtagaaagtcacctccctactccttttattttacatgagtgctgatgtgttttggcagatgagctttcagctgaggcctgatggaaattgagataacctgcaaagacataacagtatttatgagttatatcttagttcttgaaattgtggaatgcatgattgacaatatatttttaatttttattttttcaagtaataccagtactgtttaactatagccagaactggctaaaatttttatattttcagagttgaagttggtgaagacattcatgatttaaacaccagatcctgaaaggggttaaatctactttgaaatgaatctgcaatcagtatttcaaagcttttctggtaattttagtgatcttatttgattagactttttcagaagtactaaataaggaattttaacaggtttttattaatgcacagataaatagaagtacagtgaggtctatagccattttattaaaatagcttaaaagtttgtaaaaaaatgaatctttgtaattacttaatatgttagttaagaacccgtcaagcttatatttgctagacttacaaattattttaaatgcatttatcttttttgacactattcagtgggaatgtgtaaggctaggctaattcttgttttctggatttaaaggcacttttaaatcttatcctgccccctaaaaacaaaaggttttgatcacaaggggaaatttaagattgttaaccctgtttttcagaagggctactgttaattgcacataaacatgaaatgtgttttcccctgtgtactaacacattctaggcaaaattcaaacttatagtggtaaagaaacaggttgttcacttgctgaggtgcaaaaattcttaagacttctgtttgaaattgctcaatgactaggaaaagatgtagtagtttactaaaattgtttttctaccatatcaaattaaacaattcatgcctttatagggtcaggcctacaatgaataggtatggtggtttcacagaattttaaaatagagttaaagggaagtgatgtacatttcgggggcattagggtagggagatgaatcaaaaaatacccctagtaatgctttatattttaatactgcaaaagctttacaaatggaaaccatgcaattacctgccttagttcttttgtcataaaaacaatcacttggttggttgtattgtagctattacttatacagcaacatttcttcaattagcagtctagacattttataaacagaaatcttggaccaattgataatatttctgactgtattaatattttagtgctataaaatactatgtgaatctcttaaaaatctgacattttacagtctgtattagacatactgtttttataatgttttacttctgccttaagatttaggttttttaaatgtatttttgccctgaattaagtgttaatttgatggaaactctgcttttaaaatcatcatttactgggttctaatacaattaaaaattaaacttgaaaaaaaaaaaaac

SEQ ID NO: 14106 - DNA, 1431 bp, Homo sapiens
ggtcattatgattagctatccaaaaggaagagaaattttggagctggtgcaaaaaggaattccagtaacgatgaccataggggttggcacccggcatgtacaggagttcatcagcggtcagtctgtggtgtttgtggccattgccttcatcaccatgatgattatctcgttagcctggctaatattttactatatacagcgtttcctatatactggctctcagattggaagtcagagccatagaaaagaaactaagaaagttattggccagcttctacttcatactgtaaagcatggagaaaagggaattgatgttgatgctgaaaattgtgcagtgtgtattgaaaatttcaaagtaaaggatattattagaattctgccatgcaagcatatttttcatagaatatgcattgacccatggcttttggatcaccgaacatgtccaatgtgtaaacttgatgtcatcaaagccctaggatattggggagagcctggggatgtacaggagatgcctgctccagaatctcctcctgggaagggatccagctgcaaatttgagtctagctttaccagatgatgacggaagtgatgagagcagtccaccatcagcctcccctgctgaatctgagccacagtgtgatcccagctttaaaggagatgcaggagaaaatacggcattgctagaagccggcaggagtgactctcggcatggaggacccatctcctagcacacgtgcccactgaagtggcaccaacagaagtttggcttgaactaaaggacattttattttttttactttagcacataatttgtatatttgaaaataatgtatattattttacctattagattctgatttgatatacaaaggactaagatattttcttcttgaagagacttttcgattagtcctcatatatttatctactaaaatagagtgtttaccatgaacagtgtgttgcttcagactattacaaagacaactggggcaggtactctaatataaaggacaggtggtgtttctaaataattggctgctatggttctgtaaaaaccagttaattctatttttcaaggtttttggcaaagcacatcaatgttagactagttgaagtggaattggataattccaattccgataattggtccccatgggctttccctggagggaaggttttttttgttgttttttttttaagaacttgaaacttgtaaactgagatgtctgtagcttttttgcccatctgtagtgtatgtgaagatttcaaaacctgagagcactttttctttgtttagaattatgagaaaggcactagatgactttaggatttgcatttttccctttattgcctcatttcttgtgacgccttgttggggagggaaatctgtttattttttcctacaaataaaaagctaagattctatatcgc

SEQ ID NO: 14107 - DNA, 290 bp, Homo sapiens
ggttgaaagcaagtgtggctaacactgacgaaaaagatgagctacttcagacttgtacctcactgcaacagcctcttttaaattttttggtgttacaaagcaaaacaaaatttcttgttcctcttgtgaattctcatttcagttcgactttagttggaatggttaggatactgttcaggcagtaaataacctttacgtaggaaaaactgctacaaggcttttgtatttttgtttgatcatgaccaattcaggataggtaatttgatgggagggaaaaagtggcccctcgg

SEQ ID NO: 14108 - DNA, 424 bp, Homo sapiens
gtcgacggtggaagtatgggtgggagggagggatatttaggaagtacaaagaccagaacttggaacttcactggaagtggagagtcaataagagggacaggtccaggtccaggtcatggctggtgattttttgtacaagtgtacagagaagcagaggcagatttgtggggaaggtaagttaagttgtgaaagtgcagagtctaaggtgcccatgacatgggcatccaaggggctgtttggaggagccatgggctgtttctgccttgcagggaggattgttaggactgctaactgggctaatgcttgtgaaacacagggcctagcacgtggtaaatacctcataaacaggaacccttattattattgggagttatcaacttatatttgctaaatgaaaccccagttgctgataagattacttggg

SEQ ID NO: 14109 - DNA, 310 bp, Homo sapiens
  misc_feature (1)...(310): n = a,t,c or g
gggtagggacatctgagagtaatgatgaatgccaaccgctctgatggtggcacatgccgagtcacccgagtaagctattgttaagggccgtgacccgaggcctccatcagccgtccgctctcatgaaaggctgtcggtggtagtccacgtgcttaagtgcctgcattccgcagtgtcaccaatatttccattagtgtttcttttttttttttnnnttttgnnncccaggnngaaangcnagggntnnanntgggtaangggnancctccgngtccnnatttaacnagtttngcctaaccntcccaagaaa

SEQ ID NO: 14110 - DNA, 1457 bp, Homo sapiens
ttctccgtctgtacacctgggtagagtgggtgaaagaaatggttgccaactgggacagcctaagaagtggtcctgccagcactttcaatgatagagtttttgccagtgaattgaatgcaggaattataaaaacagatcaaaactatgaaaagatgatgtttaaagaagctttgaaaacagggttttttgagtttcaggccgcaaaagataagtaccgtgaattggctgtggaagggatgcacagagaacttgtgttccggtttattgaagttcagacacttctcctcgctccattctgtccacatttgtgtgaggcacatctgggacactcctgggaaagcctgactcaattatgaatgcttcatggcctgtggagggtcctgttaatgaagttttaatacactcctcacagtatcttatggaagtaacacatgaccttagactacgactcaagaactatatgatgccagctaaagggaagaagactgacaaacaacccctgcagaagccctcacattgcaccatctatgtgggcaaagaactatccaccttgggcaacataccaccctgtctgttctacgtaaacactttgaggccaataacggaaaactgcctgacaacaaagtcattgctagtgaactaggcagtatgccagaactgaagaaatacatgaagaaagtcatgccatttgttgccatgattaaggaaaatctggagaagatggggcctcgtattctggatttgcaattagaatttgatgaaaaggctgtgcttatggagaatatagtctatctgactaattcgcttgagctagaacacatagaagtcaagtttgcctccgaagcagaagataaaatcagggaagactgctgtcctgggaaaccacttaatgtttttagaatagaacctggtgtgtccgtttctctggtgaatccccagccatccaatggccacttctcaaccaaaattgaaatcaagcaaggagataactgtgattccataatcaggcgtttaatgaaaatgaatcgaggaattaaagacctttccaaagtgaaactgatgagatttgatgatccactgttggggcctcgacgagttcctgtcctgggaaaggagtacaccgagaagacccccatttctgagcatgctgttttcaatgtggacctcatgagcaagaaaattcatctgactgagaatgggataagggtggatattggcgatacaataatctatctggttcattaaactcatgcacattggagatttatcctggtttcttaggaatactactactctgattgtgtctactgattggctatcagaaccttaggctggacctaaatagattgatttcatttctaaccatccaattctgcatgtattcataattctatcaagtcatctttgattcctggacctaataaattttttttccctttcaaaaaaaaaaaaaaaaa

SEQ ID NO: 14111 - DNA, 1849 bp, Homo sapiens
ctgagtctaacaaccccttctcctccacggatgccaatggggactcgaatccattcgacgacgacgccacctcggggacggaagtgcgagtccgggccctgtatgactatgaggggcaggagcatgatgagctgagcttcaaggctggggatgagctgaccaagatggaggacgaggatgagcagggctggtgcaagggacgcttggacaacgggcaagttggcctatacccggcaaattatgtggaggcgatccagtgatgagtcggggacaggccagcggggggacggaggcggcgggcccaggagcctcagccagccacgtgggcatccactccttttcctgcaagagatgatggttccattgctcttggcttcatggtgttcctggaaggcagatgagctggtcatttcgcctgggactcggcacctttccgagtgcagctggagggatctgagcgcaggaagacgcagaacaacagaaatagccgcccctccccgcccactgtgcctgttggcctatcatagatctctatgttcttgactttgtctctcctttccgagtcaatggtgggttacactgatcttgttccactgattactctctctgacgagtccatcacctgcaacttaaatgaacaagcttacatcccattttgagtgaagattttgaggtttttaatttaaaggctgtgtacagttatacttttttatacacctgttcatttctacttaaattatggcacagattgatgcgcaccagtcttgaggaaacgatctccctattcccttaccctgttactcagccacgccgtgtgtaggcttagcctcaggtgggcagatgtttgagaaaacggaattatgccaggaaggtgggaccgggttatggtcgggtttctattgggaatgctctttgtgcttttgggcatctgaatggaagctttacatagaaccttaggtagaactcccccaaatcgccatatttaaaaattattttcactctattcttgcttaaaactgtactcttttgcaaattaacaattttatcactgattcagagttaaaaagaagactaacttttcaaggcaaatgcatctgtaaagatgctttagattagactgtcatgtctcagtgtctatctgtatatattatttgatattcagagaatctaaagcactcgtctactgttttaatgagatttaacagcttttaacagtgagtttcgtttgtaaactgcttgaagtctgtggcattcaggcacacatctggctggccggctgggtctcctcccgggctcagtgggcctggggcctctctgacgtggtgcctgctggagggaggctcgtcgtcaccagctgactgctggtccggcttctgaccggcctttgtcctggctccgtagcagaacactgtaaaagtgcccgcgtctttgcaagtagttgcagatttcaagtcgtcgtgttacttgtgcacaaacagaagctgggtcttacccgcagcacgagtgtctcgggctgcccggagtcgcccgggagcaggtgctgcagccagagttacgcgggggccacgcgggcccggcgggggtggggggaacgtgggggaacctgtgtttcacgtgactcagcagtgcccgccgccgtcaccagctatgccattcactccgtttccagtgagcagatgtcttgcttggaaagtggacctgtgtctgtgtctgtcctgagaacttaccagcagaaatcctcatttctgtgctacggatttaccaaaaattgtcaagtctttttcagtttaacagttcctttaaatgtgtagtatttgaggaaaaaaatcaataaacagttgatctcgtg

SEQ ID NO: 14112 - DNA, 567 bp, Homo sapiens
  misc_feature (1)...(567): n = a,t,c or g
gcttttgaaaagcagtgaaaaaaagctacaagaaacaccaactgaagcaaatcacgtacaaagactgagacaaatgctggcttgccctccacatggtttactggacagggtcataacaaacgttaccatcattgttcttctgtgggctgtagtttggtcaattactggcagtgaatgtcttcctggaggaaacctatttggaattataatcctattctattgtgccatcattggtggtaaacttttggggcttattaagttacctacattgcctccactgccttctcttcttggcatgctgcttgcagggtttctcatcagaaatatcccagtcatcaacgataatgtgcagatcaagcacaagtggtcttcctctttgagaagcatagccctgtctatcattctggttcgtgctggccttggtctggattcaaaggccctgaagaagttaaagggcgtttgtgtaagactgtccatggggtccctgtattgtggaggcgtgcacatctgctcttcttncccattacctgctgggtttaccatgggcaatggggatttatactgggg

SEQ ID NO: 14113 - DNA, 377 bp, Homo sapiens
cctctgggtcccctcctaggtgctgtcctgaatggcccgttgtcatcccataatgctcctgtacccagtttatttaaggggacatgcactggaataggaaatgtcccccatctcccttcctgcaccctgctgtgctccctccaaacccaccttgctctgtgttctcaggcccccctgcttttgtctcaccaggacccatacctttcaccttgttcccttccacccctccagttagtccctatctgggtaagggtcttcccttgagctccagggggtggaacccaatgtttacattctcttctgtctctgcccccaccccatgcagcgctttgaggaattggaaaagaacctgctgttgtacctggaaaaaaaaaaaa

SEQ ID NO: 14114 - DNA, 460 bp, Homo sapiens
  misc_feature (1)...(460): n = a,t,c or g
ttggnnnccatttgantcccaannnnnnnnnnnnnnnnnnnnnnnnnnnnnnnnnnnnnnnnnnnnnnnnnnnnnnnnnnnnnnnnnnnnggcacgagggaagctcggttgatgtttctgcagaagttttcccccttggtcggtggcggagctgctgagcgcgatagtagcagctccggcggcagcaacattgactacgaggaatggcggcggctgccgcaggacctgcagcatcccagaggtttttccagagcttctcagatgctctaatcgaccaggacccccaggcggcgttagaggtgggagagccttttctgcttcctccactcccggctgacccgcctccttccagcaccgcctgattaggactcaggctctagtgatgctgcgtctcagnnnnnnnnntgagattctcggctcctttctctctcttacggtnccccggntacttanaattctg

SEQ ID NO: 14115 - DNA, 1248 bp, Homo sapiens
catttggttttggttttgtcctattcctccaaatgcagcagggcctttagttgtctgttaaagctgcactataatttggtatctacattttatcacacaaaggaacctccccttttgacaacaactgggctaggcagctgttaatcacaacatttgtgcatcacttgtgccaagtgagaaaatgttctaaaatcacaagagagaacagtgccagaatgaaactgaccctaagtcccaggtgcccctgggcaggcagaaggagacactcccagcatggaggagggtttatcttttcatcctaggtcaggtctacaatgggggaaggttttattatagaactcccaacagcccacctcactcctgccacccacccgatggccctgcctcccccatcccatccccaacatccctgtaccaccttctctcacatcttctaaagctttgtacaaatcacaatggtgcacttccaacaaaatatatcaataggtgttttcctctcttattttgtaaatagtattattttagctattaagctggataccttctttcaaattcagccattcagttgtaaagttgggaagaagtttcttgacaagactctgcaattaaatgcttaaaatttggaggggatccttccttgattacatcaagtatgttggtacatgggtttatacaagttcctcttgagaaggcaaaaagaccaccatgtgtgagagctctttgacttggccaataggggcctatcttaatgcacttgtttggacacatttctgatcttatttgtaaaggctgcaaaaggagaggatgaaatgctgtaaaagtaggaaatgaagtggaagctggaagaaaatgtaattggtggtacagctatgggccagatggtggaggggagggtggggacccctgccggcaagcagagtgtcacagctggctttcctcacttgggaaaagggtactgccggtctagcagcctcctctgtactcagccaggacacccagcgcgtgggacctgtttgtgtctgttttgcttccttgggaacggcacagtcactcaccctgccatttgcggaaatgacctggtgcactttgactgttaagcaatgcgttattgctgtagtcaaggttagtgcaagcaaggaaacattcccagtaaggtatttgtttccattttctgtctgtgcttctgtcagaaacttgctaggacatttagtggccaataaaaaagaaattcctaatttcaaccttaca

SEQ ID NO: 14116 - DNA, 1550 bp, Homo sapiens
  misc_feature (1)...(1550): n = a,t,c or g
gaagaagatgatgattacgggtctcgaacaggaagcatctccagcagtgtgtctgtgcctgcaaagcctgaaaggagaccttctcttccaccttctaaacaagctaacaagaatctgattttgaaggctatatctgaagctcaagaatccgtaacaaaaacaactaactactctacagttccacagaaacagacacttccagttgctcccagaactcgaacttctcaagaagaattgctagcagaagtggtccagggacaaagtaggacccccagaataagtccccccattaaagaagaggaaacaaaaggagattctgtagaaaaaaatcaaggaactcaacagaggcaattattatcccgactgcaaatcgacccagtaatggcagaaactctgcagatgagtcaagctgagatgagtgaactgagtgtggcacagaaaccagaaaaacttttggagcgctgcaagtactggcctgcttgtaaaaatggggatgagtgtgcctaccatcaccccatctcaccctgcaaagccttccccaattgtaaatttgctgaaaaatgtttgtttgttcacccaaattgtaaatatgatgcaaagtgtactaaaccagattgtcccttcactcatgtgagtagaagaattccagtactgtctccaaaaccagcagttgcaccaccagcaccaccttccagtagtcagctctgccgttacttccctgcttgtaagaagatggaatgtcccttctatcatccaaaacattgtaggtttaacactcaatgtacaagaccggactgcacattctaccatcccaccattaatgtcccaccacgacatgccttgaaatggattcgacctcaaaccagcgaatagcacccagtcctgcctggcagaagatcatgcagtttggaagttttcatgtactgatgaaagatactctacagaacttgtcaaatctttgaaacttggaatatattgctttcataatatgaagttttattgcctatctatctgaagtgtctaatttttcaagtttgtaagtttattatgtggttttaacattgggtgtttttgttttgtttttactatgaaaagacagcttaaggaagagctaaattctgttaaaatatttggggcatgtttgtgcactgctgttgtgaggatcagcatatgaaattgacatcatggttagtcatggtactgcagcttagggggctacacggttgctgtgtgagtggagagatgcagtgaggcagttgtcattattctaaaaattgtactactttcacttttcccaaagattatataatgttcataatccaccatgaaaacagcattggccaaaggtactgaggctgcttaaaatattcaattctgctttttaatttttaagtgaatttagtttgaaaagcatgattatacaggcctctcaggctggagtgctactttggtaaagttcccagttttcctgccttctgtgacaggatgaatgaggtgggtatggacagtggaggcagctggaatgggcaagtgcagnaaattaggaacag

SEQ ID NO: 14117 - DNA, 1357 bp, Homo sapiens
gcccgggagaaggagggccaagatggcggaagcggaggagtctccaggagacccggggacagcatcgcccaggcccctgtttgcaggcctttcagatatatccatctcacaagacatccccgtagaaggagaaatcaccattcctatgagatctcgcatccgggagtttgacagctccacattaaatgaatctgttcgcaataccatcatgcgtgatctaaaagctgttgggaaaaaattcatgcatgttttgtacccaaggaaaagtaatactcttttgagagattgggatttgtggggccctttgatcctttgtgttgacactcgcattaatgctgcaaagagactctgcagatagtgaaaaagatggagggccccaatttgcagaggtgtttgtcattgtctggtttggtgcagttaccatcaccctcaactcaaaacttcttggagggaacatatctttttttcagagcctctgtgtgctgggttactgtatacttcccttgacagtagcaatgctgatttgccggctggtacttttggctgatccaggacctgtaaacttcatggttcggctttttgtggtgattgtgatgtttgcctggtctatagttgcctccacagctttccttgctgatagccagcctccaaaccgcagagccctagctgtttatcctgttttcctgttttactttgtcatcagttgggatgattctcacctttactcctcagtaaatcaggaatgggaaattaaaaaccagtgaattgaaagcacatctgaaagatgcaattcaccatggagctttgtctctggcccttatttgtctaattttggaggtatttgataactgagtaggtgaggagattaaaagggagccatatagcactgtcaccccttatttgaggaactgatgtttgaaaggctgttcttttctctcttaatgtcatttctttaaaaatacatgtgcatactacacacagtatataatgcctccttaaggcatgatggagtcaccgtggtccatttgggtgacaaccagtgacttgggaagcacatagatacatcttacaagttgaatagagttgataactattttcagttttgagaataccagttcaggtgcagctcttaaacacattgccttatgactattagaatatgcctctcttttcataaataaaaatacatggtctatatccattttcttttatttctctctcttaagcttaaaaaggcaatgagagaggttaggagtgggttcatacacggagaatgagaaaacatgcattaaccaatattcagattttgatcaggggaaattctacacttgttgcaaaaaaaaaaaaaaaaagcgtt

SEQ ID NO: 14118 - DNA, 330 bp, Homo sapiens
  misc_feature (1)...(330): n = a,t,c or g
ggggtgagaagtatgcctttattttgtaaagtggaagattgtgaaaggatcttggggaataaaaatcagcatgataactggacaatgggcatattctcaggcagatcagtttagtgagaagtactcatgggagtaaaggatctggaagcctttttcttaaaattacacatgtcgttggcgtatgtcccatggaagacttcatttgtcctggggggcacacatcccccagtttgaagaccatttatagaggtaattctcactgggggacgattttgctgccacagtacatttggcattgtctgnanacgnttttggntgncaaacncggga

SEQ ID NO: 14119 - DNA, 1551 bp, Homo sapiens
  misc_feature (1)...(1551): n = a,t,c or g
tggacctttgccaccaggtgggaaaaaagagtggattcaacagacagggtttactttgtgaatcataacacaaaaacaacccagtgggaagatccaagaactcaaggcttacagaatgaagaacccctgccagaaggctgggaaattagatatactcgtgaaggtgtaaggtactttgttgatcataacacaagaacaacaacattcaaagatcctcgcaatgggaagtcatctgtaactaaaggtggtccacaaattgcttatgaacgcggctttaggtggaagcttgctcacttccgttatttgtgccagtctaatgcactacctagtcatgtaaagatcaatgtgtcccggcagacattgtttgaagattccttccaacagattatggcattaaaaccctatgacttgaggaggcgcttatatgtaatatttagaggagaagaaggacttgattatggtgggcntagcgagagaatggtttttcttgctttcacatgaagttttgaacccaatgtattgcttatttgagtatgcggggcaaggacaactattgtctgcaggtaaatccagcatcaaccattaatccagaccatcttttcatacttctgtttccattgggtcgttttattgccatggcactatttcatggaaagtttatcgatactggtttctctttaccactctacaagcgtatcttgaacaaaccagttggactcaaggatttagaatctattgatccagaattttacaattctctcatctgggttaaggaaaacaatattgaggaatgtgatttggaaatgtacttctccgttgacaaagaaattctaggtgaaattaagagtcatgatctgaaacctaatggtggcaatattcttgtaacagaagaaaataaagaggaatacatcagaatggtagctgagtggaggttgtctcgaggtgttgaagaacagacacaggctttctttgaaggctttaatgaaattcttccccagcaatatttgcaatactttgatgcaaaggaattagaggtccttttatgtggaatgcaagagattgatttgaatgactggcaaagacatgccatctaccgtcattatgcaaggaccagcaaacaaatcatgtggttttggcagtttgttaaagaaattgataatgagaagagaatgagacttctgcagtttgttactggaacctgccgattgccagtaggaggatttgctgatctcatggggagcaatggaccacagaaattctgcattgaaaaagttgggaaagaaaattggctacccagaagtcatacctgttttaatcgcctggacctgccaccatacaagagctatgagcaactgaaggaaaagctgttgtttgccatagaagaaacagaaggatttggacaagagtaacttctgagaacttgcaccatgaatgggcaagaacttatttgcaatgtttgtccttctctgcctgttgcacatcttgtaaaattggacaatggctctttagagagttatctgagtgtaagtaaattaatgttctcatttaaaa

SEQ ID NO: 14120 - DNA, 590 bp, Homo sapiens
cgcgcttccgagactcgcagtctacgcgagctgcctgtttttttcctgcttggacgcgcatgagggccccgtccatggaccgcgcggccgtggcgagggtgggcgcggtagcgagcgccagcgtgtgcgccctggtggcgggggtggtgctggctcagtacatattcaccttgaagaggaagacggggcggaagaccaagatcatcgagatgaagattggataaccaagaaatgactaatcaagagtctgccgtacatgtgaaaatgatgccagaattccagaaaagttcagttcgaatcaagaaccctacaagagtagaagaaattatctgtggtcttatcaaaggaggagctgccaaacttcagataataacggactttgatatgacactcagtagattttcatataaagggaaaagatgcccaacatgtcataatatcattgacaactgtaagctggttacagatgaatgtagaaaaaagttattgcaactaaaggaaaaatactacgctattgaagttgatcctgttcttactgtagaagagaagtacccttatatggtggaatggtatactaaatcacatggttt

SEQ ID NO: 14121 - DNA, 739 bp, Homo sapiens
gcgactcccatgcatcggctaatagcccggagacaagctgaagcaaataagcaacatgtaagatgtcagaaatgcttggaatttggacattggacttatgaatgcacaggaaaaagaaaatacctacataggccctcaaggacagcagaactaaagaaagctttaaaagaaaaagaaaacagattattattgcaacaaagcattggagaaaccaatgtagaaagaaaggccaagaaaaaaaggtctaagagtgtaaccagttccagtagcagtagcagtgacagttctgccagtgattcttcatcagagagtgaagaaacatctacctcttcctcctcagaggacagtgacactgatgaaagctcctctagttcctcatcctcagcctcctccacaacctcttcctcctcctctgattcagactcagattccagctcttccagtagcagtagcaccagcacagatagcagctctgacgatgaaccaccaaagaagaagaaaaagaaatagagttgctccattcatattggaccgatggactgaaaacattgatgtgattcttgaaagggaatttagaatatgttaaggccaagtaggttaactggtgaacatttctagaattcaaaagtttctaaatgttttacattgtaagagcatagagaatattaataatggcttatagagagagacttttatttgaagggtgaatctggttttttttatctttaaaatatatctc

SEQ ID NO: 14122 - DNA, 508 bp, Homo sapiens
gaacagcttacatataaccttggtacatttatcaaaactaaaggtgcaatcatactaatagctagagtttatttggattttaccatttttcccaatgtcccttttcctggctgcagcagcccaatccaggatgccatactgcacttagagctgttgctttcttttttcctaactttatattttgaaataatttcagatgataggaagttgtaaaggtaagggccccacgcacccttcatctagtttccctccatggttacatcttatatggttgtaatgcagtattccaacaaagactctgacactggtgcgatgtgggtggacagtccaaatcatttgtcacatgtacatctgtgtaactaccactgcaatcaggataaagaagtcccatccccacaaggatctccctccccaccttccctaactcctggtaaccactaatcgttcatctcttcttattttgtcatttcaagaatgttgtataaatgggagcatagtgtgtaagcaa

SEQ ID NO: 14123 - DNA, 344 bp, Homo sapiens
  misc_feature (1)...(344): n = a,t,c or g
ggagagcagcaccatgaataccctgaacaaatactgtctagaaaatatctgatttnnnnnnnnnnnnnnnnnnnnnnnnnnnnnnnnnnnnnnnnnnnnnnnnnnnnnnnnnnnnnnnnnnnnnnnnnnnnnnnnnnnnnnnnnnnnnnntatctgggttaaatcagggattaaaatctggnccttnaacttaagggtnnnccttnnancntaancccanancaaccttnaaannaacccnntctatcaacaccactgattattcaaanccaatagctgaatntnacataccntntttttccagtcagagaaagaagccttaggaatttcaancntaaccatct

SEQ ID NO: 14124 - DNA, 1654 bp, Homo sapiens
  misc_feature (1)...(1654): n = a,t,c or g
gtcatgcccgtggatgtggccatgaggctttgcttggcacattcaccacctgtgaagagtttcctgggcccgtacgatgaatttcaacgacgacattttgtgaataaattaaagcccctgaaatcatgtctcaatataaaacacaaagccaaatcacagaatgactggaagtgctcacacaaccaagccaagaagcgcgttgtgtttgctgactccaagggcctctctctcactgcgatccatgtcttctccgacctcccagaagaaccagcgtgggatctgcagtttgatctcttggaccttaatgatatctcctctgccttaaaacaccacgaggagaaaaacttgattttagatttccctcagccttcaaccgattacttaagtttccggagccactttcagaagaactttgtctgtctggagaactgctcgttgcaagagcgaacagtgacagggactgttaaagtcaaaaatgtgagttttgagaagaaagttcagatccgttatcactttcgattcttggaaaaactacactgacgtagactgtgtctatatgaaaaatgtgtatggtggcacagatagtgataccttctcatttgccattgacttaccccctgtcattccaactgagcagaaaattgagttctgcatttcttaccatgctaatgggcaagtcttttgggacaacaatgatggtcaagaattattggattgttcatgttcaatggaagcctgatggggtgcagacacagatggcaccccaggactgtgcattccaccagacgtctcctaagacagagttagagtcaacaatctttggcagtccgaggctggctagtgggctcttcccagagtggcagagctggggggagaatggagaacttggcctcttatcgatgaattaagcaacaatgtaactggtcttgacttgtcatattcccccatgcaatcctaggtctgtattgctcaattttaggaagcctttgctactccatcagtaggtttagatttgagcttttgagacctggctatggaaaagaaagacacttgagaatttagtgttggggtctgtacagatgatgctacccaatttggctttgaaggatcaagtaacaggttgaaaactatttttataaaggtaatactttttcagttcccttcttccttccctctcaatccactagctttcatgttgggcaaggaaaagttgaggaaggatggctgatggtgatggaaagctgtgttaatggtatgaggaatgtgtgaaaagtatacacaaagggctctgaagctcaagtcagaggagtgggaggtctgatcattgttggtggaaaaacgtaaggttattttgtgtttttaagttggttttacaattctttcctggggaaattatttctggaggggaaaaagatccattctacgtatccttgtggagaaaagctaaataacctttaagaatgtgggtggtattggagaaagaagatgaattatagctccggagaatcaagatcttaagtgaagcctttctgttcagatgtgatcctataaaaaatcataatttggggaaagtttaagccaatctggccttgtagtccccgatgttatnaggtgacctttgttgatccaacctgtccaagcctnggggtcccgg

SEQ ID NO: 14125 - DNA, 28 bp, Homo sapiens
ggagagagctagcaccatgagcttcaat

SEQ ID NO: 14126 - DNA, 708 bp, Homo sapiens
agatgacagtttaagacagtgaaaaagaggggccagttggttatatctgataacatgatcttacaaactctctccatttaaaccccaatatgtctgcatttctccagccctcgtttcccagaggctcactttgctcatggaggcctttgttgccaccagctccatcctactttatatttcctcatagcagcacgtgccctgtgctagatttgcttttggtctgtgctcactggaatgtgagctgcatgaaaaccttttgtgcgctgctgaagctctagtgcttgcaaatgtcgggtacatagtagccacttagtaagtattaagtggattgaggaccatgatcattcattgacagttattaggtttgccttcagctctcagtcccgtgggggtacatggacacataaataggtcatccaagtttagtgagaattggtgggaaggcaagaaatggaaataaggaaggatgggcacttggtcaatatttacatagactttacccaaatattgggctttttgtaaacatagaatctgttgcttcttaaagcctaagcccgttggaaattggggtaatgtgagcaatttctttctttccatcaaagaggtggtatggcatgcaagaaaaagcaagattcaaaactttaatagcatttgtcttgatgtcttgctttagaggactctaagacaattaaaaaatacaataagagt

SEQ ID NO: 14127 - DNA, 3436 bp, Homo sapiens
gaattccgcctcacagtggccaggtcctgtgccagattgtccctctcaacctccagccgggcgctgttggcgtgagttgatcgagccgcagccgcagctctcgcagctcagcctggtagacgtctgccagcttggtgggctccttggcccgcagctggttcagcctcagcagccagcgccttgttttgctgttccaggaagcgaaccttctcgatgtagctggcaaagcggtattgagctccatcatctctgcccgctcactggcccgggtctccttgaagccagcattgagtgccccagccagggagaaatccacccgggtcggagtggagggggcattcgagccagggagaggcgggtgcaggacccagacggcggccaggagccaggccccccaccatcatctcccctgaggagacgtaggagcggcgagcagcggaggtgatgcgtctcctctccagcctgtccggctcgtcggtgtcctccgatgctgaagaataccagcctcctatatggaaatcatacttatatcagttacagcaagaggcacctcgtcccaagagaatcatttgtcctcgggaggtggaaaacagaccaaaatattatggaagagagtttcatgggatcatctctcgggagcaggcggatgagcttcttggaggcgtggagggtgcctacatccttagagaaagccagcggcaaccaggatgctacacgctggctctcaggtttggaaaccagaccttaaactacaggctcttccacgacgggaaacactttgtgggtgagaagaggtttgagtcgattcatgatctggtgacagatggcttgataacactgtacatagaaacaaaagctgccgagtacatttcaaaaatgacaactaaccccatctatgaacacattggatatgccaccctactcagagaaaaagtatccagaaggctgagcaggtctaaaaatgaaccaagaaaaacaaacgtcacacatgaagaacacacagcggtggaaaagatctcctccctggttcgaagggctgccctcacacacaacgacaaccacttcaattatgagaagacacacaactttaaggtccacacgttccgaggcccacactggtgtgaatattgtgccaatttcatgtgggggctcatcgcccaaggggtccggtgctcagactgtggattgaacgtacacaaacagtgttccaagcacgttcccaatgactgccaacctgatctcaagaggatcaagaaagtgtactgttgtgacctcacaacacttgtgaaggctcacaacactcagagacccatggtggtagacatatgcattcgggaaattgaagcaagaggattaaaatcggaaggcctttacagagtctctgggttcactgaacacattgaagatgtcaaaatggcatttgacagagatggtgaaaaggccgatatatctgccaatgtctatccagacataaacatcatcactggagcccttaaactgtatttcagagacttacccatccctgtcatcacatatgatacctattccaaatttatagatgcagcaaaaatctccaatgcagatgagaggctggaagccgtccatgaagtgctgatgctgctgcctcctgcccactatgaaaccctccggtacctaatgatccacctcaaaaaggttactatgaatgaaaaagacaatttcatgaatgcagaaaatctggggatcgtgtttgggcccactctgatgaggccccctgaggacagcaccctgaccaccctgcatgatatgcggtaccaaaagctgattgtgcagattttaatagaaaacgaagacgttttattctaatccatcagggaaatgagctgaatggcccagcaccatcaagttgacacagctaaggataaaacatttcttaccacttgatttgttttccaagcaagtgctagaatttgctggactgcagaggatcgctgagtggggtactgtgtctcatagacatgcgccacctccacgtgagaacaagggtgaaggtgagggaagcccctcaggttgggtcttttgctgtgcctcctatgtatgtctggtttgctggaagagtgattaatacatctttaatttattaaaaaacaatgtagacctttaaacttcagtcttattgggaataaaagggaacttaattcatacaggtacttgatacagttatacattttccacttacaaaaagaagacaattctgttaaatgaaacgtgtatcgtaaaatgtaattttatttacccacgagaatgttgttattttagcaatagaactccaatggcagatgcattggcttattaccctgtgtaccttgtccctcattttgctgtgacaccctgaaaaagctgaccacaaatgcagtattatcattgacatacctctgtcctcctcagtgctttttaatgtaatttcacctgccccttgtgttcctgctttggacagtttttgctcttaaggcattggcattcttctattgtatggtatgtatttatagcaattgtaggatggtctgaaatgtccacacactttctatgcatacaaattttgtgaattcccaaagtatgctttgggaattggtcatagtcttttcgtatcatgagtgtgtatcccagaagatacagaatgcggtcattttacctgaaattatttgagaacactggatgtatctggtctgtgtaaaaagttagcacttaccctcttttcttcctggccaagccctctgaattcatctggttaatatcaaattggtatttttgccacatttctgtattggtgaaaagcgaatctgcagaataactgccaacgtttttcattcttgttttacaaacatattttttaaagtgagaataaggttggtttttaccaaatatttgttcctccttgacaaaagtagctctgtgtggataatatgattttattactacagttccagtcacttggttatatttatcttagcatgagcctttcacaccaagatttctatattttgtaacataggtgaaatatttaaaacatcaaaaactgtaaatctagatttttaaaaaatccaactgcaatgtcttttcctttgattgagatgatttgtgtaaactcaccagtcttgctttggagtgagcagaagagaatgactattttacgtggagcatcattgtgtgactgttgacctggacagtcccaagggctatgcagatggactccattggcacagggaggtttgacctcttccctgctattatccctcctcccaactgtacagatttgtttgttgtagtttatgtacttcttgatactgtcaaaaaattatctggaaatggttttattttgtgaagtgaacaatactttgtaatttatgatagtgtaaatggaaggcaaagcatcacatgtattaaattcttctgtcta

SEQ ID NO: 14128 - DNA, 2249 bp, Homo sapiens
tttgattgtattcaaatttttattttttgaacaaaaatttaagacaatgattttaaataataaaacatggtatatattctagacactggttttttttaaagatttattaaatttagactcctatagttctgttgtgatgctttcttcaacatttatattatttcttaccattttatcatcactccaagcttgctaaacaaagaatctctctgttaagtgaagttttacattaaggaaatactccactagcacactgaacaaacctacagaactgtcctagtttatatttacaaaacacaagaagtctgtccagccattttggttttgttgttacactgtccatactgagatcagcagagagctaagtaatacacaagattacgcttcggcagtgcaaaggatggcatcaaccaaacttcattaaacagaccaacaagtacaaacatggtgagcaaagttcaactcaggtaatagtgattaaaaacaaaacatgtagtggggtcacaaccagactgggttttcactgtgcaactttcctcagggaataatacccattcacagaaagaaaggaatatgcatccaagcctttgttcataaagaaaatgcccttcaaacaaattcatcataaggctaaaaaaaaaaaaaaaagaaagaaaaaaggatgaagcagtttggcccagagaaaagcttaaatataatgtgtatacatacttatagatatgttgccatttaaaccatggatatagacatttgacaattaaatgaattggctcagtaaagtgaaaaagtgttttctataaatatgtagttattgctgatatgctacacattatgctttgacatggagactgtagtaactcagaatttaaagctgccatattgccagtgttagccctgcagtaggcattcctgtggacaacatgccatccaatcctgaagaaaaagcaaaacaccactacttaacaaagaaaaggcttatgcactgtcccttacatttttgtttttttttttaaaaaaacaaaacaaaacagaatccaagtcccagttcacccacaagttaagcacaaccctggcgagcaagtttagcggcatgatggggagaaaacagtgaggtacagcatgcatttacaaccagcgctgatctagtctattttgtcatataaacttgaatacaaaaatccaatttaaataagactagacttactataatagtaaacaaacaaaaacaaaaaacaaaaaaaaaaacacacacagtagacttagtttgatactgattaattttaagagtaaactcatcctgtcccctcttaatactctactgcaatttattgatggctagaatatttactgacttaaaaaaggtattaaatacttgtatcatgaaattacattcttattaacaataagacatactgtgtaagaaaatagctcatgtgtgaaatgtgtctgaaatgcattttttccttacaactatcaaaacatccactcacactaaaatgaaaccactcccaaccccccctgaaaaaatgttaagggaagacggggtgggctgggggaggagcaaggaaggaaaagatttagctatactaattacagcacagtgattaacaatggttcaagacagagccaacaagagttggtcaaaacgatgccttcaatacatggctacaattaaaaaccaaactcagccgcttttggttcattgcagtgagaccaaacacagtatctctcacagattcatataaatactagactccagctcttatatcatttttttttaagtttttctgtttgtttctgcaaggcctagctatcttattacaatttatatttgctctgcaacaactacaagaggtaggcataaagcatgaaaaagtttctcagttagtacctcgccatgtgttgttcactgcacaaaaccattcactttggacatgaatagtcattccttctattatcttctaaactctaaagcaaagctgctgccacccgtaaatgttctaaaagagtgtactcacaagtaagaaactttctctactgaaggatactgtcacagagtttgttgcagagcatctatatatatatttatttatttattttaaaaaaataaacaacaatgatgaacgaacccaggttcctagaaccaattctcttgattctctacttccacaaaataaagtgtatcatttggccaagactacagatgtgtttttttttttttttcacagatgcaagtgccatgcaaaaat

SEQ ID NO: 14129 - DNA, 450 bp, Homo sapiens
gggcttgcaacaaacacataactagtctcccatgtcatgtttcctgcccaagttgcatgggcaagaaagctaaagagtacgcttctagtttgcaaagataaaactgaacttcatctgtagtcttttgtagtgtttgtgggccaaaaagacagatactccagatcctaaattaaaagcctaggatggtcaccgtcaaggaaccatccttgaggatgagccttactaaggcttgggactgagccttactaggaagtgcagcccaaccctgacccagctcaattcctgggcaagtgaggaggacttgatccacatcagtcccaatttttccttacaggatggaagggctgtgctctctctggtgggaaaatcatctggatcctttatggcactgccatacacagtgtctagcataaaataaaaagtagctagacatgttttcaaaagcaggct

SEQ ID NO: 14130 - DNA, 535 bp, Homo sapiens
gagtgacctcgggcggcgggtcacgtcggccgggcatggctgcatggagcccggccgcggcagcgcctctcctccgcgggatccgcgggcttccacttcaccatcggatgtttgccactcagactgagggggagctcagagtgacccaaattctcaaagaaaagtttccacgagctacagctataaaagtcactgacatttcaggaggttgtggggcgatgtatgaaattaaaattgaatcagaagaatttaaggagaagagaactgtccagcagcaccagatggttaatcaggcactaaaagaagaaatcaaagagatgcatggattgcggatatttacctctgtccccaaacgctgaccacgccctggctgcatagatgctgctgcttaagaccttggatgaacttcactgacatcattcttccctaagcagtcaccaaaaaatttatatattttgctcatatacatttccatattataattatagaagatgtataatctatttagatgttaattaaaggaaacaaacaactg

SEQ ID NO: 14131 - DNA, 434 bp, Homo sapiens
  misc_feature (1)...(434): n = a,t,c or g
gaagtcttaaagcagtatgtcagtggccccatactctgtagccttctgccccttgcttttttgttcagtactgagattcatgtcgacacgtgtcgctctaggtcagtcgccaactgctgcctgatagtcctctgatgatttactttatatttgactaatattgtttccaaacaatgctgcactattcttgtctacttctttgtgtacacgttgccagtttctctaggggacttggttattccgtacctaggggcttgtcacctgcattagctgccacaagtaatttctggactttgcctagaagccatcctggggagatgggaaatagaattcactaggtacccagagagccctagtatatccaacttgattaaagcccacagtgccacagacaagcaaggttggcaaccatgcangcctaggttcaaatctta

SEQ ID NO: 14132 - DNA, 757 bp, Homo sapiens
gggagcgggcgggccagcgccgcggagtttcgggtccgaggagcctcgcgcggcgctggagagagacaagatgtccgccagagctgcggccgccaagagcacagcaatggaggaaacagctatatgggaacaacatacagtgacgcttcacagggctcctggatttggatttggaattgcaatatctggtggacgagataatcctcattttcagagtggggaaacgtcaatagtgatttcagatgtgctgaaaggaggaccagctgaaggacagctacaggaaaatgaccgagttgcaatggttaacggagtttcaatggataatgttgaacatgcttttgctgttcagcaactaaggaaaagtggggaaaaatgcaaaaattacaattagaaggaagaagaaagttcaaataccagtaagtcgtcctgatcctgaaccagtatctgataatgaagaagatagttatgatgagggaaatacatgatccaagaagtggccggagtggtgtggttaacagaaggagtgagaagatttggccgagggatagaagtgcaagtagagagaggagcttgtccccgcggtcagacaggcggtcaagtgcttccagccagcctgctaaacctactaaagtcacactggtgaaatcccggaaaaatgaagaatatggtcttcgattgcaagccatatatttgttaaggaaatttcacaagatagtttggcagcaagagatggcaatattcaagaagatgatggccc

SEQ ID NO: 14133 - DNA, 444 bp, Homo sapiens
  misc_feature (1)...(444): n = a,t,c or g
ctgcagctggcagggattgcggggtgccggccgtctgagtttttttaaaactgctcgccgcgaagtctgtctgcagccaaaatgtccaacagaaacaacaacaagcttcccagcaacctgccgcagttacagaatctaatcaagcgagacccgccggcctacatcgaggagtttctacagcagtataatcactacaaatccaatgtggagattttcaaattgcaaccaaataaacccagcaaagaactagcagagctggtgatgtttatggcacagaacatcctaaatgtatgcatctgaattataggagagaaagagagcaacttcagaagagcctttgctttgttacagattagtcactgctacccagagtacctaagtaattttcctcaagaggtgaaagatcttctctcctgcaatcataccgnattggatccagatctg

SEQ ID NO: 14134 - DNA, 2286 bp, Homo sapiens
tcaaaataaatgtttaatataatttttagaccaaagaaaaactcaatcatacattgtctccagtggaccatatgtgccagaacaggaccaactcagtccagctttgaaggccctgattcagtcctactggtataatctcccttgatttattgatttgtgtatgcttcttatgcaatacaaggtgcattttactcttgaagtccctatcacctccaccatcgccatttaactggcaaaagcatggcttcctaatgggagggttttcttcccccttccctgcagagggttctgaaccttcaaggagtttgacaatcttatgaatctcttgaaccttctccccagaaaaatgtacatacaagtctacaaataatttcatggggttcatgggaccccaagggcccacaatgggtttctaaggccccaaattaaggaactctgtgctagtgatttgagcacgcaattgccctcagaagacactgacacagggcaggtgaaggactgggttaaccaaaatgacaggaggcaatctcataatttctgtttttattttggaggcaaaatttagttctcagggcctccctacgtttaagagcagaactactcaagaacctaagcagctatcagcatagtttaagcgatttagaatagggctgtgcaaggggatgtacagggttcctcattcagctgaggacctcatttagctccttaactggaagctttacatttgatctgcagtgaggggacatttctaattttagtttgacccacatggaaaggtggatagctttttttttttgttttggtatagagagcacgtagaattggacaattaggtaaatccttggaatcccccaaacagccatttgctttataaatccagtatttcttacctctgaacgtcttaaagagctgcctcacaaattaatctaaccattgcttgcactaagaagtttgccaagagcctcttccagccttactggggggaaggaagagattactgaaaaccaacttgtaggaatgaaatgaggctgtcagttgtctaacctaacaaactgccaaattaggtttacattttttgttattagacttttgaatggccgaggcagagttaaatttaaaattttggattgtagccactttccactcgcctaaacactcaataccggtttgtttatttttccagcatcaagaaagaaaaccaaggcactagaaagcaagcacacttaagtattgaagataattacatcttaaattttgcctgaactgtatattgtagcatacttaaacccattcaaggaaaaaattggcaaattgaaaattctcccattaaagattgatatttttgcaaactgacaaatttaacgatttcggtacccctccccaaaaatgcagtcacataaaatatatcaatactattttgaattagctctagaaatcacactgaaactatgttacatttacaaatattaaatttattataactaaaatgaatttaattgttctcagatttggccaccttatagctccgtttaaggaggggatttgttaaaaacaaaaatgcattataacttggtcaaattactttcacattaaggaaaaaaacttctaaaaaggaaaacaagaaaagcaactcttcagtttcacataattaaaagaacaggagaaagcacgcaagctacatatagctaaatttacgaaaccaaccaaagccagggggatttctcttctgattatgtgtcataaaaaggtccactgtcttatatacacatgtatataatgttacattccatcactgtaaaaagtcccctttgccccctcccccaaaaaagtttcagtctagtctccaaacttggaaagcggcgctcgctcctgctgccggtgcagttcgttctcggtcagcagctggaggttctcggcgcgcagccggtccagctccagctccagctcccgcacacgcgcgtcgtcgccacccagccgcttgctctccagccgcagccggttgttctcgtcctccatgcgcgagaggcacttctccagttccaggtactccttgatgagctcctgcttgctcatgttctgcaggctctccgtgtggtaccgctcgtacgtctccgagaagtcccgctgcagaaactcgctgccgtcccctcccatcccatcgctgcccccatcctcctcacccccttcttccatgaagtcgtcatcgctggtgtcgtcggatttgggcggcggcccgcttggagtacaggccggttttgaggtccggctcctcctggtcgtgatcat

SEQ ID NO: 14135 - DNA, 1073 bp, Homo sapiens
ggcgccgctcgtccacctctactccggggtctagtacagcgctggcgctacggcaaggtctgcctgcgctccctgctctacaactcctttgggggcagtgacaccgctgttgatgctgcctttgagcctgtctactggctggtagacaacgtgatccgctggtttggagtggtgttcgtggtcctggtgatcgtgctgacaggctccattgtagctatcgcctacctgtgtgtcctgcctctcatcctccgaacctactcagtgccacgactctgctggcatttcttctatagccactggaatctgatcctgattgtcttccactactaccaggccatcaccactccgcctgggtacccaccccagggcaggaatgatatcgccaccgtctccatctgtaagaagtgcatttaccccaagccagcccgaacacaccactgcagcatctgcaacaggtgtgtgctgaagatggatcaccactgcccctggtaaacaattgtgtgggccactataaccatcggtacttcttctctttctgctttttcatgactctgggctgtgtctactgcagctatggaagttgggaccttttccgggaggcttatgctgccattgagacttatcaccagaccccaccacccaccttctcctttcgagaaaggatgactcacaagagtcttgtctacctctggttcctgtgcagttctgtggcacttgccctgggtgccctaactgtatggcatgctgttctcatcagtcgaggtgagactagcatcgaaaggcacatcaacaagaaggagagacgtcggctacaggccaagggcagagtatttaggaatccttacaactacggctgcttggacaactggaaggtattcctgggtgtggatacaggaaggcactggcttactcgggtgctcttaccttctagtcacttgccccatgtgaatggaatgagctggggagccccctccctgggtgactgctcactcagcctctgtgatggcagtgtgagctggactgtgtcagccacgactcgagcactcattctgctccctatgttatttcaaggg

SEQ ID NO: 14136 - DNA, 803 bp, Homo sapiens
gttccctagcagaatggaatgacaatccctgctcccataggcttgtgagggtcaagtgaggaaccccgttgccacatgtatgaatacctgagtacacaccccctccacctcttccctccaggagaataagctggcaacctgggacaggatgagtgagaatggggagcctctttctgtggcttctgcattgtgctggagtgaagatagcctgggcaggatgcaggttcaaaggcccggcatcatcccttactgcgctgctcctcatagctgtcctcctgggccccatctacgtcccctggaagcagaagacctgactctccttccttcctcccctgccacgtgggaccctcatctctgctgcctccttcctttcctgagaggctcagcttgagagaatgagccagtgagaagcttctctagacttggctccaaacatctcccctcccaagacatctgcctgcccacaggctcctgttgctccttcacacagacctggatgccccagagcaaggtcttcattcatggtcctgagcaggggccatgggattgggctctgggcactgacttaacggcacctccctagaaggcgagaaacatgccaaatctaaacacaccaggactcccatccatcgccttgagactgaccgtaaaccacagacgctctccaggttctcaagagttatcctgccttccagattcctgcctatcccaactccccagccttgttgaggttctctattgcctcttgaatacaaatgcactcccaaagtggttttaagaaaataaaaagattatccttcaaa

SEQ ID NO: 14137 - DNA, 1415 bp, Homo sapiens
  misc_feature (1)...(1415): n = a,t,c or g
tgccaaaagagggctatagggcacccccagaacgcgagatctccctcgtctgtcatctttacagaggaggaagtggactcccaatccagccatagtccattcgccccgggcacggtgactccgggcggccagaaccaaatgtgtctcctggcttttgcacggcatcaagtaacccgcgccaggccgcacagctgccctggccttcagcaaggactccgcgagcgaggtgcaagctgctggggagtgccacagcaggagctgaggcagcggattccgagggcggggtggggctgaatcgggaaggaacgcggaacccggtggaaacgcactgcgcagacgcgccggcgcagaacttcggccgttgacgagtctttcttccagctgtcccctgcaagtcgtccaggcggcggtccctttttttctgcctttttgtttcctccggcgggtcggcgcgagggtgaatttccgtttccggcggtgtccaagcggacctaaggagtcgcagttgtgaacaggtttggtgccgcgggctggggtaggcggcggttgggtccgtggctctggggcactgggaagatcgcgagtcgtgcgcatgggaaggtcctcccccggtcctccgggtcatctttgctcccgaggagcggcatatttcgcatctgccnggagattagaattacttgttattggtaaatagccactatggagactaaggaccagaagaaacaaagaaagaaaaatagtggacccaaagctgcaaagaaaaagaagcggcatctgcaggatctccagctaggagacgaagaagatgcctggaagagaaatcccaaagctttggcatttcagtctgctgtgtggatggctcgatcctttcacaggactcaggatttgaggacaaaaaagcatcatattccagtggttgatcgaactccactagagcccccaccaatagtggtagtggtgatggggcctccaaagttggaaagagcactttgatacaatgcctcattcggaacttcacccggcagaagttgacgagatcagaggcctgtgatgatcgtgtcaggtaaaaagctccgactcaaccattattgattgtgggtgtgacattaacatgatgattgatctggctaaagtagcagatctggtaagtgagcaggggcagcctggggtgctgatggagacttacagcattgtggtaggttatttaccccgtgatgaagggaagagagttttgtgattattaaaaggatcatggtcattatcagggatatagtagatgtgattgaattgatgatgataataatattagtaataaatgntgtcatattaataatacnaatggaatgggcacaatgaaatgtgttccaaaatcttaaagccaatcacaggatggagaaaacctttantgaacacac

SEQ ID NO: 14138 - DNA, 672 bp, Homo sapiens
  misc_feature (1)...(672): n = a,t,c or g
gagatcttcttctgaggcattcagctctgcggcacatgatcagcttcctcctaggggccagtcggcaaaacaatcagatacgtcgatggagttcagcacaagcacgagaatttgggaatcttcacaatacagtggccgttacttgttttgcattcagatgtctcatcccaaaggaatgttgctcctggcatatttaagcaacgaccacccattagcattgctccctcaagccctctgttgcccctccatgaggaggtagaagccttgttgttcatgtctgaagggaaaccttacctgttagaggtaatgtttgctttgcgggagctgacaggctcgctcttggcactcattgagatggtagtgtactgctgtttctgtaatgagcatttttccttcacaatgctgcatttcattaagaaccaactaggaaacggctccacctcatgaggttaaagaatacgttccaacttacttcatggaaatattggttattgaagatcctatacaagcagagcgagtccaaatttgtgtttgagacagaaaatggattactagctttgatgcaccacagtaatcatgtggacagtagtcgctgctaccagtgtncaaatttcttgcactcttgctcaaaagtgcctgcagctaaggagtacttcaaggagaattccccac

SEQ ID NO: 14139 - DNA, 613 bp, Homo sapiens
aaattttatttttccttttattttgtcacataattaaagctactccagaattcccttgatttctgcttgcctggtatatcttttttccattttttaactgtcagccttttttgtgcctgttaatctaaagtatgtgtttcgtagataatatgtagctggatcatattttaaaaatatttattctgccaagctctgtcttttgattggagtattctttcatttatgtttgtaattactgatgaggggggcactaatgtctgctgttttgctatttgtttccccatgtcttatgtcttcattactgacttttttaattaaacaactattttcttgggtaccattttaagtccctctcccactcattttttaatgtttttttgtgtttacttttgtttttattgtttgccctgatattaaaattaacattttaccttgaaatagttggcttcagattaatatcaacttagtttcaatagcataggaaatttgcttcactatatttccattttctccccgtcctttgtgctattattactataccaattagatctctacacaatataggcatatcaacacattttgtaattatttccttatccagctctgtgccgaa

SEQ ID NO: 14140 - DNA, 888 bp, Homo sapiens
gctggagcagtagaagccaaggccttttttctgcaagtaatgatgtaggttatttgcagtctctgtaaccaccatccaggccagtacgcagtatttagctggggaccaagggatgggattccctactctaagaaaatacctttattttaattattattattttttgagactccatctcaaaaaaatataataatgaagtggaatcaaggtggcaagaaaatttagaatcgtttctgatagggactttcccttatcctaaatgtgttttgaaggcacacgttatttccattgtcattctgactttagaaaggcaggttggggcatgagtgggcattttcctaatgacttgctgctaggaggttataggcagggaacagtctgggagtctctaatccagagagactttcagattccctctcttcacatgaacctccattagttaggattttggggaaagtgagcatgaagaagggactcagagctgccaggtacccgagtctcaggtctgacatccttgggccccttctgccacaacttcttgccacttcacggacttgaattatgttgcttcttcctggaagtctggcctgcagcacaggcctttcctctccaaaaagctgctgctcatttctggccccatctgctgctatctttgccatcagccatcacagtttggcatcatcagagtctcagctagaggagctgtcattctgccttagtgtttgcctgcgacctgaccaggggcatgaccagctgggatgtcaagtgacatttgggaacttgtagaggccaaatgattgaaagtttaattcttctcaagacccactgatttgccagtgtgcatggaaataatagattagagcagaaactagcagggactgttgtata

SEQ ID NO: 14141 - DNA, 234 bp, Homo sapiens
taaataaaaataaagcaaaatctgttgggaaacgagaaaaaggagaggaatttttcaggaataatcataaaaagaaatgatcatcagactgaaagtccagagcctgagaaactgaaaacatatttttaagcattggtgttgaccatgcagacaaacttttgttaattcagagcgatacaaaaggcactttgaatctataaaacttgaaaaagttaaaaattgtatgtcggataa

SEQ ID NO: 14142 - DNA, 183 bp, Homo sapiens
taatttatttaaacagaacagcctaagttggttgcattgattttgttgatgattcacataaaaataagaatccattgcactagagaaaaagtgacttattgatcaatgaaaatgtctataatagaacactggaaaggttttctttttccttttttctttgttttctttgagatagggttttgc

SEQ ID NO: 14143 - DNA, 1789 bp, Homo sapiens
cgtccgcagcagtccgctgagctccaggcttctgggggtcgcggcacccagtgtgtctgttggtgttgggaatggcgggatccgggaaaaccacttttgtacagaggctcacaggacacctgcatgcccaaggcactccaccgtatgtgatcaacctggatccagcagtacatgaagttccctttcctgccaatattgatattcgtgatactgtaaagtataaagaagtaatgaaacaatatggacttggacccaatggcggcatagtgacctcactcaatctctttgctaccagatttgatcaggtgatgaaatttattgagaaggcccagaacatgtccaaatatgtgttgattgacacacctggacagattgaggtattcacctggtcagcttctgggacaattatcactgaagcccttgcatcctcatttccaacagttgtcatctatgtaatggacacatcgagaagtaccaacccagtgaccttcatgtccaacatgctctatgcctgcagcatcttatacaaaaccaagctgcctttcattgtggtcatgaataaaactgacatcattgaccacagctttgcagtggaatggatgcaggattttgaggctttccaagatgccttggaatcaaggggactacatacggtcagtaacctgactcgttcaatgagcctgggtgttagatgagttttacagctcactcagggttggtggggtgtctcttgctgttctgggtactggattagatgaactctttgtgcaagttaccagtgctgccgaagaatatgaaagggagtatcgtcctgaatatgaacgtctgaaaaaatcactggccaacgcagagagccaacagcagagagaacaactggaacgccttcgaaaagatatgggttctgtagccttggatgcagggactgccaaaggtgttttcactgtagacagcttatctcctgtgctgcacccttctgatttgatcctgactcgaggaaccttggatgaagaggatgaggaagcagacagcgatactgatgacattgaccacagagttacagaggaaagccatgaagagccagcattccagaattttatgcaagaatcgatggcacaatactggaagagaaacaataaataggagactttagcacacttcacttgtttctagaagtccagaattttggacctccacgtgaaagaactgttcttacctctgaactgggggctcccataagggagtaattttcctcagagtagcaaagtttctcttattagagaaatcttgtgactcagatgaagtcagggatagaagacccttgggacctggcaggttaatgctgattattccttggcctttcccttgtatttatgcaaggaaggatatactgagctgatactcttccaagcctacaacttcaagttttatcatttgaactcaagtacttttgctgctgaggaatggaatcaaaagaacgtagtctcctggtgaccacctcagatctctattattaggctagatgtatagcctctactcccccagcttcttgctcttgaccctgcactgtaagttgcccttctattagcagccaagggaaaagggggaaacatgagcttatccagaccggtggcagagtctccttggcaatcaaccaacgttgctatgaaatatgcctcacactgtatagctcattataggacgtcaggtttgttgaaaaaagtgggcaagacatgattaatgaatcagaatcctgtttcattggtgacttggataaagactttttaatttt

SEQ ID NO: 14144 - DNA, 436 bp, Homo sapiens
tccattcctgcgtcgttctgtccttccgaacgcacacttcaggagcagccgcgagggtggcatggcagcgagcacagacatggctgggctggaggagagcttccgcaagtttgccatccatggtgaccccaaggccagtgggcaagagatgaatggcaagaactgggccaagctgtgcaaggactgcaaggtggctgacggaaagtccgtgacagggaccgatgtggacatcgtcttctccaaagtcaaggggaagtctgctcgggtcatcaacttctgtccacctggggacagtctgtgcctgtagcctcatgaccccaacccaccccaggcatggctaacccctgactgcttgcctcatatttaagctgctgctctggccaagtgcctaattttaacccagacctcaataaagacaccttttgtaccaaaaaaa

SEQ ID NO: 14145 - DNA, 1926 bp, Homo sapiens
  misc_feature (1)...(1926): n = a,t,c or g
ttttttttttttttttagaggtgtcgtgtttactttttatttaggagtacaaactgagacaaaatcatccttccagttagtgaggttttgagggatcatactaaagagaagacatggaaaacaccagtaatggtgaaggtcttgatgaaaaggacatggacccgcagatagcgagagatcagaggaggccctaatttctttcctcatttcctttccaaatatcccaaatgtgcaatgcatcacctgagacagaaggcagaaagcatcaagctctctgtttatcccaattcaatgacaaccagaacttattttttttgagatgggggtctcgttctgtcgcccagggctgggagtgcagtgggggcattcatgggctcatcgcagcctcccaactctcagtctcaaggcaaccctcctacggtcagtggtcctgaggtaggctgggaactacagggcatggcaccacccacacttgggctcatttttaaaaaatttcttgtgagacaggatcttgtacattgcccaggcttgaagtgccgtgggtgcattcacagctnnnnnnnnnnnnnnnnnnnnnnnnnnnnnnnnnnnnnnnnnnnnnnnnnnnnnnnnnnnnnnnnnnnnnnnnnnnnnnnnnnnnnnnnnnnnnnnnnnnnnnnnnnnnnnnnnnnnnnnnnnnnnnnnnnnnnnnnnnnnnnnnnnnnnnnnnnnnnnnnnnnnnnnnnnnnnnnnnnnnnnnnnnnnnnnnnnnnnnnnnnnnnnnnnnnnngtggtgcccaaccccgacaaccagaactttcccgcagaccttgtgcttttggaccttgggtatcttctgcaggtcaagccatcctgaccactctgagaacttacccagggtgactcagctgtcactcccaggtcactcataagcccaacgggtagctccacccgtggacagctggatacacttgtgtctgttctctaaagtcatggatgacctgacaagagggaaaggaaagagggaacctccacttccctgggcaagttggaaaagggtgaggtgagggcaggattccttctcattggagatggcacacagaggcttggcctagtccttcagctggagacctcatacaggtacgcgccagcatcttggttccctctatgtagttatacctgttgagcttttcattctgggagtgggctccgtcatccgctgaccccacaggcagcagcatgacgttcttgcccgtggcctcctgaaaggtcaaggtcacgggaatactgccgccttccctggtcaagtctggctcaacaccaaaaactgtcttcatggctcttctcccagccaggtaatgagggtgactgaagtcggagacccagggcttcccaccgtggcccatgtacaccttgaactcattggggctgcgtagttcagcaaacttcttagttaggtagcttgtgacctgctcgccgacgacttcaggagtcatgttcggcacgagcctgatggagaacttgccaaccaccttcctgggaatcacggtcttggccccagacccagagaaggcgccttcgatgccatggagggacagagacgggtaccgccatcggtgcatgaggatgtctttcttgtggctgtgcaggaggatctgcgcccccacatccttggcaaactcctctatgtcaaagtcgatgtcgtcgtacagcttgtgctcctcttccgtgacggcggccacggcctcgttaatgccggggatcaggatgttccccctcttgtccaccaaagagcccatcagcaaaatgagatcagtcatggcctcatgcaccgagcccccgtacaccccagaatggaggtctttgttgctgcactccacctcgatgaaaaagtagcaaatgcccctgaggccgtaggtgatgcagggcttcttctttcccagccag

SEQ ID NO: 14146 - DNA, 1294 bp, Homo sapiens
cctcgccgcagtgggcccgcccgctggcccgtttccggtccggtgggtacaagatgacggagccgggcgcctctcccgaggacccttgggtcaaggtggagtatgcctacagcgacaacagcctggaccccgggctttttgtagaaagcacccgcaagggagtgtagtgtccagagctaatagcatcgggttccaccagtgcctcttctgtccccaacacagatgatgaggacagtgattaccaccaggaggcctacaaggagtcctacaaagaccggcggcggcgcgcacacactcaggctgagcagaagaggagggacgccatcaagagaggctatgatgaccttcagaccatcgtccccacttgccagcagcaggacttctccattggctcccaaaagctcagcaaagccatcgttctacaaaagaccattgactacattcagtttttgcacaaggagaagaaaaagcaggaggaggaggtgtccacgttacgcaaggatgtcaccgccctaaagatcatgaaagtgaactatgagcagattgtgaaggcacaccagggacaacccccatgaaggggaggaccaggtctctgaccaggtcaagttcaacgtgtttcaaggcatcatggattccctgttccagtccttcaatgcctccatctcagtggccagcttccaggagctgtcagcgtgtgtcttcagctggatcgaggagcactgtaagcctcagaccctgcgggagattgtgattggcgtcctgcaccaattgaaaaaccagctttactgaccggttcttggaaacctggagaacagccaacaagaggcccttgaatctctacgtggccactgaactgctgggcccgggagactggactacaacacctcacactggtcagctggtttctacttggtgtttggtttttcccagccccattttatcttcagcggagccgcggtgtttgttttgtgaaagcttctgattaatttattatattgacgataaaactcaaacctacccagccttccccccactccatggaagtccttgggatgggcgtctgctctggacaccccaaagagctcctgccctctcagccctttattcaagcctcagatttctgctcatgatctacatagatttggaaactgttttcctctgttttggtctcttgggcaacatttttggcccaagtttgggcaacatttggcccaagtttggggaattttgggcagtagctgtatgggagaaaaagagtaagaggaaataattcccacagccatgaaagggtgaa

SEQ ID NO: 14147 - DNA, 955 bp, Homo sapiens
tttttttttttgattttcatcctctgctttattagttgtgatttaggaaatagaatggccctgtttacacagctgtaacatgtcagggcctgtagtacattattggcttgaggcctccgagttgccgtccattctcagcagaatcaatctgaacttgaaaacattccctctaggaaacatgcacatatctactagcataaagcacttcttgcacaactgaaaacagtattcacttgaggtaagttgcaagttcaccttccaaaaatcagccctgacttgtcattgctctcagcatgttcacgatgggagcagagggctacaaatgcctctttaactaggtacccagcatcggcgaatgtgctacactttgctgctagtcagatctcagactctgcaagtgggagtagctggctgtttaacatgcgttcagagcactgccaatctaaaatggctgctcagtaatactttaattgcagtttcatggaaacaaattgctatttaactgcaataagcacttctgtgacttggctgcactaacaataggtgagtcttagtaacaaagctataagtaacattaacttgtaaatggcctttttccaatggcctcttgaaggggtcataggtgggacagcacccaggatagaattccctggtgaagggtgaaggggtctttggggtgaagggtgatggggtttttggatctcctcaatttaaatacaattagttaggctacatgggaactcttcactagactccatatgtagctcttgggttcactgtttattatatgatttatgggccctaagaaatattttatataaatagtagtgcacattagaatcttactatattgacatttaaagccctttaagagcttccttttagatgattagttgtttcaaatatcagtgttaataagggcaaaagaaagaatttaaatacaggtaatattaag

SEQ ID NO: 14148 - DNA, 572 bp, Homo sapiens
tcactcaacagagactgtactacgcaaaattgtcgttcattcaagcggaaataatgatcaagcggcacgaggtaggagcagcagaacattcgggaggaactaaataaaaagaggaccccagaaggagatggacgcatgccatgctaatccggcacgacgagtccacccgagagctagagtacaggcagctgcacacgttacagaagctacgcatggatctgatccgtttacagcaccagacggaactggaaaaccagctggagtacaataagaggcgagaaagagaactgcacagaaagcatgtcatggaacttcggcaacagccaaaaaacttaaaggccatggaaatgcaaattaaaaaacagtttcaggacacttgcaaagtacagaccaaacagtataaagcactcaagaatcaccagttggaagttactccaaagaatgagcacaaaacaatcttaaagacactgaaagatgagcagacaagaaaacttgccattttggcaggagcagtatgaacagagtataaatgaaatgatggcctctcaagcgttacggctagatgaggctca

SEQ ID NO: 14149 - DNA, 470 bp, Homo sapiens
caaggattcaaggctttcaggtatgaattaaaagcaaaaacaaaaaacaaaacaattcattagcctcagattcttcatctgtatacatcacaaggctcattcttgcctgctagtatggcctacatgccacttacgttttaagttatttaggaacacaaaggacagacaaaaaagccatatgcacatgcctcattttctcttatttttgatctatctagtaattcttttgctgcctgtctcttctccattttccttcttcttttttaagcatttttcatattcttcactgtcttctatttggtcttgattaggtgcatctatctcttcgctctgtcttccacaaacaaaaattctgccttcagacatttggtgttagtatttcacactcagttctccctttttttacataaaggattgagtttcctttttatgatgattttacctttatagcaattttggaattttggcat

SEQ ID NO: 14150 - DNA, 1592 bp, Homo sapiens
  misc_feature (1)...(1592): n = a,t,c or g
cgctgactccagagcgcacccgttgggcgatgaaggcggcacagcgtcgaaaaaacaaaagaataagaagaaaacgcggaacagggcctctgtggcaaatggaggcgagaaggcctcagagaaactcgccccagaagaagttcccctaagcgctgaggcccaggcacaacagttggcccaggaattggcttggtgtgtggagcaactggagctgggcctcaagaggcagaaacccaccccgaaacagaaagagcaggctattggagcaatccgaaccctgcgcagcaaaagaacgcccttgccccggaagaggcagctgatgcactccttgtttggagactatagggctcagatggaagccgaatggcgtgaggccctgcgggctctcagagctgctgcttattcagcccaggtgcaacctgtagatggagccaccagaaagaagagccaaagggtctgcaggcctcgctctatatggagagccaaagccactctggacatgcctgatgaagagtttaggttcaatttcttttagcgtctccccgaacctgaaacaatccccctcccttggggtggtgtaggggtttgttttgagtgcagagcctttccaggacttctgttgtcagagaaccctggagttggtctgtccctggctggtccaaggatttgtagctgttgtgaaggtgtgagaccatcagataggcaaaagaccccgttcgttttctgatgaaatgttctctctttcagaagagagagagaggtgcatttagaaaatatgcaataaattgaagtgagtgttcaaagtattgtagaaggaatattgtactcagtctttaggattaagattaagtggctgttggtaacaaagattagtggagaagctgtataatcgtacactggttttcacttttgaaaggaatccctgtcaaatggtttagtgcttaatgctgttatgtcatattgccctaatctctatttttgataaaattggataaggagtgaaagagtatgctgaccacctatgttagaggaagtacagaagatgcaggggtgtggtatccctgggtccagtccctcacctggtacctttgtgcatgttgccttcattcctgagcaggtatcatcctcagggaaccagcatggcacctaccaggccaggctctgttcttaggagcaaggagcttcttgcgctaacagttctggcctgagacctggattgagccttggcagacttcttgtctaaatgttggccattcagtctcaggccctctgttccatggaattgggaatctccaggtgacctaatcctcattggtggcttgatgtttgctggtatcttccaaactcagttcccagactagattgatacctggagcccagctgcctactcagcattttcacttgggtgcttcataggcatttcaaacctgatgtgtttaaaacacttgattaggctccggttttcctttggcttctgcttttcagtgaatggcatgactgcctatgtggggtggcaagccacccaggtggccgaggaaagagactctnnnnnnnnnnnnnnnnnnnnnnnnnnnnnnnnntaaacataagga

SEQ ID NO: 14151 - DNA, 330 bp, Homo sapiens
  misc_feature (1)...(330): n = a,t,c or g
gaccaaagcaaagacctacaggaggtgatagtggtgagccattcaggtcactaaaggaggcatgttcccaggagaggggacgacaatgcaaaggcaagaaggagcaccagcctgtgtgttgagaaaagcatggggacccaagcagctaaagtggaacacatgtaagaagaataaccgtaatgaggtctgagagacagctgggtgggaagtgtcttaatctgtttgtgttactataaaggaatatctgagtctgggtgatttataangaaanggaggtttgtttaggtcacaattctataggctgtacaaaaatcagcaccagtatctaca

SEQ ID NO: 14152 - DNA, 527 bp, Homo sapiens
gtcagtttctgttacgtaacgaaaaggataaacatctcccacgggagaggccacagatggccacttccagagcttgcccattgcctgtctctcgccaattccgtttatccaaaaaggtacatgtttttgtattaaaaagtaaacagggatcagtgactgtattccaaataaatatgaatccctaagggccgtggacaaattgcctaacccagggccagcggtattgctgaaggaaaggggcagctctctgggaagtgggccctcagagattactctggctttgacccttgtttagctgatggtcatttctgggattggaatatttaataagcccaattctaagttgataggtaattttaaatattcaaaccaaatcttcccaacagttggcaagttgtttattttatattatttcttccaggacctacttgctcagatctccaagcaagcatttcttttcttttagggatgtctgaaagtcacatccagttacattactgtgttctttctaatgaaaagtaaaggtt

SEQ ID NO: 14153 - DNA, 489 bp, Homo sapiens
  misc_feature (1)...(489): n = a,t,c or g
ggagcagcaccatgagcttcaataccctggcaatctgccttgactgtttgtgctcaaccctacagcctacccgttccatcccgggctatcccagttccccactgccagggaaccccacgccacccatgaccccaagcagcagcgtcccttacatgtcaccaaaccaagaggtcaagtctcccttcttgcctgatctcaagcccaacctcaactccttgcactcatcgccctctggtaagtctgtccactcttgggacagcggggtgacaaggccaagggtgggcatgggggaatcacaggactccagagagtcctgtaggagcttgggggacaggggatggctgccatatccctnnnnnnnnnnnnnnnnnnnnnnnnnnnnnnnnnnnnnnnnnnnnnnnnnnnnnnnnnncacaagagttcaaggttaccgtgagtgtgatcttgccactgcacttcaacctgggtcccaaagcaagaccctgtctt

SEQ ID NO: 14154 - DNA, 2881 bp, Homo sapiens
  misc_feature (1)...(2881): n = a,t,c or g
gaattcctgtaaataaaattaatgaggcatttattgaaatggcaaccacagaggatgctcaggccgcagtggattattacacaaccacaccagcgttagtatttggcaagccagtgagagttcatttatcccagaagtataaaagaataaagaaacctgaaggaaagccagatcagaagtttgatcaaaagcaagagcttggacgtgtgatacatctcagcaatttgccgcattctggctattctgatagtgctgttctcaagcttgctgagccttatgggaaaataaagaattacatattgatgaggatgaaaagtcaggcttttattgagatggagacaagagaagatgcaatggcaatggttgaccattgtttgaaaaaagccctttggtttcaggggagatgtgtgaaggttgacctgtctgagaaatataaaaaactggttctgaggattccaaacagaggcattgatttactgaaaaaagataaatcccgaaaaagatcttactctccagatggcaaagaatctccaagtgataagaaatccaaaactgatggttcccagaagactgagagttcaaccgaaggtaaagaacaagaagagaagtccggtgaagatggtgagaaagacacaaaggatgaccagacagagcaggaacctaatatgcttcttgaatctgaagatgagctacttgtagatgaagaagaagcagcagcactgctagaaagtggcagttcagtgggagacgagaccgatcttgctaatttaggtgatgtggcttctgatgggaaaaaggaaccatcagataaagctgtgaaaaaagatggaagtgcttcagcagcagcaaagaaaaagcttaaaaaggtggacaagatcgaggaacttgatcaagaaaacgaagcagcgttggaaaatggaattaaaaatgaggaaaacacagaaccaggtgctgaatcttctgagaacgctgatgcatcccaacaaagatacaagtgaaaacgcagatggtcaaagtgatgagaacaaggacgactatacaatcccagatgagtatagaattggaccatatcagcccaatgttcctgttggtatagactatgtgatacctaaaacagggttttactgtaagctgtgttcactcttttatacaaatgaagaagttgcaaagaatactcattgcagcagccttcctcattatcagaaattaaagaaatttctgaataaattggcagaagaacgcagacagaagaaggaaacttaagatgtgcaaggagatttaatgatttcaaagaaaataatggttctttgtttttaatgttaaccttttttaaatacaatactgatagttagaagaaaactattgtactcttttgttttagtggagaaataatagatgtctgttcatgtgttaagtgttatagcaaaaaaaatacacatatggttaagttaatgaatagtttttgttttatcagaatggcaacagacagaagtactttgtagagattgacttcctaagctacttaagacaacttgcaccactaagaaaaaaatgtagaaccatttggaaaaatgaaatttagtagttccaagtttcaaagaaatgtcaacattttattccattcaataaagaacaaaaccaatagtgtttttattactttcatctgaaacattccatgttttaatctgaggccttggcagactttcatttggagtttgaacccgttttggttgcatttcatttttggagaacttaattaacgtgagattggcaattgaaatgcaggtgcagttttctgttaatgtcatgctgttgtttaggtaataagaaatattaagtaattggctttagattttgtaatttttttccctgagttcctgctagatttcgtattctagtagtcaatgtattttcagtgaaatgcaaaaatattcccgttatctttgaccagtattaatttttgagatcttactgcttgtcacttgaatcccgtgattgtcatacatctctggtataagcaacatttgatttttgaagtgtgtagaccatctcttcatattttcaagatgtaattttacatttctgcatttttaaaacagtttggccataatcctagatgcacgcttctaattcatgtacctgcacatgtgacctttgtgaacagaaatttgcatgtataatttgtgtttacttgtaactttctggttatatactgcttatatctgtggattcaagttactgaagtgaataccaataaaaagaaaaccctaggccatgttaattggttatacatgtttggaatgttaaccaacgtatttgtcagttgtggtttttattcgctcttaaactttgtgcatggctttaacaatttattacttttaaatctagagtgaattctaaagactgccgctaaagatctgagttttaaaaatgttgttgctggtggatttcttgttcctgttacataactaaaagtgaggccatttgtggtttttaaaaaccttatgaattaaaaatgctacaggtgaacaaacagaagcttatgtttagagatattgatgacttaacagtacaattggaagtaatacggatgagcaagaattagttctgcagcttttcaaaataattacgtagagactcttggtatattggattatctgttgtaaacaatttttttttcttccctgacacaggggtctcactctgttcaccccagactgggagtgcagtggccncagttctgcaacctcagcctttgggttcaaatgaccctcctaccctcagtcttcctgagtagctggggnctacaggcttcatgccacttattaccnggctagtttttttggttttttttgtattagatgggggctttgcatggttt

SEQ ID NO: 14155 - DNA, 498 bp, Homo sapiens
tttttgtatgtaaggatttaatgattacatgctgcagaagttgaataagtaacaagtttattatttgctttctggaactattccgggtgatgtatctggtagctgataaatttagtttattctagaaataattgactttttttaatatttcaattttcattttgaatgatttgtttccaagggtacagagcagttattctccagactttgccacagcttagaatcctagattgcaagaacatatttggtgaaccagtaaatttgacagaaataaattcatcacagctgcagtgcctagaaggtcttttggataatttagtttcttctgattctcccctaaatataagtgaagatgagatcattgatagaatgccagtgataacagcacctatcgatgagttagttccccttggaacagtttgcaagtacaccaagcgatgctgtgttgacgtcttttatgtctgtgtgtcatcttctgagccagagagaaataatcat

SEQ ID NO: 14156 - DNA, 457 bp, Homo sapiens
ggaccgtctctggccagtttgcttcaacccattccattccccaaagaagctctcgcacatgagaagttcaccaaggaactgaagtacgtgattcagaggttcgccgaagaccccaggcaagaggtccactcatgcctgctgagcgtgcgggccggcaaagatggctggttccagctctacagccccggaggggtggcctgcgacgatgacggggagctgttcgccagcatggtgcacatcctcatgggctcctgttacaagaccaaaaaattcctgctctccctggcagaaaacaagctgggtccctgcatgctcctggcactgagggggaaccagaccatggtggagatcctgtgcttgatgctggaatacaacatcatcgacaacaacgacacccaactgcagatcatctcaaccctggagagcacagacgtggggaagcgcatgtacgagcagc

SEQ ID NO: 14157 - DNA, 1681 bp, Homo sapiens
aataaatcagaatgagttatgcagaaaaacccgatgaaatcacgaaagatgagtggatggaaaagctcaataacttgcatgtccagagagcagacatgaaccgcctcatcatgaactacctggtcacagagggctttaaggaagcagcggagaagtttcgaatggaatctggaatcgaacctagtgtggatctggaaacacttgatgaacgaatcaagatccgggagatgatactgaaaggtcagattcaggaggccatcgccttgatcaacagcctccacccagagctcttggacacaaaccggtatctttacttccatttgcagcaacagcatttgatcgagctgatccgccagcgggaagacagaggccggcgctggagtttgcacagactcagctggcggacaaggggcgaggagagccgagagtgcctcacagagatggagcgtaccctggcactgctggcctttgacagtcccgaggagtcgcccttcggagacctcctccacaccatgcagaggcagaaggtgtggagtgaagttaaccaagctgtgctagattatgaaaatcgcgagtcaacacccaaactggcaaaattactgaaactactactttgggctcagaacgagctggaccagaagaaagtaaaatatcccaaaatgacagacctcagcaagggtgtgattgaggagcccaagtagcgcctgcgcttgcgtggtggatccaacaccagccctgcgttcgtgggacttgcctcagatcagcctgcgactgcaagattcttactgcagtagagaactctttttctcccttgtacttttttttgacctgggcatctttttatagggaaaaatggcctttgtaggcagtggaaaacttgcaaggaaagctgccgtctctttggcagtctgatgcagagcctgcactctggcactcgctgaagaatctggaaggttgcggtttgctcttccagtgttcgggggcctctggctgctgaaggattcggtctaccacggagggctgtgctgttaggctgcatcccactcaaaatacaggaaaagcacgaatcatgattctgctttctgttagcttaggcagacattgggccttcacctacaagtttttccttacccctgtggtttttgtgtttttttttttttctttttccataggaaagaatatataaatttgtaaatcctaattcaaagatggctcatgtgtgagggcattgagtttgatttgttttccctttggtctgggttgtgtggcttttgggggatgcgtgtgagggggctatgtgttttttaattttttaaatatatattttggtgctgtgtgtggtaagagacttgttcctagtggatcaatgaaccatctcttctgggcagttttgttgaaaataaaggtttctctttgatttcaagaatgaccaaaatggcctctaaaagatgttaatcatctcaaatgaccttttgtctttggggcgttcttccccctgtgatagcggcagtggctttttctggtacctgcagctggaaaggccacttggcgctgtgctgagtgagcggccttcattagagcgaggcagcccttggccggtggggacgcagagccccagcaggtggtgcacgactgttggcggaaggaacgcgtgttcatcctcagtgatctgccctccagc

SEQ ID NO: 14158 - DNA, 536 bp, Homo sapiens
gtgtttaaaagtttcccactcaaatgcacacttgaaaattgggtccctcagcctcattactgaactaaataagtgaagaagttgtatctttggggtaaaactttccagggccacttaattttttaaccagttaagtacgcatcttcctggtggttcagactttttaagtcagtgctaaagctgaaaagcgccttctaaatatgactgtgagtttagtttgtatcttacatttagtaactgttctgttgggccaggactatgactttaattactatgtacttattcatcccacactctgcactaaatacaccatagctactatagcattgtggcaggcactcatttttgtggactcattccatacttctgctggcatatttcgtttaaaatctagctaaagattttcatagtactgtgttaactagccagggctgaaaagtgtgacaggatatcaaattgactttccttggggaaaatgttgctttggcaatagtgaagtccaactccttcatttacagaattagtgattactcatc

SEQ ID NO: 14159 - DNA, 838 bp, Homo sapiens
ctcggaagaagccctggccagacagccccggagatcaagcatctcctcctggggatgcccctcccttggaagaacaaaaggagctccattatgcctcccttagtttttctgagatgaagtcgagggagcctaaggaccaggaggccccaagcaccacggagtactcggagatcaagacaagcaagtgaggatttgcccagagttcagtcctggctggaggagccacagcctgtctgggggaaaggacaagtcagggaccacttgctgaagcacgaagagcccttgtggcaatgttaacattaactgatgtttaagtgctccaagcagagcagaaagaaaacagatgatggaattagagaggtgggctcaaatctaggccctggcactgtcatcaagcaattcactgcatccctctgtgcctcagtttcccattctgtaaatcagagatcatgcatgctacctcaaaggttgttgtgaacattaaagaaatcaacacatggaaatcaaccaacatgggtcctggaacagggcgttgtgctcagtgctttctggtctctcttccttgaatagaaaggtcctgctgggcaagttctctcaaggctggggatgaccaggcacaaaaaacagggcagcaatatgttggtgtcactccccttcccaaaactcttcgaagactccctagggaaagaccagcccctcagcctgggcacttggttcatgatgtgggatcttatatccttgccagagtcatatcttttgcccacttttacctgcaatccttgcattcatattccattggctccagtccttcatttatgagacccataggaatccttcc

SEQ ID NO: 14160 - DNA, 577 bp, Homo sapiens
gctgactgcatctgcctgatgcacctagacaagccccaggctgtgcccgtggatgtccatatgtggcacattgcccaacgtgactacagctggcaccctaccacgtcccaggcgaagggaccgagcccccagaccaacaaggaactgggaaactttttccggagcctgtggggaccttatgctggctgggcccaagcgactccaccctccttacaggtgctgttcagtgccgacctgcgccaatcccgccatgctcaggagccaccagcaaagcgcagaaagggttccaaagggccggaaggctagatggggcaccctggacaaagaaattccccaagcaccttcccctccattccccacttctctctccccatccccacccagtctcatgttggggaggggcctccctgtgactacctcaaaggccaggcacccccaaatcaagcagtcagtttgcacaacaagatggggtgggggatattgagggagacagcgctaaggatggttttatcttccctttattacaagaaggaacaataaaatagaaacatttgtatggaaaaaaaaaaaaaaaaaa

SEQ ID NO: 14161 - DNA, 902 bp, Homo sapiens
acgccacggacatggtggccgagaccggcggggtgggggacgtgtcgcgcggccgggtggcctcgggtcggtaccctgggcgcggagcagctgcctcattagtattcgtacccacgaggcggcgcagcgggccctcggggacagcgagcgtcgcgggccatggcttatcactcgggctacggagcccacggctccaagcacagggcccgggcagccccggatccccctcccctcttcgatgacacaagcggtggttattccagccagcccgggggatacccagccacaggagcagacgtggccttcagtgtcaaccacttgcttggggacccaatggccaatgtggctatggcctatggcagctccatcgcatcccatgggaaggacatggtgcacaaggagctgcaccgttttgtgtctgtgagcaaactcaagtatttttttgctgtggacacagcctacgtggccaagaagctagggctgctggtcttcccctacacacaccagaactgggaagtgcagtacagtcgtgatgctcctctgcccccccggcaagacctcaacgcccctgacctctatatccccacgatggccttcattacttacgtgctcctggctgggatggcactgggcattcagaaaaggttctccccggaggtgctgggcctgtgtgcaagcacagcgctggtgtgggtggtgatggaggtgctggccctgctcctgggcctctacctggccaccgtgcgcagtgacctgagcacctttcacctgctggcctacagtggctacaaatacgtgggaatgatcctcagtgtgctcacggggctgctgttcggcagcgatggctactacgtggcgctggcctggacctcatcggcgctcatgtacttcattgtgcgcta

SEQ ID NO: 14162 - DNA, 665 bp, Homo sapiens
ggtattttgcatttccattttgcatatggggacacagaggtttagagaagtgaaagaaactgtccaaggacccaggagtggtgaggttagcagaggcacctgcacccaagccttctgacctttactcctgcccagtgctctctctctcctaatctggcaaactcagtctgggccagactgtgtgctccttaactagaaagtttcccaatggtcatagtttgttctttaggtttgtagttcaagacaaaccattgccctgtagctgcccttttccccactggcttatctttggaccgactgggaggtgaaggacactgtccttgtatgtgccattcccaattggctacttcctggtgaacttgatttctcattttggggcccaggagggtgatcattgcctaagaacattccagagtttacttaaggcaaactatgaaaaaggtaaattctgtgctttcttcctttcattccacttcagtaactgcctttttactggtattactcaaattctccagctttcttactctttaaataattttaccgagcctccactctgcgtctggatttgtgctctgtgttggacatataacgataaataagacaacttttattagtggtttcaggtatgttaacgagttagtatggtacagcaatgataaatgtga

SEQ ID NO: 14163 - DNA, 2473 bp, Homo sapiens
  misc_feature (1)...(2473): n = a,t,c or g
gctcgacccaaggctttctgaaaacagggccttaatccaaaggagtgtctcatgctaggaattaacaactccaaggcaagacaggcccctggaggcagatggatttgtgctactctcagattatgtagtagctacctggatccttaatgacaccggcttgggggatggtgttggtaagataaagagcatgagccaccgcacccagcctgcattcctgtttttttaatggttttggagggtagcnnnnnnnnnnnnnnnnnnnnnnnnnnnnnnnnnnnnnnnnnnnnnnnnnnnnnnnnnnnnnnnnnnnnnnnnnnnnnnnnnnnnnnnnnnnnnnnnnnnnnnnnnnnnnnnnnnnnnnnnnntaatgatcattttaatgtttcccatgcactcatttagtttgaaccttcacagcaacccaatgaggtaatactcccatttcacatataatactgagagatgagttgcacaagattatacactgttaagtagcagagccagaatggacttcagaatcccaactacaatacaaatgtttatttaaataaagaagaaagctattgtacaaatatcactcttcaggtttagcttacagagccatggctatggattcttagctctgtaaggaagtgcttctataaattcttaggtttagagatgataccatctgggtacctttgcttggaaccgtgcaaccacattctggggtcttagtagggtgggatcccatccagttggtttccaagggtgatccagttgggttgcacattgtgtggtcgtccaaataactcaatcttgcgagtgccaggagatagtctttcaatcatgccatagatttcatctggtttatgactggtggaacgaacctcagctacgatcacatcacaatccagaccctggttgaagccttggggatttcctttgacaccaaccaagcagtgttccttcccatggttcaaccagtgacctgtacggcctgtccgaatgatgcgttgcagttgatttgtcttcacccaaataatttcatctacccgttcatacccccagagatttagacattctctccccaactccatggccctgactgtgacccagaggaagagaaagccatcatcctgtagtacgggtatgttgagccgcgcatctcatcatctgtccaggtcccataaggcagtttcatgtgaatatcccagggtgggtcagccatcacaactgcaaacttgcccaagatactgacgtccaggtagcggatatcacaacagatcccactgaggtgggaagagtcggtctgcactggaatcacctccgacactctgtgtaagagcaagctcctggcttggcgtgtggtctttgctgccaggggcctcagaatccatgcaagcatcaatttcatagtgaacatacttgcaggtatccatgtggaaacatgtattaaggaaagagcagtcacctaaagactcatcagtgtgtttattgataattcgtctgaagtgcagcttgcgacagggtcgatcagcatcactggctttcatgcactcctccttggttccatagtcacagaattcttgcacttgggcccgacctcgagagcgaatttcaacaatggattgttccttggctgttgtagtaattaatagctctaggatctcctgactgaccttcttgctctgttgttccttagtggactgttggttcagaaggctctctatctccagatcaacatctgaggcagcatgtttccttgatttcttggctggctcctttgctggttcccgatgctgaagaagttcagaccagagactaacgaactggcaaaggcagctactgtagtcgagtcctgttctgcacgccgcttctgccctgtgacagtccctgctacctccccagggcccttcttttctgccacagcacccatcatggcagagagcttggaatggtcagcataggttacaagagtaggatgtgcatcatcttgtaggagacctcgctttacctcaatcaactcctgagctgcaaacttctgcaggaggctttctaccccatcttgagtggcaggagcatctggcgtggagatggcaagacagatggacacagcatcagtgggcaatgttaaggccagatcagagaggtggtgtagcaacttcttctctaactcaggatctgtagctaattcaggaactgctgaagctgtgctgggcttagggccaccagaggtgggtgcagtaggcactgggctgtcactacggaaggttggagacaatgctgcctctggattccgtagatccaagtgccccgagtcctgcttccgcctccgctgcagcctctcccgcagagagtccagctgcttcttgtgggcctggatagagctccacgtgtccgacatcctagtctcccagccctgacacctctcgaataaggcgcggcggactagcacctcccagcactcgctccaggatatagccaattctca

SEQ ID NO: 14164 - DNA, 902 bp, Homo sapiens
cgagccggaagctccgactgcggcggcatccgggacggcgggcgggctggccaccacgggacaggaaggcacagagcatggagaatgatgaacttccgtcagcggatgggatggattggagtgggattgtatctgttagccagtgcagcagcattttactatgtttttgaaatcagtgagacttacaacaggctggccttgggaacacattcaacagcaccctgaggagccccttgaaggaaccacatggacacactccttgaaagctcaattactctccttgcctttttgggtgtggacagttatttttctggtaccttacttacagatgtttttgttcctatactcttgtacaagagctgatcccaaaacagtggggctactgtatcatccctatatggcttggcagttatttggcaatcgccaccaggcatttgtcaaggcttctaatcagatcagcagactacaactgattgacacgtaaaatcagtcaccgttttttccctacgattacaaaactgccagtcctatatggagtctgatcacaagactgcagtttcttcacagatctcaggaagttgtcgtggggcagaggctttttaaaaacatgtgattagggagctatctttatctgaataataacgaatttttaggtaaaacctgagatagagtactacaaaatcatgttgatgacttcagattttggaagttaaatcatgtctgttatttgcattctttagaaacttgactaagtacctgaattcatatttctattctactgtgcaacatagtgatgattcagaaatttttcctttggggaaaaaaatgaatatgaacatttccattgtgttaagtgtaaaaaggtccagacatgatcataaaatttaaattttagtcgcagc

SEQ ID NO: 14165 - DNA, 431 bp, Homo sapiens
  misc_feature (1)...(431): n = a,t,c or g
tttnnnnnnnnnnnnnnnnnnnnnnnnnnnnnnnnnnnnnnnnnnnnnnnnnnnnnnnnnnnnnnnnnnnnnnnnnggcacgagcacaggagcagagatgaagagacatgaggacatcctacaaggtgcagagacgtgggagacagtgaaaggctgtcaggttatattattgtatcatcctttaagagacactgtggggccttctgttcacccctagcttagccttatgacctgggctgtccttccccagaagctgtctggcccctttgagagacaatgtcttcccctagccacaggttcaaccaagtcatccattggcatctatactccaggtcttaaaattgtggattaagggtggcctnacccttaatctcctctatgctatctcctctaatctccccgtctctggganataggtcctgttgttatct

SEQ ID NO: 14166 - DNA, 830 bp, Homo sapiens
ttttttttttttttaggactgttaaaaactgtatttgacttttaattttgaaagcaaattaaatacagttaaattaaaacagaccagatgcagctgcctgggtgccaccctcaccccagcctctgttcttagaactcctagcccctggcctcactcctgtgtggtggggcttgccagcgagggagcagggaacagactgggtttggaaaacagtggtcatcatggacccatttctgatttagtaacaaactcattcccaataaagatgaaggctgcagtccaccagggttataattataaataaatatacatgcagctaaaagaggatattaggtgaaaacaactgacctagcatctgcccaaagaagtccccattttgttgttcattatcaaagtcctgaaaatgaaccctaggtttttggctaagaaggtggcctcagaccagccaagctgaccttggcacttggctggcttctgtgaggcagtagagtgcccacacataagctcaccacctgtgcccacctcctcccttctctcccatgccaccccacttgcttccaagggcttggtttccaaagtgacatccagggtgtaagaggttggggaaaacgtcctgcaaggtggctcagggatctgattccatcagatgggcgtgtaccctgtttagtgcctggcaatgccatgtttatatcaaggtcttaatattacttttgagttatttctcccactcttcatggaagtgatgctccagccttgctaaaacactgagggtcctcccgataagccaggcattgtgattccttggcttcaagtgccttctgtcttccccg

SEQ ID NO: 14167 - DNA, 1105 bp, Homo sapiens
  misc_feature (1)...(1105): n = a,t,c or g
attttttatttcattactgggtaacaatctacttctcagcttagaatgctatagaaagcctccacatttaatttaatcaaatctgaaacccaataagcttaaacaaagtgaatgtttttcaaagtgcataatttccaactcatccacttgcaatatttatccaattccagttcatcagcaagaaaataaaatgtacttggctataaaaatactgaggaatgttatcgaaaaggaaaggctatttggtagaagtaactacaaaaataattagtttaaatctttgtaaagctttaatgtaagaacatcagtacactttctttacataaaccttaaagcatgatcaataccaagatttcaaattttcaactttcaagtacttgaaaaagggttgcaacaaagtgtctcttcccaaaaaagcaagaacagtgatcatgcaggtgttaatctgcagacatctgaggacactggtatctgtgttgggctgtcatttctggctccactggcagagagtgtaggcaaggcattactttgaaatgcagatgtaggacaaggagtcatgacaacattttcgtcttcaccaacgtctgaatctggtgttgtaacttcactgccttgaagcccaaggatctcacagactgcttgtggcaattccttgcattttaccatctgtagagaaattgcttctgccttgcagagtatatcttccacatcaattttcatggacaattcattgatatgcttaagtatttcattgaagccataatgcttttccattatttgctgcttttctgattccagaatagcacaacagagaagaagatggaaatttgtacatggtagttcggtccacattacctcccataatcgaagaatatctagaaaactaaattcccttttgaatctgattaaaagccacctgaagcaaaaataaaggtatccagagtcctgagattctaagtaactgcaaaatccactgtctaacaatcgaagtaaggtactcagctgaattagctgggtcctcgtgccnnnnnnnnnnnnnnnnnnnnnnnnnnnnnnnnnnnnnnnnngtattaaattcgtaatcatgtcatancggttttncaag

SEQ ID NO: 14168 - DNA, 1311 bp, Homo sapiens
ccggggccgagacgatggctgaccacaaccctgacagcgactccacgccgcgcacgctgctgcgacgcgtgctggatacagcggacccgcgcaccccgcggcgaccccggagtgctcgggctggagccggagagccctgcttgaaacggcttcccccaggaagttgagtggccaaacaaggacgatagccagagggcgttcccatggagccaggtctgttggcagatcggcccatattcaggccagtgggcacttggaggaacagacacctcggacgctgctgaagaacatcctactaactgccccagaatcttccatcctgatgcctgagtcggtagtgaagccagtgccagcaccgcaggcggtccaaccctccagacaagagagcagttgcggcagcctggagctgcaacttcctgagctcgagccccccacaaccctggctccaggtctgctggcccctggcaggaggaaacagaggctgagactgtcagtgtttcagcagggagtggaccaggggctgtctctctcccaagagcctcaagggaatgctgatgcctcttccctcaccagatccctcaacctgacctttgccacacctcttcagccacagtcagtgcagaggcctggcttggcccgcagacctccagcccgccgagctgtagacgtgggtgcctttttgctgggatctgcgagatacttccctggctcctccaaacattgtgttggaggacacccagccgttctctcagcccatggttggctcccccaacgtgtatcactccctgccctgcacgcctcacactggggctgaagacgctgagcaggctgccggtcgcaagacacagagcagtgggcctgggctgcagaagaatagtgagtgtgtggcactggtggcctggagccaaatttagcttgggtgagagttgacaatggtagttttccttcctcaagcccctctgtgcccctagagcaccctgggctgtggctgcctccttcatccaagagcagagtccatctttacccttctctgagctatgcagccttggcctgctgcgtctccggcctgtattctctccccttcactcaggccctgggaaaccagcccagtttctggcaggagaggcagaggaggtcaatgcctttgctctgggcttcctgagcaccagcagtggtgtctctggagaagatgaagtagagcccttacacgatggagttgaagaggcagagaaaaagatggaagaagaaggtgtgagtgtgagtgaaatggaggcaacaggagcacaaggacccagcagggtagaagaggct

SEQ ID NO: 14169 - DNA, 1669 bp, Homo sapiens
cccccctcgaggagtgctgtgggcctgcagggtcctgttgagttcgaagctctgaacccacaccctgcacttggtgaatgccctggaggcgcggcgaggtggggggtctcctcatcccagagggtacaaatgggtcagaagagcccagggcaggaggctgcggaggggctggtccatctctcccacaccatgagaccccattttgcgtctccccgccccatgccacctgcagacaaggtgaaccgggattccgtgcgctccatccagaagagcatcttcaccgtgtgcctagatgcaaccatgcccagggtctcagaagacgtgtaccgcagccacgtggcaggccagatgctgcatgggggcggcagcaggctcaacagcggcaaccgctggtttcgacaagacgctgcagttcatcgtggcagaagatggctcctgtgggcttgtgtacgagcatgctgcagcggaggggccccctattgtcacccttctggactatgtcatcgagtacacgaagaaacccgagcttgtgcggtctcccatggtgcccctgcccatgcccaagaagctgcggttcaacatcacccccgagatcaagagcgacatcgagaaggccaagcagaacctcagcatcatgatccaggacctgggatatcaccgtgatggtgttccaccattttggaaaagacttccccaagtcggagaagctaagcccagatgccttcatccagatggctttgcagctggcctactacaggatctacggacaggcatgtgccacctatgaaagtgcctccctgcgcatgtttcacctggggccgcaccgacaccatccgctcggcttccatggactcactcacctttgtcaaggccatgggatgactccagcgtcacggagcaccagaaggtgggagctgctgcggaaggccgtgcaggcccaccgaggctacaccgaccgggccatccgcggggaggcctttgatcgacacctgctgggcctgaagctgcaggccatcgaggacctggtgagcatgcccgacatcttcatggacacctcctacgccatcgccatgcacttccacctctccaccagccaggtccctgccaagacagactgtgtcatgttcttcgggcccgtggtccccgacggctacggtgtctgctataaccccatgggaggcccacatcaacttctccctgtcggcctacaacagctgcgcggagaccaacgccgcccgcctggcgcattacctggagaaggcgctcctggacatgcgtgccctgctgcagagccacccccgggccaagctctgagcccctaggactcaggcctgccaatgccacagccaagcccaccctgggatgggccacccaccagggctcagctccttggttccctcttccttggttccctcttccctggtccccccaaatctactgagccacggaccgcatcctccagggggcctgcaggccccagccaagtgccttccgtgggtcatcccagcacctgcccagggcccgacctggggctgagtgcagaggctgagcaggacgttaggcccgggcccctggcacgtcctccaccggtgcctcctctggggaaagggaaccagccctcccagagcaggagactgggcaaagaagctcttttgtctcaaccagctta

SEQ ID NO: 14170 - DNA, 1224 bp, Homo sapiens
acagaccccaaccccttcatgtcttttgaggggggctcaaactactggtgcctgggacacaagcaagacctgggtccatggaaatgtgtgtgtgtgtgcatataagcacatatgcttgaggaactaaagccaatatgaccccttgtggggcgtggcgcttagcttcattgggctccttttttcagtttaaattccattagcatctctaagtctcttctgccagctcgggcctggattcttctgcctaaaagagctatgagtgcttctgctccccactgttaattccaacttccaagccttttactcaggctgtctcccccattcccttcctccgaataatctcattccctcctctttcacacgaatttcctctgggctgctccagcgtttgttaattcctgtccagagagctgtctcatctccctcttcagacagggagaacaggcatcttcctccttaccctggaatttccaacagttcccaccaaaaagtgctgaatgaaccagaataggggccgagaaggaaaattaccacctgtttcacctgctcctccttcagagcaagaaattctagcattggttgggctaggggttggggggtagggagaaaaagaaggaagagagttaccaaaagtaaacataagacaaaaccctagtggtatagatggaagactatgttccagtaaaccagagagctggttcctccctcgactctgcacagccactgaaagtttaaagattgcaaaagtggtgtggggcaaggaggtagagtcaatcaatgaaactgtgaaaactgtttaagtagcactgctcaaggagaccaggagagaagagtctgttagagacgtagcagtaaaaccataattctcagacagagctaaggggttggagcccatgcctctaaagtcaccctgctgtttggaaaggatgagggagaagacggaagggaggacaagctgcagagggtaaggattgacagaagaaccgaatgctgacatcgagggaggggagaggcaggaggcatgggccgagggattaggagagctgggagcccagcagtctctcgatagctgcgttgatgtcccctcctgtggcaatcagggcctgcaggttagcctcacgattgatgaagcccatggagttgagctgctccagctgctgctgaaatctcacttctggcgtctgcacctgtgagtttccacttccagccaaaagctggatcatc

SEQ ID NO: 14171 - DNA, 1098 bp, Homo sapiens
  misc_feature (1)...(1098): n = a,t,c or g
tttttttttgactgtgaggaatttttattttcctttcatgttcactaattgcaagctttcttcatttcggtaatatctaaaatgatctcctcttgtcggaggtagattttcccagtagcttctaactcctgtgtcaaagagaaaataaagatttaccgacttctcaggtccattttcacaatctgatggtgtttgctagcaattgtcagcgcctgacccagaagcggtgtattgcgcctcagcatggaggaggacgtgaaggcgtacggagtctgggagtagtacaccacgtaggtaggtttgtactggtttggctttgtgtactgtgttccccaggcaattcgaatccagactgcattctcctcagtttctctgaagctgactgtcacattttttaatgctctctgaagaattttcttgaacgaatttttaaattgtttcatatcaaaaaggtcaacatcttcacctggtcctttactcatctgaaaaacatcccaaactttctggtgctgatgaaattgcatataaatgatgtctaacagggcagcatcactgatacttgcacgcttttcctcacacagatggatcaagtgctgaactacagattcctttctctgtcggaaaattttacaggtctgcaagttggattttcagacaaaaaaatccccaaggccttcaggattgttgtcaagttcaattcatggggattttcaagatggtcctcttgatgaactcaggcaacagtctcaatccatctcttttgcacggcccacatctcctgcagtctcactcctcaagagctgttcccctcgccgcgccttcaaagccaccaattgcagttcccgccgcctcncaagtccgcccaccggagcacaagcatcaggctgtgtcttgggcacaggggactgcacgggggagcgactgaagcgaaggtcgccgagccccccacgccgctcttcttagaagtgtgcaaccttgcaccagtagtggacttacacataggctccgttaggacctggcttatgtcagtcggcttgtggcttagacgctgccgtgccccagtggactcactgtgcctccccccncgtgcncgaaatt

SEQ ID NO: 14172 - DNA, 2416 bp, Homo sapiens
atccccagagccgcagctgaggccctctggcccagaagcagagtggccttcggaccagagaggctaaaagagatgctaagagaatgcctgcaaaagaagtcaccattaatgtaacagatagcatccaacagatggacagaagtcgaagaatcacaaagaactgtgtcaactagcagagagtccaagcagaagggcagatggacttcttcagtgtccttcacggcactggatcccatcaaagaaccttgaagaagtggctgccccttgctggacctgaattctactgagtccctgggcaagactgtcttacctgggcagcaaactgctgctggatttgttgggaccttctggagccttctacttatcatgtaaatgtattgggcacagtgctttacatatgttaataaactgcaaatgttgcagtttcagtttgtctctttgcaactcctgtaatacggtctggtgtaaaagtagtgagtttaaagctacaggtcagtttatggaaacaggaaaagtagggaatggcattttctggggtgaaagagttcacaccttagtggctattaactctcctgcccatggatagtgtattctgtttcaggcaagcttattctttccttctttcattttaaatattgtcattacaaatcttaccagggttcacttaaaagctgggctttcatccaactctaaacccacatattgaaaaaatcaaggtacagggaaaactccttgttatccttgtttccttagcttggtatgagacagatcggatccagtttcccatgcaccaacccactgcccatggatggttcttttgggaggtgtctgtgaagcagtcatacctgctcctcatctgcctgggaaagtcctcctattccagtgtccatgttggcctccagtccttaatgtcaccatgcttgtgggccaatgcatccaaataagggatacccctcagggctccagctaggacattgcaattttggcatagcttttcccagttccctttgcttgtcttcttgactgacttccctctctatcggggtccacttgccaattgttaatcaaagattgaaacactgcgtaggagagggagatgatccagagacatgtggcagcaggcatggcttccccttggcctctctgtacactgccccaggactgtcattttggcatctgcaaaggaatcactttagaaagccagcacctggttgatgtgtattcatactgacattagattgatgtgcactgcattagaaatgaggtagctgacacagaaaaaggatgttttgataggaataattttctagtatgtcttgaaacatgttcatctggaagtattttcctccaaagtaatgtagcatgatttttcaaggattgttaacatgcctgggattgggaaagataggactaaagttgtgccaaactatatcaataaattcccatgtttaggcagaaataggcagcctattggtgttatgtttatgtaacatagtccagagaactgacatgcaggtcaaaagtcagatacgcaacctccttatctgctaactctgttattcttcaaacacaagtgggtagtgtcatttttccttccttccttccattggcagattgtatatttattcacaaaacattaaatgtccatcctgtgccaggtactatgcagatgttgagggatttggggtctggttagtcgtgactatctatcctgaatctaacagtgacttcataactaggagactgaattagacccttaaggtatagtgtgtgttgcaaaatcactctgcaatggaaacttttatattcagggtaggtttgtgtcttaaactaggtgttctaatcaatgtacaagactttaccatacacgcaactatagtttttctaaaccttcatcattttgtgattctttgagaaagggcttttaggaactttatgttctaaaaaatgtttttaacaataataagataaaagaaaaacctgtgattcatatgtccccactggcattactcagcaggagcccccagctgccaaaggttggcagtgatcctgcaagttcaagggctctttctccctggggatgtgctttgtggcttctctttacagctttgtttctgcatcagttcactgctgcatgttgtttggaatttatcaccttaagaaagtgtctctgttttatatagaaacactttctcacttacaggggagaaggaaatgcagggcacatgatctggccctccccagaacaatctggatttcacggagacagcaaccagaagttaaaccatgtgactaaaaatgcatctggctactttttcatgtatgtatgagacagaaactaatccttactatcctattaggataccacttttcattgcaaagtttgtgtcaataaagtcattaattttaaacataa

SEQ ID NO: 14173 - DNA, 1256 bp, Homo sapiens
caaaagtcaaagaaggcaacacgctgagagatctcacttccctgctaaccggtgggcggcccgccggggtgcacctctcaggcctgcagccctcggccggccagttcttcgcatctctagatcccattaacgaggcttctgcaatcctgagtcccttaaactcgaacccaagaaattcagttcagcatcagttccaagacacgtttccaggtccctatgctgtgctcacgaaggacaccatgccgcagacgtacaaaaggaagcgttcatggtcgcgcgctgtgttctccaacctgcagaggaaaggcctggagaaaaggtttgagattcagaagtacgtgaccaagccggaccgaaagcagctggcggcgatgctgggcctcacggacgcacaggtgaaggtgtggttccagaaccggcggatgaagtggcggcactccaaggaggcccaggcccaaaaggacaaggacaaggaggctggcgagaagccatcaggtggagccccggctgcggatggcgagcaggacgagaggagccccagccgttctgaaggcgaggctgagagcgagagcagcgactccgagtccctggacatggcccccagcgacacggagcggactgaggggagtgagcgttctctgcaccaaacaacagttattaaggccccggtcactggcgccctcattaccgccagcagtgctgggagtggtgggagcagcggcggcggcggcaatagtttcagcttcagcagcgccagcagtcttagtagcagcagcaccagtgcgggttgcgccagcagccttggcggcggcggcgcctcggagcttctccctgcaacacagcccacagccagcagcgctcccaaaagccccgagccagcccaaggcgcgcttggctgcttatagactgtactagggcggaggggatccgggccttgcgtgcagcctcccaaccatgggctgggttttgtgcttactgtatgttggcgacttggtagggcaggagacgcagcgtggagcctacctcccgacattcacgttcgccccacgctgctccgactggctgcagcggacactgcccaaagcagaggggagtctcagtgtcctgctagccagccgaacacttctctccggaagcaggctggttcgactgtgaggtgtttgactaaactgtttctctgactcgccccagaggtcgtggctcaaaggcacttaggacgccttaaatttgtaaataaaatgtttactacggtttgt

SEQ ID NO: 14174 - DNA, 2199 bp, Homo sapiens
attctgatttccattcttcttatagtctatggtagtttcaggtcccttaatatggactttgaaaatcaagataaggagaaagacagtaatagttcttctgggtctttcaatggcaacagcaccaataatagcatccaaacaattgactctacccaggctctgttccttccaattggagcatctgtctctcttttagtaatgttcttcttctttgactcagttcaagtagtttttacaatatgtacagcagttcttgcaacgatagcttttgcttttcttctcctcccgatgtgccagtatttaacaagaccctgctcacctcagaacaagatttcctttggttgctgtgggacgtttcactgctgctgagttgctgtcattctctctgtctgtcatgctcgtcctcatctgggggttctcactgggccattggcttctcatggatggcactgggccatggctcttgtgtcgccatgatcgcctttgtccgcctgccgagcctcaaggtctcctgcctgcttctctcagggcttctcatctatgatgtcttttgggtatttttctcagcctacatcttcaatagcaacgtcatgggtgaaggtgggccactcagccgggctgacaatccccttgacgttctatcccggaagctccacctggggcccaatgttgggcgtgatgttcctcgcctgtctctgcctggaaaactggtcttcccaagctccactggcagccacttctccatgttgggcatcggagacatcgttatgcctggtctcctactatgctttgtccttcgctatgacaactacaaaaagcaagccagtggggactcctgtggggcccctggacctgccaacatctccgggcgcatgcagaaggtctcctactttcactgcaccctcatcggatactttgtaggcctgctcactgctactgtggcgtctcgcattcaccgggccgcccagcccgcccttctctatttggtgccatttactttattgccactcctcacgatggcctatttaaagggcgacctccggcggatgtggtctgagcctttccactccaagtccagcagctcccgattcctggaagtatgatggatcacgtggaaaagtgaccagatggccgtcatagtccttttctctcaactcatggtttgtttcctcttagagctggcctggtactcagaaatgtacctgtgtttaaggaactgccgtgtgactggatttggcatttaaagggagctcgtttgcaggagagaggtgctggagccctgtttggttccttctcttcctgcggatgtagaggtggggccccttccaagagggacaggcctctccccagcgcgccttcctcccacgtttttatggatctgcaccagactgttaccttctgggggagatggagatttgactgtttaaaaactgaaaacagcgaggagtctttctagaacttttgaacactaaaaggatgaaaaaaattagcaaaccgaagtttcttcaatgacccctcgagaactttgggaccagtttcctatgggggactcagtttcagagaactgagacagaagctcttctgtcgttatattcttctttcctttttttggatttattaaatattttctgtggtgtgaagtgacttattaaatccacagacattgagtgacttcttacaacatccacataagaatttgttgtaatgagttcatgtccacccagatgttgtgttggcagtgaacaagggcacggtttttatacatacgtacatatatatatataaacacacacatagatatatatgaataaacaaaaatgaaatcctgctaagatcacgctgtgtagctgacaggggcttgctgtcgttttgagcatgtcgagcagtttactgtggcttccttgtatatggataagctgctgtccttccccttcacaactgaccccgcagttacaaactagtatagcatttgtgctgattgatgatagactcatggacttcaggagcccttacttggttttgatcagtgtagcaaattagggatgaagagttcaaaccttttggccctttctttcttttctaggcttctccctcgcagggtgttccgtagtttcttctcgagccaatgcatgtattatagcagcaggtgtctttgtgctttctcatcatagtaacgtactacttgtaaatacatttttc

SEQ ID NO: 14175 - DNA, 1643 bp, Homo sapiens
atacttttctaactatcagcttttattttttgagtcattttacatctgtggctttgatgaacaacttgacattgctgtttttcaggttttatgagaaagctgaggagagtaagcttcctgagatattgaaggagtgcatgaagttatttcgctctgaggcactattcttgctgctctccaacttcacaggcctgaagcttcatttcttggcccctaggaagaagctgtccccactcgcatgattttgaacagtgtgttgatgttattgcttcgaattgcatcccgacaagcagtgatcacctggttctttggttttccaacccgcagacgacctgctctttgaattgcttgatttactgctttgaggtttcccaacagctctgtgtgattgttacagcgaattttatatccatttagcaagtctctattaaggtcatagagttccatataacgactcttcattgttttcatgtccctcatcagacgagcatcctcgagctccgaccagcaaacttcggatcaaattagaatgatcagccatatcagcactgagcttctgatgcactgaatgatattcatccaccttaactagcacctttcgtaattcctcaaaatagacaggaaaatccgcttctacttgaaggtcttcaatagcaaaaaatgatgccattgactggatgatatcaccagccaaatcaatatcatcagtatttatagtgatctctccactaagttttatttttatatgcaggtggccgccattccgtaaagatgtgaaaccacacttgaaatggagcattctgaatgtgagtgtcttctggtaacagaaagttctgaccgagccatacaacaaccctctgtgcccgttctgcaatggtaaagttaacataactgattggctcactggcagggtccaggctggtcagcgcatacatggagaatcgagggagctgtcttgtcgattcaaatacatgaaactgggtgctgcttctgtaacccacgaatgccttcaagtgcagatccacagggacatctttgggaggcacaatagggatgcagatggaactggagaggttgtgaatgctgggatgtaccacgtggctttcacctgtaaaaattccttctgcaaaaatcaatactgctcggatgatggtgtcattagaagtggaaatgcgtaattctgtatgagcagtttgggtctcattccccaggctgactgagagcgtggtgtggagcctggtattggctgggattatgccccgatgcccatcagcctcgttcagtggactggccaattcagccttggcattttcctcatagttacggagttccagcaacagattctgcttcttctgactcagctctcggatcaggtcctgctctgcactggtgtccatgaggttgcccctcatctcagccgtgccaggcaggtagccccggatttccccatccactgagcagcagattaactgtatgtggccatccatccggtaatctccctctaccacaccggcaattgcagaagaaaaattgtccttaaagatgacctccccagttcggtcacttcgagcatcaaccttcccattggaccaaccagttatcagttcattcactccatcagaattaaggtcaaaagcatgaat

SEQ ID NO: 14176 - DNA, 1366 bp, Homo sapiens
ttttttttttttttcactgtgcctggcccctttatttgataatttacacatacatttttgtccaaaactcttctttatttcaagatgatgtttctgtggctatgtgtggtatgtggtataaatctcaatctatggtcacacgaggggcattttccttgttgtaagtgtagtctaaaccagtaggaaggaggtttaattgccaaaaccagcgagaactcgggcactgtggatactacagtgggcagctgaacgaggaccaaggagaatgtctaagaggcctccagccctgcgctcagtgaagacaggacaggaacaacagagcatacataccttggaagggtgtgttctgatatactcgtatggaaagttctgacaggttttctccctgggaagtgcagcacataccccaacacactggctctgcccagtgtgccaatcccagatggtgcttgctttgtgtgcacccacacccaaacccctgccctcccatatgctcttctgtgtgcccaggtaggccctgccctcaggcagcagcttctgaacacattcctcttggcgcagacaaaagaaagtacttcgtctgtggaattcgaggctgagcctgagttctagcacaagaagaccattgcagtccagagatgagaaactggaccagaggcaaatcatgaacagaacgggagtcaagagaaggggtttctaagatggagaagtgggggcgggtgtggatccagtgggatgtggcttccccaggttgcaaccccaaggaagtctctggaagcagcaccagtcctgatgggggagcagaagagctgccatcctcagtcagggtccgagtcagggtccgaggagagctgctgctccatagtctcgcacatggcatcctgcagggacgtaagatgaccccggggactcatccccattggctggatgactctgttcctggagagcttgtcaaacatggtcaccagcttcatggcctcgtgctccttctgctcctctgtcatgccctccatagggttaggcggcttctcctccaccctcccggtcacagggtttatgctggctttggcttccttgtactcatctgtgtctgtgtcctcatcctctgagtactggccctcgggccggcctcctgccatgaggcccctggcagccagaaggccagcagcattcccatagcctgtgtacttgatgaatcggggcacactctcagagcacaggacaaacaagaactcggcagccaccctcttcacatctgtgtccaggtgtgtcatgaggcggacaagcttgttccgcagcatctccccaacctcaggccgtgtcctcacatcccgcagagggggcagcacctgggccttcaggaact

SEQ ID NO: 14177 - DNA, 1037 bp, Homo sapiens
tttttttttttctcagaaagaaacatttaataggaacttacaaacagaagcaatgtttctagcagccactaaatggcggcactcaccctcccaaaagtaccctttatataacaagcatttttggcaaaacgtgtagctagtcatatctcagactttcttgtgaaacacctgaacactggggaggttagataagcatctttatgaggggttatctgtactaccggcactgtttaaagacattgctgcagaatatcttggtatgcaggagtcaaacagcagtcatcatgccagctgctcttcaagatgacatcactcttacaatgcaacaggctgttttcctacactcgacccctcgaaaccagtccttaaaatcttacatgcctgcttcttctgtgatagtccctggacctagagggagggtgcttgatattgtatggctttagtagtattgcaatggaaatggaaaacagattgggtccagtggaattcccacaagagggagatttgccaggcttggttgaatcatctatatagtcttcataataccatgaagaagtaaaacaatgagaaatacataacattaataattggagtagtagaaatctaaataaagtaatatgatgtttaagatatcccttgccttaatagcctataaatatgggaagagtgactatcatcttctgaatttcaagacccatatattccgacagtttcagtaatatgaagattttggaaattctaaaaggttttgagatcatttctaatcaagcatttagctcttatgttagcattaattgcagccccaacttttgcaacttattgacctgcacatttttctgagcacttactttccttatgtcagatgtagggaatcatgagatgaacaagttttggttcctgcactgtagcaaatgaatttaggcaaagatatgaaagatgaaaaaaccctatgactatatgacttttagtgtcatgaaactgattactatataatcttgttattcttcccattgcttgactttaaaatagggcaagtt

SEQ ID NO: 14178 - DNA, 566 bp, Homo sapiens
gaggtgaagagggtacggggtgagccccagagccttgcgtgtgcccactcaggacagccatagtctgctgctgcccagagaaaggggctggctcaaacctagctcccaaatcttttttctatgcctttttcctttttcctcatctctttcctgaactatccagatatcttcctgcctcctgcctcctgcttctagggcggctcaaatgcccatgctgccccatccctctgggctggaggagcaaacccctggaggctgaaagagtaagttgtctgcagggaacaagccactgtcctgtggcgggtgcaaattggtatgctctgtcactgagaaaccccgcagtgtatacctgcggtaggcaagggcctgataggatgcgctgaaaggagtttctgtcccgtgggaggaaaagacgtgagtcctgtatgttctccagcaaaggtagagggtgagaggaccagaggcccacacagggggcatggctgggagtgcaggggcaggggggagtctgggaggatggagggacacaactggagtgggtgctgggtggacttcatgcattcctt

SEQ ID NO: 14179 - DNA, 1627 bp, Homo sapiens
atagatactagattgtattgaattctgttttaattattctctaggtaagtatgttttaggattaaataccttttacagatactgaaagtgcctccttttgtggtgtaaaaaacaaattatggtgcaaaaagtaatcactagattgaaatacatgaaggttttttgctttttgacatacgaaaatgtcaagagaaaggccaaagatttgtactttttcacttacaaagcactcctttttcccttaaacttctttctgtcaaattagatttaatgagagagtactatttttaaggagctatctgtttatgtagaatgattttgttaagagtaatgtaaactattattgagtagaggcctaaagaggactgtgcatttttgctatttaaaggaatcacaaatgatcatacttaagtgagcaaaaatgacaagttttactagctaagtagagaaataaatctcaaatgcagcgctacaattttcattatcttaagtacattgtacatttctacagaacctgtgattattctcgcatgataaggatggtacttgcatatggtgaattactactgttgacagtttccgcagaaatcctatttcagtggaccaacattgtggcatggcagcaaatgccaacattttgtggaatagcagcaaatctacaagagaccctggttggtttttcgttttgttttctttgttttttcccccttctcctgaatcagcagggatggaaggagggtagggaagttatgaattactccttccagtagtagctctgaagtgtcacatttaatatcagttttttttaaacatgattctagttaaatgtagaagagagaagaaagaggaagtgttcacttttttaatacactgatttagaaatttgatgtcttatatcagtagttctgaggtattgatagcttgctttatttctgcctttacgttgacagtgttgaagcagggtgaataactagggcatatatttttttttttttttgtaagctgtttcatgatgttttctttggaatttccggataagttcaggaaaacattctgcatgttgtatctagtctgatgtacttatccatctcattacaaacaaaaacacacagactgcatttgtagctctgtaatccttgaatacggaagtaaattttcttctttcctgactttgacattgtagctatactgtttccatttttgtttttacaaatcctttgggtctaattctgtgagcctacctatagcactggattaaaatgtctgcatcatttctttagttatccagttaactttaaaactgttgtaaaagtgtaaacccagcccatgacaggtttttgtacatgttaaagaacttcattgttcagttttcatgattattgtgtaaggaagactgatgtagatgttctgtgctgtcctggaccatgttaattacacttacgacgtattttagttccacatcacaatgatttgtccccagtgacccttttatcctttctaggcacatttcttgttgttgttgttgttgcagttcccctttgcattgtattgctttgacaactgtaatttgaatcagatctgaaagaggtccagaataaaatatattttgatattaaaaaaaaaaaaa

SEQ ID NO: 14180 - DNA, 633 bp, Homo sapiens
gaacctgctgcaggacagtagtaccagtgatagtgacctgacttgtgactcaagcacgagctcatcagatgatgatgaagaggtttcagggagcagcaagacaatcactgcagagataccaggtcatttggatccaggattcctagcaagtgacaaaacatctgcctggcaatgcgccactcaatgaagaaattaacattgcgtcttcagatagtgaagtagagattgtgggagttcaggaacatgcaaggtgtgttcatcctcgaggtggtgtgattcagagtgtttcttcatggaagcatggctcgggcacgcagtatgttagcaccaggcaaacacagtcatggactgctgtgactccccagcagacttgggcttcaccagcagaagttgttgaccttaccttggatgaggatagcaggcgtaaatacctactgtaatacaatgtcactgtgtttcctctgcactgttcccttccacttcctcatcctctttgtgacatggaagttcattgtcatagcttcagcttcagaagctgtttgtggcatttgtaggattcaaactcatggaaaattccctcctcttcccccctttttttaattaaaagaagtcacttaggaaaataaaaaaaaa

SEQ ID NO: 14181 - DNA, 346 bp, Homo sapiens
attactttgaagaaaaacaaagaaagccaatattgtgtcctcagagattttcaggaataccttgctgcagttgaatcttcaatgaaagccttgttgacagacaaggaaagtcttaaagtaggaccactggacagtgtaacgtatctggacaaaattaaaaaattcatagcatccatagaaaaagagaaagattctttaggcaacttgaaaatcaaatgggagaatttatcaaaccacgtgactgacatggataagaaattgttggaaagccagattaagcaacttgaacatggttgggaacaagtggaacagcagattcaaaagaagtattctcagcaggtagtgg

SEQ ID NO: 14182 - DNA, 837 bp, Homo sapiens
gtctcctccaagatggcgagcggcggcacgggggggtgtcagtacctgcgctgtggagtgaagtgaaccggtatggccagaacggcgacttcacgcgcgctctcaagaccgtcaataagatactacagatcaacaaagatgacgtaactgccctgcattgtaaagtggtatgccttatccagaatggaagtttcaaggaagctttgaatgtcatcaatactcacaccaaagtgttagccaataactctctctcctttgaaaaggcatattgcgagtacaggctgaacagaattgagaatgccttgaagacaatagaaagtgccaaccagcagacagacaaactgaaggagctttatggacaagtgttataccgtttggaacgctatgatgaatgcttagcagtgtatagagatctcgtccgaaactcccaagatgattatgatgaggagaggaaaacaaacctttcagcagttgttgcagctcaaagcaattgggaaaaagtggttccagagaacctgggcctccaagaaggcacacatgagctgtgctacaacactgcatgtgcactgataggccaaggccagctgaaccaggccatgaaaatcctacaaaaagctgaaggttggaagtttgttaaacttatctgtaaatataacgtgcatataactttgtagagtatcttctaaaattgcatttgacttctgtgaaattattaaatggaagttattgatgcagtgacaatttctccaagttcctgtcgtctttctctctcttttttttttttacagcctgggcaacagagtgagacctccaactttaaaaacaaacaaaaaaaaa

SEQ ID NO: 14183 - DNA, 432 bp, Homo sapiens
  misc_feature (1)...(432): n = a,t,c or g
gcaagactctgtctaacaacaacaacaactatagctatagatatagatatataggattaactgcatatcctatcatgcatttcaattattatatattaaatgttctctctttagtatttcacttcacatctctgctggattgaggatctcagggagtgttttacagctaacgtgtgccagacttccccatctcagtcccattctagggccaactcatggatggcatgccctgtccgggttccaataggaggtttgggcgggaaggaatccttacaaacaccaaatccttggatctgtcctgtgggaggcctggaatccatctggattgggccccaggaatcaccctggatttttccctggaattcccttcngggcaangttggggcccaggnttagggacccatgttaaaggcccggggggggattgttggg

SEQ ID NO: 14184 - DNA, 1739 bp, Homo sapiens
  misc_feature (1)...(1739): n = a,t,c or g
gcagtatgatcggtgtctagctgaagttgtctttaaatgcccttactcgtcacagtttaaacacttaggatgtggcaatcttaagtatcaatggcattttatgtccagctaacatcctaaagcattagaaattaaaaacgaaagacttttaaaaacatacatcaaacatgcttgcaccagagaagctttttaaaataatacactctcatagccaggtgctaatttaattttacttatgaaattaagagaggtgatgggttctagcaacagatattttcacggacatattctaaaaccactagagaattcgctacctctcagagccatcgatgctttgagctacctttattaaacagggcacaaatgtttactgctgtggtttacaagaaaagggctactcacttattttgaaaccaacgaaccaacttttaactagggtgaacaaagcactcaaaagtgctttgtgaaattggagcatacagagattttgagcttcaagtatttgctagttttaaaaagaatacaccttttctttaccttgtagcagcaattaaaagtcacacaaagcttgcatcgagtagggccaactgccacttgggtagcctatggtcacattcaatactgagaatgacttggaactcacagattaatatgaaagaagcagcgttcatcccaagacccatgctcacaattacagctccgtgccctgaggtagagttggagatttggattaagaaatagatttctaatacgactcaagatcatcctacaatattttctttggaaactaatttagcccatgatattttaaagagagacaagagaaggcctatttatcttgtctaagtgaacggcatttgtatattcataagctatttgtggtaagaattttaaatcttttagctcaaggcctacagggcatcatgatctttgccttccttgaaaatacaatttaaattgnacaaacactttataaaaagctaattattggtgttagaacatgaccccacacaatgctgcttgacccctgaaactgacattcatgagcataacctttgttacattgttctttttgatgtaatttgtagaaatgttttttagttcgtaatggaaaatgtatgtaccctgaaaaattacttattttgtttaactttggtataaaggtgttgggcattttcttggggagggggggattacaaaagaagtttgtctcccacatcaaaaaacgttcaaagaaattaagtatttattatattttttgcagatgtttccatacaattcacataacctttttgtaaagagagatgaagaaatggattaaagatttttaatatttgaaatggtaaatagaactaatttattgtaatatatttctgttatttatagatgtttccttaatgttttactgtgcattaccactttcatttaagccttatccttgtgaatttaccatttcttttttaaaacatgtctagatgcatattttaaataactggaatgtaaatcactagcatatctgaattcccaaatgtaatttttaaaaattattttggtttggaaaaaaaagattcatttgaaagccttcagatggaggggtgggaacatttttatggctttatgaattggaatttcataggcttatttacctagattgtgtgtgaacaaaaaaatattgtaaatagatgaatgtttcccataatgtaaaaagaagaaattaataaaataattaatgcactgct

SEQ ID NO: 14185 - DNA, 1391 bp, Homo sapiens
acaggcagaaactctttaatcaggctttttttccaactctaaaacaaaatcccattttttccttaaatttagttcctcaggaacagagaactttgcaatgatgatctcaactctgcatcatctggtgactcctgattctgcaggactaagacatttcccaagagttctgctgcatcagccagtgaggacaagagttcttcagtgcggttcagctcaaggacacctaggcttccccagcagggggcttgcttgcaggtctgacaaaccacagagcgttgagcagatggcctgggactcccaggacctgggcagagggttttattagggccccgcctgggcctggcaccgtttcatccaagtaccctgacccagcactcatcttccctggcattctctgttatccaccagctcctctgcacacctcagcgtctacttccacgaacttctaaacatcaaaaggtacaatggccaggggtgcggcaggagagtcgggggcagggccagcctttcaaattccacactattgaatccacacgatggaaagaagagaaagatggggaaattctccagagatcatgagatgcatccaggcagtgttctcatgtgagaggatagggaggccaaaaactaaaattgctatcagcccccgccgctgtctggtacgcgaggaaactttccgaggactttacaagcatagttgcaaaatgctagtaggtttgggactcttcaactttctcttctagggccaagtagactcggtgtaacttattttgtaagaaatgggtatgggtgacaagaggggccaccttccacccctgcagcagagtggtaagactccagcgtgggccctgtgcaagggaccagcccagaggccatgagccacagaaactcacagcacctggtggccacaccctgaaatgcaccctttgctccaagcagccagcgccctatcaacctggcatttaccaaacatctcaacagcagaccagaactagaaaacacagcttctgtgtagtacacacttatggtctgagacccaactaaggctccctacatccttcaaaactcagactccacaggctgaatgtccagcttcttcctccaagacagaattgccctcagcccacgaattctctctgggactatttacagaatcaaaggggaaacccacggaactgaaaacctctttacacaggtgggttcaagaagaaagccaccaacagaaggcaactcaggagggagaggccgaggctggcaaagcccctgggcctatttccaagcagccacccctcccaacaagagcagaggtgcctctcacctcaaccctcagccctttaacttctggctgggccactgattctcctccccagtctgtggcccatctggaaacc

SEQ ID NO: 14186 - DNA, 1605 bp, Homo sapiens
  misc_feature (1)...(1605): n = a,t,c or g
ttttttttttttctcacttccctttttatttcctctaagacttgcaagcagcagcaccagagagggaacctgccctcctggccctggaagggccgaacccccaacccctaacccaggacacagctggcacctcaggcccctttccttctgaaaggagggctgtgtctctctcacattcacacatacacagacacatgcatgtgtgcacactcatggcacatgggacctcaggggtagcctgtttgccgatccccccaagaggtaccaggaggcagaccgctagaaggagataagaggcaccctggtctcctccaacccaaggaggaagaaagctcaacccctctaggatagggactgtcttcagtcaatggagcgttgacttagggggcgtttttgaaggttttttttcctcctttttgcagtctttacaaaaatagaacttctcttggtatttataaatctacggccatggctctatgtgcatgttacaggtagaaaagccatatggggcactccttttggttgctcaggccttgattgcctgtcatccaggtcccttggtctgagaagtctatgcggtcacctcagagccgctaagcaccttcagtgggcccatcccattggcggcgtactcctgctggagccgggcacggtaatagaagaggtaggaaggcaacaggaatcccaggagtgagaatagcaggaggcccagattcacctttagggcaaggagagagaaacagagtcaagtaggtagtcatctgcccttagccctcccacagggagaagaaaggcggccatttttctccaggtcctgagccagaataaatacagctagtacttattatgtgtagtcattgttccaccagtatctcacttaatgttcagcaattctgcaaagtggctgagatgagacttctcaggtataacaagtggcagggcctggtgggtgcccacaccatatggcactcactaggtaggtatgaggaaggcacagcactgtaggagtctgggctggtcaggctgctcccgaaatggggccttctgggctcacccctctgacctttggagatgttaaccaatgggatcccgttcagggtggcgagaggaggctctcagacacagttcaaggaactgggatgcacagcctggtggacagaaggcttggaaggcccaggacacgcgggctctgactcggttcacatcccgactgctgcattactcactgtgtgactttgggcaaataatggcaattcttactgagtgcctccttctcantggctgntncagtacgnatatnnaanntancangnncgncngccntgngatgnctnncaaccgngtccncgcnatttntcacntanaangaacngatntcntnaccgttcannannanaannaatntaaacccnngtggccccacagggcagaatgaaagatcagcgtcagggaggcagatgagttcaatgtaaggaaaagacttactaacagcagcagggctgcctcgtgcaggagtgggtgccctaccactgagggtatctaagctaagagggaagggtcccctttcaggggtgctggagacaggatcccacactaggtagaact

SEQ ID NO: 14187 - DNA, 490 bp, Homo sapiens
cgaggccaagaattcggcacgagagcaggtggagaggacgtgcggatgtgggggtgttgtctgcagaaccaccaccttgaaagatccatgttcttagagcctcagctgctaatattgttgagtgctttctggaaaagctgatttgttgctatgttttcaccccagtggcatggcgcagttgaagtctttgtggacatatctttgtggctactgtggctgcgctgtggtcacctgaggatgtggttcaggtggggtctccagaaggctgcttgcccccagagagccatctcttccatttttgattcattcctgagaatggcttagtcctgagaatctgcaaagtctctgaagagaactctctcttcccactaagtgatataacctacttggccagcattccaaatagactcagactcactgccctgagcctgcacagagccaggtgcaatgggcagtgagtctggccaaaatgtaaaccccaccctccctg

SEQ ID NO: 14188 - DNA, 696 bp, Homo sapiens
tttttttgcacggtgaaaaatacattttaatccaaaagttttgaatattggcacttagaaagttatttacaatcaattttactataccctttgtgaataaagagataattatgtacgtgtagctacctatagttgtttctttccaactcaaacaccataactatgtggaaaaagggtaagagttaaagctgctgcagctcaaaatcattacaatcaacttagattctgcaaattttcccagggttgaaaaatgctggttaaatcaggacaaaagaggaggcaagtgagtacaccccactcctctcccattttacgtgttgctcccttacttaaccggcaaagacctgcacctgaattctagacaatttcatatacaacaggcctcttattatgggtccatagcagatggtttagggtagatgttttaaagatatcaatgctaatggcctaccaatgactttcatgacctcccaatattcgttttaatggtagtcaagagactatcaagcaggaagcctgatctcgacatgtttcctctgcggctttggtgaagctgactatctgcagtataaaatcttatggtttgatcgaagtctcatttttgactagaaacagtaaagagcagctttattaagatcaatggaatggttctgaatgcctgtttctacagaaggattaaattaaaattttttcttt

SEQ ID NO: 14189 - DNA, 942 bp, Homo sapiens
  misc_feature (1)...(942): n = a,t,c or g
gaattcggcacgaggtttagggggagatgcggtcccaggnnctagtctccacgtgagtgagactatggagaaaacctagaaaaagctagaatgagccactttgtcacctgcctgactgaaggaagaaggaaatgtatagtaaaacctgtacactatgacagggtcaagaaaattacccagagaaagaaggagatcccagtagtcttcctcaatcgagtccctgaggcccttgggaaatgcacccatgcagacccagaggcagcagaggggaagcatcgcgtgccatgcattttatccttcagtcagctccggacattagaaggaaattacagaaaatttggaggccagaccccagaccctgctgttgactttggcagaggcggcttttaaggttttcaataacggacaggacacagatggcaggtaagaagaggagactgaccaagacagcacagcttctggctgccctaattcatccaccatcttcagggtgaccctaggattctcaggagaccaactaatcgaagacagccaaccttggatggagccaatgtgcctactgcaggatggagggtgtcactggaagagaggctgccctgacctccttaaaacaggacagccggcagaagacctggccagccgccactcctcaccaagctttcagatgagattgatacacaccgcctgacagcaccctggctctgactgcagcacactccatcgtcatcacaccacggagcctcaggtcacccttgatgtggcagttctaggaactggccttaggaaatctaactatgaaaccaaggttatggagtatcccacctcaggaaggaacactgaacaactgattgacagtcttcttgccgccagccagaccaccaagtggccctttaaccaagagaaccagcgcaaccaggttacggttgacccgctttttcttac

SEQ ID NO: 14190 - DNA, 1896 bp, Homo sapiens
aacatagaaattgccttttgttcatttgaaaagtaagtatgttgtatctgaaaaagggctctgcctctgctctccctcgcttccttgtaaccaatctccaaacgaatctctcctggcaccgcccccttccttatatagggtcactgtccccggggccacctctgcctccaccctgctgtcaccactgccctgggccaaggcacccaggtactcccagaaagcgcgagagccagcaataaggccccactcagccttgaggactggtggtcacacctccctgtcagagtcgcctgctggggttgaaggggcaatggattgtcattgttgaaattgtttggctcaggttataaggaggaacttgggaagtagaaagtgacttgaccatgtgcatccttggtagcttcctgtaactaacaaatggaacagagagcacacccccgccccaccccaccccaagcagatgttcccgtcagcgctgccctgagtcagtcggtcccccgtttctgctctcctcccttttgtgttcctgctcacttcaagcttcttccatggactttccagggcacagtcatctctagcccccaaatcatctcttcatcctctgtgtgtgcatttttttaaccaaatgaaatagacaagaaagtcatactttggggcagcagaatttctaatttagtagaatcactgtatagagatagatgttgatatatatgtttgtgtatatatatcaaaccaaattggataggagaagtatagctttacagatgaggagaaggagctctttagaggtcggagtcaagactggtgtcttggacgtgcatgggctgtgtcccaggccactccgcacacatggggctgaggcgtggcgccgggcccttgtcatccacctcaccacggcagagccagcaggccctgtagggtggctgctgctgtctcactgggtcccagcttcaagcgcatcagtgggtgacgggggcaacaaatcagagtgactggaagtttccatcccgttttgctttgaccacgtgtactgagctgcagcctcttgatactctgtcacgtttccaaaaatggtatccattaggatagaaagagaatgggatcttgcagaaatgtttacctttcaactgctcatgaattcaggacactggatagaaagactcactccccaaaatgagaacagggaagaggagacccggcgacactaagtcaccaggtccaaggaacgtggctccctccccagggtcatctcacctagatctttctctcccaggtcatctcagctcaatctcaataaccctatgaaagccctggtctgttgtgttccttcaccgtacggtttctgtaataaaaagtgttaatccatgttaatctgtgtgaaaattattgcgtgcaacagtattttctcgtgtacctctttttcctatgtgaattgtccctcttttttatttataaatgtctacttttgtttttttaaagacaaaccaatgtgttgtagacctatatgtaacctattccttagtctcatattataggtatgttataagaatggatattttacttggctttagaatgttttacaagaaaactaattcttaactgatcaagtccttgctactaaaatgcttgtgtttttcatcatgacgtcgtgtgcttctaaattaatcattttcgttgtagaaaaatggagtgaatttatattagtcttggaaactaataatagcattgtaaatttatgagatgattttaacagaaaaaatatagaagaatatagttattttaattgtaatattaactgtagggtgagaaaaggggggggggtccccattgtggtgaactatgttatagcttgttactcatagtttctttttgatcattttttcggtctccgaggtg

SEQ ID NO: 14191 - DNA, 1149 bp, Homo sapiens
tctgaagttggggtttaagattcttgcccgtgagagcgaacgagcctgccgtgcttctgattttgaaacacctgggtctgggcttcccgggcgagcggtggaacctgtgagaagtttctacaatggtgggctcagctctcaggagaggtgcccatgcatatgtctacctggtgagtaaggccagtcacatctccagaggccatcagcaccaggcctggggatcgaggcctcctgcagcagagtgtgccacccaaagagctccaggcagtgtggtggagctgctgggcaaatcctaccctcaggacgaccacagcaacctcacccggaaggtcctcaccagagttggcaggaacctgcacaaccagcagcatcaccctctgtggctgatcaaggagagggtgaaggagcacttctacaagcagtatgtgggccgctttgggaccccgttgttctcggtctacgacaacctttctccagtggtcacgacctggcagaactttgacagcctgctcatcccagctgatcaccccagcaggaagaagggggacaactattacctgaatcggactcacatgctgagagcgcacacgtctgcacaccagtgggacttgctgcacgcgggactggatgccttcctggtggtgggtgatgtctacaggcgtgaccagatcgactcccagcactaccctattttccaccagctggaggccgtgcggctcttctccaagcatgagttatttgctggtataaaggatggagaaagcctgcagctctttgaacaaagttctcgctctgcgcataaacaagagacacacaccatggaggccgtgaagcttgtagagtttgatcttaagcaaacgcttaccaggctcatggcacatctttttggagatgagctggagataagatgggtagactgctacttcccttttacacatccttcctttgagatggagatcaactttcatggagaatggctggaagttcttggctgcggggtgatggaacaacaactggtcaattcagctggtgctcaagaccgaatcggctgggcttttggcctaggattagaaaggctagccatgatcctctacgacatccctgatatccgtctcttctggtgtgaggacgagcgcttcctgaagcaat

SEQ ID NO: 14192 - DNA, 455 bp, Homo sapiens
ccccctatggaaaagcagtggcctgtgaagctgtttctttaaagtaaaaccccttttgaaggttagtctggggtgacctttactgttacatagggagtagattttgtttcttgatggttcgttgagtggtagagaggttaaaggtagaactaacaaatgtagaactaaaaagcatctgaaacttttagcaaaccagtaatatttagaggcttctgcccactctgggtaggcatttttatcttgtatacccataccagcttttcacatcctgtttcttgagaatacataaagagcagatttctccacattatcaggaaaacaatttgaagcacaggtcttgtgaattgggaagaccactagtattgccattagctgcttatttgtgtgtgtgttggaggatggattataatccaagtgtattcatattctcacactttaaccaaaaaaaaaaaaaa

SEQ ID NO: 14193 - DNA, 618 bp, Homo sapiens
gaacccttattgctgtctatcaaagtataatgtgtttggactccatttctgctcaccattcctaggagaatgggataagtatgggtatgttttgtttgggcccttagggtgccattattatccatgaagtttatgaagaaggagcagcatgtaaagatggaagactctgggctggagatcagatcttagaggtgaatggaattgacttgagaaaggccacacatgatgaagcaatcaatgtcctgagacagacgccacagagagtgcgcctgacactctacagagatgaggccccatacaaagaggaggaagtgtgtgacaccctcactattgagctgcagaagaagccgggaaaaggcctaggattaagtattgttggtaaaagaaacgatactggagtatttgtgtcagacattgtcaaaggaggaattgcagatgccgatggaagactgatgcagggagaccagatattaatggtgaatggggaagacgttcgtaatgccacccaagaagcggttgccgttttgctaaaagtgttccctagggcacagtaaccttggaagttgggaagaattcaaagctggtccattccattcagagaggaggccatcttcaaag

SEQ ID NO: 14194 - DNA, 1308 bp, Homo sapiens
gcggcacgagggccaatgttggcatgaggttcttgctctacttccagtgttttgattccactgggagaatttggcctagtgtgtggctttggatgaatccgtgtagagagaggtgagcttgtcctgttacagatgctgtcagacatagcgatagtaggcacctagggaggaagtggccgttagttttacactgactttttaagaatggagaatgcacgtgggtttctgttgcggatgattcatagtaagcaagcggttgatgctgttaataccggccccacccgattgacattaagtttattcagcttttaaaaagatgaagaactaaggggaacaaatttaagtttgttgcaacttagccacacatgcttccctggtaccagctggaatcagcagctcacaggcatcttcaggacacttcagtgtatatgacacagtactttgttagcgtctgcgtgtgtatggaaagttgacaaaaaatggcatgaaaagatcatgattggattttcttttaaacctgcccttctgtaaaaaatagtttatatatttttaaattagtaggtatgtgtggcttccttttttcctaacattcccagcaaatttttgctgctaagactatcactgttaaagtgaaaattacaggggaaaaatgtgatgaatataccgtaactcaaaatgtgatattttcttaaaatcactcttttatgctttaggaactggttggtctccactttgattattagtgtaaagagcctgagtatacgtggatttcattgtaaaatttaactccttgtcttttacttggggcacggggccctgggagggcttccctactttccccactatgttaacaggtaattctgatttatgcctttagtttgacttatttttaacaaaatattagaagttatgctttaaaatgtttaatgtggactgaaattttcatcttttgtttgagaatctatgaagtgtatcatatacgtggcctaaagcaaggtgtgtattttgttattctgaaattgttttgcatctggacaaatactaaatatcccagtggcctttttttttttttttaaacctgtgtatccatctcatccttttgcgcattcctagtacgcaaattaatttgttatgccatcttcattattctaattacagactgaaaaaatatggccagtttttaaagaagtttagattatgttttccatggaaggacaagtctgactgttcataggctgattttctttaagaggattattctgttttacaatttcaattctagatcacattttatatatgctgcatgcc

SEQ ID NO: 14195 - DNA, 338 bp, Homo sapiens
gcaaaagcttgcttcagattacagattgcagacttcttataatatgtccatttcaccaggccccgctctcagccccgggaaaggccactggaaaccacctcacatggtagggccttgcaggagccagtaataaccttatctccgtcaacatgttctgtcagattgaatggggcagccagagaagccagagttggcacaggaaccaaaacaaaggcttcccatcctcctggagtgagcggttgagcctggattggtgcttagacctataatgggtgcaagcagcgttcattcatagtggctttctagacccagggacttggccccagccctacaactcc

SEQ ID NO: 14196 - DNA, 368 bp, Homo sapiens
gaatccagttcttgttcatactgccttgtagtgagggcagtttaatatctacaaagaagcttttagaagctgaaaaagtcaatgtgattgtgcattctgcttttaagaagctgtttcagctatgaactgtgtatgtgctataagtgtgaggtaccataagttatttaatttttaaaagaggaaactcctgagtgagctgtttaagaaatctgagtgtgatctattgttacgttatttataactaggtaaaatgtctgtcgtgatagatttcttttaacgttcagatactgtggttgggttgtctatatttaatatgcagatttgcctgctggaatcataatccatttttaagtgaatgtaagaaatga

SEQ ID NO: 14197 - DNA, 485 bp, Homo sapiens
gtgtggcggaggcggtgagtgcgcggctccggggctggccgactccgctagtggcccggccggcctgtgctcgggggctccgggctctgggctctgggtgcgcggaccgggccaggctgcttgaagacctcgcgacctgtgtcagcagagccgccctgcaccaccatgtgcatcatcttctttaagtttgatcctcgccctgtttccaaaaacgcgtacaggctcatcttggcagccaacagggatgaattctacagccgaccctccaagttagctgacttctgggggaacaacaacgagatcctcagtgggctggacatggaggaaggcaaggaaggaggcacatgggctggggcatcagcacacgtgggcaagctgggcagcacttcaccaactaccttgcagccgcagctggactggcaggcccgagggcgaggtgaacttgtcacccactttctgaccactgacgtggacagcttgtccta

SEQ ID NO: 14198 - DNA, 911 bp, Homo sapiens
ttttttttttgcttggatcgggtaattttcattccaaataaacttatcacaaaaaaactcagcttcccaaggtcattcccccgctgccagatacatacttatctctgaaagagtttggaagatggacctttcaattcctctacaattagtagctgagttacagagtaacctgccagcaatcctatcagcattcatcagactatttaaatagagcaaagtccacaaaaagttccactgagacatgctgagcaaaggccggagccccagaagaaaacaagtacagactcagaggaaagctgccctggtcctgagtgtgactcccatgggtccccgtggggttctgtgtgggttgggcaatgagctctgtgctgtcagctttcatggagggagctccctggctggttcctgttctttggggtcttcctccccatgactttgctgctgctcctcctcatcgcctacttcaggatcaaactgattgaggttaatgaagaactgtcccagaactgtgatcgccaacataatcccaaggatggctcttccctgtaccagagaatgaaatggacgtgaagttggtgactttccaataactaaagcacaatgagtttctactggtcagcaagcaatggccaacagttcagctaataaagtaggttgataaactagaaccatagcaaaatagaaagaatactaagatactcattctgaaccatactgaaaagtggcagctattatctaaggggacttctcagagactcagtataacagcagctcttgaaaagtaccaagaatggatttcctgggtatatacactggacacattgtaactttttaacttttattgtgactgtgtctgctctaaacgggcatatttaaaaaataaaattctgcagcatcttactacataaaaa

SEQ ID NO: 14199 - DNA, 478 bp, Homo sapiens
gaaaaaagaaaaaattatttaagcctcacctctttccaatccgtcttggaaagaaaccctttgagattaggttgagatgatctcagcacataagaactaagctctgtgtctgcaggtttcacaatagaggaaattaaaaccaggataagaatgtgcaaaccagggcactgttggtgatttgcgagatcggaagttgtggctagaatcttcctgactatggaggaaggcagacgtcttgtatagggggtggggtgtacattctggacagttcatggaaaataaggggataagaaggtgaatcatcaccccctcccatctttctctctgctctatgagaccctccccttccttatttttatctcttcccactttatgctgggccttccctatcctgccctgagttatagttagtcactaacttctccgctggctcccacccttatcacatctcagctacatatataaactctctgttatc

SEQ ID NO: 14200 - DNA, 1268 bp, Homo sapiens
  misc_feature (1)...(1268): n = a,t,c or g
ctggaaccaggcttgtaatccatagcatcaccgactctgcaaaggatttcattttggggcacagcagggtgttttaagggctgtgacttcagctaatgatcttttcttcagccccaccccctccccactagctcgatctagtatattggggaatgcaggtgggggggtgttcaccatattttttctgagctgggcctttttttctcatcagattgtccaggctatattccacctgcctcttttgccctcttgagtagagttgcacacagcacatgggcaactgaagcagggttgaggggctctatctctctctctcctctgctgatgggacccttttcccctcaccctctgcccttctaagtcatagactaggtaggaaggccctatattggtccccagcatctactgaggcagacctgcaacagaagtggcattcagtccccagcagacatgggtgagctcaccccagcactgctgttgggaaggtgactgcaggaaaccaattcttacaagatccaggcccagcctttttgacctgcttgagagggaagaaggggtgtttagcatttaatagtttgcttgtcttccactcctgccaggaagtgtttatttgcctctaattgggcctgagagaccatagggaggttggggctcactgagggattggctgaggatgtataaagcaaaggctgtgagaagcagttgggagtttggttgtcattggattgaatttacttttttgtttctcacccgcaacttgagccaggacagctggtccaagtggccacagtgatgggtttaagtaccttggtagggctggcaccagtggaaacacatactgaagctgccaccacaatagcttgtgaggttttatccagctttggttagaccctgcatgaccaaatttgacctgcccttgtttatggcaagaagggcatttttctcttcaatttccagggtttcctaggacccagttcctcatgtaagggaggaagaccaaggtctttgtgttttcttcctcatggaattgaacctgacattttctggatctcctgcatgtcaggagcatcagtgaggcttcagctccttcgtctccactccagagaggaggtggctatgtcttcttaagcctctggcccttcagagggttcctccctatcttcctgggcttagttaaccactagggttaccagggtcttttaggggggcctgagagagggcctcttaggagaatccaggggaaactntgagcccaggattgcccatct

SEQ ID NO: 14201 - DNA, 970 bp, Homo sapiens
  misc_feature (1)...(970): n = a,t,c or g
tttcaccagcaattctctttaatcctctttcttttccttctaaaagcttttgcaaagtccaatttatttttacagtaaatagattatcttttaagaaaacgcactagcaagattgtagcaaagtgtgtttatgcaaacaggtggtgcagagacagaggggcggaccttgtgggcagctggaggaccatcccagctcatgggccacgcacagatgggagcacctcagtgttttcagccaagagaacacaagtctcgggatccatgtggctccctcaggccctggacccaggcaggcaggacacccttgaccatggggcaggggacatcccagcatcttgtctgtacccccaccacctgcgtggcacctggtcctcagacacctgcgtggcacctggccctcaggcacctgcgtggcagctccacgggccaggcccactgtccagttgctcctgccctggagttggggccgtggggagggaaagcgcagtaatagctgagtgttcagaggaggggctgggctgcaggcattgctggttcagattggtgctctccacctggctgagtgaggcggcaggaagcagcggccggaagattcctagagcttagcagagaaggatgcgaaatccggcagccctttgacaccgtttgggaacgtcaaccatgccccgccatcggccaccagcacggcccccgtcacgtaggaagccagagggctggccaggtagagcacgctgtgggcgatctcggtcttgttccccagcctctgcagcgggctggcagtgaccttggtgctcaggctggcctgagggccacctggagggcagcagaaggctcaggccccgtgagccccaagacccagcaccctcccctctccctcgtgccnnnnnnnnnnnnnnnnnnnnnnnnnnnnnnnnnnnnnnnnnnnnnnnnnnnnnnnnnnnnnnnaacgggtnttcaaanggnnntncaa

SEQ ID NO: 14202 - DNA, 383 bp, Homo sapiens
  misc_feature (1)...(383): n = a,t,c or g
gggtgaacaggacagacttgtccaccccctccatgaagctcccagccctgtgggggagaaggtgcaacatacaaattgcagtagtccttcacactaatacctggacacggatgttcactgcaacattattcatgatagccggaaaacagaaacgggccaaatgcccatcaactgagaaataaagtgtggtctatgtagtggaatattaccgggccttaaaaaataatgacgtcctgctacatgctgccnnnnnnnnnnnnnnnnnnnnnnnnnnnnnnnnnnnnnnnnnnnnnnnnnnnnnnnnnnnnnnnnnnnnnnnnnnnngttgatagagtatcttgaataggcagatccatggagacagaaagattagtggttgccta

SEQ ID NO: 14203 - DNA, 813 bp, Homo sapiens
ggaggaggacttgaacctagaagatagaggtgaggaaactgttttaggtggtggaaccagggaagcagagagcagagcatgcagtgatggaagaagcaggaaaagcaagaagaaaagacagcagcatcaagaggaggaggacatcttggatgtaagggatgagaaggatagcggggctagggaagcagagagcagagcacacactggctcaagcagcagaggtaagaggaagaggcagcagcatcccaagaaggaaagagctggagtcagcactgtccagaaagccaaaaagaaacagaagaagagagactaaaggtctggtaaaggtagggctcaattgattgattttcaggagttgaagcctcaaagaccagggttgatgcaggtctgcaggtcttctgcacccccctcaatgaggagtccctcccagaaaggaaactgatctctgggatgtcagctgctgagaggagcaagcggtagtaccaccccttagttgagggagtcagcacagtcctttctgcagcttctaacccaggaccatgaactcaggtgcctagagaagccaggcagctaaaggacaaggaatgctgggggctgtgggaacaggaatgcagataccctttgaaggagcattcctgctaaaagaagctgaaaatgtagacctatgtgaagtgctctgatttctaaatattgtgaaggttaagaaaaacataaatttaggtctatgggctagatttagcccacagttgccagtttctagcgctaccaaatgaatgaataaacatgagcttgcgctcctagcctagagataaa

SEQ ID NO: 14204 - DNA, 954 bp, Homo sapiens
attttcatttttccctttattttttcattttttagttgtgaaagtagttcgtatatatttagaaaaatgtttacttttaataaactattcatttaataaatgtattaactgagcactaaataatgctcaaaggatcatagatttttttcctccacactaagcccatgggacatgaagaatatctgggtgcttccaggatataaggaaggaatgtgccttttcccactcctggcctttgggtactgtcctgagcatgggatgctggggcaggggctgccttggccatcttgccatctgcatggcagtggcagaggatagctgagggaaaagactagagagccctggagctgccgccttgctctgtgagaagccccttccaatggagatttgaattacttgcaacttgttggcctgcctctccaccccacccccatctgttccctagctctcaactttggctgcacactggaatctcctactcatgctccctgactatgccctcacagattctgatttgactggtcctgggtgcaacggggctggcatgagacgactaaaaactccccaggtgaatccaatgagcaaccaggctaaggaccagtgatctaactgtaagtcattctcttcttttccctttgtaattttatgtttccacctcatactgtggttggctacatctgtttcttccctctcctactagaatgtaggctccagatggccttccaaacaatacatgtggcccttcacgctccaggtgatgacaagtacccgttgctgatggaagtagcagagtcatacctttcttggaatttaggttctacagtcaatgcttatggcacccaatgagtcaaaaacacccttggcaactcctaaggaaggctctgccctggaacctgatgtactgtttccccatcaccatccagggagagtttcctcctgggccggaacagaaag

SEQ ID NO: 14205 - DNA, 526 bp, Homo sapiens
cagttcatgttttatgaaggtttaaaacggcagcttttaaagaaacggatgaagctttcttccttggatgtgttcatcattggtgcagtagccaaagcgattgccaccacggtgacctatcccctgcagacggtacagtcaattctgaggtttgggcgtcatagactaaacccagaaaacagaacattgggaagtcttcggaatattctctatcttcttcaccaacgagtaagacgttttggaataatgggactctacaaaggccttgaagccaaactgctgcagacagtcctcactgctgctctcatgttcctcgtttatgagaaactgacagctgccaccttcacagttatgggggctgaagcgtgcacaccaacactgagacgccttcccatgaaaaattccgaagatgctcaagagggaggtttcctcctgagtgaagagaagtgattctcccttgactctggctcctgccaccacaaatgttaccctcattggcttgaaaagcatccaagggtgcacaggg

SEQ ID NO: 14206 - DNA, 467 bp, Homo sapiens
tctcaaaaaaataataataatcttaaagatgagaaaagccaccccatctggcaccacagctgcatcttgcttgtgagaaatggggaagagttcagggaggacacgtgacctgcacaggatcacagagcatggggcagagccaggactagagctcagggcatctgactccctcttcagtgttcttccccctccatgttgcctgcccctgaagacctttgagttcagtctacacctaagcaggtagacatccgcgaagtcagatgctttccaacatgacacctgaacatcttcctttatgcaacacccaaacatcttggcatccccaccccaggaagtgcggggaggaggttatgatccctgggcgcttcggcagaatggagagctgaggtgtccctcccctgctagtcacctaccaggtgtctgagcagctgcatgctccctggctcaagtgggcactgtaccttttg

SEQ ID NO: 14207 - DNA, 468 bp, Homo sapiens
  misc_feature (1)...(468): n = a,t,c or g
gggcgtgccgctgtaaactggcctctgggccgggggcgagccagcccccgggaggccgagtgcatctgttggaccgtgcgaggagaagaaaaaaaatatcggccagaggagaggaactaaccgaacattcttcctccctaccttatagaggggagtggtcatctacactaaagcaaagtgttagnnnnnnnnnnnnnnnnnnnnnnnnnnnnnnnnnnnnnnntccttatcacaggaagaaaattttccttgacctttaggtgcttttatattcatctcaaaaacaaaattctgaactcaggacttggcaagtaagtaattgtgggctaatcgttccaaatactgtttaagtagcttgaaaacaggtacatagaagtggaacaataagccggttagcttcagcagaagacgaacatgaaaaatgactgtaagctattgaaatttaagttaaatcttttatttttcaac

SEQ ID NO: 14208 - DNA, 388 bp, Homo sapiens
cgcatctcaaaccgagctggcagctccaggctccggagccatgccctgcacggaccctcgtctttaccacgctcctgaggaatgaaaggaacccagggaccctcagaaggcagcagtgatgcggaccaaccccccggagcctgcacccttccgagggccataggcgacccagggaactggagagagctccagaaaggaaatcccagctttcccaaagtccctgtggatgctgacaaaaggagacctgaatttttggaagagcctgtactaggttacccggctgcagagtgattttcccctccggcactgactctccccctccaacccccagccgtccagagtaccatgaagaattatgaggatgtgtgacagaggtatcccagatgtt

SEQ ID NO: 14209 - DNA, 535 bp, Homo sapiens
  misc_feature (1)...(535): n = a,t,c or g
gctcttctttgctgttctggtcaaggagagtggccccctggagtcagaagccatggtgatgggcatcctgaagcaagccttcgacgtgctggtgctgcgctacggcgtgcagaagcgcatctactgcaacgcactggccctgcggtcccaccacttccagaaggtgggcaagaagccggaactcacgctggtctgggagcctgaggacatggagcaggagccagcacagcaggtcatcaccatcttcagcctggtggaggtggtcctgcaggcagagtccacagccctcaagtacagcgccatcctgaagcggccaggcacccagggccacctgggccctgagaaggaggaggaggagtctgacggtgagcccgaggactcaagcaccagctgagctccacccagccgcctgccccgcctgccccgcctgcctgtcccgccacactggctttaggacctgtttgacacggaggggggtttttaanttggtttttaacaactcaggggttttgtttttatttttattttaattttt

SEQ ID NO: 14210 - DNA, 1911 bp, Homo sapiens
  misc_feature (1)...(1911): n = a,t,c or g
cagcaagaaataggagctgatggcatcgctgtcattgcaccgttcttcctcaagccatggaccaaagatatcctgattaatttcctaaaggaagtggctgctgccgcccctgccctgccattttattactatcacattcctgccttgacaggggtaaagattcgtgctgaggagttgttggatgggattctggataagatccccaccttccaagggctgaaattcagtgatacagatctcttagacttcgggcaatgtgttgatcagaatcgccagcaacagtttgctttcctttttggggtggatgagcaactgttgagtgctctggtgatgggagcaactggagcagtgggcagttttgtatccagagatttatcaactttgttgtcaaactaggttttggagtgtcacagaccaaagccatcatgactctggtctctgggattccaatgggcccaccccggcttccactgcagaaagcctcccagggagtttactgatagtgctgaagctaaactgaagagcctggatttcctttctttcactgatttaaaggatggaaacttggaagctggtagctagtgcctctctatcaaatcagggtttgcaccttgagacataatctaccttaaatagtgcatttttttctcagggaattttagatgaacttgaataaactctcctagcaaatgaaatctcacaataagcattgaggtaccttttgtgagccttaaaaagtcttattttgtgaaggggcaaaaactctaggagtcacaactctcagtcattcatttcacagatttttttgtggagaaatttctgtttatatggatgaaatggaatcaagaggaaaattgtaattgattaattccatctgtctttaggagctctcattatctcggtctctggttcctaatcctattttaaagttgtctaattttaaaccactataatatgtcttcattttaataaatattcatttggaatctaggaaaactctgagctactgcatttaggcagggcactttaataccaaactgtaacatgtctcaactgtatacaactcaaaatacaccagctcatttggctgctcagtctaactctagaatgggatggcttttggaattccattttcggatgtccaccactttttcggctcttttaaaaacactggggttcaggtgagggacttgttttcagttcccattaaactaaggtaaatgggcgggctttctccataaacaagggaaaaagttcttccccaaagatgaatttaagtctccacttttttctatacagaaaactcaaaactcaaagtttcaaagaaccaaaggactcttcctctgggcaccacaaacttccccttcctccactgagaagactgtctctcccgcaggaccctgaattattgaaatcgaaggctgacttcctttctgcagtgagcccaggggctaatgttatcctgttcacacttgcaactagtgacttttgtttagtgatagaagatttggggaggacccaaaggactcagaactttctctccatacctccttttactcttttctttctgtgtaatgtatcaacaactgtttaatctcccttctaacaaaccttgatataagctttctgatatcaaagtatattgacagttaacccttactgattttaaacttgactatccagtctgttaattacctaaggattttgttttcatttcatctctaattgttttggancatgggcagaggaagggtatttggaattcatncagttttgctncctattttaatctctttggatttaaaataaaacttttttcaaatgggaatttggaattttaggaggcnttcattatccttggnaatcccctccttaattggncggctggttaaagggttatantcctanatc

SEQ ID NO: 14211 - DNA, 683 bp, Homo sapiens
gcctcctcacaaagtcaccattctccaaaagactatccaggctgtaggtgaatgtgagcagagtgaatcttcagctttcaaagcagatcctaaaataagcaaaagaagaccatcgagagagagaaaagaaagttctgagcattaccaaagagacatacagacactcatcctacaggtggaagcactgcaggctcagctgggagagcagaccaaactttctcgagaacaaattgaagggctcatcgaggacagacggattcaccttgaggaaatacaagttcagcaccagagaaatcagaacaaaatcaaagagctaaccaaaaatcttcaccacacccaagaactgctctatgagagcaccaaagattttctgcaactcagatctgaaaaccaaaataaagagaagtcatgggatgcttgaaaaagataatttgatgtcaaaggttaaggcaatatagggtgcagtgtaagaagaaagaagataaaattggaaaagtgttgcccgttatgcatgagagtcaccatgctcaaagtgaatatattaaggtaatgtcccttatgtcgtaaccgaagttgtttatttttctgggagagttgaaggaattcccaaagaaccctacaatttgtaatgtaagatccattcagtccaggaagctctggtagcagctgcctcaagactaggt

SEQ ID NO: 14212 - DNA, 1306 bp, Homo sapiens
ctgcctcagcctcgcctgctcctacgtgggcagcctctacgtctggaagagcgaactgcccagggaccatcccgcggtcatcaagcgacgcttcaccagcgtcctggtggtgtccagtctctcacccctgtgcgtgctgctctggagggaactcacaggcatccagccaggcacatccctgctcaccctgatgggcttcaaggctggagggcattttcccagcggcgctgctgcccctgttgctgaccatgattcttttcctgggcccactgatgcagctctctatggattgcccttgtgacctgggcaagatgggctgaagggttgtcctggccccccgctccttggggccggttgcctcacagacatgcgttggctgcggaaccaagtgatcgccccgctgacagaggagctggtgttccgggcctgtatgctgcccatgttagcaccgtgcatgggcctgggccctgcatgtgttcacctgcccgctcttttttggagttgcccattttcaccatattattgagcagctgcgtttccgccagagcagcgtggggaacatcttcttgtctgctgcgttccagttctcctacacagctgtcttcggtgcctacactgctttcctcttcatccgcacaggacacctgattgggccggttctctgccattccttctgcaattacatgggtttcccagctgtttgcgcggccttggagcacccacagaggcggcccctgctggcaggctatgccatgggtgtgggactcttcctgcttctgctccagcccctcacggaccccaagctctacggcagccttcccctttgtgtgcttttggagcgggcaggggactcagaggctcccctgtgctcctgacctatgctcctggatacgctatgaactctcaccggctccccagccctccccaccaaggggttactgcaggggaagggctggctgggggtccccgagatctcaggaatttttgtaggggattgaagccagagctagttgcgtcccagggaccaagagaaagaagcagatatccaaagggtgcagccccttttgaaaggggtgtttacgagcagctgtgagtgaggggacaaggggcaggtcccaggagccacacactcccttcctcactttggactgctgcttgtcttagctcctctgcctctgaaaagctgctcggggttttttatttataaaacctctccccaccccccaccccccaacttcctgggttttctcattgtctttttgcatcagtactttgtattgggatattaaagagatttaacttggga

SEQ ID NO: 14213 - DNA, 940 bp, Homo sapiens
gacccaaactgcatccctgagaatccacataatatttattttggtagatggattgcagatggacagagagagcttattgagtcatacagtgtcaaaaagagacactttattggaaatacaagtatggatgctggtttgtcattcattatggctaaccatggaaaagtgaaagaaaatgatattgtctttgatccatttgttggaacaggtggcctgctgatagcatgtgctcattttggtgcatatgtgtatgggacagacatagactacaacacagttcatggcttgggaaaggctactaggaaaaaccagaagtggagaggaccagatgaaaacattagggccaatcttcgtcaatatggtttagagaagtattaccttgatgtcctggtttcagatgcatctaaaccttcctggaggaagggcacatattttgatgcaatcattactgatcctccatatggtatcagagaatctacaagaagaacaggttcacagaaggagataccaaaggggatagaaaaatgggaaaaatgtccagaaagccatgttcctgtttccttgagttatcatctgagtgatatgtttcttgacctgttaaacttcgcagctgagaccctcgttttaggtggaagactagtctattggttaccggtgtatacgccagaatacactgaagagatggtgccttggcacccttgcctggaactcgttagcaactgcgagcagaagctttccagtcacacatcaaggcgcttgatcacaatggaaaaggtgaagaaatttgagaatcgggaccagtattcacatctgctaagtgatcattttctgccataccaaggtcataattccttccgtgagaaatattttagtggggtaacaaaaagaattgccaaggaagaaaaatccacccaggaatgaaaattaagattttgacaat

SEQ ID NO: 14214 - DNA, 938 bp, Homo sapiens
gggggcaccgacagcgctgcagccaggctctgggtagtggctgaggccagaggcccatcgcctgcccctgtccaactgagatggccttcaggagcctaggtttgaacagcagatgctgtcccaggaagggctagggacatcggaggggacctgcccccgcaccctctgctcagcccctggactcagccttgcctgtcttttcctgctgctcccagggggagggtgtcagacctcgggaggcagacgggaccagagccaggctgttcactgtgggcccacttgccccactgtgctagggcgcgggaggagagagcactgtggtcgccctctgcagccactctggctcccaagacttccctgactcccccactcccctccttgccaggggcacacccggaccccacacggcaggcccctctcttgggagggggctttggaatgatgaaattccaacccctgctgcccggtcagcggtaccgtttcctgccctctctctgagaggccctttctggagtcctgggaaggtgtctgcctggccgcgctgccagatcagtacatcttttgtaaaaaccctgaaatgggcagggaagaaaacagggatttcccctctctagatccctgccaggtccctctccaggaggcccctctgctctcctgaagggtggtccctgagggtctgcccagccttggacgagaggttggttccagcccctggcagggcttccttccaagggcccctgcagcctacaaactgggcctcggggactcaaaataagtgctcttgggggtggctctaccccattacctcccccagccacaactcctggccttcgacttctggctgggttagccagaccctggtttctctaccctgatgttgcatgagacctggtaacagtgtctccctcccagctccttgccaaagcctctgttgagac

SEQ ID NO: 14215 - DNA, 901 bp, Homo sapiens
  misc_feature (1)...(901): n = a,t,c or g
tttttttttttacgtcttttaaggttagatatttttaatcaaaagagcacagcganaatcctatattaagaaagagtcttcactgtagagaagtcagtgatcgcatggtgaaaccaggtgcttgggtagcaaaggactccaagaatagttaaaataccttttatgaagtcaactgcttacatttacaagttgatcatgaaaacatcagtaagacacaaaaacatttccgatgctctcggcatgaagaattggtatctggagagtagcaagttataatagtaaggtttctgcaaaagattaaatagtataaagaatattagtatgccttcaactggcagaaataggactgggcacatggaaaaaggtcagaaataagagaagatgcagatttgctcaaaggctgctacccagcactcccatgcccaccccattcctaagctcttccccaagcatactcttcatatgcattggtgaggggccaggtccctggaggtcccagagacacaaagttaagggtagggaaaagttcagccccacactcccatccactttgtagggctttctccctccagtctgggggtccccacaaatgcccaagatggtggaaacagtcacatggatttctaagagaccacatgacatgctgggagttgcagatcactgtcctcagctcgcattatttgaacgcagggcagggaccatgatcactgctgctgctcagaagagctttaatttactcaaatgactcacaaatggggaaaagtggaaagcatgcatagtttcagaatcagagataggatggccagcacagggtcccctgacctcggcactattggcattttggggctggataattcttatttgtggggggctgccctgtgcattgtaggatgttcggtgg

SEQ ID NO: 14216 - DNA, 1655 bp, Homo sapiens
  misc_feature (1)...(1655): n = a,t,c or g
ccaccgcggacccgccttctgccctcagcagcagacgctctgtcccgcccgggncagctctgcgaggcagcggctggagagggaaccatggggactgtgcacgcccggagtttggagcctcttccatcaagtggacctgattttggaggattaggagaagaagctgaatttgttgaagttgagcctgaagctaaacaggaaattcttgaaaacaaagatgtggttgttcaacatgttcattttgatggacttggaaggactaaagatgatatcatcatttgtgaaattggagatgttttcaaggccaaaaacctaattgaggtaatgcggaaatctcatgaagcccgtgaaaaattgctccgtcttggaatttttagacaagtggatgttttgattgacacatgtcaaggtgatgacgcacttccaaatgggttagacgttacctttgaagtaactgaattgaggagattaacgggcagttataacaccatggttggaaacaatgaaggcagtatggtacttggcctcaagcttcctaatcttcttggtcgtgcagaaaaggtgacctttcagttttcctatggaacaaaagaaacttcgtatggcctgtccttcttcaaaccacggcccggaaacttcgaaagaaatttctctgtaaacttatataaagttactggacagttcccttggagctcactgcgggagacggacagaggaatgtcagctgagtacagttttcccatatggaagaccagccacactgtcaagtgggaaggcgtatggcgagaactgggctgcctctcaaggacggcgtcatttgctgttcgaaaagaaagcggacattcactgaaatcatctctttcgcatgccatggtcatcgattctcggaattcttccatcttaccaaggagaggtgcctttgcctgaaagttaacccaggaactggcaggctacactggcggggatgtgagcttcatcaaagaagattttgaacttcagttgaacaagcaactcatattttgattcagttttttcagcgtctttctgggggcggaatgttggtacccattggtgataagccgtcaagcattgctgataggttttaccttgggggacccacaagcatccgcggattcagcatgcacagcatcgggccacagagcgaaggagactacctaggtggagaagcgtactgggccggcggcctgcacctctacaccccattacctttccggccaggccagggtggctttggagaactttttccgaacacacttctttctcaacgcaggaaacctctgcaacctcaactatggggagggccccaaagctcatattcgtaagctggctgagtgcatccgctggtcgtacggggccgggattgtcctcaggcttggcaacatcgctcggttggaacttaattactgcgtccccatgggagtacagacaggcgacaggatatgtgatggcgtccagtttggagctgggataaggttcctgtagccgacacccctacaggagaagctctgggactggggcagcagcaaggcgcccatgccacacaccgtctctcgaggaaacgcggttcagcgattctttgactgcggaccctgtgggaaaccccgtcaataaatgttaaagacacactccaaaaa

SEQ ID NO: 14217 - DNA, 1301 bp, Homo sapiens
tttttttttttttttttaatagtggaaatttttattttacaaatgaaaagtcaaaatactgctttgaattgacccttaagtcacactctgaattcataccatgcagttaaaattttcccagttcatcaattaattccactgaaaacagactaagcttctgtctatggaagaagcacagaccagctttaaccatgatgacaatcactggtaagactaagcaaaggaagtgactgtatctctgtttcaaattctttttcttcttgggcacattctccatggccatgtgaaacttaaaacaaagattgcgactgtcctggccagagaagaaggttaaagctgtgtcatagagaattgcagattatagttctaccttcatcctgtgatatccatgtctctcagagaggtctggctacaccaggatgttctttgcgatagcattcaaagtccttactttggtcacatctgttacctttagggaatattctgagcaagaaagtgaggctccccatggcaacagatgaatttcgaaacttcattcccgagtctctagtagaccgagcagaacagtggaattctgtagcacctgaaccctcaaggatcctttgtagatttctgtctgttataccacctcctggcattaccacaatcctgccttttgcctgctcaatgagtcgctttattaggggtagcccttctaatgctgaactgtcacatccactggtcaacacgcgttcaaatcccaaggttaagagggtctccagagctgccattggatcatgaaccatgtcaaaggctcggtggaaagtgactggcagagggcggcaaatagccataagggacatacacagctctttgtcaatgtgtccatcttcagtcaatgccccaaaaaccaaaccatcagcacccataaggcttggcaagacggaatgtcagccttcatcacctcaatttcacgatctgaatacaaaaaatcacctccccgtggccggaatcatcacaaaaaactgggatcttgaacactcttgcttcacttactttgaagggacacccatgctgggtgtagttcccccctctgataaaccagaacataattcaatccgatcagcacctcctctttctgcattcacagctgattccactgaatcaacacaaacttccatgagaaatccatttgctgctccggccttcccggacggtatccgcgctcgttttcgctcagaggaggccccctgccttttcatgctccacgcgttcctccctcgtgcgcctgcagtttccacttggaatttgggctccggcgc

SEQ ID NO: 14218 - DNA, 1013 bp, Homo sapiens
tttttttttttacttgtaatacgtattttaatttttgtttcatatgagtttaagtgttgtctaggtgacatcaaaatctaaggcaaacagacttgaccatcttcagacccactgcattctcaagctgaagtggtctgctcatagtttgtgtgccaggttgctcatcagtattgatactgtcccagaacaggttgtaggtataattcagagactgtcctttgcaaaggaaatgaccagcatttcaactgtatgtcttcctggaagggtagattctgctatatcttctttgtctgcatcaaaagactcaagaggaatgtggacacatttcatatcccatttgtagagtaaagcttcaagtgaccagtcagcactcctaacttgataagtagaccacaattggaccttgggattcttgtgcatcaaaaaatatattgtagccaaaatgtcttcaaaatcttctggttcaaagaacacatcagatgcaaggataatatcttgtggtggtagagccagaagatcccaagatatatgaccccatgttagtcctaccacctgcagatgtggcaggttattcatttggcagctttgcccgacagacttcccagacagtgaggcagttctgagctgtctgacagtattacttctgcaccacatttggcagccaaaattccctggaaggctcactccagctccaatctaataagttatgaaagatggcatttcacaattatacttggaactgcaaataattgggaatcttagtactttttcattatattcttgcatttttaaataagcatagagtcagtctttctggatttgtataaaatgtaccgtaactgaacattactataaacatgacaaaagtacattccttatgaatctactctgctaaaaggtaaaagcttaaccttcaatttcaatattaaagggccatgtatcgtaactggcagttaattgctatgcacacagaagtagttttggggcacttgattcctctgccatgattttca

SEQ ID NO: 14219 - DNA, 535 bp, Homo sapiens
  misc_feature (1)...(535): n = a,t,c or g
gtgatcacagtgatgtcaggttttcacagaatccttagctcaggggactggagagcatcttgtccaccacccattggtggtggagtaaacaggcttcaaggggagagtgacccgcccaggagagccaggtccctggtctggagtgacaccttgcaactccccatgagcatattgctgcataaacgtgtgggcagggccccagccagtactcaaggcagggagactccttaggtgctcaaaggggtggacgtttctgtctctcttgtatcttgtaagtgtgtgcagcgagttcctctgcttattcaatgcatgtttagtgagcactgaaaacatgctgtccacgggggagctgagcggatcgctgatctcctggagctcatccaccaaggagcatgggagaccaactgaaattaaagatgagatgacaaatcaagaaagttccacagggtattggagcaggtttgctgagctgcagaacccaaggcaaagatctatccccacttccntgggaggaagtngcgtcccccctggctta

SEQ ID NO: 14220 - DNA, 627 bp, Homo sapiens
gtcctgggccatgtgggtggtgcttctggatgtgagtctcttatttatctgcagaaggaactttggggtgcagccaggacccaggtaggcctgagcctcaactcttcagaaaatagtgtttttaatattcctcttcagaaaatagtgtttttaatattccgagctagagctcttcttcctacgtttgtagtcagcacactgggaaaccgggccagcgtggggctccctgccttctggactcctgaaggtcgtggatggatggaaggcacacagccccgtgccggctgatgggacgagggtcaggcatcctgtctgtggccttctggggcaccgattctaccaggccctccagctgcgtggtctccgcagaccaggctctgtgtgggctagaggaatgtcgcccattactcctcagggcctggccctcgggcttccgtgatgggagccccccaggaggggtcaagatgctggaaggggccgctttctggggagtgaggtgagacatagcggcccaggcgctgccttcactcctggagtttccatttccaagctggaatctgcagccacccccatttcctgttttccattcccccgttctggccgcgcccactgcccacctgaaggggt

SEQ ID NO: 14221 - DNA, 2230 bp, Homo sapiens
gatggcggacagtgcggaactaaagcaaatggttatgagccttagagtttctgaactccaagtactgttgggctacgccgggagaaacaagcacggacgcaaacacgaacttctcacaaaagccctgcatttgctaaaggctggctgtagtcctgctgtgcaaatgaaaattaaggaactctataggcggcggttcccacagaaaatcatgacgcctgcagacttgtccatccccaacgtacattcaagtcctatgccagcaactttgtctccatctaccattccacaactcacttacgatgggtcaccctgcatcatcgccattactccctgtttctcttctgggacctaaacatgaactggaactcccacatcttacatcagctcttcacccagtccatccggatataaaacttcaaaaattaccattttatgatttactggatgaactgataaaacccaccagtctagcatcagacaacagtcagcgctttcgagaaacctgttttgcatttgccttgacaccacaacaagtgcagcaaatcagtagttccatggatatttctgggaccaaatgtgacttcacagtacaggtccagttaaggttttgtttatcagaaaccagttgtccacaagaagatcacttcccacccaatctttgtgtgaaagtgaatacaaaaccttgcagccttccaggttaccttccacctacaaaaaatggcgtggaaccaaagcgacccagccgaccaattaatatcacctcacttgtccgactgtccacaacagtaccaaacacgattgttgtttcttggactgcagaaattggaagaaactattccatggcagtatatcttgtaaaacagttgtcctcaacagttcttcttcagaggttacgagcaaagggaataaggaatccggatcattctagagctttaattaaagagaagttgactgcggatccagacagtgaaatagctacaaccagcctaagggtttctctactatgtccacttggtaaaatgcggctgacaattccgtgtcgggcccttacatgttctcatctacaatgttttgacgcaactctttacattcagatgaatgagaaaaaaccaacctgggtttgtcctgtctgtgataagaaggctccatatgaacaccttattattgatggcttgtttatggaaatcctaaagtactgtacagactgtgatgaaatacaatttaaggaggatggcacttgggcaccgatgagatcaaaaaaggaagtacaggaagtttctgcctcttacaatggagtcgatgggatgcttgagctccacattgggagcatcaggtagcgtctcaccaccagtcctcaaataaaaacaagaaagtaggaagtgattgacctaaccataggacagttcatctgatgaagaggaagaagagccatctgccaagaggacctgtccttccctatctcccacatcaccactaaataataaaggcattttaagtcttccacatcaagcatctccagtatcccgcaccccaagccttcctgctgtagacacaagctacattaatacctccctcatccaagactataggcatcctttccacatgacacccatgccttacgacttacaaggattagatttctttcctttcttatcaggagacaatcagcattacaacacctccttgcttgccgctgcagcagcagcagtttcagatgatcaagacctcctacactcgtctcggtttttcccgtatacctcctcacagatgtttcttgatcagttaagtgcaggaggcagtacttctctgccaaccaccaatggaagcagtagtggcagtaacagcagcctggtttcttccaacagcctaagggaaagccatagccacaccgtcacaaacaggagcagcacggacacggcatccatctttggcatcataccagacattatttcattggactgattcccaggccctgctgctcccatccccaccccagatcgaatgaacttggcagaaagaagagaactttgtgctctgttttaccttactctgtttagaaaagtatacaagcgtgttttttttcctttttttagggaaaaaattaaaagaaatgtacagagaacaaaactatattttcagttttacttttgtatataaatctaagactgcctgtgtgataaaacacttgtttaaaaaaaaaaaggaaagaaaagaaaaaagaaaaacaagc

SEQ ID NO: 14222 - DNA, 363 bp, Homo sapiens
ggaaaaataagacaatatcatttcccaattacattcctttcctaccgcactctatgatgctagctgagatttttccaaaagaaaatggcttaaataaaaccctaagagaaagaaaaactttaaatccctccaaagctcaaaagtaatagaaacagatgagtttggagtcaggatttctgtgtaagattgcctaggctgtgtactgcacatctccaggtgccactgttcacagagattataactacaatgtgaagtgaatggtgccacttgacagttatgcaaaccgtccagagcatagccacctgatcctggctgggattcctctttggccagtccatcaggcagtttccccttggaaagttt

SEQ ID NO: 14223 - DNA, 559 bp, Homo sapiens
  misc_feature (1)...(559): n = a,t,c or g
tttttttttaggcacttagtgatttattcttctcttaaggctccatcagcaggtggaatggaagacacctcccaccctgaccccttgggcaaccaaggcattatactccttcactgcctgctctgtctggaggacccgcacatcaatgccatgtttcttgaggtactccacagttgatgaaggcaccttcaaggcctcactcatccctcggccaatcacaagagtctgtacacccttctcaacaacttccttcacatctgcaggctgcacaccaggagaatgctcagttcctgtttctctccaatcccaagtccgactgccccctggccatactttgcagtccttataggttgtattagagccttttactttcatttgcccccatgataaggaagcaatttcaggggaagtcataaggaacttcactgaagtcagatgcgagccaactggtcttggacttcccagcctccagaaccaccgcactgtctcctcaaagttgcgttcccaaacggcgcatgtntctgcccgcacttacctcaccagcgctgcttcgggatct

SEQ ID NO: 14224 - DNA, 315 bp, Homo sapiens
  misc_feature (1)...(315): n = a,t,c or g
ctttctttcacattctccatcctcaggtggaacttaccctagtctcctcttcaccccagccattttccatgcacaaattaccaccctgtggcatccagagcactttcttacacatgcttgctaatccacgagtctctgccttccagacgtcaatcaacaccctgagagcagaagtcgacgcggtcgngaattccagatctatgaatngtatatctgaanaaccccncnngggggnctttaanngngctttgtgcaccatcgcngtttctntcattgatncnncgttttngngcgtnttntacntncccannagtg

SEQ ID NO: 14225 - DNA, 1175 bp, Homo sapiens
aaacagccgattggagacgggagccaaccagggctgcattggaggttgaaatcacaaagattagacacctttttagataggtgttcttcagcaccactgacaacacggttctgacagtatttcatgacaatggatggtgacagttctacaacagatgcttctcaactaggaatctctgcagactatattggaggaagtcattatgttatacagcctcatgatgatactgaggacagcatgaatgatcatgaagacacaaatggttcaaaagaaagtttcagagaacaagatatatatcttccaatagcaaacgtggctaggataatgaaaaatgccatacctcaaacgggaaagattgcaaaagatgccaaagaatgtgttcaagaatgtgtaagtgagttcatcagttttataacatctgaagcaagtgaaaggtgccatcaagagaaacggaaaacaatcaatggagaagatattctctttgctatgtctactttaggctttgacagttatgtggaacctctgaaattataccttcagaaattcagagaggctatgaaaggagaaaagggaattggtggagcagtcacagctacagatggactaagtgaagagcttacagaggaggcatttactaaccagttaccagctggcttaataaccacagacggtcaacaacaaaatgttatggtttacacaacatcatatcaacagatttctggtgttcagcaaattcagttttcatgatctgaagaaatgatggaatggggagtgtagagaaatgagagtctgtatgattctggaacagagacatcagaaggaaagactggtgaaaagatgtatctttgtatattaatagctgtaatgtagcttcctgatgcttgactaattgaggtgttaattctgacttgagaatctttttcatgaatgattttaaagaaaaatttggattttaaaggtattaaaatatttttgttttgtacgagagtttgttgctctgtatgactcctgtatgcattgtatattgcaatttattactgtcagagatttgtagacagtttcttattttcatattgaatcatgttacttttgtaattcaagtaagcggctgggttaattcatgatgtttgcccttttaataaaatataagggtagagttcattttgaatgcaagt

SEQ ID NO: 14226 - DNA, 761 bp, Homo sapiens
gcgccttccgtcggtcggtccttgcttcctgcttcgcctccgcgcctcgctaatggggacagagcccccgatccgccagcaccacctgaggatccagaaaccgccccagcgatggaagaggatcaggagctggagagaaaaatatctggattgaagacctcaatggctgaaggcgagaggaagacagccctggaaatggtccaggcagctggaacagatagacactgtgtgacatttgtattgcacgaggaagaccataccctaggaaattctctacgttacatgatcatgaagaacccggaagtggaattttgtggttacactacgacccatccttcagagagcaaaattaatttaccgcattcagactcgaggtacccttccagctgttgagcccatttcagagaggcctgaatgagctcatgaatgtctgccaacatgtgcttgacaagtttgaggccagcataaaggactataaggatcaaaaagcaagcagaaatgaatccacattctagtcctttatgcagtatacaaggagaactgtcctgtaggatattctcttcttgatggtgcagaacccagaattagaagtttgtggttacagcatactctgtccttcagaaaggcgtgattctagctgttgaccccttgcagctgttggaatctctgcaagaacctctgtattcttctaataaattccctcttttatttaaactagtttgactggtttctgttccatgcaaccaaatggtccttgagga

SEQ ID NO: 14227 - DNA, 299 bp, Homo sapiens
gcggcacgaggtttcctgtgtcctctagaatcatttaaaacctggttggatcttccataatccagtggaattggatatgagatgtagctggagaagtttgttttgctacatatcagaatctccaattagtttcatttagaaaggaatatagccttataattttatgctgggttactgtggaaccaaatatcatagaaggatgtgtgatatttttatgtttttcaagaaggtagtatagatttaaaaggtgggatacatattacctgtcctaatgataggactagatttttttttttttt

SEQ ID NO: 14228 - DNA, 1286 bp, Homo sapiens
cgtgaagcttctccctcagctgagcagtgatcacttactcactcttaaccccaatccgctgactgggtggggacagcacgtccagccttcccacctctcctgcaggcttctagacggagtttcaaaaactgatgagcctcgatccagggcttgaaagaagccagggtgtaatcttgttcatgcatgcgtccccagagcctcgcccagtgcctgggcacattagtaggcactcaataaatgctgaatgggtgaatagttgaatgataggtgctcaataaatgaatgaatgggccttcccttcttcaggctatttcccaccattagtcttgcccacctttctagggtggggttgggccaccatttaaacacggggtgggggtgaggggcccctgcaattcacggtgcaatattcaccagttttgccctctgcctcataaaggcaaacctggcttttgattaccatgtgtggatgtttcagtgtcctttcttctctgtccctggggatggggtggtctgtgaatatgtgacatttctgcagttcagtatccgaagtttctcttgggggtaggggctcctgggcggccagatgaatgggtccctgggaacccagacctcagatgaggacttaatgtcttcttcctctcaagccaaattcgcctccacccactccctctgaagaactgggcatttgccaaagtaaccactggagtcatctaatggccctccccctccccaggtttcccacagctttcagggacagtgggcaagaggacacccccccccaccacctcagtggaacacaccattctccccccctcaacagcacactcagtgcagcaagactgacccctgaccccctcccagccctccctaccttggacaggaaggaagtaatgcaccttctcttgctgattatttatttgtttggagagacagaaatgtaaaagtgtatctagaaatatctatatctctatatatttttaactgactctttggaatcccctgggggtggggtgaggggtaagtttaggctttcgcggaggggaggagacatggagcctgggaactccttgttcttccctctgctgcctctccccaccccttaaagcagttggtagaaggaatggtatttgtatggggggagggaggctgggaatggaggaatctggattctctcctcttccccattctccagagggagggaggtggtgaggaagagggaagggaggggcaggatgggccatggaggtgccccacccccacacctgacaatcacccacacttct

SEQ ID NO: 14229 - DNA, 1617 bp, Homo sapiens
ggaggctgcagcagcggaagaccccagtccagatccaggactgagatcccagaaccatgaacctggccatcagcatcgctctcctgctaacagtcttgcaggtctcccgagggcagaaggtgaccagcctaacggcctgcctagtggaccagagccttcgtctggactgccgccatgagaataccagcagttcacccatccagtacgagttcagcctgacccgtgagacaaagaagcacgtgctctttggcactgtgggggtgcctgagcacacataccgctcccgaaccaactttcaccagcaaatacaacatgaaggtcctcttacttatccgcctttcactagcaaggacgagggcacctacacgtgttgcaattccaccactctggccattccccaccctttttcctcccagaacgttcacagtggttcagaggacaaattgggtcaagtgttgagggcatcagcctgctggctcagaagacctcgtggctggctgcggctcctgctctccctctccctcctccaggccacggatttcatgtccctgtgactggtgggggcccatggaggagacaggaagcctcaagttccagtgcagagatcctacttctctgagtcagctgaccccctccccgcaatccctcaaaccttgaggagaagtggggaccccacccctcatcaggagttccagtgctgcatgcgattatctacccacgtccacgcggccacctcaccctctccgcacacctctggctgtctttttgtactttttgttccagagctgcttctgtctggtttatttaggttttatccttccttttctttgagagttcgtgaagagggaagccaggattggggacctgatggagagtgagagcatgtgaggggtagtgggatggtggggtaccagccactggaggggtcatccttgcccatcgggaccagaaacctgggagagacttggatgaggagtggttgggctgtgcctgggcctagcacggacatggtctgtcctgacagcactcctcggcaggcatggctggtgcctgaagaccccagatgtgagggcaccaccaagaatttgtggcctaccttgtgagggagagaactgagcatctccagcattctcagccacaaccaaaaaaaaataaaaagggcagccctccttaccactgtggaagtccctcagaggccttggggcatgacccagtgaagatgcaggtttgaccaggaaagcagcgctagtggagggttggagaaggaggtaaaggatgagggttcatcatccctccctgcctaaggaagctaaaagcatggccctgctgcccctccctgcctccacccacagtggagagggctacaaaggaggacaagaccctctcaggctgtcccaagctcccaagagcttccagagctctgacccacagcctccaagtcaggtggggtggagtcccagagctgcacagggtttggcccaagtttctaagggaggcacttcctcccctcgcccatcagtgccagcccctgcctgggctggtgcctggagcccctcagacagcccccctgtcccccgcaggcctgccttctcagggacttctgcggggcctgaagaa

SEQ ID NO: 14230 - DNA, 2096 bp, Homo sapiens
tgtccatcttcttgtttctgcttttaattctgccatttcctcttaaaatttagggtttaacaaagacaacagggctgtttgccaaatcgcagctattaattcacagcatagaaaagtcaaaggctatagcaaaaaattgctaatctgcacaactttaaaaaatagttcagtacatttttgttataaaattcatttacaggaggttattcacatgtacttgtcaaatttactcctgataattcacaaaaacatacaactcaacaaactgtgcacaaataaatccaaggcaaattatatacaaagaaacaaaacaagcttttaagtagcacatattcatttgaaataactaatattggaaagaagacagggaactttcttttaatgccatggcaaagacgaagcgaagagccacacttcacaccttgtaaaaagaatagccctgttcaacatacggcgctgacagccacatcaggaggggccacgtgaacataggaaatgggctttggcaaatacttgtaccaactggaacgagtgaagtttcaaaagtaatgtgagtacaactgcattccgctgtaaaaggccgtcacaggacacaggctcgtctgttagaaaggatgatctagttctaccattaattcttgcagaatcagatctgctgagtggtgaaccaacaggtgaacacaacgtaagaacaggcatcaaacttcactggaaataatattgttcagtgtgtggcggcaaaatatgcattttagagaaaacttatttctcaaatcatgtgttaatagtattaacatgagcagcgtgagagacatcctgaccccaacgtttttgcccatgccctccctttagaagcttaggagtttgtacattccctaagtggtcagcactacaagtgtctgctaaaatgggcacttcatcaagataacaggaaagcaaacttaaagtaacgagatttcttcccaaaggcacatggaagaagctgatagagcccttgacccagacagaatgggacccatcccctacccgtcctgaactgtcgcacactgcatggcccaaagacaaactctccacccccacagaggaagcagtggctgactctggggacaaagcactccaggaagtcacctgctccctgggtttcaggagtattcagttgaccgtctggacaccagtgagggagacacaggtaatgaaatcaaatgctcaaacttttggcaaccgaaagttgttttttaaagctctttataatctgctcaagtagaatttctaacacaaaacccttttttgcttaaaaagcagatgacaaaggaaatgtcaaataatgcacatgaatcttcagctattttcctacccccaaatgagatatggggctgcacagcattcactacagatccctagtttttacaactgtcaactgtacattctcatgtttaggatactccagttcactgcgtggatatttggaaaactggacaaaatcaggcagcccacccctcccttgtcccgagcttcctcgatctccattcaccatgaccaatttttttccccacaaaagcactatcacctctaatagtagctggaaacacctatcagatattctaaacagcatgtatttttaccaggtagatgatttctgaagatcacaggaagtctaccactctcttcccagttctgaactcctctggttacgcttcattttaaatcgggtgcttctttcccgcccaaaatattctatttggcctgccccagtggttcccaagctgcctggtgatcagaatcccttgggaaatgttgaacacacagcttcccaggctttctggaaaactagttagatctgtctgacaatctgtaagctgaggcgattcttccacagctgacccagcgctaatctagcatttggcaaccaaatgtctgtacctcaccagtcacacaaggctcacaatatgctgggagcatttgaatgatagctcaagaattattctttcactccatattcttctctctcaagaagattaggaattttagctagggaactatgtgcatactgaaacaggtaaatgaactcatcacagaaatataatacccctcgtgcc

SEQ ID NO: 14231 - DNA, 1928 bp, Homo sapiens
aacaactttgacctttctacaaaacttctaatagtgtgaaatgtctgaattaatgcttttcacactaggtcagcttaaaaaacttacagttcagctagcctaccccctccttcatcttcctacagcttatttgtagcctggaaagactattttggtgatagcattagaaagggtcctggaaacaaaatacaaagcatgatagagcatatgaaatctgtttctcttcattgggaatactgcatggttctgatggtcacacttgacaatgaagctaaaaacagtccagagaagaatagatgaaaatggcaaaggagaaaaagtggcttctctgacagttagattaggttagattagttagattaagattagaattcctaaataaacagaaagctaattagtgatatgagccttctacattctgaaggatttgaacaagatcattagaattcaaaaaacaccagaaatgaaagatctttcctgaagctgtttaggaatattcatgatatacccttaactgttctagagaacaaaatgcgtctgtgctccttcacaaaagtccctatgaatttgtttctcaatgtgatccttcttaagttctataactttttgttttcattaattttagggaaaatcctgccttgcttcgttggggcctatgcaaggaacaataaatgtctatcctaaatttcagacccactcctaaaaactcactcatgggagctctgtgtggatttgggcccctcatcttcatttattatattatcaaaactgagagggtaagtattcagaccagatgtttagtatttgagtgataggttcactttctagggaccagctgcagctccttctcttgaagattgccaccagtgcccctcccaccttgggggctgtcctctgccttcccttcctctcttcttttatctttattcctttccagcaggagttaaaacagaaagttttcagtcacctttgtctatttttgttagttcatttgttttttaaaaagatgatgtttattgggttaagtattagcagaatacataaatcatttagtacgtttcctgtttgcgtgaattctatttatgttggtcacattttgcaaattaatgttaaaacctattaatactctacggacagagaagcacaagctgcctgtgtggggaatagctgccgtcagcagcctgggtatatgattggagagaaagtcaagctgatctttggcaccaaaccattccacatctggtactaaaccctgagctgcagcccccaggcttgtgttgccactggagcccactcgtctagctttgtctttaactggcccatctgcattcccattagagttcgtgtattttgattatctggtgaatgatctacttaacagaaaggtagtccacattttcccagaaagtgtttgcattttgctttcaatgtatggttttatgggataatatatttctaatgactaaaatgtgagtaagatgtttttgaataggagcattttcttactgtgtctttagttcctcggattactgtttcttcgcacactccctgggctttagacagtgggattgcaattaggtttggagtgtttcattctgtttgtcagttgtacggtgggttgtgcgaaatgcagttttcgtacgtgtgtatttattattttatctatatagcagctgcagattagatgcttaatgacatgttccgccttacaggtggaagaaacttccggagggaatggcgacaatcctcaatagttggaagggcgaagtctcccaaaaaccgtgtgtttggataagagaagagatgggggccctctggttttgcgcgttacaggtgcaagccatgtggaccctcggtaagagggcccaacgggagcgcactggtggcggatccggcttcttcctagcggcccaaacggcggttctaat

SEQ ID NO: 14232 - DNA, 449 bp, Homo sapiens
gcggcacgaggaaaacaggcagggattccccccaagagtagatcaactaagagcaaacatgttgaatttagtttaacatcataagcctaggaattttgagtgagttataacatgaatacaatccccattaattagattgtttggataaaaagagatttgagaatgttagaaatccagctttctgcatggcttgttcttcaccaaggaaccagtttccaccctgttgacacatctctacatttttcatggctgtcctattattacatgacttattcgtggatgtaatctaccaacgtcagcgtgggtgaattacggagcagcagcttaaagtaaacatcatttactcctaaggaagttatttccacccttgggttttctgctggacatttaaaaaagaaccctgcccccttcccaccttttttaaaaattaatcacctgtcctacatttg

SEQ ID NO: 14233 - DNA, 517 bp, Homo sapiens
  misc_feature (1)...(517): n = a,t,c or g
gggacaaaaaggtgcttattgttcaccctggctgcaggaattcattacaagaacatgggcagcagttcccatggatccctgcaataatggggtatggaaaatagttattattgagtggaaaggctgaaattcaccaacattaaccaaaatttatcatcctctttatcaaactcttcccttgatgcttccagtgtttaactagactcgagaattccaaaatagttacttcagacagtttttgacagttcaatagttttctcagtgggaggaacagatttctgtagctttttagtctaccaacctctatgacatcattcttgcttgacttattgtttttantttattatttttttgagatagagtctcactctgttaggctggagtacagtagcatgacctcagccaantgtaagnnnnnnnnnnnnnnnnnnnnnnnnnnnnnnnnnnnnnnnnnnnnnnnnnnnnnnnnnnnnnaggngnatgncaacatnccanncaanccnccnattttttgttg

SEQ ID NO: 14234 - DNA, 900 bp, Homo sapiens
  misc_feature (1)...(900): n = a,t,c or g
ctcgctttctttcacggcttntgctctttttcctttctctgtctctacttcgcttccgttccttacttttgcttctctttcgttcatgactacgacttctgctcttgctttttttcctctttttgctacgttcttcatggccgttggcactgctcaacttgttctcatcctaagcagggttgatagaagaacatcatgaggacgaagtggtaacatttcaagttgtcaaagggtaaagggaacaggaataagaaaatacaaaacaattttaaaactaattatttacttatagtttaacatggaaggctataaaaaaatttagatgggtatgtgtttaaccactttgttgcttacatttaagtcatcaagatacaaaaataaaaaaattttccatattaacatgttaaattttactttcttatatagtttagatattaaaagttatccagatttacaatgttgaagtggttaaatataatttccataaaacatgaagtcctgttttgagttttattccatgtgctatggtccctttggtcagtaccatggctctatttctgcctaagccccaagtggccatgctagcagccagccactatcgatttcctgtgaccgatgccattcctgagatcttcgcccatttccgttggagggttgggactgtaagagcttgatgccacctctgtcacacatctcgcccttatgattgacagttcacactggaatcaaaggtgaattcatgggagtagaggtgagatatcgttaggcaagtcttcttgtaaggagcctcaagcattgcttcaatatcaatatcgtctgccattttctctaaacgcctgttccggccttcgggagcctgtggtgctcgtgttcgggaagagattgctgctgctgctgctg

SEQ ID NO: 14235 - DNA, 2768 bp, Homo sapiens
  misc_feature (1)...(2768): n = a,t,c or g
gtgagtacagggaagcagcggccgccatttcagggagcttgtcgacggctgtcgcaggggtggatcctgagctgccgaagccgccgtcctgctctcccgcgtgggcttctctaattccattgttttttttagattctctcgggcctagccgtccttggaacccgatattcgggctgggcggttccgcggcctgggcctaggggcttaacagtagcaacagaagcggcggcggcggcagcagcagcagcagcagcagcaatctcttcccgaacacgagcaccacaggcgcccgaaggccggaacaggcgtttagagaaaatggcagacgatattgatattgaagcaatgcttgaggctccttacaagaaggatgagaacaagttgagcagtgccaacggccatgaagaacgtagcaaaaagaggaaaaaaagcaagagcagaagtcgtagtcatgaacgaaagagaagcaaaagtaaggaacggaagcgaagtagagacagagaaaggaaaaagagcaaaagccgtgaaagaaagcgaagtagaagcaaagagaggcgacggagccgctcaagaagtcgagatcgaagatttagaggccgctacagaagtccttactccggaccaaaatttaacagtgccatccgaggaaagattgggttgcctcatagcatcaaattaagcagacgacgttcccgaagcaaaagtccattcagaaaagacaagagccctgtgagagaacctattgataatttaactcctgaggaaagagatgcaaggacagtcttctgtatgcagctggcggcaagaattcgaccaagggatttggaagagtttttctctacagtaggaaaggttcgagatgtgaggatgatttctgacagaaattcaagacgttccaaaggaattgcttatgtggagttcgtcgatgttagctcagtgcctctagcaataggattaactggccaacgagttttaggcgtgccaatcatagtacaggcatcacaggcagaaaaaaacagagctgcagcaatggcaaacaatttacaaaagggaagtgctggacctatgaggctttatgtgggctcattacacttcaacataactgaagatatgcttcgtgggatctttgagccttttggaagaattgaaagtatccagctgatgatggacagtgaaactggtcgatccaagggatatggatttattacattttctgactcagaatgtgccaaaaaggctttggaacaacttaatggatttgaactagcaggaagaccaatgaaagttggtcatgttactgaacgtactgatgcttcgagtgctagttcatttttggacagtgatgaactggaaaggactggaattgatttgggaacaactggtcgtcttcagttaatggcaagacttgcagagggtacaggtttgcagattccgccagcagcacagcaagctctacagatgagtggctctttggcatttggtgctgtggcagatttgcaaacaagactttcccagcagactgaagcttcagctttagctgcagctgcctctgttcagccacttgcaacacaatgtttccaactctctaacatgtttaaccctcaaacagaagaagaagttggatgggataccgagattaaggatgatgtgattgaagaatgtaataaacatggaggagttattcatatttatgttgacaaaaattcagctcagggcaatgtgtatgtgaagtgcccatcaattgctgcagctattgctgctgtcaatgcattgcatgggcaggtggtttgctggtaaaatgataacagcagcatatgtacctcttccaacttaccacaacctgtttcctgattctatgacagcaacacagctactggttccaagtagacgatgaaggaagatatagtcccttatgtatatagctttttttctttcttgagaattcatcttgagttatcttttatttagataaaaataaagaggcaaggatctactgtcatttgtatgcaatttcctgttaccttgaaaaaataaaaatgttaacaggaatgcagtgtgctcattctccctaaatagtaaatcccactgtatacaaaactgttctcttgttctgccttttaaaatgttcatgtagaaaattaatgaactataggaatagctctaggagaacaaatgtgctttctgtaaaaaggcagaccagggatgtaatgtttttaatgtttcagaagcctaactttttacacagtggttacatttcacatttcactaatgttgatatttggctgatggttgagcagtttctgaaatacacatttagtgtatggaaatacaagacagctaaagggctgtttggttagcatctgcatcttgcattctgatcaattggcaagaaagggagatttcaaaattatatttcttgatggtatcttttcaattaatgtatctgtaaaagtttctttgtaaatactatgtgttctggtgtgtcttaaaattccaaacaaaatgatccctgcatttcctgaagatgtttaaacgtgagagtctggtaggcaaagccgttcngagaaagaaataggaaatgcagaaataggttttgtctggttgcatataatctttgctctttttaaggctctgtgagctctgaaatatatttttgggttacttcagtgtgtttgacaagacagcttgatatttctatcaaacaaatgactttcatattgcaacaatctttgtaagaaccactcaaataaaagtctcttaaaaaggcc

SEQ ID NO: 14236 - DNA, 869 bp, Homo sapiens
aacttaagctaaatgtaatctatttataaagcaagagactctcatctatttttatgaaaggaagggttttttaatctagggtaggcagttgtggtagcccagcattttcctgtggacgagacatggtgcatgttgttgctggattgaatggaacccattcctgtcccccggcctcgtcttctgtcctcacttttggtcatccacacccatgagcagcttcagcagagtgtaggtcccacttcaccccattctcctctcctctgacccctcagctccttggaagtcttggggtggggatctgagggggtgggtgggctgcaggaaattcagaaatgtggtgggtgggggaagggacaaggcgcattaggggagggaacaagctgggctctggggataggctctgattaattagttactctgactctggtctgccgagatccatttccaacccagttgcgttgggagagggttgggaggcagcagagcatgggtgacagtgggagcacacgacttccttggagcctgggcctttgcgggtcccaggtggtcaggcagctggagcagaagtggaaatggcttaagatgctcatagcccagccccggctgtgtctactccaggccaagcctgggctgcagtccttgctatgttccccccagggccctggggggagggatcagggtgctgggggtttcctaggacaggggtcttcccccttgagacaccaagctctggctctagaagagctctctcctggagtggggagtctggaggggactgggtgggtgcaggtaaagccagattctctctggaagggaattttctatgaatggatgatttccaggctcagggtgggctgtgtgttagttct

SEQ ID NO: 14237 - DNA, 508 bp, Homo sapiens
ggggctatctggccctttcctttccgcgtgtagaatgtggggcgcctgtaaagttaaggttcacgattccttggccaccatttccatcactctgagacggtacctgagattgggggcgaccatggcaaaaagcaagttcgagtacgtgagggacttcgaggctgacgacacctgcctggcacactgctgggtggtagtgcggctggacggccggaatttccatcggtttgctgagaagcacaactttgcaaaacccaatgacagccgtgctctccagctgatgaccaaatgtgcgcagactgtgatggaagaactagaggatattgtgatcgcgttatggacagagtgatgagtacagctttgtgttcaagcggaaaaccaattggtttaaaagaagagccagtaagttcatgactcacgtggcctcccagtttgcctccagctatgtgttttattggcgggattactttgaggaccagccccttctgtatcccccaggctttgacgg

SEQ ID NO: 14238 - DNA, 1561 bp, Homo sapiens
gggatgaggccttcctgcctcagctactctgcccgtctgtacatctttagtgtctgcctccgtaccttattcagttattttcacactaaagtaagtagaattaagactgtagttcagatgctttttctttttctgttggaaactgaacacactacagacagtgaaaaaaggtacatattccattttctcattgcctgaagatctctgctgatgctcctggagaatgactttgggggctttagaaagaatattgccagtccgtctcggcaaggagatgatgggagcgctttatatggaggctttacatgacttgtaaattaaatgtgaatgagggcagttgattaaaattggtattacagaagggccctgctgaggtttgaaaacagctgagctgctgatgtctcaggcctttccctgaattagcactgcggcttctccaggatatcagcaaagagggcaagtaatagaagcccctgataaggagcgtcagccgacaggcaagcttgggaggctgtgggaatgggtctgcccccagcttcacagacctcttcctccagcctctgaatcccattagccacagcctagaacattagctgagctgcacaagctcacccaccccctgtgccagggggccctgacctccctccatgccatgtttttggctgtatctacggcacttaacaataggggctttttattttcattacagagatattttgaaaaatttaaaagacatgaactcacataaacagttatggatgatagttaaaagagaaacgggtggaggtgggttgagaggttgtcttcatgaatataattacttgagatttttttttcttaatggaattagtttattagaaaatgtctgtgttaaatccgtagaaaaggaagaaaagtgtagcaacaaaaatgtagccattatctaacttgccataaatatttgcagttatgataccttggaatgttgccacgatatggattgctttgattaaaagatgtcagttgaataaaacagtactgtgggagaatcgctttctgctgctagataaatgctgatgtttatttttaaaccaggaaacattgatcctgtaacaatgcccgattacaattgctttattacaccccagggctgatggagatgtaatcacttggctaatggatgtgggtgcaggacagatgctcgcttgctggcctgctttcctgcttgcattctgatgagctgcaggagtgcgcctggccttctgcaggtggagctgctgtcagagcttcgtttcactgatacccaaagccatgtctgactgaaataaaacaggttccctttttttttccctttggaaaatgccaactaagggagactaatcagatatcttaacacaatttcatccaggcttagtgctaacaagattgcggggctttttagggtttaagaagatgagaaatgagtgtgcacgtttcacacgttgacttgccggtttttccatgtcatacaaaaaagtcctggctgtttctccgaactggctgcctgcattcccgtctttcttttgtttttaagaaatagact

SEQ ID NO: 14239 - DNA, 1306 bp, Homo sapiens
tcgcttgggaactctagtctcgcctcgggttgcaatggaccccaactgctcctgtgccgctggtaagggacgcccgggttctgtgccttgggatgccaaattcccagacaccatagagagtgtccctgggtttgaggaggtcgtattttgctatcagaggtaaaggggactccttgacttagtccagtgctttcctcttggccaagatcctgagagcatttccttcctctctgtgcctctgtgtcagcgttgagggtactgaggctcaaggctgtcctgctccacgtcatgcggtttgtcccaggggctgttggctgagccccaattctctaacctgactctgagcttaccggattggataggagacattggataggaggggacattgcctcttccaggttcaggacagaaagtcgaagtcgccgtcttcccaggctgtgcctggagcctggggactttcctttggagtagaaataggagggtgcttggcctttcccagcatgaatggagaggacatggggcttctcttcctctgctctgagtgggaaaggagctctgagggctggcccccgcacagagaagggggaagtggacactcattgacccactgctgtaccttctgcatctcactcaccgttcactggctttttctcttctagcaggtgtctcctgcacctgcgccagctcctgcaagtgcaaagagtgcaaatgcacctcctgcaagaagagtgagtgcggggccatctccaggaatctggggctgtggctaaggttgggagggaacccaaggctgtccctgagtgcgtgcttctggggaaccggccttcctttgtccctgtaggttgtcactgcctgtctagtcttctgcactttccagggcttatgtgaggtggggcagctttctcaaaggaagacccattccaatgtccaccagttgtctcctgacaaaaaccatgccatcatgaactaagggtcctctggggctggagggatggagacaggcctctgttggggcagggagttctctgatcgagtctgctctgacctctcaatctcctttcctccccaggctgctgctcctgctggccctgtgggctgtgcccaagtgtgcccagggctgcatctgcaaaggggcatcggagaagtgcagctgctgcgcctgatgtcgggacagccctgctcccaagtacaaatagagtgacccgtaaaatccaggattttttgttttttgctacaatcttgacccctttgctacattcctttttttctgtgaaatatgtgaataataattaaacacttagacttg

SEQ ID NO: 14240 - DNA, 5580 bp, Homo sapiens
caggaaggaggctccgctggttccgctgggtcaggcgctgacgggaccgggctgcggcaatcgttagcgggtcatgtcggccgcccagggcgggggcagtgggggcagcgggggtcgggggacctgccaggccacagacctccaccagcacgaagtggacatcgttgtgtggcagataataccaacctatatgtgtttggaggttataacccagattatgatgaatcgggagggcctgataatgaagactatcctctcttcagggaactctggaggtatcattttgctacaggagtatggcaccagatgggcacagatggctacatgccccgggaattggcatctatgtcacttgtgctgcatggaaacaacctgttagtatttggaggtacgggcatcccatttggagagagcaacggcaatgacgtccatgtgtgtaatgtgaagtataagagatgggctttgctcagctgtcgggggaagaaacccagtcgtatatatggacaggctatggccatcatcaatggctccctttatgtctttggaggtacaaccggctatatttacagcacagacctgcacaagttagatctcaataccagagagtggacacaactgaaaccaaacaacctatcctgtgatctaccagaagagagataccgacatgaaattgcacatgacgggcagaggatttacatcttgggaggtggtacttcctggacagcatattccttaaacaagatccatgcatacaaccttgaaacgaatgcctgggaggaaattgcaacaaaaccccatgaaaaaataggctttcctgcagcccgaaggtgtcacagttgtgttcaaataaaaaatgatgtatttatttgtgggggctataatggagaggtgatcctgggagatatctggaagttgaatctgcagactttccaatgggtgaagctcccagctaccatgccagagccagtttattttcactgtgcagctgttacaccagctggttgcatgtacattcatggaggagtggtgaacatccatgaaaacaaacggactgggtcattgtttaagatctggctggtggtacctagcctgctggaactggcatgggagaagctgcttgcggccttccctaaccttgcaaacctctcccgaacacaacttctgcaccttggactcacacagggactcatcgaacgcttgaaatgaggatttctggactgttcattgatactggaaatgttaatttaaagagactcctttatttatgggcagtgtagaatgtgctacaaagaggattggttaccctgatcaaggccttatttagaaaatacatcagatgcctttctgtaaattggtttttcagtttatggacatctcactttcccacgtgcttccttctttgcttctgttcctcctgacccattacatgcacatgtactcacatactccctcttccttctcgatggagttaagggaaagcctgaaagtaccttaataatgttattaatcaagacagattcctttttaaaggaattctgaatagttccatgtcatacaatattctagaaattaaaacatcatcaacataaagaaaaatgaaattaaaaaatttttacatctagcaacagcaacaaccacaaatttaggggaagctgagaaggctaaccttgggaatcttgcaggttatacttaaacctagatgtttaacttagtgttttcaagatgtgtctaactgagtagtagctgggtctgatggcagcagtgcttgccatcttgttgcacagataactcaaacctaccctttggctttgaaggaaggttaagcagcccagcaactcttggttagtgatttctttctcatcctcatggtgccagcagtggttagagttggtttgtcaaaagacttacgtgtgtgtcgtggtcgtgctctttgttgttgctcttagaaattatggcaccaagaatgtttcaaacggaaaaacttgtggtggccaaagttcttcattctggcagttttgaaactctcttatgcttattaatggttttaaatatctctttgacttcttcatggggaattgtagaccctaagtatgtggtgtaaatgccatgtaacatgaacacaagctcccgagggaggccagagaagagccaggcagagaaaacctgcatcctctgggcttgttaacttggcttccactcgggctgtggtctttggctatcatcttggccatttccttttgagaacttgtttcttttctaatctctgggccaggtacctgccattttctcaggcagttggtccttgatttttcccttagcttgttgccttcttttccgtctgctttaatgtgcatggtgctgtgaataattgtctagtaattggatacaaggtcttgggggtaaagccacaggtcatccttcctgaagaaccaagtatcatttaaaaactagcatgaggaaggaatgaaactgagtagcattcattttgtgtgtgtgaaattttagttctggtttgtttgatttgttttttttttaattctaaaaagaatgacataaattttcactcgctttgccatctggctgctaggggagctgagcaagaggctcaccatgcgcatgtgtaagccgcaggtgtactcaaggtgctgaaggcgtgcaaggggcagcgctggtcctcccggggccaactcacagcaggagactcgcatgggagagttggaacacatctttcctttaagtgcctcttttttcacctagcttttaaagttattctttgtccttcatctcagaagggatctctttagcttatgtgtggatttaaaatgacctttgagctacggttaaaaagctaccatctggtgttcagttctgggaaagagaaaaccgtagcctccagacatgctcctgatttctaggccttatcataccatcccctctgtgatgggttgagttcatggagcctgtattctgggaagtcttataataaccacgcacctgtgaacgtgggtcctttctggggagtgaggaatgtgggagagaggcagaaaaaggagcagctcctctaggggcccatcctcccacatcttgccattaccagtctgtgtagcacttaacctcctgccaccactgccaggcttgctcctccgttctctcccagagcaagtcagtctgagcagctccattagtccaaaacagagctttgctgcatgacttcagcctggcctctggatatttggtggaaatatattctaaattgaacaagccaggctgtccaggggtggcaagagggattttttgacctgggatttatacagggaccaaagactgaatgctcagcctctgtgcttaagactttcatgggtccttaggatagaagtgagtctctagccctgcttacaccagagagctgaagagagatgtggtctggttccatccatacttgctgggcatcctttgtttaagccttctgagggcagtcttctttggaggtaggaccttgggagggcctgacatcgaagacctgtgtgttttattttcataaaagtatatatccttggtctaaagtgtcttcttttaatataacactagtaaaaatgacatggtatgaccagcactgagtgctatagaaccacacatgtgtacatgttctggatgccaaatgagactgtgtgtaaatgactaagtgtagataactagaaattagataggggtcatcaggcgtttcggtatacctataaccagcactcggaattcctgacactgtttacttgatttaggaaagtttatgcctgctgcttctctgcctctttgaggtactcccagccgtcttactacagtcctgtaaatttaagtgcaatatatagaaacatatggatatatacagattatatatagggtgtaacctataaagcaggtagactacttttttgcatcttggggaagtgagctcattactttaggttcaaattatgccaagaattttagatgtgatcagctggcttaagccaactcatgtcatgataaagctggattttcaagtccatgttttcttactccaactcttagagactcattgttccttaggtttgttagagttgagattttttttctccctgtcatctttgtactctctcatgtttgcatgtcttacattttgttgccggagaacaaggaagtccatctgtaaggagtttcctaaacggagaattaaaacctagtatttaacactaaccattctcctatgtatatactaatttatctgggaatgtaatactttattaaatgaagaaaatgatgctttcttcatttaatattttccacatcctggaaaaactataaactgacacagaatagattgaaatcttaactggggctaaacaaaaccctttccattggcagaatctccttttttcagggccataatgacatgatgtaaaaatttgctttaaaccattcatgcccttaaatagctagattttaaagcataataagcatattaacatttttaagcaaaagatacgttaacagtgacctttggttatccacagtagcaagagtaaagcacagatcattgaaatccatagataatcagtgaatcaactttcctaccaaacaatagattcatttacatttctttttcctccctatcctttcctgtaagcacctgtttttccatggaatggggttaatgagtaggtagaaaaggaaaaggaacaatcagtaggagctgacaaccagtgaccatataagcagctgattgcctgtaattagtcaggctgaacaattagagttgaatgctgaaattaggaaccacaggtggtaatcctgagtagatgtaactcttcagcgtcatctcctgccctgagctccaggccatctctctaaccaccaaagaactcttagtacctacgggaaggaaaagctgtgtgcgacacagaggaaactccattatttgaacacatttctttggctcttgacaaatacttgcttttcctctaatcttgcaagagctatggctcttctattttccaatcacacagcttgggcatgtaggaaaggttgaatgatcctctaagactgtgttggtcttcgtattctgtaaaacccattttttttttgtggtcttacagatgtttagaaagtggcacaggttactgaattgtctacctgccagcattctgatatagcacaaaaagctattttcctttattttttgtattattttttatttttctggcattgagctctagggtggatgagggtttatggtcctctgatcataagctccattctaaaaactggtcactgttagctgaaattgctttggttccccaaatgccttggaactccagacgcacccgcagggcctgaggtaggcttcatagagttctaggacttccgtgtgcgttgccaccagatcctgcccagcaatggcctttcccttctaaggtcattagattcagccaaaagcgacctcttctctagtccggtgttacgaacagaagttctgagttgtgctacaaaagtagttccatctttttggtgtaattttcatgtttttaatttgaaaaaaaaaaaaaa

SEQ ID NO: 14241 - DNA, 349 bp, Homo sapiens
gaagatcctccacaggcatcaaggaaccaatatctcttaacaattccataaacacagcttccaggtatccacaagggatgtgtcaatttcaagagtcactacactcaggaaagcctaaagcttgaagactccatttatttatagtgcatcccaatccagatacgtaacaattaacgagttatttttactataagcaaagttgcctaaaatcatagttgatactaaccatggttaacagagctctaaagtttgacagaaagtgagattcaaatcctttcactctcatatgctaaaccttttgccttactctgggtcatcagagaaatttaggtgagaatgtatgatgaag

SEQ ID NO: 14242 - DNA, 669 bp, Homo sapiens
cccttttatctcgcacgagatgggatcagtgaggggccggggctgcctggtggaggggccccgggtcgcggcgagcccactccatctgattcgcatctttctccccggcaggagctgaagaagaagctgttcaaacgccggcgggtgttgaatcgggagcggcgtctgaggcaccgggtggtcggggctgtgatagaccaagggctgatcacgcggcaccacctcaagaagcgggcgtccagtgcacgtgccaacattacactgtcagggaagaagcgcagaaaactcctccagcagatccggcttgcccagaaagagaagacagccatggaagtggaagccccttcaaagccagccaggactagtgaaccacagctcaaaaggcaaaagaagacaaaagccccccaggatgtagaaatgaaggaccttgaagatgagagctaaacctcttccactagaagattctcaactggagccagccttcagactcagtggttgtttcagaggactttgacaaaagcaaggccccttttcactctccagatttcctcctacctaatggcctactgacctcccctagagggatgtctttgggagggaagaaggtacagaagaaagattggagaagggcctctctagcagtcatttgtaataaagccctagcactct

SEQ ID NO: 14243 - DNA, 976 bp, Homo sapiens
ttttttttgttttttttaggtattcattctgtttattggattgaaagaaagggaatacaaacgactggttaagtgctgcgcactgacatggaaaaagtgtctttaaaaaaaaatcccagtaaagcaaatcaaagttaatgtagtttcagttgaacaaaaatttaaagacgtttaatacattacacatttataaaataaaagtcaacaaagggtgttttgtaaataattagtaaacaagtgaaaataaatatcagagacctgaagtttttatactttaatgaataaagcaaagaaatttaaactaagtaaatataatctgagaggcagttaaaaaaacaaaaatcaaaacccaccaaaattgaagaacacaatcttttgaaacatttaatcagtccatagcaaatagttattacataccaaaagctctaagtgttaactagttccaccacaatgccatgtaaatcttgacaatttagaaatcttgagatcaacacttaagttcttttcttgatctctacagcttggtttgtaagtacatacatgcttttgtggatctattcccctcgccacacacacacattttcaaggagccaataacatttttttccatctgtgcctaaaaatgttacaattcagttctagcacattgaccctgataatgaaaatgtttaagttaaagatggggacacaatttcaatcttataaaaatataccagtattaaccaaaccttaaactcagagggcacttcacatgtgcacgagactttcagtaaaaatgacaagatcctagaacagctgtttccaggactttttaatgaatcaagtactctctctctcacacacacacagaacacacacacacatttttatactattggttttgttaaatccaggctatctggattaagtagataggggatgggtttttatagtttttatttttgtaactatagggcagctactataacaatagctt

SEQ ID NO: 14244 - DNA, 740 bp, Homo sapiens
gcttcttatttaattcaaattatattcagggactcttaatacttcatgcacaaaaagacacttcagtcctaaacctgtattttagtgttgtgaactccagtggtttcaagtcactaaagtttcttaagtcttcagtgttttcttaagcagttttcccttgtggctccctggcgtgttctctgctgactcttgtcccctgcccttagtgttattcccctgctttctatcccaaagcctccgaatgcacacccccagctgccctctgcatggactgttgcatgtgagtagacggccatagtggcgagtcaccttctgactcctgttgggtgcggcatgacccaagtgcagcgcaggccatctgcaggcaccagcgacagacgctgcaaggggtgcttcgtttcagcgttaatgccgctcaagttatcgtttgtcctgagaggtgctcccatgtcgtggtgctgagacctcctctgaagatgggtctttattcctcctgtaacctacctctaacagttccacccagctctgctttaaactgtatgtagaagaggcccatttccagaagcccctggaatggaggagacaggggctgaagcagactcatctgtgcatgactagttcattaggagttcagttgaaattagattagatgctcctaaaaccatgggcaacccaaatacataaagtggggctttcttttccccttgtaacagtgttttactttatagatttatttaaag

SEQ ID NO: 14245 - DNA, 2360 bp, Homo sapiens
tgatgatagagatgaccccaaatattacagaggaagaagaaaagcaagaaaaagaagaaaaacgagaagaacccatggaagaggaagaggagccagagcaaaagccttgtctgaaacctactctgaggcccatcagctctgctccatctgtttcctctgccagtggcaatgcaacacctaacactcctggggatgagtctccctgtggtattattattcctcatgaaaactcaccagatcaacagcaacctgaggagcataggccaaaaataggactaagtcttaaactgggtgcttccaatagtcctggtcagcctaattctgtgaagagaaagaaactacctgtagatagtgtctttaacaaatttgaggatgaagacagtgatgacgtaccccgaaaaaggaaactggttcccttgggattatggtgaagatgataaaaatgcaaccaaaggcactgtaaacactgaagaaaagcgtaaacacattaagagtctcattgagaaaatccctacagccaaacctgagctcttcgcttatcccctgggattggtctattgtggattctatactgatggaacgtcgaattagaccatggattaataagaaaatcatagaatatataggtgaagaagaagctacattagttgattttgtttgttctaaggttatggctcatagttcaccccagagcattttagatgatgttgccatggtacttgatgaagaagcagaagtttttatagtcaaaatgtggagattattgatatatgaaacagaagccaagaaaattggtcttgtgaagtaaaactttttatatttagagttccatttcagatttcttctttgccacccttttaaggactttgaatttttctttgtctttgaagacattgtgagatctgtaattttttttttttgtagaaaatgtgaattttttggtcctctaatttgttgttgccctgtgtactcccttggttgtaaagtcatctgaatccttggttctctttatactcaccaggtacaaattactggtatgttttataagccgcagctactgtacacagcctatctgatataatcttgttctgctgatttgtttcttgtaaatattaaaacgactccccaattattttgcagaattgcacttaatattgaaatgtactgtataggaaccaacatgaacaattttaattgaaaacaccagtcataaactattaccacccccactctcttttgatcagaaatggcaagcccttgtgaaggcatggagtttaaaattggaatgcaaaaattagcagacaatccattcctactgtatttctgtatgaatgtgtttgtgaatgtatgtgtaaaagtctttcttttccctaatttgctttggtggggtccttaaaacatttcccaactaaagaatagaattgtaaaggaaaagtggtactgttccaacctgaaatgtctgttataattaggttattagtttcccagagcatggtgttctcgtgtcgtgagcaatgtggtttgctaactggatggggttttcttattaataagatggctgcttcagcttctcttttaaaggaatgtggatcatagtgatttttccttttaattttattgctcagaaatgaggcatatcctaaaaatcctggagagctgtatttaatgcatttttgcactaattggtccttagtttaattctattgtatctgtttatttaacaaaaaattcatcataccaaaaagtgtaagtgaaaaccccctttaaaacaaaacaaaaaaatgaaataaaattaggcaaattgacagacagtgagagttttacaaacatgataggtattctgctcgggcaatttgtaagtttacatgttatttaaggataaaggtaaatcattcaaggcagttaccaaccactaactatttgttttcatttttgtcttgtagaaggtttatatcttgttttaccttggctcattagtgtttaaaaatgtactgatgatgtgcttagagaaattcctggggctttcttcgttgtagatcagaatttcaccagggagtaaaattacctgaaaacgtaagaagttttaaacagcttttcacacaaattagatgcaactgttcccatgtctgagtacttatttaaaagaaaggtaaagattggcctgttagaaaaagcataatgtgagctttggattactggattttttttttttttaaacacacctggagaggacatttgaaaacactgttcttaccctcgaaccctgatgtggttccattatgtaaatatttcaaatattaaaaatgtatatatttgaaaaaaaaaaaaaaaaaaaaattcctgcggccgcaagggaattc

SEQ ID NO: 14246 - DNA, 1748 bp, Homo sapiens
cccgggacggcagcaggtgggctgcacacggactctgggacaagtcgagctgaaaaccgcggagcaggggtggggtggagacgcccgcgacgccaaggctggggtcccggaacacgctgggaggagggtggaaggcaacctcggggaaactgggaaaggcggcctggacttcgggaacaccgcgtacctgcgggggcacagcccacccgagcgaacgggctccaaagggaaggtcccgcggtgcccaccggcagagctcagggggtggtgcgcccggcccttctgcggcgcacagcccagcccaggaacgcgggcggtgcggactcagcgggccgggtgcaggcgcggagctgggcctctgcgcccggcccgacctccgtctataaatagagcagccagttgcagggctccattctgctttccaactgcctgactgcttgttcgtctcactggtgtgagctccagcatcccctttgctcgaaatggaccccaactgctcttgcgccactggtaagggaagctctgcgccctggaatccccatttcccagccctattacagagggtctctgggtttcaggaagtcgcattttaagttctgagcgacggggactccagtacttcgttagatgctttcttcctgatcacgcccctgagagcattgccctcatccctgggcctctacgtcagagttaagaatactgaggctcaaggctgaactgctccacatcacccagttggtcatgggcctgctggctgggccccagtgctctgtccaggctctgagcaatcagtgtggttgggggtgctgggaaacattgactcttcagagttcaggacagaaggttctggctcgcagtctcaatattcctgggttgtatgtgcacgtgggaccttcctggtgcggtaaaacaggagggtccttgccccttccccagcgttagtggagaggacatggggcttctgttcctctgtcctgagtgggaaaggagctctgagggctggccctgcacagaggagggggcactggagactcactgacccactgctgtaccttctgcatctcactcactgcccactgcgttttcctcttccttgtaggtggctcctgcacgtgcgccggctcctgcaagtgcaaagagtgcaaatgcacctcctgcaagaagagtgagtgcggggccatctccaggaatctggggctgtggctcaggttgggagggaactcaaggctggccctgagtgcatccttctggggaactgggctttctttgccctcattgcccgtgtcattccctctccaggctttctgccctaaattcagatggggcaggacagcatttttctcgtgggacacaaaccccaactgtaccccctatggtttcagaacagagctgtgccagacgaaaaaaagcatcctctgggtctgggttctgagctcgagccaggcttgctattagggcagggaggtgcccggtcaagtctactgccacctctcactctccccttcttccccaggctgctgttcctgctgccccgtgggctgtgccaagtgtgcccagggctgcgtctgcaaaggggcatcggagaagtgcagctgctgtgcctgatgtgggaacagctcttctcccagatgtaaatagaacaacctgcacaacctggatttttttaaaaatacaacactgagccatttgctgcatttctttttatactaaatatgtgactgacaataaaaacaattttgactttaaaa

SEQ ID NO: 14247 - DNA, 470 bp, Homo sapiens
gagtttcgcggccagaggcttacaggtccaggtggagaggccgggctggccagggcttcggcctccggcgtcgggaaatggcggcggggggcaggatggaggacggttccttggatatcacccagagtattgaagacgacccacttctggatgcccagcttctcccacaccactcattacaagctcactttagaccccgattccatcctcttcctacagtcatcatagtgaatcttctgtggtttattcatctcgtgtttgttgttttagcatttttaacaggtgtgctttgttcttatcctaatccaaatgaggacaagtgcccagggaaattacacaaacccatttgaaagttcagacggttataatccttggggaaagttattttgtgggattctccatttaattccttgaatggtaacatccagtattcaccacaggcaaaatcaggaaaccgaggctataacttg

SEQ ID NO: 14248 - DNA, 1723 bp, Homo sapiens
  misc_feature (1)...(1723): n = a,t,c or g
ggctgctgaggctcctgttaaattttctgtggcatcttttatgccttggtaaaaactgcagtgtctttggacctgagagtggctactccgtggttttgtgacctgtaagcgtggggttcaggggtgtgtggccctgcagggtcccacgcctccctgagcactgactggaagtttcactggctggtggctgtcccttctcccatcagggtccccagcaaagttaactacacagaggacccaggggaaacgagctgtgtagccactgacttgctcgcgcggccgtggcctctgaggggcactcgccggttaagacagggtgggagtagtgctttccagttcagactctaacttctcccaaagtgtcctaagaaaatactggatcggctcatagatttatgctccttatgatgccctaacttggaaggttgttctagggacaggccgggcagtgttcccacaaacaactttagagttcgaaggccccagggccccgctgtcacttgcccaaaagatcccttccggcaggtaagggactaccaatgcttacgtcaaaacagcagaatcggctttgcagtgcactttggggagcagatattaacttatttttgtgttggacagtagtgaaatcttgtgatttttaatcgctttgataatacttccaaattttatgatttttctgaaggaaataatgcaaacattttaaatatgtttctccccctttccaaaaactgttaaactaatgagcaagtaacactaactttgaatgtctctacaatacccgttgataactcagtggagccaggctttggggtagcggccctgagcttgcagggtttctcgccactggggctgaccacgcccccagctgtgaccgtgggtgtggctggctctcggccctgcccagctttgttctgaggacgtggtgacttcctgaacatcagcttcaatcctccatcattaatgtgaagcaaaacacaaaaaccgccccaatccctcaggattccttggcatccgaaaccagcatctgcacctaaacccatacccacccgtgtgcgcccacagggggatgtgtccgaatgggcagcttaaaatgtggtcacctgtgggggaaactcttcaggcacctgaagtgagaacccagctgtccgtcctcaggccggcctttcttccggcgacacccgtccatggctggctgggtccccttcgcagtgtttgtctgtcttgacatctaaaccccggcgtgtgcagtgcccatcttccaggactaccttattttccagaattaaacctgttttataattcaagttaatgcaaatgactgtcagttgccaaatatcttgatcctatgagtgtagttgatgactgtttgttagtcagtagagtaaaatgctgtgtccacggggtgtcacagcctcaccataccctgttgaggtgtgaaatgccccgtcagaaattaaatacaaacttaaatgtgcctattgggtgtctaaacttcatacaatgttaaggtcagattccttttaggaatacctgggtgctgtcccccaggtttgatagttagncttaaaaacttgaaattcnctttttggggggagggatatactgaaatagagagttgagacttgccagttgggggaaaatagcatttaaaatggaaagctgtgtttggaaaattgtgtatgagtatttttgtattaaaaacattttaaaggcttttttctta

SEQ ID NO: 14249 - DNA, 1277 bp, Homo sapiens
cgatgagtttcgagtggccgtggcagtatcgcttcccacccttctttacgtgaggctcagaccccaagaagcaccgctgtgcctccctcccctcccccggaccctgggctcagcctggatgcttcatatggggagggggagaaaagacccgtcggccaacaccctcagtcccttactttcttcctgaaatgcgtcccgggcaagtgctgcctcccgccctctaattctgcgccccactcccttcacccggcaggttacaaccgaatgtggacactcggcagaagcagctggccgcctgggtgctcgctggtcctgtccttctgccgcctggcacaaacagtccagcatgacggtgatggaagctcaggagagcccgctctttcaacaacgtcaagctacagcgaaagcttcctgtggagtcgatccagattgtattagaggaactgaggaagaaagggaacctcgagtggttggataagagcaagtccagcttcctgatcatgtggcggaggccagaagaatgggggaaactcatctatcagtgggtttccaggagtggccagaacaactccgtctttaccctgtatgaactgactaatggggaagacacagaggatgaggagttccacgggctggatgaagccactctactgcgggctctgcaggccctacagcaggagcacaaggccgagatcatcactgtcagcgatggccgaggcgtcaagttcttctagcagggacctgtctccctttacttcttacctcccacctttccagggctttcaaaaggagacagacccagtgtcccccaaagactggatctgtgactccaccagactcaaaaggactccagtcctgaaggctgggacctggggatgggtttctcacaccccatatgtctgtcccttggatagggtgaggctgaagcaccagggagaaaatatgtgcttcttctcgccctacctcctttcccatcctagactgtccttgagccagggtctgtaaacctgacactttatatgtgttcacacatgtaagtacatacacacatgcgcctgcagcacatgcttctgtctcctcctcctcccacccctttagctgctgttgcctcccttctcaggctggtgctggatccttcctaggggatgggggaagccctggctgcaggcagccttccaggcaatatgaagataggaggcccacgggcctggcagtgagaggtgtggccccacaccgatttatgatattaaaatctcaactcccaaaaaaaaaaaaaa

SEQ ID NO: 14250 - DNA, 624 bp, Homo sapiens
actggaggctctaagatggcggcagtggcaacctgcggtagtgttgccgcgagtactgggtctgcagtggcgacagccagcaagagcaacgtcaccagtttccagaggaggggtcctagagccagcgtgaccaacgacagcggccctcgactggtgtccattgcgggcacgcgaccgtcggtgcggaatggacagctgctggtatcaaccgggctcccagccctagaccagctcttaggtggaggtttagccgttggaacagttcttctaattgaggaggataaatataatatttactcacctttgctcttcaagtatttcctggcagaaggaattgtcaatgggcatactttgttggttgcatctgctaaagaggatcctgccaacattttacaggaacttccagcaccattacttgatgataaatgtaaaaaggaatttgatgaagatgtatacaatcattaaacaccagaatctaatattaagatgaaaatagcttggcgtttaccagttattacccaaggtgggagattgggaccagtattcatctttcaaggatttgggtcactatttatggatggcatccaaaaaggatgccacaaggaacttatttgtgggtttcaa

SEQ ID NO: 14251 - DNA, 576 bp, Homo sapiens
ggacggacagctgagatgggagacaggagagatgagccccaggacccctggggagccaagctgtcccccacatcctagcctctcaccccacctggagcttcaccaagggctcctcagcagtgaagtggcacaagcctcccagtttggtgggcaagtggggctgatggtggtgtcatggctcctggagacacgacataaccaggagggtgaagggataaacctggggtgggctggggctgagacccatggcatgaccccaattctctctcctcaagctcgacccccccgccatccccaggatcacacaggagaatctcatcctcacggcttggattggtcctgggggcccccggttgtgctgctaactggtgtacaatgctcaagagcagcccagaggggagccaggaagggaccctcgccctcacctgctatccccatttccgcatctcttgcactggtaccctgagggccacattctcagttcctgggattgaaaactgcagcagtctggccagctccagggacagagtgatccaaccacctaccacgtaccctctcagcaggccactggaccca

SEQ ID NO: 14252 - DNA, 589 bp, Homo sapiens
  misc_feature (1)...(589): n = a,t,c or g
gggctgggccgaggttccccaggacgacaggagggagccaaggcactctgctagaggttgagggcctgagtcactcccccttccagtcaccaggaattcctggagagtttgagaaagcaagaaagattctttaagctggttcctgacacaacagctgttaggccactgaagcctgggggagcggccgggtggcatttgtggggtcagctcatcggtgtccacacaggggcctatgccatagtgcggccaacagggaaactgagccctggagagttgcaggggcccagccactgctgtgttgtcagagcaaagtccagccagccccagtgaggctggaggcaacgctgtggcacccacttccctggatgcctgagaaccctgcagaggggccacccacatgaggcagaagacactcagccttcagggatgaagctactccctgaggtcccagggacgggagctggcctggcaaatacatctaccctgcctgagcagtccccaggccttggctgcccatgagcactcggggacaggccagagacaaggccactccttgagtgctaaaagttccgtnncaaaaccnnactca

SEQ ID NO: 14253 - DNA, 1527 bp, Homo sapiens
tttggagagttttaaaaattcagtatacccccagttcatgtatttactgggtgatttgttcttgctgaggtagtaaccagcccaatcttgggctgttaaatcctaggaaatctcgaatcatagtgattaaaatagttggggtaaagttgtagcttatatgcaatactacttggaggaattcttctactaatttgtatttaatgtggaaattgtatagtttcattgatttaatcataaataatggaaatggtctccaagaagttttatttttcatttttttgcttatacactctgattcctataatacagtgctataagctatgcacagaaaataaaatgtttgaaatccaagaataatggttcttactgctaagagggagtaatagttattactaatgattttgattgggttgcatttttgttgcaatgtttattccacttgcagttagaatatgaatatgttttatcactagtgtggctaaataaccaaacatttgtgtaaaaaaaaaaaaaagccaagatttcattgtttgttgaatatttcttaagcatctagcccctaaagagaccgcttcttaccaagcctgtaaactatgcatgatggaaattcttgtattttatttaggaatggctgttggtttactcaccacatctgtggaatcatggctataaatgtttgcttacaaactctttgtgacttgtaatttaacttaatctcatctaatgtaaatattagattatgatgttcagtaacatcttccataggtataaactgctgtcattattgatttcagagtaactctgagtaatcaaataggtaaaagcatgttttgagtaaaatagctagatttatactttacttgtatacagacttaacaacaaccggtattgactggattgacagctaaagtatcagaatgaaagcaaggtttttttgatgttacctgactgtcataaagatgaaaatgatttgtattggtatgaaatgcttatctttattctacttcgtaagggtaagttttatttatactctttggactcccatgaacttttgcacactgctttgtgtttttggtttaccctaaactaccatcctttttatctttgctttttttcttcctattcagaaaagagcaaaatgtgaaaacgacacaagactctcaggtatagaatgaactgagcaatttggagaatgtattggactttgtcctctcttattcccccctcctagccctgcaagttgctaggtacttgtgaggcagtgtactggagaggggagagcatggatcctggggtcaaagggcctttgccccacccttacttggccctctacctgcaggtgaccactggcacattctcctgcttgtctcagcttcaggttcttcacctctaagatggggatgatgaaaacagtacctgtcatgcagaattgttgggaggattgataatttagatgtttatacatgtaatgtacttagatcagtgtctgctcttttcacttgatatccagtactatgtaagatagaa

SEQ ID NO: 14254 - DNA, 1804 bp, Homo sapiens
caccattatccccatttaacagaagggaaactgaggctcggcaagcataggcgagttggcagtggaacacggaatctaaactcaggtgtgtccaagtcctcccaaaggacagcagtgatggagaggaccccagccagctgtgtgacagctgtttgttgctgacttcattttccaatccggagaaggggctctgtccacagtcccccgccgccaggtggcccacatggaccacagatatgggggagaggtatatctgttggcctgaagagtgaaacctgtaccaggccaaaggtgagggcgtgagtgagggaaggagtgtttatggaagagtgaagttctgtgcccaccacaagaggctgtgagatgttctgaccctcacccactgtccaccaaaagcctctcctgctgatgggcactaggagacctcagggtactgcccatctgtttctcctcgggtgccagccagctgctggtgatcctcagccggagggcagggtaccaggtaagcttaactccatcttgggtgtttgtgacaggccctgcctgccaccctaggcagggaaagctgtcaagactcctgccaggaatggggggtgctgagtcatctcacgaagaatccctcacttttcccgggttcagcccagaagcccttccaggcatgatcttccccatcaggcctggggctctggcagggacctgcccaggatggagatgagagagggtgagagatggagggcgagatttggatgggacccagggctcctgactctgccctggaaggttcatggggaaactcgctccttctgttggcagaggacagcccctggggaaccccaggcccaactctgtccggtatcccttttcctcccagctgccctcccctacttctcccttgctcccaaagctttccttggagaagggccctcctgcagctggaccctgcagggtggctccctcctccccatcaagcacaagagagggcccaggaaaaaaggtttcacataagtgtagagtcgcaaggacgcttagagtcggcagagtctggggtagggagacagcgacttgtccaaggtcaagcacagagggagaggttcaggagtcaggtcttctgccttctgagttggctcatcctgggcagtcacagactgtcctgcctgcacggctcctatccacctgggggtgtcgcagttgaggggctaattcccaggggactgacgttagttccctactccatccttccctggtgattcttgatcttcaaagcctcggggatcccaggtttccccatgtaactgagacaccctgcctgttagccctgggagacccctaaccttggcccaagacccctttgattctctaaggagcacgaaagggggaatgcccctcccaggagtttatgggagaagggactgggccggctgcctcccagcgatgcacttgacctgacactccccatgtcctggtgcgcacagcccttgtcggtgccccggcccctcccgcagcgttactgcctgtgtatagtataaatatatatattttctatatataagatgtataatataaggctccacaaatatatctgtgtgtgtgtgtgcgtgtgtgtgcggtgaagggcggtccccatcctgggcccccactctagacccccccaccacctggttaagtctcgagtgaatccagtggccccgtggcaccctcctttatgacatccatccatctgtggtgaaccaagtgaaggtggtgacttctggtgacagtagtaataaagtgaagactcagaacccaaaaaaaaaaaaaaaaaaaa

SEQ ID NO: 14255 - DNA, 313 bp, Homo sapiens
ggcggaaggagctggagacggtcgtagctgcggtcgcgccgagaaaggtttacaggtacatacattacacccctatttctacaaagcttggctattagagcattatgaacattaatgacctcaaactcacgttgtccaaagctgggcaagagcacctactacgtttctggaatgagcttgaagaagcccaacaggtagaactttatgcagagctccaggccatgaactttgaggagctgaacttctttttccaaaaggccattgaaggttttaaccagtctttctcaccaaaagaatgtggatgcacgaatgg

SEQ ID NO: 14256 - DNA, 1231 bp, Homo sapiens
  misc_feature (1)...(1231): n = a,t,c or g
gaataaccaaatcctgggatatttctgaaactcagtcgaggtcagtagatctgtctgggactacattttccatcccagttcctaacaaagtttcattttcttttctttattctctgatgtaagagttaacagtgaaatgaccaaaatcctgaaagccaatggagcaacaataaacatactcagatagattgcctcataaattctttcaagttagttttaaaagtaacacattttttaaaagtccactttggaaaaattgataatttaatatctggttatcagcctctccaaggtattccgggaaagttattttctttttatcatttaaaaatattccatttacaaagtcactttacatgaagcttttcagtgacataactttctcataaaatgtggtcctctgctttaaaatccatttgatgttttggagaaagtaaattctccagcagaattgtctcttgtgtttattggttttaaataacttggcttttctttgctccacctcctaaaacttgtatttcacggtttttcttttggggataggttcagaattttcacagctgtattcaggtaactgaagattttgtgtctccagaacatcttgtagagtcatttcatttaacacaggaactgagacttttgaaggaagaaatcaattatgatgataaactacagtgattagaaatatcaacatctctttcaggttaaaaatattttgtatcatgcagtcaaagaaatggtgagagccttgaagatacacgaggatgaagtagacgatatggaagaaaattaagtgtgatccagtttgatatttttaggttgttgaactgggattacttaaccttgaatgatgatatgtatgcacactgactttaagcttcataaaaccatcagtgccaagaaattctctttgtagtaattacttgttactgacaccacagcagtatagcatatgtcacagctcctgtgattcaatgttataaaacaagcagaattttaaaagcagcactatatagctgttttgtattatagtgtatatgatgtttgtgaaaatgccagatttaaaatgatgtatttatttttggtaaaaaataaaaaattctatgctatattgttgatcaagtgtaaatgtgaccttgtacagtttactaaaattactggatatttttcactacattggagaccagttactgtgagaataggaccccaancaccagctattgcctgcatc

SEQ ID NO: 14257 - DNA, 510 bp, Homo sapiens
  misc_feature (1)...(510): n = a,t,c or g
ggccacagggaagaaaacagaaaggtccttccctcttggaagcccctcttgaaacacctaattggtgacatggtacactggagaatcagagagtgtcactcaagcattttggcttggtggtggggcgggggtggcgggtcaggcactcaagcacccctaagctgatctggagaaagtgtcggggaaggggaacattagcgtttctccctgaggaatcatcttacacctataacggcaactggcccacagtaacattgatggagcaagtgtcttcttgtnnnnnnnnnnnnnnnnnnnnnnnnnnnnnnnnnnnnnnnnnnnnnnnnnnnnnnnnnnnnnnnnnnnnnnnnnnnnnnnnnnaacatctaggattgttgggggaaataaatggttaataattggaatagtgctgggtgcataggaaactctaagtggtacacagcatgtgggccnancttcccttttccttctttttccctttgntggtngcctngttccttaangggaacc

SEQ ID NO: 14258 - DNA, 1397 bp, Homo sapiens
ttacggaatttaaatacgactcacttatggggaaatttggcccctcgaggcccaaaaattcggcacgaaaaactgcctgactgcttgttcgtctcactggtgtgagctccagcatcccctttgctcgaaatggaccccaactgctcctgcgaggctggtaaggaacgcccgggttctgtgccttaggatgccaaattcccagacaccatagagagtgtccctgggtttgaggaggtcatattttgcgatctgagctgaagaggacttctttacttcctccgctgctttcctcttggccaagctcctgagcagcatgtccctcttccctgtgcctctatgtcagagttgagggtcctaaggctcaaggctgtcctgctccacatcaccccgttggtcacgaggctgctggctgagccccaattctctaaccaggctctgagcagccggattggatgggaagcattggataggtggggacattgcctcttcagggttcagcacagaaagtcgaagtcgaagtcttcccgggctgtgcctggagcctgggacttacctttggaatacaaacggagggtgcttggttttcccagcatgaatggagaggacatggggcttctcttcctctgctctgagtgggaaaggagctctgagggctggctctgcaacagagaagggggaagtggacactcattgacccactgctgtaccttctgcatctcactcaccgttcactggctttttctcttctagcaggtggctcctgcacctgcgccggctcctgcaagtgcaaagagtgcaaatgcacctcctgcaagaagagtgagtgcggggccatctccaggaatctggggctgtggctaaggttgggagggaacccaaggctgtccctgagtgcgtgcttctggggaaccggccttcctttgtccctgtaggttgtcactgcctgtctagtcttctgcactttccagggcttatgtgaggtggggcagctttctcaaaggaagacccattccaatgtccaccagttgtctcctgacaaaaaccatgccatcatgaactaagggtcctctggggctggagggatggagacaggcctctgttggggcagggagttctctgatcgagtctgctctgacctctcaatctcctttcctccccaggctgctgctcctgctggccctgtgggtggttggcaaagtgtgcccagggctgcatctgcaaaggggcatcggagaagtgcagctgctgtgcctgatgtcgggacagccctgctcccaagtacaaatagagtgacccgtaaaatccaggattttttgttttttgctacaatcttgacccctttctacattcctttttttctgtgaaatatgtgaataataattaaacacttagacttg

SEQ ID NO: 14259 - DNA, 392 bp, Homo sapiens
gggatgaaagaataatagcactcttaattcaggcactttcaagatgaaaggataatgaagaaaagttattaagatatatttctgaactggaaggaaagaaactaacatttagttgcagttaaacaatatttagtacaaactgagttgacatccccgggttataattttatttctatcttggggttaattgaagcatgtctgccattccccagtaatatatgtgaaaatggctacatttacattaagccagatttattgctatgcttatcctgatatttcatagaaattgtgttatttttcttttgtactttagtagaaagttaaaagcaaatatttaattgctcgacctcagaatttcttggttttttgagatggtcttgctctgtcctcca

SEQ ID NO: 14260 - DNA, 578 bp, Homo sapiens
  misc_feature (1)...(578): n = a,t,c or g
cgaaaaaagtaaaagagttaaaggtgttggattcaaagacagcccagaatctctcaatctttttgggttccttccgcatgccctatcaagagattaagaatgtcatcctggaggtgaatgaggctgttctgactgagtctatgatccagaacctcattaagcaaatgccagagccagagcagttaaaaatgctttctgaactgaaggatgaatatgatgacctggctgagtcagagcagtttggcgtggtgatgggcactgtgccccgactgcggcctcgcctcaatgccattctcttcaagctacaattcagcgagcaagtggagaatatcaagccagagattgtgtctgtcactgctgcatgtgaggagttacgtaagagtgagagcttttccaatctcctagagattaccttgcttgttggaaattacatgaatgctggctccagaaatgctggtgcttttggcttcaatatcagcttcctctgtaagcttcgagacaccaagtccacagatcagaagatgacgttgttacacttcttggctgaattgngngaaaatnnactttccgnatntcct

SEQ ID NO: 14261 - DNA, 539 bp, Homo sapiens
gcattgacttaattatcacagaagaacctgaaattggcaatatagaaaaacctgtagaaatttttcatataattgagcatttttgtcttggtagaagacgccttcatctatttggaagagatagtacaattcgaccaggctggctcacagttggaccaacgcttacaaatagcaactacaatgcagaaacatatgcatcctatttcagtgctcctaattcctacttgactggttgtacagaagaaattgagagacttcgaccaaaatcgcctcctcccaaatctaaatctgaccgaggaggtggagctcccagaggtggaggaagaggtggaacttctgctggccgtggacgagaaagaaatagatctaacttccgaggagaaagaggataaatgaatgattctgccttttgttatgtgcgtgaacagaatggaacaactcaagtagcttcatcttcagagactgaatttattctgatagacttcagctaattacaaaggattttgctaatttttgggaataaataatggaaaaagaaa

SEQ ID NO: 14262 - DNA, 1005 bp, Homo sapiens
  misc_feature (1)...(1005): n = a,t,c or g
agtaaaataataaatatacaagttatgtttaatatgngtaactgcaacatacttaaacatctaaacatataataggaattctatattaaaatgcaatactttcacctgcattaatctcttacacaatgaaaaaatacttgcagataattagcattaagaatgcaaatatatttttactgtggaagaaaaattccagtaataaggttagaaatcatatatctgtataatctacaatgaagctgtagatagtctacattatgatattctatcttaaaatgaaaacaattcaatatttaagcttacaacaaatttactcaaggcaaaatatgtttattacagaacaggatcttaaagtaagcaaggcaacatgagatcaaccattttagatttttttttaatgaagtgtagctttgaaattgtaataaaggtgaacataaattctaacatgctcttctcttcttataaatgggatgatgtagaaaagcaaagcttcaatgtatagggattggaaccattcggcactcttatctgatagtgattcagtgccgtaagggcttctactgcatcagttttgcactcccattctaatagcccagaaagtgttttggctgaaggttttgcatcaaacactttatatttgatgaatgtaagaacttcatggtcattacacaactttgtgaaggtctcttctgtgacacacaatggaacattataataatgcaaaacacaggagggtggctggattatattcttagatgcttggccagcacttgtaaagcgattatttttgctcattgcaaaatctttgtagctgctggtaccatcctccagctcaaatatttgacttggaacaactgaatgttgtttagacacgcaaacattaagtcttttcccaaataatttgacattattaaggtgtgtgacagctctttctacagcatactcatcacccatttctaccagtgctgtaccaggaatggtcttcataaattttaccttctcaat

SEQ ID NO: 14263 - DNA, 1183 bp, Homo sapiens
  misc_feature (1)...(1183): n = a,t,c or g
ttttttttttttttttattgcaaaactgaggtttaaaggacaaatacattatccatttaaaaacagatatctaagacaaaataactcaaacattctgaggtcagatacttgcttatgcacactgacatccacaactgctaccggtgcggaagaacgccagggactggttctgtatagtcacagccgagctgaacaccttagctccgacacctgggatgtgttctagagaatgacaggctgagactgtagtttggtttaactactggctttgttgcaataatcctcgaataccacacagtggcagcttttggcatcataaaaatgggacataactgaagggaaggcttcacacatcacaaagaccgggttggttaatgactaaatctcactacatgaatacgcaatcttaaattactgtgcttatcagccatttctcgcattcatgtgtagaaaaaaccatggagacgtgtccctggagggcaggttgtaaactgcaacagttactaggaagtcagtcctttacatgctcgtaacatgggcgagctcttgagatgggatctgggtggcaggagaggttgcttttcagaggaaagctgcctgggacccagcatggtggagcagctttgaagttgagtcccctctgggtgcatactgggttccaggggatgatccttggcttgagggcaggctgcttgatggaaggggacgctccacaataagaaagaacaaaggctttggtttgtcctcatcctccagtctgtcccacacacctgcccatctctgggttttggtggccccagtgagtggctgtggaaaaaggaggagggcccaggtgggtgctggcagctgtcctgcacccactgctggggtcgggtgnagttgctggtggagttctgtgatagcagaattggcatctcctttcctgcggaagcaccagtctgcacagaaagcataggatgtattgtattaatgggctagagacaaagtcgtcccagagcccctccagggccaggcaggtttataaggtagtggtaggaaaaagcttggtggctgaggcagtggcccagttttgagaccagctgaccccccatgaagaaaaactcagcagtccttggttattcagtgtttttgatgaggcagcctagctggagcgctggaccatgcagaatttgttgcaagaact

SEQ ID NO: 14264 - DNA, 1574 bp, Homo sapiens
tttttttttaaagttaaacttttaaagttaaaagtgaaatttattacaatacaataaatgcaagtgtcattattaaaaatgccggttaaaattataaagtatctaaataatttttctaatataaatattggaaatgacaactttaacaattctatatgtacacaggacactgaaaacataaaatcatgaacaaggccaaaaaataacgttgcacattaaccctttagttattactttctattttccagtcccagcatcatacctgctaattactcagatcacaagcctcaaggattaagtgttttgaatgtatttcagtttcatactttaacaatgcttaaagactattggttgtattctgatcaaatggttctccttcccatatttccctttctcaatagatcttagacaaaaaggtgagccagggaaaactgtgattacaggatcccaacatgaccaggtatacccaatgattcatttaagggtggcataaagttatatagaaaagacctacaggacggaagacaagtaccatccaacatgtagtgaaattaagcagttcacccactgcgtgcttacatggctcctatatctcttcgggaagaagccagagccgtagagaagtcagggcaaaccagaactgttgaggagtaggggtggggggcagagggaaggagctggggagaagtgccagatcataaaggaaatgtaaaagagttacctatctgttctccccctcctgctaacgcaggggctggctcgagcccagcctccctgcccgcatctcagtggagctcttcccccagcattgtctttcagatgaaaagatacatctgttccccactgagatgtttttttgggggagagagtatgttttgttttttattttgattatatattgacaaattattgtatatttttatagggtacaatacggttttatgatttttgaatataaggtggaatgattacactaattaacatatgatctcaaatatttaacttttttatgagaacattagaaatttactctcttagcaatattgaaatatacattcaattattcctatatttagcatgctgtgcaagtgatctttaaaaaaaaatcacacttattcctcctaactgaggctttgtaccctttgactgtctcccaattctgagaacacttttcataaatttgaggaactgcctaaatattataggcttgaacatctgaacttgtcctcagcatgaaagcaggtgagactttttttttttttaaacaaatgagcaggtaacacccagagaggttaagtggtttagccactggaaagataaggaagttgggtgtgatgtttacttctctatgatgatgcttctcaaactttcatgtgcatacaactcctttggatctcatcaaaatgtcctgggtccagagtggggcttcagattctgcatttctaataaggctctaggaaatgttgaggctcttggtctgtgggccacacttttaatagcatggactacaacacaaagagggatccaccctggccttcctgggtcatgagaggcctgcttcagcgttatctgcc

SEQ ID NO: 14265 - DNA, 1671 bp, Homo sapiens
tttttttttgacaatttactctttattgattaaaaatgaagaaaacatgcagtaaaatacaaagtccaaaaaaaggaggaaaaagttgaatattttacatcttccataacctagcatacatcataaggaggaatctccacttattggtacatcattattctctcctccagattattaaatattatcagctggctctaggatttggttcaaaacttaagcaaaaacccaacaaatcctttagtcgtttagaaagaccaaacatttcacaaatagcattggcacatattactttgtgctatagttagtccctactccagggacaaggggatcctgggacctagtcaaagaggtgcactctgaatcagcattcctagaaaggagtacagtcactcactaggttacgtgctgttccacctgggcagtttctgttcatgtattttctcagtatcactgcacaagccagcaaagggagtctaccacacatcatgcagaagaagtaacactgtcctgggacatggtgtctgtcttctaattcctagcagggcaaacaatgaactgaaaagaaggagaaaccccagcccaattctatttgccatgactgccccactgcagttcacaggtaatgatgggctagagaaagtgaacaggggatgggctgctgctcactcccagctaggcaccagaccatctccacaaagaatgctagaacagagtgatgctgccaccccttggattcataaataagtagattttgatgggtttgaaaaaaaaaaaacaaaactctaaggtaagcggtaagccactagtcttgtgccaaagaagatgctatctcttttctatacctcattcctacctccccatccttgttcctctccgtcccccctcgacaaaaaaagaaaaagaaaagctaagtatttttctagcaagctggtcaatcttcttttctccctcctggctcagcaggctccctccttttaccaagactgctgggacgttgaactccggtgtctgatcatctcacctactctcctcctaactcccaactgaaatccatctcctctcttcctccccaacatccatctctttcccaacatgcctttgcacctagagcaggtgaagaaagcccatgactaaaactaaagactcagaatgaaacaaaaggtgtgacaagttatttgtggggaaggttttcagatatgttccaagagaaaataaggtaaaacaaccttgttcatcagaccaacagtgctggaaagggctcgagtgattctgtaaagggcaactctcccccctttccagggacccacagcccatctttgtgtatctttttaaggccagattgagtatcccactcatatataaaactcggtagggttactagcagttagacaaagactatgaaacggtaggaaaaaagaaaaatcaacctcactgattattcacatattgcattatgagtgctcttttttaaacctaaagaataatttatattatttctgtagaaaatcaaatgaacactgtctactcataaaacctaaaggtcacggcacatgtggtttcactttccatcttgagttagcttcagcacacagagaccccctccaaagggtcagtgcaggagagcaggcagaaggcagcctctctggcccagtgtgtgtctcctttattgct

SEQ ID NO: 14266 - DNA, 445 bp, Homo sapiens
ggaagatgctgacaattctagttttctaggaaagatatatcagatagatattggttatagtgaatataaaatagttagctctcttgatctgtataagttttcaagacctgaggaaagctctcaaagcagggacagtgctccttctacaccaaccagccccactgagttcctcacccctggcctgagaagcattcctcctcttttctctggtagagagagccacaagacttcttccaaacatcagtcccccaaaaagcttaaggttaattctttaccagaaatcttaaaagaagtgacatctgtggtggagcaagcatggaagcttccagaatcggaacgaaaaaagattattaggcggttgtatttgaaatggcatcctgacaaaaatccagagaaccatgacattgccaatgaagtttttaaacatttgcagaatgaaatcaac

SEQ ID NO: 14267 - DNA, 2186 bp, Homo sapiens
cctcctccctagtgttcctccccatttttttcagaaaacacttctgactcctgtcccttccccttctgcttttggtcagtccctgttcttgagcctcttttctcctctccccaggatgcagaaagtggtgaacccaggaactgaggaaggaggtttccagttcatttacattaagggccctggggggagaataaagctcagagcaggagggagtaaggaaacatttcctttttgtttttatttggttggagtttctcatatttgaaaacattgcggtatccatgatttggccttgtggagggtgttcctaggtagaggtgagaatggggaggcaagatctcaggcaccaggcaggaggtgccttgtaagctaactgggcggaggtggaggtgcagtgtcaactgtggctctgtaactcttcaaaggcccagtttccctcacgcagcctcttaggtagcgtttcccctaatcgtgggggttggaccccagagtttccaaagaattttcactggttgcctgcatctttggctctgctgtgatctgattggaggagggacagtttctgggtacccatcctctgatttatacatatgcattttttcccctctggcctttagatggcctcagccccagccaccatatacccctgcagtttgcactttaattgatggtagttcagttggggtacttgttttatggaagttttgattgatttacttgccctcccaccttctttttaattcaatgaaatctgaggttaatgcgaggttcgaggagaggttatagataaaactaccagtggcagctactcaagtcctatctccactgttagcttcctccaactctaattattaacctatattcttgccaagctaactattgactataggtttgcctttcctggagaattaattgagcaattgaggagtgtctcaggatagcacaggccaaggtaggggagtaaaaaggaggtcaggcaaaagggaggagttttctgtcctttcccaggtttcacactcaatttgatatccattaccatgtcttttctacttccttgtaaataggtatgatctttattcccactgtacagtctgttctatcctctgcctcccatcaggccctgtttctttgttcctttgttaatatcttgaatttagtccctccatccttaatccccccatccctccccatcatgcaaccagtggtttaatccatgtaccaataggggctagtaccacagaggcctcctgtggtgccctcgtatcataccacctgttcctgtggagagggaatgaccggcactgaaggtaccttacaactggctcatattatcagaggaccttggtcctttctaaatctctagtctctcttcatatccttcatcaggtgttttaagatgtctctgagaagccatcaaggcaaaagagaactttaagttccttgttccagcccggagttttgggaaagaaagaaaggaaagggtcacagtgacctaggattggaaccttcctgcccttttggcttgcagactgccttctatcccagaacagctgagaaatctatgaagctgagattctgaaggacccagcttaggttcttccacttaggcctcaattcccttccttttccaggggcagccttagttcccatggccctgaaacacacacatttcccccttcctttcccagaagccactggccccccatagcacccagtgcatcctttttacaagtggaagaactaggatggctttccaaagtcttctagaaatgaagttctttctctgtgcagctttcccccttgggagcaggagtgaagatgtttcattatcttgggcctgggaaaccacttccccaggcttctccctccccccacccccataggaacaggatttggccttagcttctgggcctatcggctgccttccctctacttcctaccacctcttctgccttcctttgagctctgttgggcttggggatcttagttttcttttgtttatttcccagctcatttttttcttctggtcagtttttttaagggggggtgttgtggttttttgtttttgttttgcttctgagaaagcatttgcctttcttcctctcccaacataacaatcgtggtaacagaatgcgactgctgatttaccgatgtatttaatgtaagtaaaaaaaaaaaaaaaaaaa

SEQ ID NO: 14268 - DNA, 726 bp, Homo sapiens
gtgaacagtaacaaactttggtgaaatttcaggaaccatagccattgaaatggatgagggaacctatatacatgcactcgacaatggtctttttaccctgggagctccacacaaagaagaatcgccctgaaatctggctatggaaaatatcttggtataaattcagatgaacttgttgggcattcagatgcaattggaccaagagaacaatgggaacactgaaaggttttgaccagaccattaatttgattttggatgaaagccatgaacgagtattcagctcttcacagggggtagaacaagtggtactaggattatacattgtaagaggtgacaacgttgcagtcattggagaaatcgatgaagaaacagattctgcgcttgatttggggaatattcgagcagaacctttaaattctgtagcacactgaggaaaaactacatacttggacatctgtaaatctttgtacagaaactgattattctgaggatgatatatggagtttttatgaatgtgtcactggattttgactccttattgattcattgtaatatgtaaattaaaatatttctacattttattgaaaaaaaaacctttttttttgcctaaatataagtttggtagcttggtttcttttttttattaaatagtgtgaaaatataatggggcattttgaaaacttttaggaaaaaagtaggtactttttgatactttagtatttatgg

SEQ ID NO: 14269 - DNA, 1234 bp, Homo sapiens
aattggttggagagatgagtgaagtcgttgatcgaaatcctcagttccttgaccctgtgttgggctatttgatgaaaggcctgtgtgaaaagcccctggcttctgctgcagccaaagccattcataacatttgctctgtctgccgagatcacatggctcagcactttaatggactcctggagattgcccgctccctcgattccttcctgttgtctccagaagctgctgtgggcttgctaaaagggacagcacttgtcctagcccgattacctttggataagattaccgaatgtcttagtgaactatgttctgttcaggttatggcattgaaaaagctgttgtctcaagagcccagcaatggcatatcctcagatcccacagtgttcttagatcgccttgcagtgatatttaggcataccaatcccattgtggaaaatggacagactcatccgtgtcagaaagtcatacaggaaatatggccagttttatccgagactctaaataagcaccgagctgataatcggattgtagagcgttgttgcaggtgcctgcgctttgctgttcgctgtgtaggcaaaggatctgcagcactgctgcagccactagtcacacagatggtgaatgtgtaccacgtacatcagcattcctgcttcctgtaccttggcagtatccttgtggatgaatatggcatggaagaaggctgtcggcagggactgctagacatgctccaggcactgtgcatccccacctttcagctcctagaacagcagaatggtctccagaatcaccctgacactgtagatgacctgttccggctagccaccaggtttattcagcgtagccctgtcaccttgctggcggagccaagtggtcatccctatcttacagtgggccattgcctctactaccctggaccaccgggatgccaattgtagtgtcatgaggtttctacggagacctcattcatacaggggtagccaatgatcatgaagaagactttgaattacggaaagaactgattggacaggtgatgaaccagcttggacagcagcttgtcagccagctgctgcacacctgctgcttttgcctccccccctataccctaccagatgtggctgaagtgctctgggagatcatgcaggttgacagaccgactttttgtcgatggttagaaaattccttaaaaggtttgccaaaggaaacaaccgtgggagctgtcacagtgacacacaaa

SEQ ID NO: 14270 - DNA, 884 bp, Homo sapiens
gaccgccccaccactggggccctcctgctgctcactgcccttcagctctgtgaccaggtaaggctccactgcagctgcagaaatacctggagaaacagctcctgggctattcctgggcctgttcagcataggacagtgcatgggctgggtgcccacatctgctgggaaagagggtgggcatgagtatgggtgcatgcagttatgcgtgcgtatccagggacctgcacccagacccctagggacggagccagggaaaagaacccccacccctcaacacagaattagccatgagaagaagcctgggcaacagcaactacaggccgtgtttctcctccaaccgtgatgtaggtgagtgcttatggcttcatcactgagggccatgagcgcttttctgatcactactatgatacatcatggaacggctgatcttttacataaaccatgacttcaagctggagagaaaatctggaagcggtacacgatgaagggataatccggctgtaccagcgtcctggtcccggaactgccaaagccaagaactgaccggggccagggctgccatggtctccttgcctgctccaaggcacaggatacagtgggaatcttgagactctttggccatttcccatggctcagactaagctccaagcccttcaggagttccaagggacacttgaaccatggacaagactctctcaagatggcaaatggctaattgaggttctgaagttcttcagtacattgctgtaggtcctgaggccagggatttttaattaaatggggtgatgggtggccaataccacaattcctgctgaaaaacactcttccagtccaaaagcttcttgatacagaaaaaagagcctggatttacagaaacatataga

SEQ ID NO: 14271 - DNA, 748 bp, Homo sapiens
  misc_feature (1)...(748): n = a,t,c or g
attctagatgcaggtttccaaatgcctacgccaatccaaatgcaagccatcccagttatgctgcatggtcgggaacttctggcttctgctccaactggatctggaaaaacattagcttttagcattcctattttaatgcagctgaaacaacccgcaaataaaggcttcagagccctgattatatcaccaacacgagaacttgccagccagattcacagagagttaataaaaatttctgagggaacaggattcagaatacacatgatccacaaagcagcagtggcagccaagaaatttggacctaaatcatctaaaaagtttgatattcttgtgactactccaaatcgactaatctatttattaaagcaagatccccccggaatcgacctagcaagtgttgagtggcttgtagtagacgaatcagataaactgtttgaagatggcaaaactgggttcagagaccagctggcttccattttcctggccctgcacatcccacaaggtccgaagagcctatgttcagttgcacttttgcatatgatgttnaacagtggtgcaaactcaacctggacaatgtcatncagtgtgtcccatttggaagcaaggaattctncagttgnaactgtaggaccaggagcttctcctnggttggattctgagaccgggaaaactttctgggccgttagagnacttgnttaaaaangggtttcantccacctggttcttggtttttgttcagtccaatggg

SEQ ID NO: 14272 - DNA, 764 bp, Homo sapiens
  misc_feature (1)...(764): n = a,t,c or g
ggaccactcaggagctcagtgagctggggccatgtccctgtggcctccagcccatccgcaggagggtcccttgcagtgacagcacaaagagtcccccacaggaagcccctgagggccagcatggaccttgagagccaggagggaatgggcctggtgccactctgttcccactcccacctaagattcctacccctgtgttctagcaggtgactcttgatctggccagcccacaacaaatacttgaactaggcagcatggggtggtggaggcctgcagcagccccgggcccaggaactgagactagggctttctcatgaggcctgatcaagctcccgcaggtatgacctggcctcctcgcctcgggctgccttaaagcaccgctaacccacgccaaggggctaggcagggcttcgcggggcctggcccaaggtctccagcagagcaataacatcttcccaggttgggttgccacagacaccctgccctggagcccccagcccatcccatctggtgctaccctgtctgcctggcagcctagcctcacccctcctgtccggtcatctgggggtccttggtaaggatgcagccacatggggccggtttatgcacctgggcggagaacctgaactgggggcaggggattgctcaggggcctgcaaggtcttcccaacagagctgctttttcttgcccnggcttcaccctgttggggttntgtaattttctttgcccggggtcaaaaaatnaggccagttgactntggtgc

SEQ ID NO: 14273 - DNA, 880 bp, Homo sapiens
  misc_feature (1)...(880): n = a,t,c or g
gctttgacacggatcggcccctgctcagcaccttagaggagtcagtggtgcgcatctgctgcatccgcagctttggtcatttcatcgcccgcctgcaaggcagcatcctgcagttcaacccagaggttggcatcttcgtcagcattgcccagtctgagcaggagagcctgctgcagcaggcccaggcacagttccgaatggcacaggaggaagctcgtcggaacaggctcatgagagacatggctcagctacgacttcagctcgaagtgtctcagctggagggcagcctgcagcagcccaaggcccagtcagccatgtctccctacctcgtccctgacacccaggccctctgccaccatctccctgtcatccgccaactggccaccagtggccgcttcattgtcatcatcccaaggacagtgatcgatggcctggatttgctgaagaaggaacacccaggggcccgggatgggattcggtacctggaggcagagtttaaaaaaggaaacaggtacattcgctgccagaaagaggtgggaaagagctttgagcggcataagctgaagaggcaggatgcagatgcctggactctctataagatcctagacagctgcaaacagctgactctggcccagggggcaggtgaggaggatccgagtggcatggtgaccatcatcacaggccttccactggacaaccccagcttgctttcaggccccatgcaggcagccctgcaggccgctgcccacgncagttggacatcaagaatgttctggacttctacaagcagtggaaggnaattggttgatactgacccccaggccctgcagtggggctgactccagatctctcctgccctccctgggcagcccaggaccca

SEQ ID NO: 14274 - DNA, 2968 bp, Homo sapiens
tttttttttttttttagagtttcaaaggatttatttgatttccccacatgatcacaaccatggttttacattgatagagtctgttgccactgacaaacagaatgcagatgaaaacaaacgcactcctttcctctcaaaggtacacagtgggggtgccaggcttcttgtgagggaggtgtcccttgaagtctctgaacagtctggggattcaggacctgattctaattgcttaaaacaactcggaggcaaaagatattttccaagaggagatgcatgctgtgtgcagtctcgatgtgactgcacacagaagggcgatgcagatgcatctgaatggagggcaggcctcctccctcttgtcctgtgctcagcacccccacctcaccctgctcagtgttgcaatgctgccttgactattgttgttacataaaatacaaatgtactcgtttctcaggcaggaagggtgatgatattttacaaggagaactgtaagactgtgcgtgcttacctgcgggcacagagcttcccgtggcgctgagtcaacaccccagcatcagctgtgaacatctgctgtcttttcagctcattaagaaaaacaagaggctcctgctgcatgcagtgtgtgagggaaagatcactgcactgggtgctgaagacatttttaagcaagatgtgcacagcatattaggatgaactttatttttacattgttgtacaattcattggtaaacttaaaaaaatacaaatacatgatttgattgttgtcccagaaaagacttttgtcacattgccagctgtttccctcagcgtctcctgctcctgtcagcaattctgtatgtaactgcaataatttgtgtgacttgagaaaggtgtgccaagggcgtcctcacagtgagaagggaccaggcagacatcctggggccctcggcctcctcctgcctcccctcccaggggatgtgatgacaggaccccgaagctgtggctctgacaggtgggatctctaaaggggacagtcccatgaaagacacacggggacaccagctcactgggagcttttgctttcccaaacaagatgtgggcagcatgactccagcctctggaacccaacaatgtatcttccacaaacttttgataagcttgcaaataaaacagaatgaaacctcactagcctgaaggaacacactgagtgcggcgggaaaccccgggaagggctcagtgggttccagcagttccttacgcgaggccctgctgcccagcacagctccaggacacaccgaggacagtgccacaggctggcagcccgaggctgtggagcttgcaggatggcgatggagagggagagtttcctgaaagcccctcctggggttttctgtctgttcctattcattactgctacccttcagaaagagcaattctgtgccaaacggcctgaatcttttctggaacaacctaaaggttacagttagactctccctccccagcacagaagagggtgagaaaagctgacatactcaatatgtaatcgctttacttcaacgatgtgtttacagtcacgccaatacattttgcaaacgcacaacacgcagagcgcagcctcacagctgacgccagatgacatgcagcagtttaacgcttccaggtcggaacaacctcctcaaaattgcgagacaaagagtgctttggggagcctggcttttaaaaaagacccgagaattgatgagtcggagacaccagggcgcttccctgacagcccagcctggacccaatcacacggtcccatgctgtttctttctgagcagacaccaaagaaatgccacgccaatgggaggacacaggtgggcgggttaaagtcacatttttaaaaaggctaaactctagattgctgtatttgctctctctggagattaacaaagtgcttggtttgcagatttgctggtacggtgatctcaatgatatgaccgagggtgggagggatgtgaggagggaaatcggcaaaaccttggccagccagccagccaaggtgacacacagccagaggggcttccctcctcctcctgcgtccggccacggctcaccacgctgtccactggaacgcggccccgcggcccgcagagtcaggcgtgacttcgccctttctgaaagggcctccgcctgggcaggcgccggggggcagtcctcgggtcccatggcttaggagcacagcactgacggctgcagtggctcgaaaggctgaaactacaaagtatggcccgtgggtgactcgggcacagacctgccgcgtgcaggtctggccctggggagcgcatggtgtcaccacaacacagaagcgacaagagcacagctgagagtcatgtgatgccctggcagctcactggaccatgggaaggcagcgggggctccgccgggcactcgtcggctggggtcacacgggccacggtgaggacacaggggttctgctagcacatggctacatggaattacggtgatcactgctaccactcagaaaacaaaacgggaaacacacacaccgccctgggttctaaacgctaaagtcaaccttcaggttcgagagtggttcctgatgaaaacactctctgagggcttcggcctggtgtgggttggaggcgggatgaggacgttatggtgttggggagacgaggatgagagctggtcactttcatgttggagatgaacacttctgccgtgtatgggtgcccctctcggaggactctgaatgagtgtgcgtcaaatcatatgcgcataaaagaaacatggatcatggagagtcacagttatcgcagccattaaagtgtctaagaatccgtgtaaccaatgtcctaagacaaccagcttgtaaccagctgtcctgagttgctactgtagagtgtactgcagtttagctatttgcttacctgaaataacagcattataatactatttatgatagtattctgttaataaaataaggatt

SEQ ID NO: 14275 - DNA, 522 bp, Homo sapiens
tcagcctggaaacatgctaaactgcagccagaactccagctcatcctcagtgtggtggctgaaatcacctgcattttccagtggttcttctgagggggacagcccttggtcctatctgaattccagtgggagttcttgggtttcattgccgggaaagatgaggaaagagatccttgaggctcgcaccttgcaacctgatgactttgaaaagctgttggcaggagtgaggcatgattggctgtttcagagactatagaatacgggggtttttaagcccagtcaactccaccgagcacatagtgctcttttgttaaaatattcaaaaaaaatctgaactgtggacggcccaggaaactattgtctatttgggggactacttgactgtgaagaaaaaaggcagacaaagaaatgctttttgggttcatcatcttcatcaagaagaaattctggggaggtatgttgggaaagactataaggagcagaaggggctctggcaccacttcactgatgtggaacggcaga

SEQ ID NO: 14276 - DNA, 2225 bp, Homo sapiens
gtttgcattcacctttacaaaggcctttctttagatctgtgcagcctttgcgtgccaaacttgtgaaattccttttaccttttttggagtacttgctataaagccacctgtcaacaaacccccattacgtacagaataggacctatccagtagccaggccagtaggagtttggggaaggtgggaaggatccagcgaggcccctgagcctgcacctggacaggtgtacgtctgcacccatcaccctcagcaccaggccaccctgcagtccacttactgtactgtgttgtggaaggatatgctaagtgatgaaagttgcgagcagtctcactggtcgtgtaaacttttttttttttggaaattgaagctgtagagtgctgcccgaaatctctaggaagttggtggcaagggacagcactcacactcttctggtcatgatctctgatctccacctcaaatgacaataaaaaactggtccaacgaagacactgctcagcacttcagccatcaggactaatccatcgatgactggaaaagaggctagctttgaggaaaacagcctgggctcttgggagcagagtccagtgggtgtgaggctgacttgccgacggtcggcaggtaatggctctcagccggcgaggcggtcccacagctctcctcccagggcagcctgaggaggaggaggccgggtgcctgtttggtggcagcttcagcctagggatacctgaagctgttgagcaacacctttatgaaatgttgccagagcagcaacacttccctgtgggcacagccccgggaaatccggtaccaagtgagcaaggtggcaggacccacccaagcctgatacgcatctgggcctgccgggctcagcaggggaggctgctacggctgcccacttcccagcaccgtctgtcaggcttgaacccctctgtgctgttcccttcctggctaatagggagacccttcgcaggcacccactgtttcaacttgaccctcccaccccctgctactctcctccacacacccctccgttccgctagcctaccctgtcagcctttcaataaaagttatgcacaaatgtgaacacctgagatggagctgaacatttcttcactttgttctttttctgaagtcaaactcttatcaaatgccctaaaattattaccacccaagagaaacaggaaaaaggttacatgtttttgtttactgagagtaagatcacctgcatctggaagacgggctggtaaattgggtttgggctacaggaacaggaaaggaaaacaaaaacaaacctcgtaagggaagtatcgcactcagacaccaccacttcctagagccaaatgagcaatcccaaactgcaagtgccgtaagtgggcctgtgacgttcacaccgcccggcccgaggtatcgcatgtgccgggggaggcccacactacagctgtcctctcgtctagaaggcaccacctcgctttcatgtcccgtgtgttttggaaaagcagtatggtgtgtcatgtctagcggcgaacacttccctccctctgtccttgaggttgtaatataaaaactgtgtttctgtacgtgtgggtgggaattctctgacggtgctcgttcatagcacaagcttacgctgagttctgaactgtcgttcacagctgcgtgtctgcatggtgtcgcatctgttgtacctttggggaaaatttgtatgtaaatgtacagaaataaaaacgttgccccattaacagatttcctctggaatgtcttccctacctcacctgatggtatccaccgaagggcatttcactaccattaatggtgagtaataaaatcctccgtgttcattcagacctcactgcgtcactactttgaacgcctctgtaagctgtgtcttcactcgccccgaggtgggtggagggaggcctctcactctgcttcgagtcctggtcttaaaggtagtcagaggcagaggctggattaaacacacactgtttaccaagtgccactctcagaccacctgagagacggggggccatcagtaaaattaagaggaattttttttcccttgttcgtgtatgttctgctgatccgtggcctgaaggttcctagagacgtcaagaaatgaatatcttacactgtgattctgtgaggaaagactggtaacccaaaactctcttctctaatgtattttttaacgaaaatgacaatatttctttaataaagtatttatacc

SEQ ID NO: 14277 - DNA, 324 bp, Homo sapiens
gatagaggatctttaatgaagggaatgagcaaggtgaggaatattcatgcttttcttaggaagggatggagattttcctagaatcaaggagtcacctcatttctgtccttttacggtttctttctgttgttgtcatggtgattgtcaactgtcatgcactgatgggagtgctatttagcatggaaatcagactgtaatgaggttagaggttcttcagaagccaagtgagctgccatcttggatcccactagtcttagcctttttggtcaccagggggagcttctgacctcaggcatcctgttgcctcaagataagcagagttga

SEQ ID NO: 14278 - DNA, 1936 bp, Homo sapiens
ttttttttttttttttttctgcctttcccatctgactttatttcactttttttttctataaaactcctccataatttcacaatttaacaaaagtttaaaatccaggaaagaaacaatcctgtaactcgttacaaacacgattctccttattccttttatccaggagttggtctcgggccgatgagtgtcctagttcctagtgagaacacgttctttgttaaaaaaccctttatgggcaaagaaaggtattcgatacccatttgcttttccggccgtcggttttacatttttgtttcagggagagagcaaaacacagagatttgcactgggggcaggcggcttaacaggaaacacgtggcaatcacaaagtgccaggcccctttcctatggaagtgtccccagagccctccgtgggcccagccgccgggcagctggggtggggtgggagagcagctggggatgctgccttgggagcccatgctgcccagcacgtccatcaggtggtcacggagccagccctgggcccagagcagctctggaggacaaccgtggacgttccggccagaggaggtaactgaagaactgggttggtgcttccggaggccttggaaacggcaggaagggccagacgccaccaccgagagcaggcgggggagcccgaccctcctctggctgagtggaaggctgctcgagtcgctgtgtggattttgggggactcctgcgaaggagaaaggccagcaccctgggctgaggttcctgtccgtgaccccggcggcctcttgtgcgtagagctcccagcagcacgggccccccggtcagcccccctcaggccagttccttcagtccaatgtcttagtttccagagaagaaaggaagcgccccatggtggagtattgttggccgccctgggaaggggagagggggcacaggggcctgccctcttcctgatacctgaaggcagtggggccgggagagaaacagagcaggtggcgaggagtccccggaggcttcctccgaaggttctcgggcctttccccgagagttcctggggagtttcccccaggacagctggcattgggggcagccttggaggcatgggtccccaccaaggagtgttcaggatctgctgacagaatcagagcagggacaagatgagggacctcagggagggacagatggagccccccaagtctgaactcataggctggggaggaggagacatctaggtgggttcgagggggtgcgagcccacctccaggccctcagccctcttttcctcataacttggtcagggcacaaggacttgaaaggacttgaaagtcagggggttgagaggactggaggcgcctcgagtcaatgtctgggaaacagaggctaaccaggcagcctccagcccctgggacccccagccacgattgggctgcgtccgcgggagcgtccctggccctggaagagtgggccgggaaggaggaccggcttggcccctgggagaattctcaggcataccaggagtggggctgcgggcgcggcaccagcatgaattgcggcggtggaggccggggcgggccaggccgcgaccagagagaaaggcagcctgggagggccagcccggccaacccaccgggcctgctgatggccgagcccacgctcgaggggctgaccagagttcaatgcgcctcagaaaactccataaactatcccgtcttatttggcaaaagctcatatttttttcaaagtttgaagacttgaatgaaagagaggaagaggagcctatgggaggaggccgagccccagggcggctgatgcgagtctgtccgcggagactgttggcgctagtctgagtagagcccgagagcagactggtggctcccgggcgccctgaggactcgctgccctttgtagtgttggctgacccccccgggagccccgggaggag

SEQ ID NO: 14279 - DNA, 388 bp, Homo sapiens
  misc_feature (1)...(388): n = a,t,c or g
ggggcaagatagccgactagaagcagctgcagtttgaggctcccactgagaagaactaaaagagtgtgcaaatcctgcaccagcaactgacatatccaggttctatgatcaggactgactaggtggttgccgtgacccatagagaacaaggaaagatgggctggtggattggcccacctgggagccacatggggcaaggggagccgtcaccctcagccagccaagggaggcagtgagtgagcatgctacccagcctgggaaactgctttttccatggatctttgcaatccacagatcagaagatcccactcatgagacccaccacgagggccttgggtgccaaccacagagccatgcanaatnttaacagncacttagctggantctg

SEQ ID NO: 14280 - DNA, 500 bp, Homo sapiens
aagtactttctgtgccgctactgtctatccgcagccatccgcctttctttcgggctaagccgccccggggactgagagttaaggagagttggaggctttactgggccacagggttcctactcgcccctgggcctccggacaaaatggggtctgcggttggtgtcctggcaaaagcagggtagaagggctgcggggcgggcccagaatccgagcctgcagagatgggagcagttgcagtgttgagggcggaagaggagtgcgtcttgttttgggaactgcttcacaggatccagaaaaggaaatgccccggcgaagccacagaaaccagtccctgctacagagcaggagttgccgcagccccaggctgagacagggtctggaacagaatctgacagtgatgaatcagtaccagagcttgaagaacaggattccacccaggcaaccacacaacaagcccagctggcggcagaagctgaaatcgatgaagaaccagtcagtaa

SEQ ID NO: 14281 - DNA, 1128 bp, Homo sapiens
  misc_feature (1)...(1128): n = a,t,c or g
tttttttttttgttggttggcatattattattagtttattatttataccgtgctctgttccaaaaaggatgtaaggaggcagcatggcttgagtaccaccttacttgatgagttaaggagttcacatccatctagagacacttgtctgagagactgtattagaagactacgggatggtttaggggagggaagagtgctaagaaaagcagtggcatcttgtccaacctcatcttctctctcctcatttgcaaatcatatctcaggagtaagccaaaaactggtgggagggttgcagcaggaaaaaattagcagtaaagcaggagagggttaattcttagaaaggtacacaatcccaccatccttcccacctctggtgcctactgcaagtaaagagtctggtcttctcccgacaggctctggctgggcctgtggtctcatgtggagaatagccagcgtggtcagtctgtaggcaggggcccactgctagctgcaggctccaggctctgcccctccatcacccctttcctcctcttcatccgactgtgccaagggcgtatctgctccatcatcacttggatttgggctatgcaggttggtggaggagtcggaggaggaggaggaggaggtcctagatgtggtcctgtctgatgtaggcaccggcaggctcagctcctccaaatggttgtccatcccagacgactggggggttggtggaggatcttcgcaaggcaagaacacatctgctgcatccgggtccccaaggtcaataagttctacttgctccagtgtgtccacattcacttccatggatgagatactacctatggggggtctctgcgactcgagatgcagatgggacagaggaaagacaaactctgtctctggctgtaaaatgtcctcgaagaatttttgccgctcccgaaggcggagctgctggcgctccagggcggcccgaggatttgggtccatgtcagctcctgcgggtagaggagcaaaacaagtacagctgcaaagtcgaaagagaagacagaggggacctgggcttggggcgccccactgcagccagcatnccaacagtggggcccctggctccggcctggacacctctgcccttggtgacctctttcc

SEQ ID NO: 14282 - DNA, 582 bp, Homo sapiens
gtacttggaaagggtattgagttctgtacagttgatcacagatgcagatgcctgtgtcccacagtcgggaccttaaaacccttgcgtcaccacaaggacccccctggttgtccttctgtgaccgcaccccctccctttccaggatcctctttccaccctggcaaccactagtcttgttttctgtctgtggatttatctgcctattccagacgttcatgtgaaggacaatctgtgggcctttgtgtctgatacggcagagctttgtgctgttgcggcgcacccatgctgcggcagagcttggtgccgtggaggcgcacccttgctgcagcaggcatcagagcacagccctccctgtggcagggtcatgcgggtcatgcacccatcagctgatggacacctgaatggtctctgtttggccctttgcagcgctgctgtgaacacagacctgcgagtgtcgtgggagacgtgtgggcatttctcgggcgtacctaggtgtaggtcgctgcactgccttttgtttggagaccagccctttgaagattattgtttcatattctctcttgggaaaacttcttgggtttg

SEQ ID NO: 14283 - DNA, 497 bp, Homo sapiens
ttttttttttaattttaattcaaatttttatttaatcaaaagtcaaaatgtgaatacttgattagtggaattattgaattggtaaaacatacaatcaaaagtgaattcttagaactattattatgtcttaatccaatcccactgagctatatcttgatttcatatttttatcatgtctatagcttgtatcttaattgatataactcaaaagtaccatatagacatctcaaactaaagatcaccaggtgcttagtttcagagctgggttgtctgctatggaaaatatttcccagaatttagatgagattgggaaagatattgcccagaagagttcctccaaaatgccctttatatagagctcaggagaatctggaataatactgggctagatactgccctaaggccttgtacacttaaactaccacgatgtgcctttctgaatattacccaattactccaggaagtgagcataaatataactgccattctttattaac

SEQ ID NO: 14284 - DNA, 2152 bp, Homo sapiens
acgagactctctcctcctcctcacctcattgtctccccgacttatcctaatgcgaaattggattctgagcatttgtagcaaaatcgctgggatctggagaggaagactcagtccagaatcctcccagggccttgaaagtccatctctgacccaaaacaatccaaggaggtagaagacatcgtagaaggagtgaaagaagaaaagaagacttagaaacatagctcaaagtgaacactgcttctcttagtttcctggatttcttctggacatttcctcaagatgaaacttcagacactttggagttttttttgaagaccaccataaagaaagtgcatttcaattgaaaaatttggatgggatcaaaaatgaatctcattgaacattcccatttacctaccacagatgaattttctttttctgaaaatttatttggtgttttaacagaacaagtggcaggtcctctgggacagaacctggaagtggaaccatactcgcaatacagcaatgttcagtttccccaagttcaaccacagatttcctcgtcatcctattattccaacctgggtttctacccccagcagcctgaagagtggtactctcctggaatatatgaactcaggcgtatgccagctgagactctctaccagggagaaactgaggtagcagagatgcctgtaacaaagaagccccgcatgggcgcgtcagcagggaggatcaaaggggatgagctgtgtgttgtttgtggagacagagcctctggataccactataatgcactgacctgtgaggggtgtaaaggtttcttcaggagaagcattaccaaaaacgctgtgtacaagtgtaaaaacgggggcaactgtgtgatggatatgtacatgcgaagaaagtgtcaagagtgtcgactaaggaaatgcaaagagatgggaatgttggctgaatgcttgttaactgaaattcagtgtaaatctaagcgactgagaaaaaatgtgaagcagcatgcagatcagaccgtgaatgaagacagtgaaggtcgtgacttgcgacaagtgacctcgacaacaaagtcatgcagggagaaaactgaactcaccccagatcaacagactcttctacattttattatggattcatataacaaacagaggatgcctcaggaaataacaaataaaattttaaaagaagaattcagtgcagaagaaaattttctcattttgacggaaatggcaaccaatcatgtacaggttcttgtagaattcacaaaaaagctaccaggatttcagactttggaccatgaagaccagattgctttgctgaaagggtctgcggttgaagctatgttccttcgttcagctgagattttcaataagaaacttccgtctgggcattctgacctattggaagaaagaattcgaaatagtggtatctctgatgaatatataacacctatgtttagtttttataaaagtattggggaactgaaaatgactcaagaggagtatggctctgcttacagcaattgttatcctgtctccagatagacaatacataaaggatagagaggcagtagagaagcttcaggagccacttcttgatgtgctacaaaagttgtgtaagattcaccagcctgaaaatcctcaacactttgcctgtctcctgggtcgcctgactgaattacggacattcaatcatcaccacgctgagatgctgatgtcatggagagtaaacgaccacaagtttaccccacttctctgtgaaatctgggacgtgcagtgatggggattacaggggaggggtctagctcctttttctctctcatattaatctgatgtataactttcctttatttcacttgtacccagttttcattaaggaaatcttgatgaatatttatgttgtaattacatgtgtaaccttccacaactgtaaatattgggctagatagaacaactttctctacattgtgttttaaaaggctcccagggaatcctgcattctaattggcaagccctgtttgcctaattaaattgattgttacttcaattctatctgttgaactagggaaaatctcattttgctcatcttaccatattgcatatattttattaaagagttgtattcaatcttggcaataaagcaaacataatggcaacag

SEQ ID NO: 14285 - DNA, 901 bp, Homo sapiens
  misc_feature (1)...(901): n = a,t,c or g
tttttttttttttaatatagagattttatttaaactgtattgaatttttacagcacattgcatgtttgtcacaacgcaactgccacngtttggatttttggccacatcatgtcacttacacccacaacagctctgaaaggagtatttgatgaacacatctgagccaagagcccagagtctcntatccaaggcccatgcagtttgttcactgatgggacagtccccctcaaaacagccacgctaagtagacagatacagtctccccaaatgttaccaatcttactccccttgaaaacaggcagagtgaagtgcaatgaaagacaagttaattaaaaagccactcacaactggcagtaaattttaatgattgataaaatgcttaaaataattttatgtatcagaaacaaggaacagcttgttactttttcaatgatctcaggaattttgcagacacaaaatctccattattcagctccatttaaatgaaaaaaaaagttccgctaggctgacctaaatatgccaaaactttttaggttacatctatggcaagtacaaaagaaccacagatgcgtctctgtaggactgaaaaggtcaggacaaataatgattcttgttctaaatgcagatcctagttattttggaatgaaatgctgttttctagaaagcaacatgaaagtagcagtaagaaagatgactaccatcatttcaaaacaggataagcctaaatataatttaccatttatatgtcaacaaattaaggaaaactgtataaagtcctagtggtttcattataggccaaggagactgtatctgtcccacccacagtacatggctatatcactgtatcttttggttaagtgccactggtacatattaagatgaaaaaacaacaaaaacaaga

SEQ ID NO: 14286 - DNA, 683 bp, Homo sapiens
  misc_feature (1)...(683): n = a,t,c or g
gaaacaatatcaccgtgaattggcctttcctgaaagtgacttatctgacacatctctgtagccacatgctttttgggtagaagaagctgggcatgggtgcaccccaccccctagggtccccatgggaaagggacatgcaaggaaacagcacagaacacgaggtggtccccatgtccctggcacactatcattccgggggatgaggaatccccagcccttgaggcagaggtgccgagtgactgccatgcttcgcccgtccgcatgggcgcttctgtccagctgcacccgaggccgggggtttccctcacctcggtcttcccaagatggagatgctaacgaaactgagaagggggcgtatgtttgacgaaggtttgtgcaagtcaggcccttctggaacacagcagggcctacaacgaggggcctttgcgatgggctgtgaggatgggggtggtgggaagaattggccacgttagagaccccatgccaccccaccatggtgagtgctctgtgcctcctgctcacctgtggtgngttgggcgagctgggcacgtgggcgacgtgggctggggagagcctgtgaggaccgagaggagaaatgagaagaaggaacaaaaatattatttctatgtaatttatattttacttatgccaaattatttatggtaatttgccattgctatact

SEQ ID NO: 14287 - DNA, 1156 bp, Homo sapiens
tttttttttaaagatttttatagaatagatgctttatgtaaaatattaaacataaaaggacaaactgacaatttatttctgagtctgtgactgagatgtaaatgagggagcccattctataaattaaattggtgtgtggtattagccatagaagcattgccatatcccagatgctagggaacagaaaaggtgggtgtgccaacaaacacaatctaccctccagaaaacgccatcctgacctttttattgtcgaaattaaaaaataaaagatacttaaatacaacggtgaacatatagggcaaaacagaatcataaaatttaatgttgagttaagcagtgagctgaatgtctaggtctccaaattggctttgaacccaaaaccacttaaaaacaagtatgttcacagttaacggcaattggcttataggtgagagaatggtcgaagttgttccagttgaacttccagggaaattctctcctcaagaacatcctttaattgttgctgcaattcgctattcaatctggccaaaacggtgttggtttccttattacgtctaattgatgcctgaatagctttcttatctttcccaacagatctgggaatagaaggttgtgatgcaagaacagcagctaagacacccgtcttttgtgtatgttcatcaacttctggccttaattcatcttctgattttaatcttcttcgaacaggtttaggtggtggagcaagtggtgttgtgcctttgctcacattggcaggagcactagcagctgtcttttcttcagttttactatctgttttggcaactcgaagagaacttgcaggatcagaagctttttcagccggcaggacttctggatgtttctcggcttcatcatcttgttcgtcgtttacatttgatgcagcaaatacttcaaactgactgaaatctgcaaaatttggttgctctggtatctgctgaggtgaggtactagtgtgagttatgagccatcggcatccactgggcgatgcacagcaggacccaggagcctgtgagggctgtggtcttggaggcactgcaggaggatgggcaacaactccagcctgttgttgtcctgtggtgactgtaaaggtccgattcatatctaaagatgatgatctagaatgagatgctgtggc

SEQ ID NO: 14288 - DNA, 1425 bp, Homo sapiens
tttttaacattgtcatatgtctctgtaatggggtggtgggacacatagtgtctaacacttcagtttctctgctgcttccctcccattgagaagccagtgccagggttgctgtgaagatgggagagcttctgaacccacctcattaaaggatgagaaacccagggtccgagagcaaagggacttgacggtggccgcaagtgcttcaaagggcagagctgggattggaacccaggtgtcatctcgatgggaatgtccagcagtgatgtccaagtgggaagtgaagacccgaaggctcaagggacacaggtggctgacagtggtcaaaggctagggggcaggattcaggcagaggagctctagggggtgtttgccaccctgtgtgaactcccgagactctaccaggggggccgaaaggagtaccccagaagggcccaaggggtcctcggggttgacctgactctctggagtcctggatgggtcagtggctgtgggtgtttggggagggcggttcctgctgccaggctggggcagcagaccctcaagacatagttacaaagcctttggtgtcactcagtgtctggcttgccctggggcccagaagggctggtcagtcctgcctctggcaggcaatctggtaggcccatgattcaaggaacagtgacattcagtggtccagtccactccctcagaggaggcgggtccagagggtgaaacaggctgtgttgatgacagactccaggtggtggtaggtggagaccagttgggcaggggggctctcgctgtcctggggctgtactgggaagggctctcggaaaaccactgtcagagacgtctttcctaagtgggagtccagaaacactagcacaaagcagtcagtgaacttctgattcagcacaaccaggtactgagttcccaagtctgggctttggaaatggcgacagctctgggggaagcggcttaggagaactttgatcaggctctggtaccaggagaccgtcatggataggaagcagtccagctgggggtcgatgtccccaatggatttggcatggactgcttctaggagttcctccagctctgccagggccaggcgcccccctagccgcagtcgatcaggccccggtggctccagcaagaagaggcgcttccaaagggtgtcccgacggcagtgccctccagccagccgcaccagctgagccagccgtgctcgtgccatgcccacctctgcagccagtggtgggaacagaggagccggtccaggcgctagaataagccctgaggcctccccagggctgccagctgaactcccaggagcctctggctcagggggcagtctgggtggcttccggaagcggcgcatgtcagcagtgagcctggggaagagctctcgctggctggtgagcaccacgaagaactgtagcctgc

SEQ ID NO: 14289 - DNA, 1617 bp, Homo sapiens
taacaaggtcactaaaactcatgcacgctgcaaaaaacctcatgcagtagttaaggtaaaccatccaagcagtttttattcattaatattcataaatacacacagcagcttcattagagatttcaattttcctcttcagtttgaatgtggagtattaggagagccttttgcatgtcaaggtacaggaagcagagatcacccctgcactgctacctacatttacctgctagaagtaaaaattagttaagtggaaatgattatcatatatattttctctcttccttttgaatgtacacaatgtaacaagagtgacagacctgaaattacaatcaccaaacaaacccaagatagttgttgtccactttcattggcaaatacagcacagaggacattgtctgcgaattgggatgtcatcaaagaggaggtggtggaggctcatttcctttattactctcttttaaatttaggttttctaaagcaacatctaaaggcataatatctacacagcccatagcaccaaaatctgccatctccccccgatcatcctcatctgaggatgagctctcttcacgcactaaagtggacagaaggagctcttggacaaacaggctgcggtctgcacgctcgctttccatggactggcgctccgtttcagacattttaggatcattcaaccttgttaaaagaaactgggaattctgtagagtctgctgactgctttctgtattagctatgttggttgttgctgtggattgtgtgattgtagtggtgacactgcttgtgttagtacgccgggttgcgttgcgtgcggtctccagttgttgccgtggctgccctgggcatgctgccgttctagctgcagctgcatctgcagttgttgtaactgagaagcggaagggccagaggaattaagctgtcctcctgcagaacgtctcactcctgataactgagataaaagctcagctataggatccatggcttccctattgcttggagaatatgaactctgagaagaagaaagtccaccagtagcaactgctagtaaagtgcatgtttgatctacgagcacgaggacctccctaatccccggcccagggtgaaacattctacgtacatgtcgaacaccactcgattcatctaaatctctaggggctctgtgttcaagtgtaagatgagctgcaaagtcatccgtgacatgattaggatcgcctccaggtaacgctgcacatattggacaaatcacttctgttgatgtttctgcatgttcagaagtaacatgttcttgaagagatgtctccgtatagcccatttttccacaatagggacaagtaaaagactgtggctgctctacagagaaagcttccccaccatagtataaatcaaaatctacccttgttaatatgcactgcattgggtggtcagttgtatgccttgttgttgttgcaccactttcataacaagatgcacaaagatcgtaatcgtagcaaattaaacacttatatctgcgacctcgaaaatttccttttaaacatgcatcacagctgacaccttcatgtcgggacatcctagttcagacggtggcggcgcggcccctcccgggctccggctgcagtgtcc

SEQ ID NO: 14290 - DNA, 2145 bp, Homo sapiens
  misc_feature (1)...(2145): n = a,t,c or g
attttattttataatattgggtatgaattatatgtagccagagatgtcattaagctttactgttatagtaggtaatatggttagtttgtagggaaaagagcatatgagcacatgcttgtgtattttggcctttgccccagtagaacagaccaatggcattctagacttgatgatactaagttttagcagacactagtaagtggtttgtatttaaccatactgatgaagcagacagattgaggcacagattttagtggctttgtggcaataaatagggcatggtgtgccttaggaaaagaatgtttataaagggaattataactgaaattaaaggaggcggcagtgaagaggaaataattctcttctatctaaatgatatacatatgatattttgagatttttataacagcagtggaacacaattctaggtagagtagaaaaaggaaagttttaaagacatataaaagattcttgttgacaaattatttttggtagcaaatctcaaatggttacctgctattaaggtctgccatattagagttttgcactattttgctaccaagtttgattcatacatctaaaacattttgtagttacttgtcaaggacttaatttgaaaatcatttgccaggccacatagttatcaatttttttttctatcagctattctgttgtatttctaaaacattttttagatgactttttaaagtatatttagcagtaaccttatgaggttcaaattggtaaatctcttgtaatttagccttcatcgaataataggtaccagtgtattaaaaatgtgtattttttgcagccccttgaaccagagtaggttcagagaaactcccaaagtttgtactttagacacatcatgcttgattggtaacttccctccttttttggggaacatgtttgtgtcctattaacttaattggatagatttttaaatatttcttatttttggcacacggaaagggtagttcgagtacagaactttgatttttggtgtagatgcagagggaatgatgggtaaatttcctaggtttatgtgaatttagggggtgtatgcattttgaaacaatctactaacagatggtgctgaaatctattacctacatgttttctagttgttcagcattatgttaatgaagcctccatataaggagtgtttctctggcacagttggtaagttgactgctaacttcatttaaatgtgttactggatatgcagtatactgaaattattaatcagtttgtgtataggaaaagagaactgggttaaaagcaaattaacttgttctgaaaagaaagtatagattaattttgttttctgtttaaattttatctccttggtaaagatttttttttcctgggcagaaaacttggcatttttaggcgtagataccttaccttacaatgccaaaatgaatttaattccagtactcaggtttttccctttaacagactctatgtgtatcagggctttctaatgggtttttcctcttcgtttttaaaatgtgagtagcatttgaccaatttccagtgctcttagcattttacttaaagaacaaccactacaaaagaaaatctttgtaatttgattgtcttttgctttgcttcattaatgcctaagaacttaagaatactcctacctcattagctactcaagatgctgtgacgatcaaatctattctacataatgcgtttagaaacaaagacttgggtgaaaaatgaaataagtatattctgacttggctattgaggggaaaattcagtattaagtgttcctcacaggagatatgttagcagaatactataaaagtttgaaatttttaaaaagtaaaagtacttaaatttaggtatctctcctgaaattctttgcagttcattttttatggcagttaatccagtgaaacactcaaaagttttttttttttttaaaagtgtttttccagataaactgtagggtgaacattcacataatcacaaatatgtaattctgtaattgtggaatgcttgtatgctttgttttcgtacatcttccatggagatgtctgaatataatactccatctgtgaatattttaaatgttgaaataaaagtaagaaatgtgccctttgtgttatccccggcaaantnnccctg

SEQ ID NO: 14291 - DNA, 780 bp, Homo sapiens
  misc_feature (1)...(780): n = a,t,c or g
gcttatagagccatggacttggataaaaaaaagacaaaaatgaacttaaaacgcgccataggtatggttggaaggagaggctgccactttagaaatgctcagctctacttactaggatagtgtttgtctcttcacaccagaaagaaccttggatttggggttcagtttgtgttctcatccaaggctgaagtgtattgtcttacagaggtgcgtgtatgctggctttttggaactcaggtattttcctgtgagaagctccaagatcagcctacagatgcctgtttcacctttaatatgacaggtcctaactctagccaccatttactgtgctgcttctgtgggaaacagaagttccaactcttaggttccagggagatacctattttgccccaggatgaggagaggtaagggggatattcctgggtgccctgttgcctgctgagaatacaaacaagtaagcccttctgcacagttcacatgcagcttttcagatatgggttttgtttgtaacttaagatatgcacattaaaaagacagatctgggaaatctatgatgtaaatgtaacaaatatgacttgattttttctgatgactccagtgttagctgcctgccagaccttttcagctacttagtggcagacatatcatcagcattgaaatctgtctgactccaggtccagtccttaaacattataccaggttttgggttatttacaatcataaatttcatttgaatttcnttttacagatttcaaactggtataggttgtagagggtcag

SEQ ID NO: 14292 - DNA, 3006 bp, Homo sapiens
ggcggcggccggctcccgcaggcgccgaggcaggcgagcccccggccccaggcgcccgggccccgccgccgcccgcgcgcggcgcggcattttattcaggcgacgcttaagggagccggccgcgcccggtgcattgtgggaggcccgcggccgttttcgggaggaaggcggaggggccaaagcgagccggtggatccataaagaacccagccaacccgcagagggaggggaggggctgagctgtgaggagagcggggcccaagaaccatgtctacgcgggagtcctttaacccggaaagttacgaattggacaaaagcttccggctaaccagattcactgaactgaagggcacaggctgcaaagtgccccaagatgtcctgcaaaaattgctggaatctttacaggagaaccacttccaagaagatgagcagtttctgggagccgttatgccaaggcttggcattggaatggatacttgtgtcattcctttgaggcacggtgggctttccttggttcaaaccacagattacatttacccgatcgtagacgacccttacatgatgggcaggatagcgtgtgcccaatgtcctcagtgacctctatgcaatgggggtcacggaatgtgacaatatgctgatgctccttggagtcagtaataaaatgaccgacagggaaagggataaagtgatgcctctgattatccaaggttttaaagacgcagctgaggaagcaggaacgtctgtaacaggcggccaaacagtactaaacccctggattgtcctgggaggagtggctaccactgtctgccaacccaatgaatttatcatgccagacaatgcagtgccaggggacgtgctggtgctgacaaaacccctgggggacacaggtgggcagtggctgtgcaccagtggctgggatatccctgagaaatgggaataagattaaactagtggtcacccaagaagatgtagagctggcctaccagggaggcgatgatgaacatggcgaggctcaacaggacagctgcaggactcatgcacacgttcaatgcccacgccgccactgacatcacgggcttcgggattttgggccatgcgcagaacctggccaagcagcagaggaacgaggtgtcgtttgtaattcacaacctcccggtgctggccaagatggctgcggtgagcaaggcctgcggaaacatgttcggcctcatgcacgggacctgcccggagacttcaggcggccttctgatctgtttaccacgtgagcaagcagctcggttctgtgcagagataaagtcccccaaatatggtgaaggccaccaagcatggattattgggattgtagagaagggcaaccgcacagccagaatcatagacaaaccccggatcatcgaggtcgcaccacaagtggccactcaaaatgtgaatcccacacccggggccacctcttaatctagacagaaatagctgtttggttttgtttttaaatagatctatttcccttatcacttcaattaaagactataaacaacaaaaatctcattgtgtctacacatcggggtgaccttaggtcggtttgtaagtggatacaattaataaaataaaatccattgcctttttttcctgttacattaactgaagatgcacctaatcttgaggcagcttctgagttgagaattatattgttatccaatactgttgattcattttgaatctttagacacttatctcttgccgcataggttttttaaaggtgctttcacatagcacaggcattacccgtagtcgtgtcaaatagcagttggtgtcttcattttatgtatatttatcatataagtctgatttttttttaagcgtcttgaatggttttctggagagacagcattggtaagtggcacatgacggtatcccagtcataagagggttgcatgattcctttgagtgtttgatttgaaaagcctagtcttgtctctcaagagcatctcggacccagaacattctccagtagtgcattcagttcaacacagcaagtgcttcattgccttccgaatggaggttcatgtataatactcatttacaattcaatatataattacacaaataatttttaaatataatcaatagtaaagactgttctgtggatggtagtgtttaatacattttctattttgtacagtgatttcaggccttttgttttcttaaaatcagcagctgtttggcctaattcttagcattattttgtcctttgcgccagtacttttttgtgcacgctttttgtgatctgtgttaaaaacctgcattgccaacattgcagctcgaacttaaacttgttattcaaataaatatttaattttttaaattgctcttgtataatcagatgccccttttagtattattttagaagcgttgggagggttttgcctaaagtacaatttatcgggaaaaactagattttagttttataaaacttttaagtctttcatgggacctatattttcttgaattaaattttgtagttctagaataaataggcaatctaaaaaggtgttctctgtgttatgtaaagtggaggcttccttatattttaacctactaagcaatgaggagggattcctgtcattaagcacaagggcgctggatcctcaagtgcccatcttcgtgagagaaaaagcagcacatcctgcccatttctggtgctttctgctcacaggcaccaaagctgcacatgtaaactgacttcttgccaaaggaaatgacccctgggaagttcaagctcctggaagaggctttaactcggacgcgccctcctccaggaaccagtgggcagggcagccttcatgcatgtgtaactggacctccagccataagcatggtgtgcagtatggaagagcctgctacggaactgaaagtgattggacattttataggaattgatagagatgttggtcctcaaaagctacaaaccagtggtctgcaaaataaagtgtgttggaaacctctagtgag

SEQ ID NO: 14293 - DNA, 496 bp, Homo sapiens
gcggcacgagtgtgaaacggtcgcatcgacagaggaagtactgtgtggttttattgactgctgagactaccaagttgagcaaaccctttgaggctttcctgtcctttgccctggcaaacactcaagacacagtgagatttgtgcatgtctacagcaatcggcagcaggagtttgccgacaccttactaccagacagtgaggcgtttcaagggaaatcagcggtgtctattttagaaaggcgcaacacagcaggaagggtggtgtataaaaccctggaagacccttgggattgggagtgagagtgacaaatttatcctcttgggctatctcgaccagctgcgtaaagatccagctcttctgtcctctgaagcagtgcttcctgacctgaccgatgaacttgcccctgtttttctccttcgatggttctactctgcttctgactacatctcagactgctgggatagcatttttcacaacaactggcgggaaatgatgc

SEQ ID NO: 14294 - DNA, 348 bp, Homo sapiens
gcgcagagccatgtcagatgcagcagaaaacagtgactgctatgcctgcagcaagatggagaccagagtgccctgtaggccagcacgcagcacccactcagggcagtgacctggagcttcctcagatccctctaaggcagacgttctgaatccatctttgttagcagtctgggagacgaacttagctttggtcaaccggcaacagcaaggcaggctggttgtagggaaggtgggctcagacgtggccccagaggtacccctcacccagcatccccagccgtggctgactcttccctgggagttgtgatcagaaatggggtggagcccagcgcggtggctcacgcctgt

SEQ ID NO: 14295 - DNA, 1575 bp, Homo sapiens
  misc_feature (1)...(1575): n = a,t,c or g
gcatatacatacaggtttatttaaatgattggatctacacttttggaggctatttgaagtatcttatcaaaataaaacgcattttaagcaagaagttaaaaaagcttttcagacccgaaggccatttaatacagtaaatcttacttgggtagtttagcaaacattttttaaaacccacatccaacagattggttagtattagatacacagatttggtttcaaagctgaaatacccctgggtggaataaatcttctcatgaaattcagttatattatgccacaaaacagggacacttatctattgacaacttaaatattaactcagtgggctacccgggggatntaaataggaaaaaaacagtggtcatggattaggagtgagaagactatgacaccagcctaccttggactgggaccgcaaaggatgttaaaatctatcctagaatttaaaacaggagaaatgtcaaatattccagtctccattcggctcaagccatcgcccaaggaatacacccccaccccagccccacatgaggtttactaaccagctgctacagatgttactatgtcactaattaacaatgatcacagaaaatgtgtcaataccagaatttttgttatcaatacacaatgcattagtggctgcaggaatcttcctccaaaagctaccgtcagaaggcaaactgacaaatgtccatgccgctggtccaagaaaccacagctaagagccatgaggcattcatttgtacattgagctctctctggcatgctccccactctagttagaggggctggggtatggagagaccgtcccagccgggcgctgcagcctcctactcctgggcctccttgcgggtcaacttgtagatctcagtgggtccgtccacatgggtgatagtggtggtgagctggagttcttccccactatggacacccagatcgccattggactggtcttctccatagtttttatgggatggtgcatacaagaacatcagagcaaagacatacagattccacatcccatagatgcctgtgaaaaaggcactgttcacttggactgtgacgccgccccatttccaatggccttccgttacctgactaacgatgaagaagatgacagtcatggcagcgcaggcccaaggtgataagcatgaggaacttgaacctaaaaattagcccctcatagtgtagccgccggactttgctcatagctggccaggctggactgcttcccactgatgttccgaaacacctgaaataccatgaagcatagaaacaggaagtagaggcagaggcagattccagccacgatgatgaaggccatggccagctctgttccaatgtctgtagtccagatactgtagaagggattcgtgagttgtacccctctctcacacatgtcaaatatgaagaggcagaaggaccaacggcaatgggtccgacttgcttccaataccctgcgatgtggttccgctcgtgctgatccatcatgtgctcgccacagaagatgatccagaaggacagaagcatcgcatagaagatgcctgtcggatgtcaccaaacagcagcatc

SEQ ID NO: 14296 - DNA, 1003 bp, Homo sapiens
  misc_feature (1)...(1003): n = a,t,c or g
ttttttttttcactgcaaattgcttttattttataggcaccactgcaaaatgaggaatcacatcaaaacatatcaaatagaaaataataatttattttaacttcattttactgtttgtaactaatcatgattttgtgaacttgcctgtataagtctgtaccttcaaatctacaaagcaaaagtttactacaatgagcacttaaaattccacaaaccgtctccatccacaactttcctgtacatgcaaattctttcaatgggctgcaatatttgcaaacatgctttaaacttccataaagatgcaagatattttgctttctgctaaaacctttacactctcttgggaaccttaaccaggaaaatgtttaaatgtatatcccaactctaaacgctgccggtttggttatatgtattaaatcgttaaccaccgggttgggtggttttgagttgaaaccttcacctaaatgataatatcttaacggtcacgcatatgaaacacattcagtaacgtaccattataaaatagggttccattaaaaatacatactggcagttgtatttgtgttttaggcaggaaaaaaagcgtgtttaacttttttatatgaatatagtttaaacaagttattctgtgaaagtatgcttaataaaagatctttctgaaatttaaacactttatgtaaaagggtacaggtagaaaagtacaattgctatttgaaaaaagctctgtttgttaagcatactttcacagaataacttgtttaaactatattcatataaaaaagttaaacacgctttttttcctgcctaaaacacaaatacaactgccagtatgtatttttaatggaaccctattttataatggtacgttactgaatgtgtttcatatgcgtgaccgttaagatattatcatttaggtgaaggtttcaactcaaaaccacccaacccggtggttaacgatttaatacatataaccaaaccggcagcgtttagagntgggatatac

SEQ ID NO: 14297 - DNA, 833 bp, Homo sapiens
aacgaaagatggcggcgcccgtaaggcggacgctgttaggggtggcggggggttggcggcggttcgagaggctctgggccggcagtctaagctctcgcagcctggctcttgcagccgcaccctcaagcaacggatccccatggcgcttgttgggcgcgttgtgcctgcagcggccacctgtagtctccaagccgttgaccccattgcaggaagagatggcgtctctactgcagcagattgagatagagagaagcctgtattcagaccacgagcttcgtgctctggatgaaaaccagcgactggcaaagaagaaagctgaccttcatgatgaagaagatgaacaggatatattgctggcgcaagatttggaagatatgtgggagcagaaatttctacagttcaaacttggagctcgcataacagaagctgatgaaaagaatgacccgaacatccctgaacagggaagctagacaggaaccttgtcctgttagtcagagagaagtttggagaccaggatgtttggatactgccccaggcagagtggcagcctggggagacccttcgaggaacagctgaacgaaccctggccacactctcagaaaacaacatggaagccaagttcctaggaaatgcaccctgtgggcactacacattcaagttcccccaggcaatgcggacagagagtaacctcggagccaaggtgttcttcttcaaagcactgctattaactggagacttttcccaggctgggaataagggccatcatgtgtggggtcactaaaggatgagcttgggtgacctattttgaaaccaaaatacctggcccaagttag

SEQ ID NO: 14298 - DNA, 1162 bp, Homo sapiens
gcgaccgcctcgccgcagaagtatctccgaatggagccatccccgttcggcgacgtctcctcccgcctcaccacagaacaaattctgtacaacataaaacaagagtataaacgaatgcagaagagaagacatttagaaacgagtttccaacagacagatccgtgttgtacttctgatgcacagccacatgcatttctcctcagtggaccagcttcaccagggacttcatctgcagcatcctcaccattaaaaaaagaacagcccttatttactctacggcaggttgggatgatctgtgaacgtttgttgaaagaacgtgaagagaaagttcgagaagaatatgaagaaatattgaacacaaaacttgcagaacaatatgatgcgtttgtgaagtttacgcatgatcaaataatgcgacgatatggagaacagcctgctagctatgtttcatgaatcacgtatcctgcatttgtgggctgccttgttccttgttgagttgttgcaagaggtcccaattatgacatgcagcaatgccaataccccttctgtgaatacaggttatttcaagctttcgtcagtggcaaccactcttaggcagcagcaactggttttggaaatttccctgatgtcagtaccacctggatgtggacctttgctacctgtattaataccagtggcctcattttgctgtatcattacaatttggcttcttatattaatgtttgaaaaggattaaagctggtattctagaacatgcccttcactggttgtgtaaataaaactgtagaatgacacttcagatgaagttagtgtgattttaattgtgcactacaaccgagctgtaaccagttactaattttagaatgtaatcccaggacaatattaagcaaatagcctgcagtggcttcctgtgaaatagtgaaggaggagggcatttctgtattccaggacttcttggggtttcagaatgggtttgtatgattttttttttttttgtagttttatttattctatcagtctttttaacaaatgtttattgctgcatttttttttttccagtgtatcattgttttactgcccttgtagtactggaatttagttggaagaataaaacatttacttctattttgcttgtttcttaatgtacagatggggttagtat

SEQ ID NO: 14299 - DNA, 457 bp, Homo sapiens
ctgaagctgctatcgaactcatcatccttatggaggtcttcaggggccccagagacactgcagagagtgtcagggatttccttccccacaacagaattgctgagggtctgggaagcatggagggaggaagcagaattgcgtcgaccaccggcgcattgggaaggaacaggagctcttcttcttccatgaactgagccctgggagctgcttcttcctgccacgagggacaagggtgtataatgcactagtggcgtttatcagggctgagtatgcccatcgtggtttctccgaggtgaaaactcccacactgttttctacgaagctctgggaacagtcagggcactgggagcattatcaggaagacatgtttgccgtgcagcccccaggctctgacaggcctcccagctcccagagtgacgattctaccaggcatatcacagatacactcgccctcaag

SEQ ID NO: 14300 - DNA, 1382 bp, Homo sapiens
ggtccttcgctggtgggtagctgattccaatgtcttcaccgaagttgcaattggcccatccgtgctcaatgctgccagagatgatattagcaagcttaggaatacacttcgctttcttttgggaaatgtggctgatttcaacccagaaacagattccatccctgtaaacgatatgtatgtcatagaccagtacatgctacacttactgcaggatttggcaaacaagattaccgaattatacaaacaatatgattttggaaaagttgttcggctgttacggacgttttataccagagagctctctaacttttatttcagtataatcaaagataggctctattgtgaaaaggaaaatgaccccaaacgacgctcttgtcagactgcattagttgaaattttggatgtaatagttcgttcttttgctcccattcttcctcacctggctgaagaggtgttccagcacataccttatattaaagagcccaagagtgttttccgtactgggtggattagtactagttctatctggaaaaagcccgggttggaagaagctgtggagagtgcgtgtgcaatgcgaggactcatttcttgggaaggcatccctgggcaaaaatgcagctgagtacaaggttatcactgtgatagaacctggactgctttttgagataatagagatgctgcagtctgaagagacttccagcacctctcagttgaatgaattaatgatggcttctgagtcaactttactggctcaggaaccacgagagatgactgcagatgtaatcgagcttaaagggaaattcctcatcaacttagaaggtggtgatattcgtgaagagtcttcctataaagtaattgtcatgccgactacgaaagaaaaatgcccccgttgttggaagtatacagcggagtcttcagatacactgtgtcctcgatgtgcagaagttgtcagtggaaaatagtattaacagctcactcgagcaagaaccctcctgacagtactggctggaagtttggatggattatttacaatataggaaagaaagccaagatttaggtaatgagtggatgagtaaatggtggaggatgggagtcaaaatcagaattatagaagaagtatttcctgtaactatagaaagaattatgtatatatacatgcagaaatatatatgtgtgtgtgtatctgtggatggatatatgtatatctcttcctatatatatccatagtggacttattcagaacatagatatgtattcagcttgtcttcaaatacggccaagcagaaaatgttttatattttataaatcatcttttgactctgtatttaaattctatgatactgaaaataaaggcattctggaaaaataaaaaaaaaaaaaaa

SEQ ID NO: 14301 - DNA, 175 bp, Homo sapiens
gagacgcagaccaattgttaggaacaggtccaaattggagcaccattaaccaacaatcagtgatgcagaatgaggctattgaacaactataagggctatttgcctcaggggcctgggaaaacattcaggacccagggaacctcatgcccttcttttaggttcaatcagacaaggt

SEQ ID NO: 14302 - DNA, 132 bp, Homo sapiens
  misc_feature (1)...(132): n = a,t,c or g
ttgganacntctatgacnnnnnnnnnnnnnnnnnnnnnnnnnnnnnnnnnnnnnnnnnnnnnnnnnnnnnnnnnnggcacgaggctagcccatgagcttcaataccctgtctctattttaaaaaattgtttt

SEQ ID NO: 14303 - DNA, 650 bp, Homo sapiens
gctaaggcttaaagacatagtatgcctgagaagaggataagaaccagactgtccacagtctggttctcctatgaccttaaaggacatggcaaggaccactgaggttttgtggttccatgagttggggagaagcagaggagcatgatccaccccaaggagctgctgggtagtaaagagcacaacccagagatgaagctgggaggtacactactggtagacctgagggaagcctttcttttcctcacagtgacagaggggtgctgggtaaagctgagcgttgcccaaggtcacccaccacacttgacctgtctggaggccacatgaagccttgatgcgctggcatctgacctgaacatgctgaactggagtgaggcccgtgttgcctccctacccctgacccaagggccatcgcgtaagaagctggatcaattccctctccctccgccagagactggctccccaacattagtccgttctggcttctactgtgtggcggaaggaaaagaggttgaatcagaaatgagattgaagttttaaactggactatacttcaaaaactgaaagtaatcagaatattatagaatgtgtccaaaatgtttcaatgatgagactctggagttcccctatgcatagttgaaagcagtgattag

SEQ ID NO: 14304 - DNA, 856 bp, Homo sapiens
gtggatacagaagaacgaaaagacaaagactctattcatggacatagtcagttggataaaagacccgaaccaagcacattggagaatattactgatgataaatatgcaacagtttcatcaccatcaaagtcaaagaagttagagtgcccttctcctgcggaacaaaagccagcagaacatgtgtctttgtcaaatccagctccccttctagtttctccagaggtacatctaactcctgcggtgccttctttaccagccactgtgccagcctggccaagtgaacctacaacttttggaccaacaggtgtccctgctccaattcccgttttgtcagtgacacagactttgaccactggacctgattcagctgtatcccaagctcatttaacaccctctccagttcctgtgtcaatacaggcagttaaccagcccttgatgcctttgcctcatacattgagcctttatcaagacccactctatcctgggtttccttgtaatgaaaagggagatcgagccattgtaccaccttattcactgtgtcagactggggaggacctacctaaagataagaatattcttcgattcttcttcaatcttggtgtgaaggcatacagttgtcctatgtgggccccacattcttacctgtaccctctgcaccaggcctacctggcagcctgcaggatgtacccaaaggtccctgtccctgtttatcctcataatccctggttccaagagggttcctgctgctcagaatgaaagtgattgtacctgtactgatgcccactttcctatggcagactgaggccagtgttaatggtcaaatgccacagccagagattgggaccgccgacatttt

SEQ ID NO: 14305 - DNA, 856 bp, Homo sapiens
tttttttttttttttaccagatgaatagagaaaaagtttatttatgacaaattcgaaaactcagaagagatgacaaagaacgcacaaaagcatcacaaaactgttacctaatataaaacgcaagaactgagctacttgaagaagcacagctcagaatcatcagtgtaatcgcagtaacacacccagtgccacagggtgataaaaatggtattttaaaagaaaaaccactcagcaggacacaagaattaaagtaacaatttggtaagactcttagaaatcacagatgttgatagcatttctcatcataggggacatgtaaaacaagctgaccataataaatgattagttgggatacttttgtattttaaagaaaaaagataaaacagtgacacggtttcccttccagaccctttttgtaatgtcagcaacagtacatgatatagaacagtaagaaaataatgtctttgtagttgccaattgcttaaatctttacgaagaaaacatgatcatctttcagtcaactgactgatctgagtacatggcaccaaagaaagcccttcagaaaatagaagctaaatgacataaagtagtttggaaaatcttcaagcacctccctttattccaattatccttttccaaagtctggctttcttataatccatcactttgattacaaaacagctctcttctgggaatttcaaaacacttcccgttacgttaagggaaaatgggtacaccagattcatgggttacaggattgctttctctagacttggcttctctttaacatggctaaatggaaataatttagcttggttaaatgaaagctactccactcatgtctcctgagattatc

SEQ ID NO: 14306 - DNA, 1408 bp, Homo sapiens
tgatctgggtcaccctgggtctcctgatcttggagaagtcaagttcttatcccagacttgagaggttacaagcctccaggtctctggcaaagtgtggagatgatggacagccatttgtacacacaccagccagtcccttagcatatctctcttggttttgtctcaggtctgcctcagccacctccctgacgctgtcccactgtgtgaatgtggtgaaggggcttctggattttaagaagaggagaggtcactcaattgggggagcccctgagcagcgataccagatcatccctgtgtgtgtggctgcccgacttcctacccgggctcaggatgtgctgcagcctcctggccactggaggggctgaccgcctgatccacctctggaatgttgtgggaagtcgcctggaggccaaccagaccctggagggagctggtggcagcatcaccagtgtggactttgacccctcgggctaccaggttttagcagcaacttacaaccaggctgcccagctctggaaggtgggggaggcacagtccaaggagacactgtctggacacaaggataaggtgacagctgccaaattcaagctaacgaggcaccaggcagtgactgggagccgcgaccggacagtgaaggagtgggacctcggccgtgcctattgctccaggaccatcaatgtcctttcctactgtaatgacgtggtgtgtggggaccatatcatcattagtggccacaatgaccagaagatccggttctgggacagcagggggccccactgcacccaggtcatccctgtgcagggccgggtcacctccctgagcctcagccacgaccaactgcacctgctcagctgttcccgagacaacacactcaaggtcatcgacctgcgtgtcagcaacatccgccaggggtttcagggccgatggtttcaagtgtggttctgactggaccaaagctgtgttcagcccggacagaagctatgcactggcaggctcctgtgatggggccctttacatctgggatgtggacaccgggaaactggagagcagactacagggaccccattgcgctgccgtcaacgccgtggcctggtgctactccgggagccacatggtgagcgtggaccagggcaaggaaggttgtgcttttggcagtagggccacgacctgcctgcctgggctggagctcttgcccgaagcctgaagcttccttcggcgccatgccaggggttggggttgggactggagctggccttgggatttaatggggaagaaggcctggcaggacctggcctgtttgtttaaaaatgaagtatgggttgggggattacgctagtttttctttgtatttttatctctatctatctcctcactttttctcccaaagtagaaaaaaatgatatctgaa

SEQ ID NO: 14307 - DNA, 549 bp, Homo sapiens
cacagccacctccggagggatctggctgaggaggaagtggaggtgtcactggccccggcctttgccccaatcttgtgtgggcactgaagggggactacaggttcgagagttatgggtgctacatgtgtgctttcagagcagtagtgtgaggaagcttggagtgggatggcaggacggcctcatccctatgatggtaactccagtgatccagagaattgggatcggaaattgcatagtagacctcgtaaactttataaacattcaagtacttcctcgcgtattgctaaaggaggagttgaccacaccaaaatgagtctacatggtgctagtgggggacatgagagatcaagagatagacgaaggtcaagtgacagatcacgagattcatctcatgaaagaacggagtctcagctcactccttgtattagaaatgtgacttctccaacacgacagcaccatgttgaacgagaaaaagatcacagttcctctcgtccaagcagtccgcgtcctcaaaaagcatccccaaatggttccattagcagtgctggg

SEQ ID NO: 14308 - DNA, 2838 bp, Homo sapiens
cccgccgcccatggagcgcgccgcgccgtcgcgccgggtcccgcttccgctgctgctgctcggcggccttgcgctgctggcggccggagtggacgcggatgtcctcctggaggcctgctgtgcggacggacaccggatggccactcatcagaaggactgctcgctgccatatgctacggaatccaaagaatgcaggatggtgcaggagcagtgctgccacagccagctggaggagctgcactgtgccacgggcatcagcctggccaacgagcaggaccgctgtgccacgccccacggtgacaacgccagcctggaggccacatttgtgaagaggtgctgccattgctgtctgctggggagggcggcccaggcccagggccagagctgcgagtacagcctcatggttggctaccagtgtggacaggtcttccgggcatgctgtgtcaagagccaggagaccggagatttggatgtcgggggcctccaagaaacggataagatcattgaggttgaggaggaacaagaggacccatatctgaatgaccgctgccgaggaggcgggccctgcaagcagcagtgccgagacacgggtgacgaggtggtctgctcctgcttcgtgggctaccagctgctgtctgatggtgtctcctgtgaagatgtcaatgaatgcatcacgggcagccacagctgccggcttggagaatcctgcatcaacacagtgggctctttccgctgccagcgggacagcagctgcgggactggctatgagctcacagaggacaatagctgcaaagatattgacgagtgtgagagtggtattcataactgcctccccgattttatctgtcagaatactctgggatccttccgctgccgacccaagctacagtgcaagagtggctttatacaagatgctctaggcaactgtattgatatcaatgagtgtttgagtatcagtgccccgtgccctattgggcatacatgcatcaacacagagggctcctacacgtgccagaagaacgtgcccaactgtgggccgtggctaccatctcaacgaggagggaacgcgctgtgttgatgtggacgagtgcgcgccacctgctgagccctgtgggaagggacatcgctgcgtgaactctcccggcagtttccgcttgcgaatgcaagacgggttactattttgcacgggcatcagcaggatgtgtgtcgatgtcaacgagtgcccagcgctaccccggggcgcctgtgtggccacaagtgcgagaacacgctgggctcctacctctgcagctgttccgtgggcttccggctctctgtggatggcaggtcatgtgaagacatcaatgagtgcagcagcagcccctgtagccagggagtgtgccaacgtctacggctcctaccagtgttactgccggcgaggctaccagctcagcgatgtggatggagtcacctgtgaagacatcgacgagtgcgccctgcccaccgggggccacatctgctcctaccgctgcatcaacatccctggaagcttccagtgcagctgcccctcgtctggctacaggctggcccccaatggccgcaactgccaagacattgatgagtgtgtgactggcatccacaactgctccatcaacgagacctgcttcaacatccagggcggcttccgctgcctggccttcgagtgccctgagaactaccgccgctccgcagccacgctccagcaggagaagacagacacggtccgctgcatcaagtcctgccgccccaacgatgtcacatgcgtgttcgaccccgtgcacaccatctcccacaccgtcatctcgctgcctaccttccgcgagttcacccgccctgaagagatcatcttcctccgggccatcacgccaccgcatcctgccagccaggctaacatcatcttcgacatcacggaagggaacctgcgggactcttttgacatcatcaagcgttacatggacggcatgaccgtgggtgtcgtgcgccaggtgcggcccatcgtgggcccatttcatgccgtcctgaagctggagatgaactatgtggtcgggggcgtggtctcccaccgaaatgttgtcaacgtccacatcttcgtctctgagtactggttctgagggctggtctgccgcacagccgcaggtgcacctccaggccaaatcattgctgccagtgactgtggtctgtacttgtttataccctcagacttttttaatgttaggtatttgtagcattaggccaacatgtattaagctgagccagatgaataagtccatctgatgtattttcggtgtttaaaaaatgagcccagttgctcaactgtttggttgaaaaccttgctcattttttaatgcgaaggctaagtgtcaccccctttctctgcctctggctgggccttgctaagggccaaggaaagaaagacattttttagggggcagccagtccaaatgccaaaagaagaccagttcttgccctgattgtatgaaatttgacattttggcactttttttttttttttgggccaatcagattttctatgttctaaggacatggctgctgtagaatagccacagacgtggatgataaattatccccagaagcagcatgacagaatgcctcggggagcacttggaagggaaattgcagttctgttgaaatagagggaaaatcccttgggtaaagacacagcctgttaggctcgtgtgggcctccagtatgttcaccaggggaatggctgggatttctcggcactctgcatcatccatcttttcttataggtgggaaaataaacaactttgtgatcctcctgaaaaaaaaaagtcgacg

SEQ ID NO: 14309 - DNA, 1609 bp, Homo sapiens
acaacaaattattttatttgcaacttcagagccactcagatacccagaggtgggatgctattttctaatctgacatccttggaagatgtaacaacatgaatgcttcatttttcaatggctgtaggcatagcaatttctgaaagaaaaatacgattctctataaaagacttgaagttgatttgggagaggccaactggatagtaatagggccacaggcgctgcagcttccctaaccagggttcaacatcaatacctccatttccctggagctgaaacaactaaatgaacattatagagttaagactttatgtgcctttaactcctctttagtatcaataagattttcagattatttttaagaaagcagctagaacttttaaggaacaggggctgatgacagcagacatgtaaggccatgttatgatatttatccattagctctgtcttcttcctgactcttttaatccctcctccccatcaatccgggcaaaagaagatatctaactccaggctgtttcgagtcctcccttgcaaggaaacactgtatcactcatggcactgctttttccatgtttccctcaggaggtccagggtcgagaccctcgtgaaagctagtcatccacagtgatgtttcggaaaaggtaggccatggactctccattgtggattctccgaatggcttcagaaagaatcaaactgatatccacagtctttatcttgggacattgcagcttctgaacctcatgagggacagtattcgtcaccaccacctcgtctacggaggactcctcaatcaggcgaggggcctctgcagacaggatgccgtgggtggccataacatagatcttataggcgcctctctctttcaggatctccgcggcagcaacaaaactctccacatcgtcaataatgtcatccacgatgattgcgatgcggccttccaacatctccaactacagttatcggtggcttctctttggccatcatcaatggcaactccaggcctgggtgcacagtagcatttttgaccataggcggggagtgacgaccatcgtccatgtccagttccgtgcactgagcttccccggtgaatgacggccaaacccagacgcagtctctccgcataggactgggccctctttgcagcatcaggagacttagctacaatgactgcatttctgtaatttggaatctagatttgaaggaaaaatagaaaatactgaaaagttatcagaaaataacacctggatgctggtattcaagttttccctcttataatgatccaaactagtcatcaaatatgctagaattttagtcacaagttttagatttttcaatatttatcaattaacatcactggaaaaagcactcctacgtcaagaattttttaaaaataattcttaaaacattcattttagaaaacataagcaaattgctaaagatacgtagaaaaaaaatctgtttttagtgtcttttaaagctatgatcgtccacgactaaagctgaccctgtctgctgcctcaggcattgtgacttaagggagagctcatttgatgtgccttccagtaacgaaatctgataccagagaaaaactaaataagatctcttc

SEQ ID NO: 14310 - DNA, 1060 bp, Homo sapiens
  misc_feature (1)...(1060): n = a,t,c or g
ttttttaccagaaaataaacaccaactttattaatataatagcaacagaaagagtttccaatttctcaaaaggaaaataatatgagactagtgggctatgatgatgcctgtgaatagccagctactgtaccccactgtagctggacaagtgttaaacaagtaaatgcctttcaagagggcagagccatgaccncataagcatgttacttataaaaacgggaaatgcctacatttcttgttctgatagcttcccaccacacaccagaggttcctcaaggacagctgccaccagagctgctgaaagaacatgtttttcactgggcgtcgcttcacagtcagttcctcaagcagaagactaaaatattatttctttttagaagatcttggttgagggagaacataccaatatggagaacagatctatgcttctcgaattcaagaaaaaccattaactaatctatcaagttttctccgatatggtgtgccagagtgctctgtgaagaatccttttccatccctaccacgtgtctgggtgaagggagaggagggggtggcaagctgccagtacactagcaggcactcctggtgatgctctgggctctgctccctttctgctggtagtagtaggcatgttttctggcagctgcagcagactgatgttggggggaggaaggggccacccaccaatcacctcttcttgaagccgtattttttgcgttcatagaagaggtctgtcttagagctccccagattgacaatctttgggcagccatctctgtccttctcctggatggtgcactccttacaataataggcatcagagaccccaggtcctccacagatcacacagcgcccctggtaagatccatagttacactcatcacatatgcgcaccagagtgcagggacgcacataggagtcacaaatcacacacttgccatcacatttttcacacagtcttccgatggcaacaccagcctgcttgcggcaaaagatcaaatcaggatgatgtttagccatagctcctaactaagccggccaccggaagcttcgggaactt

SEQ ID NO: 14311 - DNA, 899 bp, Homo sapiens
tttacctgtaccccactcacaagtctctgaagccgtgcccgttcttcctggagggaaagtgccgctttaaggagaactgcaggttctcccatgggcaggtggtctctctggatgagctgcgccccttccaggacccagacctgagctccctgcaggccggctctgcgtgtctggccaagcaccagggatggcctctggaacggcagcacgcatcaccgatgtgggacaacggctacttacacagtcaagtttgactcgctgctgctgagggaggccgtggttggagggggacggcatcctgcccccactgcgcacagaggccacagagtccgactcagacagcgacggtacgggtgactccagctatgccagagtggtggggtcagatgctgtggactctgggacctgcagctctgcctttgctgggctgggaggtgcacacgcgaggtataggctccagactcctcaccaagatgggctatgagtttggcaagggtttgggccgacacgcggaaggccgggtggagcccatccatgctgtggtgttgcctcgagggaagtcgctggaccagtgtgtggagaccctgcagaagcagaccagggttggcaaggctggcaccaacaagccccccaggtgccggggaagaggggccaggcctgggggccgcccagctcctcggaatgtgtttgacttcctcaatgaaaagctgcaaggtcaggctcctggggccctagaagccggggcggccccagcggggaggaggagcaaggacatgtaccatgccagcaagagtgccaagccgggccctgagcctgcggctcttccagactgaggagaagatcgagcgaacccagcgggacatcaggagcatccaggaagctctcgcccgcaacgctgg

SEQ ID NO: 14312 - DNA, 1022 bp, Homo sapiens
gccttcgcgcgtgaggctgcggctctgacgccccataggctccttcaatttccgtgatcctcggagtccccaggagaccaggtgatggcagcagccagactcctgccagtgccggcaggaccccaggccaagctgaccttcgaggatgtggctgtgctcctctcccaggatgaatgggaccgcctgtgccctgctcagaggggcctctacagaaatgtgatgatggaaacctatgggaatgtagtctcattgggacttccaggatccaagcctgacataatctcccagctggagcgaggggaagatccctgggtcctggacaggaagggggctaagaagagccagggcctgtggagtgactactcagacaacctcaaatatgaccacactacagcctgtacacaacaagacagtttatcttgtccatgggaatgtgaaaccaagggagagagtcaaaatacagacttgagtccgaagccattaatttcagagcaaacagtgattctggggaaaacacccttggggaggattgatcaagaaaataatgaaacaaagcaaagcttctgtctgagtccaaactctgttgaccaccgtgaagttcaggtcttaagccaaagcatgccactcactccgcaccaggcagtgctacgtggagagaggccctacatgtgtgttgagtgtgggaagtgctttggccggagttcccacctccttcagcatcagcgtatccacactggagagaagccctatgtgtgcagtgtatgtgggaaggccttcagccagagctcagtccttagtaaacacaggagaattcacacaggtgagaagccctatgagtgtaatgagtgtggaaaagcctttagagtgagctcagatcttgctcagcatcacaagatacatacaggagagaagcctcacgaatgtcttgagtgtcggaaagccttcactcaactctcacatctcattcagcaccagcggatccacacgggagaaaggccatatgtgtgtccgttgtgtgggaa

SEQ ID NO: 14313 - DNA, 808 bp, Homo sapiens
gctcaaaacaggtgtcaaatagataactgttgaatgattgttccccagttgcaggctctgccacctggcgttcatacgtgtctgtgcaaagggatccagctcacgctttcccgtctttatctcccagtccttcccaacagcgccgacacctcatggaaactgattgcaaatgtgctacttctcacttctgtgtggcccgaggaggctgggttaatgctgggcttggtaccttaagcaccctttctcccttccccatcttcattctcagaattacacctgtctgaagcaggcattttccaatgccctagatgggaatataagtgtaaggagatgtgaagcatttgcctgtgtgtcagaacattcactgaggatcctcataggcacttctagaaaccaaatccttgaagatgactaaccagaaatgcccgtcatagcactgtttacagttgcaaaaactgaagccaattgaaatgtccatcaggaggggattaaatgaattatggtacagttacaccgttgaatattttacagccattgaagatgatatatagctatattcattgacaaggaaaactcatattttttagtgaaaaaagcaggttatagaattgcatgatattcacatttatataaaactttatatatgggaaggatgttgattgaattgttaataactatggtcacctctagagatggaagtttgcattacctttaatttttaataccattttgtattgcttaaaatttgtatgtattatcgttaaaataagaaaaatcaaataaagctattttcattatgggaaaaaaa

SEQ ID NO: 14314 - DNA, 587 bp, Homo sapiens
gcggcacgagaactggaggcggcaaaaaaacttgtttctgagctgttggcaatgttctctttcttgatctgaggtatacacaagtgtatgacttgtgataattcattcattgactacaaatctgttttataaactcatctgtgtgtatattatatcgccacaaaaacttaaaaagaaaaatttaaaggacacttgcaagaaatctgaagccaggaaagaaaagatgttaaacggcataaatttttcacaggtgatctcgtcttgatcctagataagaactacaacaagataatcttagatttccttacgaaaggctgaagctacctctgttttgcctttatcagccgttaacgtcacatcattttcatccacttgtgaagtactctctactgcttcaacctgaagtgtaattgatccttcacttagctgtgcctgggactgttcatttaaatctcctgaatatagatcatggttaagatgagccatttctttttccaaattacctcttgatacatcagattttcttattaaggcaataggttctctcttctctgtcgacgcggccgcaaatttagtagtagtagtag

SEQ ID NO: 14315 - DNA, 829 bp, Homo sapiens
ttttttttttttttttatgtggataatatttatttgtatcttatctatagaacaaatatttacagatacaaacggaatcacagcaaagttgctataaaaccatccagacctctcgatggccacttctgaaaacatccacggtgaagggcagggccaggcctggctgtggagtgggccagctgagtacctccctcctgtctggcgggaggctcattctctctcgcagccactcgccctctctgcctctcacatatgcggtcacagagtgaatccgagcatcttattgctgcagggggcaggggcgtcggcatcagggaaagttaatccacgaagagcgagaacagcaccattaccacgatgcccgcacagagcagaagcagctgctgcagggagcgccacgggtcctcttcttccaagaggtcagggagcacgttcaccaaggcgatgtagagaaagccgccagaggtgaagggcaggacccaggctgccgtctcctctactcccttgggggactgggtacagatggtgaagccagcgcccagtaggccccccagcgctgttgaaagttgcagcttgctgcgctccatcggtcaaagccggcccggagcaggatggcaaagtcgcccacctcatgggggatctcatgcaggaggatggccatggttgtcaggagcccgatcttcttgctcacaaggaagctggcagccacagccagcccgtgggtgaagttatcgatggtgttggccagcaggttgaggtagccgctgactttgatgctccggaccacggcaccgaggccgggctctgcagccggctgggccagacagtg

SEQ ID NO: 14316 - DNA, 1054 bp, Homo sapiens
agatgcttgtaattttcccatgcgaatagcatgtgcactaccatttaattggctcatcacctgagtgtattggaacagttagcaaataaagggcattttgaaaagggagctgagcattttactgaaataatgaaagtttttttttaagcaattttaattaaagaatgcaaaggtacatttggttaaacattttataaaaattcaagcaaaatttaaaacacagccaatttcaacatttctacaaatttaaccagcattattttggtcaaatccacctttagctgaattaatgagaacaaggacaagggacattgaagtattctcctcaccacaatggaggtttttctcactttccacactgcatagccactacatgggaaactcccagaatgatgagcaattcagtcatgctctacacttttcttttcaatgaaaagtgatgtatcttcttgttttgcttttgacaaaatatgaactaaatacaagtctataataacaagaatccaagagtagctcatacacaagtcaactatgtgtatgtttttattatttaaagcccaccattcagcttatctgtctaaagagatgataacaaacaatttgtttctttttcactaatgatactgatgaccagtcagtgttaagagagggaaagtccaagacagctgtttataatccagtccaatgacacacatataactatttcaacttcaagacttctgacttattgcctctgccctaaacaggtcaaacactgatggcagataaaacggcacaaacccttttggcatatgaaagtttaatacaggaatgatccaggattagtccctgcaccaggtctcctcagcagcccccttggtttcttcatctgtcacgtgtgacctgtttaattcccaaatggtcaactcataactggcacacaccatatactccatttcgagtgcgtgtgaacactcctcagttaaagccacatgactgaggtaaaacagtgcatgactgtgctaggaaagaacagtattcagtgacgaacatccctttaacgttaactttccta

SEQ ID NO: 14317 - DNA, 5236 bp, Homo sapiens
ccaactcctggagtcccctgggagctgccgctgcaggcccccgagccgctaggccccgccgccaggccaccgctgctgcggcagccatggcggaagttcatagacgtcagcatgctcgggttaaaggagaagcccccgcgaaatcctccacactccgagatgaggaggagctggggatggcgtcggccgaaacgctgaccgtgtttctgaagctgctggccgccggcttttacggcgtgagctccttcctgatcgtggtggtgaataagagcgtgctcaccaattacagatttccctcctcactatgtgttggacttggccagatggtggccacagtggcagttctctgggtgggaaaggcgctcagagtagtcaagtttcctgaccttgacagaaatgtacctcgaaagacgtttccactacctctactatattttgggaaccaaatcacgggactgttcagcacaaagaaactgaacttgccaatgtttacagttctgagaaggttctccatcctgtttacaatgtttgctgaaggagttttactcaagaagactttttcttggggtattaaaatgactgtatttgcaatgattattggagcctttgtagctgccagctctgacttggcatttgatctggaaggatatgcttttattctgataaacgatgtcctaacagcagcaaatggtgcatacgtaaaacaaaaattagattcaaaagagctgggaaaatatggactgctctattacaatgcactgttcatgattctgcccaccctggccattgcgtatttcacaggagatgcacaaaaggctgtggagtttgaaggctgggctgacaccctctttcttctgcagttcaccctctcctgtgtgatggggtttatcttaatgtacgccacagtactctgcacgcagtataattctgctcttacaactacaatagttggctgtattaagaatatattaataacttatattggaatggtctttggtggagattatattttcacgtggacaaacttcattggtttaaatatcagcattgctgggagcctggtatattcctatatcactttcactgaagagcagctgagcaaacagtcagaggctaataacaagctggacattaaggggaaaggagcagtgtgaccagaggattgcttcatctgatacgtaggcctaagtttttaatcaactcagaacactggcagttcctacagagacactgaggtgtcttgattatggaggaaataaccattcctttgcacttgtacaatctgaggattgattgctgccttttaaaattttatgaagagagaaacttataattgactctattttaaatatgttgtttgaattaatttatatcagactggaaaaggtactgggctttttaatttatttttcttatatgccgacagtgaaacatcagtgttttgaaagtattttatttcataatttgatatccaggtgtccctgagagctgcatatgtaatgtttgccaactggagcttcatcattcaaattgttgctgcatctggaggcagtttagcctttcctctgctggaaatgcagacgaatatgtgaaatttctcttctttgaatcttatttcttatgattgcattgtcttcatcatatcatcattccatttgccaaggaaaacaactttggcactataaaaatatgtggggctttgaagtgtattgctatctatgttggcttccctgactttcataggatgagcagagtgcattccttgaaaacatgttctttttttgttgtgtagaatggggataatgaagggggtgagaaagtaggccttttactaatttttcatctatttgacttattgattcaactaaaatgttttaagtatatgtgccaggcattgtgctaaatgctggggatacagagatgtttgcagaggtagttgaaacatctcactcctgccatagtgactcaggtaaggttgagaatttagctctgttaatctattcagaagatgtcactaagagtaagttgtttcagcactcaaaagccgcaaatctgtaaattggattaagaacacctgccctacctacccggcaatagtgtgaatccaaatgctgcaatgtgagatgaggtacaagtaaagagctgtgttttgtaaaccagtgcagctcagcattgactccctctctaagtgaaaattgcagacaggcaagtctgttttcccttgccaccttcctttgggtttggttgctctttggatgaatatgatgaggtcccacatttctgaatttattggtttgaggggaaaggctggttagacgtctttgtattgtcaatggttggtttttctctggcagtgtcagtgttagagctatcatcttccttcttaaatggcatgagcaatgagcaaacttccctcctttcaacattctcacctacatcatgtgccccttggctcacctactgagcttgccaacttctctcaaaaccaatgctgcattttgggagagcagctgtgaatgggcactgcctaaattgcctcttggggtaatctggagggtggaggtgttaactcaaacataaccctatgacttgactcagagatatccattgactttgaggattagtgtgtttgctcaggccagttgtacagccagtgtgcaagagatttggtacctttgcactaatgcacacaccagtgtctatttcattgggtttggaatccactggactctgttgacctaaacagttagggttttgattttttttgatatgcaaatttatattgagatcattttcatattcctgtcttttggtttgtctttactaaagcttgggctggtggtgctgtgtccctagaattatccctgcaaccaactcccaagttacaagcttcattaagagccttagactcacttttttctagcatcttctgacctgagaaaattccactgggagtaaaggatagtatcttgtgtcatatgggtcttactctccctattttaccaatgagaaaacaaaactcagagaaagatgacttgctaatacatcaaacccatgtcctttttattgaactatgctgccatttaattaaccgcccttcccctctgagggagtaaggaaacagatcctgagttcacttgagcactttcaaaaaagcaagcagttgattgaatttggtgtcagagaggagcatactttgcaaatcaggaagagtgacagcttaccctgtcctggaacccttatcccacttccaggctgactttagttgataatgcacttctggctgtaaatgttgccaacacttcctggttttgcttaggtacagtgaaagggcatagtgagagctatttttagtgattctgttctttctgtcagcaacatgaaggagggacgtttgaataatttttgttgtagaatatttcttcatgaaaggcttttgggtgtctttaacaggtgttgggctagagccccaccaggagttgaactgcctcttgggggtcaggttccctaggagatctgtcacctcttcaggagtatttgagaacattgtgtagttacagcttcactaaatgcacgtgacaggcttctgtgccttgggagccctggcttatgctgaaacttctggctgaccagagcagtacagcaactttgccctgtctgtgttctgcttcctggatgcatccttcagccactaaccagcattgcaagatggagcagggtgaacaagctggagactgaatagtcttttggagtttgcgttttgattattgcaggcgtgttacaatatactggtgatttacctggtactgtggcacctcccagaaagtctggtttttgccccatgtttgatatttactaggcagaaattctttgtcctgttaactgcctcctgggagaaaaagaggcaatacagagttaaatccttaatttgcccactgagacagatgagctgtggtattccaaaagacaaattctatgactagtgtctcctgttcaatgtaagtgagaccctctttggccaatctgcttctagtcaaggctaaatggattggaataaccctagttggccaggctacacattgccagcatgtcccgttgagttttaattgcctcatgtggctgtggactttatgagtcaatcatttgtaggctccagtttgcacctagtttttttttttaaaaagtgcatttacacgcttttggtagtcctgttttatcaagaatccatggagggttttggtcagtacagctggtgcaggatcctcacggagaaacagtggagtttcacattgagttggtttgaaatggcaccccaggactttgggcctgccttacttgatagcctcgttcagtgagcaaagacttagtgagcagctcttgtatgccaagtattttgctaagctctggaaaaaagataaacaagacatggttcttgctttcaaggagtgtgtaattctttagccagatatggaaacctggaccctgagtgggagaaaggagacagatgaaaggagtccgtgattttgtaaccaagagctgcctgcatggttatgagtatcactgattttagggacgccccacagagctaaagcatttttttaatccgagaggacttttgtaactcatattagttaatcttctagctctgagatagcaacacagctcttagaattctgtaagtagcttgaggcctcctcctctactgtacatgttcttgctttcccaaaattgtaagtttggtttttcctatgaacaagactgtaattgatttttctctccctgaggaaaaaagttcggaataaatgagacatggatatgaaactacttagcacaatgcctggtacatattaggccctcagcaaatgtggctaccgtgtcattatttcatggtgagactcaaggcaaaacaagattcttaatttatgctccgtaaatgctagaggcttgggcaatacggtctgtcctgaaaaacaggactctgtgtctcattgcctctagaatccttaggtagcagtttctgttcactgtcttttcttttttaaaaatatctgctggacacaattacggccattacatgatgcaggtgattctacctattttttaaaaagaacaaaatttcttttatattgtgacagtacattttaataaaggaaaattattttcttccccctactccccctcctttttttaaaaaaaaaaaaaaaaaaagaaagaaggtcttgctctgtcgccagcc

SEQ ID NO: 14318 - DNA, 1483 bp, Homo sapiens
  misc_feature (1)...(1483): n = a,t,c or g
ttaaaacatcaatacaaaaatttaagttacttacttgcattatctttgttagccatggcattcatgccaatgttatcaaacttggatcccatattttcatccaatagatggccaaacttttaaacaaaaacgataaatttattagaaaactaaaaataatgtagaatagctagcttgttaaaacagtacattagccttacctcttcagcagatacaaataggctggaatcatttaagtttcttttcttttttcttggccctaaaaaaaattgtaagtctacattattcaattataaatctaatgattttagaaaaatgcaatgcaacatgattttattttaaaaattatacttgggtaaaaacaattgcaataatcttctggcaccattgggtagctggcatttaaatataatttaagagttagtatataatattttcaaaaagctaacaacatcctaataaatctgttcagatgacaagagtgtcttcttgcttttcagatttggccactgatcgaagttttacccataagggaaataacatagtatcaagcaatagtaaaattatcagtttgacatggatgggttttgaaatacttaagacacaacataaaatttagttcaggggtctttagattgtaaagaaattgactgaaagtatgtttattatgctataaatgaagttgtttataacagcgaaaaaggttctcctttcaaaaagaaacttatctgtagtactgaatatataaacttttcctgaaacaattattcaaactctgcatctttgatatcaatgtctctagcagtagtagagccatattttaaaaagagctttactaaatacagatcataacattcagctgttttaagtgtattaacgcattttggtaaatttacagacttgttcaaccacaaccacagtctgattttagaacatttccatcaacttcaaagatccctggtgccatttgtagtcctccaacccatctccgatctatcttgtttctatgacttgccttttctggctatttcatataaatgggatcatatgacatgtggtttcctatatctgacttttttcatttagcataacgtttttgaggctcatccatgttgtagtactccatgccatgttgtgggctacataatatncccattgtatggatatacccacattttgccttatcagttaatggacatttaggttttgtctactttttggcattaatagtgctgctgtgaacaatcatgtacaagtctttgtatcagagccacttttgataaaatagtttctaaaacatttcatcttgatttttattaaggtgatatgtatgttacttaacagctgtataatacacatttgcatgcattaggaagttttttttgggttttattcatcctgtagtgatgtatctgtgacctcaacgagtaggcacttctgtactaanctggtttcttaaagtttcttttatncccgcccattc

SEQ ID NO: 14319 - DNA, 694 bp, Homo sapiens
  misc_feature (1)...(694): n = a,t,c or g
cttctagtagcttatcttctcacaggtatgaaacacctagcgatgctattgaggtgataagtcctgccagctcacctgcgccaccccaggagaaactgcagacctatcagccagaggttgttaaggcaaatcaagcggaaaatgatcctaccagacaatatgaaggaccattacatcactatcgaccacagcaggaatcaccatctccccaacaacagctgcccccttcttcacaggcagagggaatggggcaagtgcccaggacccatcggctgatcacacttgctgatcacatctgtcaaattattcacacaagattttgctaggaaatcaagtttcctcgcagacttccccagcagcctcctacttctacattccagaactcaccttctgctttggtatctacacctgtgaggactaaaacatcaaaccgtttacagcccagaatcccaggctcagtctgtccatcatcaaagaccaggttcaagggtctctccagaaaatcttgtggacaaatccaggggaaggtatgatctttattccaaattatatataaattgcccaacagtaaaacaaatggaatatatctacaggataaggaatttgtttctcacaactaaagttcattttggcctttattcccaggaaagtgtaaatgagctttcttcccctgcatattattcttanaatggcc

SEQ ID NO: 14320 - DNA, 1285 bp, Homo sapiens
ggccgcctcgcacccggaacaacaaagcaaggaagacggagtccgagcctcgggggctcctagcaacgggccggggcgggagttccatggagactggggagcgcgcccgtctcatcctcatccttgtcctccagcttctccttcgcatccgacgcaaccggcagcagcgctgccgccgcgtcctcagccaccgctccctcttcccacggatgtgatcttcgtggtggaaagctaaattttaaaaccaccccaatggatgcagacagtgatgttgcattggacattctaattacaaatgtagtctgtgtttttagaacaagatgtcatttaaacttaaggaagattgctttggaaggagcaaatgtaatttataaacgtgatgttggaaaagtattaatgaagcttagaaaacctagaattacagctacaatttggtcctcaggaaaaattatttgcactggagcaacaagtgaagaagaagctaaatttggtgccagacgcttagcccgtagtctgcagaaactaggttttcaggtaatatttacagattttaaggttgttaacgttctggcagtgtgtaacatgccatttgaaatccgtttgccagaattcacaaagaacaatagacctcatgccagttacgaacctgaacttcatcctgctgtgtgctatcggataaaatctctaagagctacattacagattttttcaacaggaagtatcacagtaacagggcccaatgtaaaggctgttgctactgctgtggaacagatttacccatttgtgtttgaaagcaggaaagaaattttataattcaccacgtaattggttagaatctctaactgagcaccttttaaacctgctgcacattggactcaaaaggaaaactggaccaacaataattgaggaaatagactcttttattcattcacggctacagtgtaagctccagtccctttggattttattccaaaccttgctgtaatataaaaggaagtttacaagacatgatattgctgcttttacaaaaggacattctatttattttcgcagtaattctcatgtccccataagcagagctgtcacagtgtgcactaccttagattgttttattgtcgtcattgttatttttttccattttgagctaatgtgttttatttgtgaatagtcttttacatttttgtatgctgaatatgggcaccaaagaacctgtaaaagttatctttttcaattgaatgtgcacaaataaaagtttggaaaagataaaaaaaaaaaaaaaaaaaaa

SEQ ID NO: 14321 - DNA, 1930 bp, Homo sapiens
ctcacgcttggtgcgtcgcggcgactgcgacgggcagtggcagtcatggcggctcagtgcgtgaggttggcgcggcgcagtcttcctgctttggcgttgtctctcaggccatctccccggttgttgtgcacagccacgaaacaaaagaacagtggccagaacctggaagaggacatgggtcagagtgaacagaaggcagatcctcctgctacagagaagaccctcctggaagagaaggtcaagttggaggaacagctgaaggagactgtggaaaaatataaacgagctttggcagacactgagaacttacggcagaggagccagaaattggtggaggaggcaaaattatacggcattcaagccttctgcaaggacttgttggaggtggcagacgttctggagaaggcaacacagtgtgttccaaaagaagaaattaaagacgataaccctcacctgaagaaccctctatgagggggctggtcatgactgaagtccagatccagaaggtgttcacaaagcatggcttgctcaagttgaaccctgtcggagccaagttcgacccttatgaacatgaggccttgttccacacaccggttgaggggaaggagccaggcacagtggccctagttagcaaagtggggtacaagctgcatgggcgcactctgagacccgccctggtgggggtggtgaaggaagcttagctgctgttgatggggtgggtgtttttaaactcacttgatgtaactctcaaggctggttcattgtttctcatctatgagtacgtgtgaccttttcccaaaccttattggaaaccttaagtaaccagtggctaaacagaaaagccggttgcccaactgcattaatgaactctaattcgggagtctgttcccttttagtgccacgcgttgaatagttccacatactttcagaagagctcagcagggccctgcctggtctcccgagcatcatgagtaacgtgtctgctcagactctgctgacaccaaagtattttaaacaaataaaaggtcttggggaattctgtttggctacctgggcacgccagtctgcaccatgtgtccctgcggcgcatgagtgactggcgtatttagcccgtcacatttcattcgctgaaggaaaggcaagagagttgaaacatttttcttacttaaaaaaaaatgatctttgtgaagaacatagtgagttcgtttgtcttcagtcaacagcggctgaaactgaccactgagaaatgggtgtgggcactgacagttctcccccattatttggccaggaattgagcttggcttggcaaagttccttttaccctgttctgttcatctaaatgcagacatatttaaatcatattcaactagttactaatgacctcaagttgtattccctgggcaaaatggactttctcaaaataggactgcacgcttggtgtactttaaatgttaatgtttaatttaaaatttttatttaagaggattaaagccctaatgtttattttcctactttctgaaaacaattttgtgtcctctcatggagatccttgccgctgaggcaagcatggcttagccttcccattctctactccagcccagaagctgtcagcttgacacgtgcgtgcgtgcacattcacgtacacacatatacaggcttctacacagaaagggagagccacactcccccagtgcagctgcagcccgtccggtaagaatacgaaacacccaggagccacagcaagggcacaggatttgcaaaatcatcttgccaaagggctgttcctcatttacacggtcatccagggcttagaaaaaggctgaatgattggcgtctgttacaaaaaagaggaaagaacctttcgctgcctttgcttctagaatggaagatacttgtgaaagccatttgctgcacaggaaagatggggcag

SEQ ID NO: 14322 - DNA, 1067 bp, Homo sapiens
gcaaccaaaaggcaaaagaaaagtaaatgaacacagcagtgtttattaggtggtttttaatattgtttattagcacagtaacaaatgcagacttaagtagtccacaacatagaaccaatccactgagcaactcctattccacgccttacagttagttaacagcttaaggtatttcactacaggttttcacaagtcctgattcagaccttttttaaacaaagtagattggcatataaaataaaacgcactactcatctcttatatggtgttttatagccacgtgtccattttatatatatgagatgacaatctctaaaaactctgttaaatatcaatgttcccttccaagaagggaaaacaaattccaattttgttttaaacaaaaagtatgtagtcttagagggactttacataaatggccatatgtgtaacctgtaccaaattaagctgttttaaatttacagactacaagcaactgaacccaaatgtctaaatgtacattcttttctgtactacatttcagctaatattgcagaactaatgacaattttaaaagttgctattaccaattctgtctactgtagcaagataccttaagttacaacaaaatcttaggaaataagactgaataatatctgttatagaaataccctactctttaccaactcccaccctccctgaccccttcaaaatcataagcagctctcttctgtgacagacaaataatgtaagaattgtgaaacccccaatttatgtagcgtatctcttggtccactgtctggccattctgtcatgttctgctctgttggtcatatactgagtggcaatacttcccaccaaggggtcggcaggattacagtctgtaagaagtgagcagatagaaaggaggactttagaaatggttagtgctggactccaattatctttcaatatgtccaagcaaataacaccttgactgttaatattacaatgatagattcttgtccgaaatgtaacctttggaggcttgaagggatattctggtgtaaaagtgatatcgagaaagaatacaccaccctcatacgagg

SEQ ID NO: 14323 - DNA, 819 bp, Homo sapiens
gatccaggtgaacactcattctggaaactgatcgctttacccaaagttggccttatagccttcgtcatcaactcactcagctcgtgttttggcttcctcgatcctactctgtctctctttgttttggagaagttcaatttaccagctggatatgtgggactagtattcctgggtatggcactgtcctatgccatctcttcaccactatttggtctcctaagtgataaaaggccacctctaaggaaatggcttctggtgtttggcaacttaatcacagccgggtgctacatgctcttagggcctgtcccaatcttgcatattaaaagtcagctctggctgctggtgctgatattagttgtaagtggcctctctgctggaatgagtataattccaactttcccggaaattctcagttgtgcacatgaaaatgggtttgaagagggattaagtacattgggacttgtatcaggtctttttagtgcaatgtggtcaattggtgcttttatgggaccaacgctgggtggatttctgtatgagaaaattggttttgaatgggcagcagctatacaaggtctatgggctctgataagtggattagccatgggcttgttttatctactggagtattcaaggagaaaaaggtctaaatctcaaaacatcctcagcacagaggaggaacgaactactctcttgcctaatgaaacctagtccgatggatcctggattgatacaaggttgagaaatgaatgctcctggccttaaacatcaccgtaggaagggtttttaaaattttacgcgcaaaactccgtggaccccgtg

SEQ ID NO: 14324 - DNA, 865 bp, Homo sapiens
ggaaagtgaaaatgttagaagaactcgtgagccggattgatgagcaagtgcaccggcacctggaccaacacgaagtgagatacctgcagtttgccttccgctggatgaacaacctgctgatgagggaggtgcccctgcgttgtaccatccgcctgtgggacacctaccagtctgaaccggacggcttttctcatttccacttgtacgtgtgcgctgcttttctcgtgagatggaggaaggaaatactagaagaaaaagattttcaagagctgctgctcttcctccagaacctgcccacagcccactgggatgatgaggacatcagcctgttgctggccgaggcctaccgcctcaagtttgcttttgccgacgcccccaatcactacaagaaatgagcccaggcccacccgcagctggcctcactgtcccgggtggcgcgccccacctgcctggctggtggtaggcccctgtgagctggtcccgggctgctaaaaggccttgtgaggtggccccaccctccaggggagctggtgaagatgggccacagacctggtctagggctgacaaagacagggacagcctttgttttctgagataccaaagagagccaggggagggccccgggttcggcggccagaggcaggtcaggggtcccctctccctctccctgcaatgtccttgccaaatgactgcctcacatctgccctagtccggggcagcctaggaggcccaccctctttggagtcctgctgtctgggtgccagggccggaacgaggtagtggccatctcatacctactctgaaatgcaaaacttctattctgttgagtgaaagaataaaatgtagacaaaatctaaaaaaaaat

SEQ ID NO: 14325 - DNA, 597 bp, Homo sapiens
  misc_feature (1)...(597): n = a,t,c or g
tttttttttttctggttcaggtttgagcattgataaacactctttaaagagaaacattttaatgttttggaagtgcattccatagtaataagcctgtcctcccttgactcctcagccgagctgactagcctagctaggaaagagccagtcaggctgacagttaataagaactcaagctcatgcctgaaattcannnnnnnnnnnnnnnnnnnnnnnnnnnnnnnnnnnnnnnnnnnnnnnnnnnnnnnnnnnnnnnnnnnnnnnnnnnnnnnnnntctctaacaacaacaacaataacaaaaattagcagggggtggnnnnnnnnnnnnnnnnnnnnnnnnnnnnnnnnnnnnnnnnnnnnnnnnnnnnnnnnnnnnnnnnnnnnnnnnnnnnnnnnnnnnnnnnnnngcctgtacaaccctgtctccaaaaaaagaacccaagttttcaatatgcatagccacatataaactagaacttaagctgtaaggagtcctgtggaagcagaaactctaagtagaagccctagggtagagaagggcatagaaagtcaaacaagagagcaaaacaacctgaggcaagaggatgacaaagcac

SEQ ID NO: 14326 - DNA, 1354 bp, Homo sapiens
taatcttttattggcaaaagttaattctcagtactgcctatagagatacagtgtattttatgtacatacacaattaggtctaattcttgataattcaggttaaatttagtttggcattttcctaccacttactaaaaggtttacattaaatgactgatttaaatatataggtgcaatgttctatgtttattttaattgttatgacatttaagtagctaatataattgaccggtgctaaagtctcctgtttatccataaaatgggtacattatgggcagtgtaatacaagctttcttttcattgcctagtactttaccagcagaccacagttttgccctgggtaggacccaaccctcagaacaaaatcatcattccttgtatttatatttgtatctgagatagtaaacaagatggctggccaggtcaacatggcaccttaacttatttttttaataggtaaaacttcttcaaaagtagcttgctttgtataagaactaagctatcagtatagatatagctatccttggagcttatgtttcagacaagaattatttactaaaataaataataaacaagataatgcattatacaatttgggcatttctcgtttctcaagtgtatgcatcatggtaaatataaactaaccacaagataggtagattgattcatttcattttaatctccttgtgtaattcagtacctccataattgttctaatcttcttcccactgtttacaaattaccagttaattaactcgtgaaagaaaaattcacatatcagaataaaaataaatgtatactcactttataaaaatcaccactgctgtttttccttaatactagcagtggaaatgtaagtggcttactctacaaattttggtgctggcaaatacataggcaaactgttgggagctgctctagttacattcctcccttcttattccctttttctcttcctcactttattgcataacatattcctgtacccaaagcattctaccacagttctatttgactcccacttgtaataactcctttaaaaaattccatgtttaaccatatgaccctgcttggcttactcatattctccctccctctccccttcctttctctctcttccagaagtcatttgcctggtttgaaatattttgtagggattgcttattatattattttagctgatgaacctcaggacaatgtctacacacacacacatacatacacgcacacaaaatctcagctgttgaagagtgggcttggaatcagacttctgtgtccagtaaaaaactcctgcactgaagtcattgtgacttgagtagttacagactgattccagtgaacttgatctaatttc

SEQ ID NO: 14327 - DNA, 163 bp, Homo sapiens
aaaaatcaggaatgtattattttaatgtaaaaagtaattcactttttattttcagtcactgaagaggcaaggtgttgaactgaacaatggatacagaagaagtcaagggatcagtaaaaaaatctagtaaagaaagcaaccattcattcattcatttagatta

SEQ ID NO: 14328 - DNA, 5497 bp, Homo sapiens
aagctttttgtggcaacctgtatgaacgcggagggagaagtgccctagaccagcctccagatcgttcctactggggctgtcagcggctttagctcactgggcgctagatgggagtgtcccctccgtacccggacgaaggcggggcgcccgctggcaaagcgcattttccagcgcaagctgtttggggtgcggggctggcgagtgagggaaaacagagggtggcgcgcccaccatcagcgtctgtgcagccccacctgcgccgcgggttggtctcagccggatcctgcagccctcatcgagcaaaggctgggcgcggcgcccccactgccggggagggaagaggctgggaggacgcaacaggcccaggctgtgccgggcggggagcctgggcaggcagctgcacccccagccccagagggctggggaaggccggcccgaccagcagcaggaaagggggcgctaagtcgccttcaagcccgcacggctctcccggcctttcctcctgtcctcagagtcagctcccccgcccgggacgtcccgcgccactccgcgcctttggccctggctcaaggtcttgtgatgtgattagacaaagccgacgccttgtcctcagacactcagccctgcccggcaggccccggacgctcaagccctgtttactgagcctgggcggggagggggcggaagaaacgagcccgggctccaccggcaagactgccgcggcggccgcccgcgtggccacccccacccccaccgcgactccacgtgcagtcgggctggagccgccaccgactggacgcaggccccgagcccccgcctcctggccggggcaccctttgcaaacccgccgggccgcggggctggttgcgaatatctggcattttgcaattcccgcgcccagtacaaaaccgaagtggagcttaaagctccacaggtccgccgtcggagaacagggcagggaaagacacgtccagggctgcagaatcccggccacgctaaacgaccgggctctccgaccgcgcaccccggaggagaacagccgtgccttcccgccgccacccggcgcatccactggggccgagactacacgccacaccggccgcccgaccgcgggccccgcccggaggcctggagcaccctcccccggaggtaaaaaaattgcgcggccaatgggaggccgggaaggcgcctgacgtccgcgagcgggcgggcggcgttgcctggagaccccggcgggggccgagttctgtcccctcccccggcgcgcccgccccgccgcagccgcactcccgggctctatttagggcgcgcgctcggcggaggccgccgagttccagcagtccgcgagctgccgtcggctccgcggggggggcgggccgggcaccccggggcgcggaggagcgctcctcgcttctctccttcccccctgccgcactccgccggaccctcccgccggcccgcgccgctgcactcgccctctcctctcgccccccggcaaactttcggcccctccccgcccctcgcccgttattcgtcgtggctcaagcccggccacgccgccccaagggctcctcccgacctcccggcctgccgctccggccactgcgggatccagaaacatgtcgaccacacttctgtccgccttctacgatgtcgacttcttgtgcaaggtaggccagggacggggcccggccggcagcagccgttgtagttcttggactttgcctctgtccccaggttctgggggacgcccctcccgccctgcctttcaaagcgggaaagtcccggggtttgcaaaagagtgtccgacccctgagcgggaggacgccgtgtcgcggttgagtttctccactgccgaccgcggccacgctgcccggggcttcccggacagcttcgcgccgcccacctcggcagccggggcggaggatcacgtgtcgaaacccagcgcggcccacggtgggcgtcctcccctctcccgctccgtccagcaagatcttgctggttttgcgcgtgtataggtggagggtggaggcgagtcgggatccgccaagagtgggggaaaaaaaggaaaagaatcagctgggagttcctctgcggctcgccccgagtctgtcttccccttccgtttttcatcccttccccgctcccctccctttggcagacagagaaatccctggccaacctcaacctgaacaacatgctggacaagaaggcggtggggacgcctgtggccgccgcccccagctcgggcttcgcgccgggattcctccgacggcactcggccagcaacctgcatgcactcgcccaccccgcgcccagccccggcagctgctcgcccaagttcccgggcgccgctaacggcagcagctgcggcagcgcggcggccggcggtccggacctcctacggcacccttaaggagccgtcggggggcggcggcacagccctgctcaacaaggagaacaaattccgggaccgctcgtttagcgagaacggcgatcgcagccagcacctcctgcacctgcagcagcagcagaaggggggcggcggctcccagatcaactccacgcgctacaagaccgagctgtgccggcccttcgaggagagcggcacgtgcaagtacggcgaaaagtgccagttcgcgcatggcttccacgagctgcgcagcctgactcgccatccgaagtacaagaccgagctgtgccgcacctttcataccatcggcttctgcccctatgggccgcgctgccacttcatccacaacgcggacgagcggcggcccgcgccgtcggggggcgcctccggggaccttcgtgcctttggcacgcgcgatgcgttgcacctgggcttcccgcgggagccgcggcccaagttgcaccacagcctcagcttctcgggcttcccgtcgggccaccatcagcccccgggcggcctcgagtcgccgctgctgctcgacagccccacgtcgcgcacgccgccgccgccctcctgctcttcggcctcgtcctgctcctcctccgcctcctcctgttcctcggcctccgcggcctccacgccctcgggcgccccgacatgctgcgcctccgcggccgctgcggccgctctgctgtacggcaccgggggcgccgaggacctgctggcgccgggggccccgtgcgcggcctgctcgtcggcctcgtgcgccaacaacgccttcgccttcggtccggagctcagcagcctcatcacgccgctcgccatccagacccacaactttgccgccgtggccgccgccgcctactaccgcagtcagcagcagcagcagcagcagggcctggcgccccccgcgcagccgccggcgccgcccagcgcgaccctccccgccggggccgccgcacctccctcgccgcccttcagcttccagctgccgcgccgcctgtccgactcgcccgtgttcgacgcgccccccagccccccggactcgctgtcggaccgcgacagctacctaagcggctccctgagctccggcagcctcagcggctctgagtctcccagcctcgaccctggccgccgcctgccaatcttcagccgcctctccatctccgacgactgaggcaagagggcgccagtgaggaggaagggaaggcggttcagagatgttggaggacacccctcgccatctcgcccttgctgggggcacgggagtggggggggtgacatgggccctaggcagtctgcaagccctaccgagcacttggactcgaactctgtgccgggaggggcccccacccctcctttttcggtttcctcttgtctttttttttttatttttattacgaagtttcattctttttgagcaaaaaagtcgaactttttctgttgaataaaatattcacaacagggcagttgtgatacgaatagaacaaaaaaaaaaaaaaaaacacttaaactttgttaggactccgatgagtttgggacttcaggaaaaatcaacccagcaccagcagctaccaaccaccattccatctcttcacttgaacagcattagttaagtccagatgtgggaacccttctcttggaagaagttcctaattgtgtctcagaccggtgtaaacaaaccagccagccgccaccttgctaaacctataagctttttaaaatccaatatattctgccaagaatatgccttgatagttagccctcagcccataggtgttttttgttttttaacagaattatatatgtctgggggtgaaaaaacccttgcattccaaagctccatactggttacttggtttcattgccaccacttagtggatgttcagtttagaaccattttgtctgctccctctggaagccttgcgcagagcttactttgtaattgttggagaataactgctgaatttttagctgttttgagtgattcgcaccactgcaccacaactcaatatgaaaactatttaacttatttattatcttgtgaaaaatatacaatgaaaattttgttcatactgtatttatcaagtatgatgaaaagcaatagatatatattcttttattatgttaaattatgattgccattattaatcggcaaaatgtggagtgtatgttcttttcacagtaatatatgccttttgtaacttcacttggttattttattgtaaatgagtacaaaattcttaatttaagagattgtatgtaatatttatttcattaatttctttccttgtttacgtaaattttgaaagattgcatgatttcttgacagaaatcgatcttgatgctgtggaagtagtttgaggaacatcctatgagttttcttagaatgtataaaggttgtagcccatccaacttcaaagaaaaaaatgaccacatactttgcaatcaggctgaaatgtggcatgcttttctaattccaactttataaactagcaaaaaagtgttgcttattccaccagttctactgtgacatactcgagtataaagacatgtagcaataacggggagtggggggggagtctcacagtgcctttggaagggcccgaacttgccttaaatcttcctcaaccaaataagtattttattagtgcttgagagaatctgaatgtaggatgggttcaactgcacaaaaggaaaagatttttaccactttttttatatagatataaagtgaagcaaccgccttagtgctgaaatatgtagtacatgaatatgccttgtttaattacagaaaattccaaaacttgtactatttttttttccatgtagaaaggcaggaatgtctccctaagctttcctggacagcaagatgaatgagcggtagctttagtttgtacgtaggtacagttggagcactatatgtactctctggactactttggacagaagtaggtttttgaatgtaacaagataagtcaacttgagttgtaatatattttggggaatcagctcactacaaattgtgactgtaaacattgtactgtaaatgttttgtagttttcccccaataaaatttttggg

SEQ ID NO: 14329 - DNA, 754 bp, Homo sapiens
tcgacttttttttttttgcagtgcagacagtttaatgctctccacctccatcaccaccaccgaccatcctccacaaggccctcagccccagggcacccttcacactggagccccagagagtgtgcacaaaagcatgccccaactagcatcactttctcacccaatgcccaggacttcgaaggctgccttctcacttctgggacacctacaggcaggaggaagagaaggcttcttctgagagagaagagctgggattccagaggccgcagagtgaacagacggaagaaaggtgctctctctctctctctctcgaggtgaacaggacgtgtgtggggaatgacagggacagaagaggtgctagaggcagggggtggaattggggtcagatttctgacttctccaggtgaagggcctctactgggaggcaggctgatggtctggcataactgcagctctgaagaacagcatgaaaagctggcagaatacactcacacctgacacctcctggccaacagcgctactctactcccgtcaacgtggtcacagtgtggcaattgcaagatgactgagcagagcctaggaggcagccttctcaagtgggttcaagccactgctccccattgcccaccccccatcaaaggtgacaccctcctacagccaactgagctgctcctcctcgtagcgctgggggtcgatgaacggccggtcgatagagcggatcatcagctccccacagtacacacactcagcggcc

SEQ ID NO: 14330 - DNA, 554 bp, Homo sapiens
gtacaatagtgtctagttagtaaaagacattaaggtcttgggacatatacgctgtattttctcaccttgttaactttaccattgtcttatggtatgtttttttccttcccgagacattttgcaaagctttgatcttgctgagaaataagaatctcatcaatccatcaagcctgctagaactcttctttgaactttttcgttgccatgataaacttctgcgaaaggtaaagggcaaaacaaatatttccctgcatcttccttgaggcgacataaaattttgttgtctcttgaattatcgatgctttacattgttaataataactttaacaggaaaaagcaaccattgtgtgcatgctatatggtgttaatagccatatttattgagtgcatactttgtgccagggcaccattctcagagctttgtgtatttactcatttactcacaaagccctatgagagagggatcctcattattattattcttactttgcaggatggaaaggggctgagggttaaaggggaggtaggagtaacttggcccacttcttcacact

SEQ ID NO: 14331 - DNA, 584 bp, Homo sapiens
  misc_feature (1)...(584): n = a,t,c or g
ctgcgtccttacgggggttgcaaggcgtccgaagtatgagtccactaacaaaagtccagaaactcgccagttaatagtattgtggtgagtgatgagcctcacgttggctagagaagtggccgttagcgaggctgcacactttgggatcgcgtggcctgagtcgggggagtaaccggcctgtattccatttttctctctccagtctcttcaaaatatcggagaataatttctttctcgctgatcgcctaacttctactgacgaagcttggaagttgcagaagccagacatgatgtattgagtaaaaggaacttcggtacacaggcctttagtgatgtggtggtaagatgtatggtactggctcctgtatcacccagctctggagttgaaagagctcttcattcctgagtctcctgtatcactgagaatnnnnnnnnnnnnnnnnnnnnnnnnnnnnnnnnnnnnnnnnnnnnnnnnnnnnnnnnnnnnnnnnnnnnnnnnnnnnnnnnnnnnnnnnnnnnnnnnnnnnnnnnnnnnnnnnnnacgcccgtctnaatttgaattttcactaaanaaacgggttttt

SEQ ID NO: 14332 - DNA, 982 bp, Homo sapiens
  misc_feature (1)...(982): n = a,t,c or g
gttcattgccgttgtcttcttatgcaagaataaggtacgtctttccatccactcacgtctatttaatttgactttgcattacacagaaagctggtcttggtctgtctacctcggcatctagttgtcctcactgccccctagccgaccccaccccatctgactgactaccccatcacagagtacttttatttacgttttgctctgcctaatggttacttgatactgtcacgccgacagtgtccagttcagtggtctttgcagttggaaatgctcccgtacacactgtcttgttaaaaatgccagtaagttcatacaaacccagcttgcacccaaggttcacattcagagagcgtaggggctgggggatggggttgtttttccaaggtttcttgccactgtgtgggaaggcttctttcccactgggaagttctgtgtaccccggaatgtcggagtggagtcctgttctagtgtccagcacctgaccctgtgcccaacccctcaacagcctattcctgctgtccacagcctgctggaactttttacaaaatatgttgccatgctggaccctgggcactggacataagccccctggcagcctttttcatgtcacccaaaggggtaattgtcctactggtggtctgtaagatgagttagggtgacttgctaatagacattgtaaatcttaatatttatgtatgtattttattattaccggttttccatttatgatggtaatattgtttcttctaagaatatttatttttccttctaaatattgagataaaattcatgccttttgaaatgtnctatncagtggcttttagtatatttnctatgttgtgcanccatcgacactatccatttctagaactttttcgtcatcccaaacagacgctctgtattcataaaaaaataacttcctacctgtctctccccctagtctttggtaacctttgttatactggtaaactttgttgtgctc

SEQ ID NO: 14333 - DNA, 1171 bp, Homo sapiens
  misc_feature (1)...(1171): n = a,t,c or g
ctgcggaggtttcgagggaacgtgaccttggacccggacaccgccaaccctgagctgatcctgtctgaagacaggcggagcgtgcagcggggggaccttacgcaggccctgccggacagccccagagcgctttgaccccggcccctgcgtgctgggccaggagcngcttcaccttcaggccgccactactgggaggtggaggttggggaccgcaccagctgggccctgggggtgtgcagggagaacgtgaacaggaaggagaagggcgagctgtccgcgggcaacggcttctggatcctggtcttcctggggagctattacaattcctcggaacgggccttggctccactccgggacccacccaggcgcgtggggatctttctggactacgaggctggacatctctctttctacagtgccaccgatgggtcactgctattcatctttcccgagatccccttctcggggacgctgcggcccctcttctcacccctgtccagcagcccgaccccgatgactatctgccggccgaaaggtgggtccggggacaccctgggttccccagtgactcgggccctcctggaggagtcctgttgcctctcctgcccctccaggccactgagtgttttggccacttggaggacctgggaggagggagtgtgtcctttgagcaagaggaggaactccctggtgcctttctgagcctgcgtgggagaaccccaattctagcactccaggaaactgtgggagagtgtggggcaggctccgtcctccctgggagacccctccagccaccgggtgccacttaatgccaacagcccttaccaaagctgggagccccattgccccggcagctctggcctgtggttccagaagctgagaaaactccactggggcttgcagaatccagggttcacctaagctgcacagttcctgcagctttgccagccccctgaaagtcttgtgtaccccacctctgaagatgctgggggaggcagctggggatgggagccagccccatgcctgtctgtgaccccacagtgggtgaggagcccgttcacagtcctgggtgtgggctgctctgggaagaattagggaggcagccataataagagtctttcagagagatgattggggaagggggcccttgaaggaccagggaccagagaat

SEQ ID NO: 14334 - DNA, 1002 bp, Homo sapiens
  misc_feature (1)...(1002): n = a,t,c or g
gcggcacgaggtttcttatatagcagatggaatgaatttgaagttcccagggctgaggatccatgccttctttgtttcnaagttatctttcccatagcttttcattatctttcatatgatccagtatatgttaaatatgtcctacatatacatttagacaaccaccatttgttaagtatttgctctaggacagagtttggatttgtttatgtttgctcaaaaggagacccatgggctctccagggtgcactgagtcaatctagtcctaaaaagcaatcttattattaactctgtatgacagaatcatgtctggaacttttgttttctgctttctgtcaagtataaacttcactttgatgctgtacttgcaaaatcacattttctttctggaaattccggcagtgtaccttgactgctagctaccctgtgccagaaaagcctcattcgttgtgcttgaacccttgaatgccaccagctgtcatcactacacagccctcctaagaggcttcctggaggtttcgagattcagatgccctgggagatcccagagtttcctttccctcttggccatattctggtgtcaatgacaaggagtaccttgggctttgccacatgtcaaggctgaagaaacagtgtctccaacagagctccttgtgttatctgtttgtacatgtgcatttgtacagtaattgggtgtgacagtgttctttgtgtgaattacaggcaagaattgtggctgagcaaggcacatagtctactcagtctattcctaagtcctaactcctccttgtggtgttggatttgtaaggcactttatcccttttgtctcatgtttcatcgtaaatggcataggcagagatgatacctaattctgcatttgattgtcactttttgtacctgcattaatttaataaaatattcttatttattttgttacttggtacaccagcatgtccattttcttgtttattttgtgtttaataaaatgttttagtttaacat

SEQ ID NO: 14335 - DNA, 207 bp, Homo sapiens
gcattttcaggcaatttttattttaatttttcaactgttccgttgtcacaagattcctaatacataaatgagaggcaggttttgatagaacatagttttttttaaagttcaggggtaactgtgcaggtttgttacataggtaaactgtgtcagagaggcttgtcatacagattatttcatcgcccatgtattaagcctggtactcat

SEQ ID NO: 14336 - DNA, 128 bp, Homo sapiens
tccttgtctacctaattaggctttgtgtaactcagtgttgcaaagctttgacatctgtttgagttaatgtttatatatgttgttacttaagggtttcacattaaatttaaacatacttatattttata

SEQ ID NO: 14337 - DNA, 4880 bp, Homo sapiens
atgcagcaggcgccgcagccttacgagttcttcagcgaggagaacagtccgaaatggcggggactgttggtctcggccctgcggaaggttcaggttcaagtgcatcccactctctcagctaatgaagagtctctctattatattgaagagctgatttttcagctgcttaataaattatgcatggcccagccaaggactgttcaagatgtagaggagcgagttcagaagacctttcctcacccaattgataaatgggccattgctgatgcacaatctgctatagaaaaacgaaaacgaagaaatcctcttttactgcctgtggacaaaatccatccttcgttgaaggaagtattagggtacaaagtggactaccatgtatccctatatattgtggctgtactagagtatatctcagctgatattttaaaattggctggtaattatgtttttaatatccggcattatgaaatatctcagcaggacattaaagtgtcaatgtgtgcggataaggttttgatggacatgtttgatcaggatgacataggtttggtttctctctgtgaagatgaaccctgttcttctggtgaattaaactactatgatcttgtcagaactgaaatcgcagaagaaagacagtatctacgggaattaaatatgatcataaaagtgtttcgagaagcctttctttctgatagaaagctgtttaaaccttctgtatacgaaaagatttttagtaacatttcagatatacatgaattgactgtgaaacttttaggtttgattgaagacacagttgaaatgactgatgaaagcagtcctcatcccttagctggcagctgttttgaagatttggcagaagagcaagcatttgatccttatgaaacattatcacaggacattctttcaccagagtttcatgaacatttcaataaattgatggccagacctgcagttgctctacactttcagtccattgctgatggttttaaagaggcagttcgttatgtccttccacgtcttatgctggtgccagtgtatcactgttggcactactttgagttactaaagcaattgaaagcatgtagtgaagaacaagaagacagagaatgtttgaaccaagctattactgctctcatgaatcaccaaggtagcatggaccgaatttacaagcagtattcacctagacgtcgacctggagatcctgtttgccctttttatagtcaccaattaagaagcaaacacctggctatcaaaaaaatgaatgaaattcagaaaaatatcgatggatgggaaggcaaagatattggacagtgttgtaatgaattcattatggagggaccattgacaagaatcggtgccaaacatgaacggcatatttttctgtttgatggcttaatgatcagttgtaaacctaatcatggccagactcggcttccaggttacactagtgcagaatacaggttaaaagaaaaatttgtcatgaggaaaatacaaatttgtgataaagaagatacttgtgagcacaagcatgcatttgaattagtatccaaagatgagaacagcataatatttgctgctaagtctgctgaagaaaaaaacaactggatggcagcccttatttctcttcattatcgtagtactctagatcgaatgttagattcagtattattgaaagaagaaaatgagcaaccactgagattaccaagtcctgaagtatatcgttttgtagtaaaagactctgaggaaaacattgtttttgaagacaacttgcaaagtagaagtggcatccccattattaaaggaggaactgtagtgaaattaattgaaaggttaacatatcatatgtatgcagatcccaattttgttcgtacttttcttaccacatatcgttcattttgtaaaccacaggaattgctgagcttactgattgaacggtttgaaattccagagccagaacctactgacgcagacaaattggcaatagagaaaggcgagcagccaatcagtgcagaccttaaaagatttcgcaaggaatatgtccaaccagtacaacttagggtacttaatgtattccgccattgggttgaccatcattattatgactttgaaagagacctggaattgctggaaagactagaatccttcatttcaagtgtaagagggaaagctatgaaaaaatgggtagagtcaattgctaagatcatcaggaggaagaagcaagctcaggcaaatggagtaagccataatattacctttgaaagtccacctccaccaattgaatggcatatcagcaaaccaggacagtttgaaacatttgatctcatgacacttgatccaatagaaattgcacgtcagctgacacttttggagtctgatctttacaggaaagttcaaccgtctgaacttgtagggagtgtgtggaccaaagaagataaagaaataaattctccaaatttattaaaaatgattcgccataccacaaatctcaccctctggtttgaaaaatgcattgtggaagcagaaaattttgaagaacgggtggcagtactaagtagaattatagaaattctgcaagtttttcaagatttgaataatttcaatggcgtattggagatagtcagtgcagtaaattcagtgtcagtatacagactagaccatacctttgaggcactgcaggaaaggaaaaggaaaattttggacgaagctgtggaattaagtcaagatcactttaaaaaatacctagtaaaacttaagtcaatcaatccaccttgtgtgcctttttttggaatatatttaacaaatattctgaagaccgaagaagggaataatgattttttaaaaagaaagggaaaagatttaatcaatttcagtaagaggaggaaagtagctgaaattactggagaaattcagcagtatcagaatcagccttactgtttacggatagaaccagatatgaggagattctttgaaaaccttaaccccatgggaagtgcatctgaaaaagagtttacagattatttgttcaacaagtcactagaaattgaacctcgaaactgcaaacagccacctcgatttcctaggaaatcaactttttccttaaaatctcctggaataaggcctaacacaggccgacatggctctacctcaggtactttacgaggtcacccaacaccattagaaagagaaccatgtaaaataagctttagtcggattgctgaaactgagctggaatcaacagtgtcagcaccaacctctccaaatacaccatctactccaccagtatctgcttcttcagaccttagtgtatttttagatgtggatctcaacagctcctgtggcagcaatagcatctttgctccagtgcttttgccacattcaaagtctttctttagttcatgtggtagtttacataaactaagtgaagagcccctgattcctcctcctcttcctcctcgaaaaaagtttgatcatggatgcttcaaattccaagggaaatatgaaatctgatgatgatcctcctgctattccaccgagacagcctcctcctccaaaggtaaaacccagagttcctgttcctactggtgcatttgatggggcctctgcatagtccacctccgccaccaccaagagatcctcttcctgatacccctccaccagttccccttcggcctccagaacactttataaactgtccatttaatcttcagccacctccactggggcatcttcacagagattcagactggctcagagacattagtacgtgtccaaattcgcccaagcactcctcctagcacaccctctccaagggtaccgcgtcgatgctatgtgctcagttctagtcagaataatcttgctcatcctccagctccccctgttccaccaaggcagaattcaagccctcatctgccaaaactgccaccaaagacttacaaacgggagctttcgcaccccccattgtacagactgcctttgctagaaaatgcagaaactccccaatgaccttagccatatgtagtcattgacactggaatggtatttgtaaagttttttttttaatttattcaaaaaaagacatagtattttagtactttttacaaataatgctcttacaaaaatgctactgatcaaataagcttttaagaattggaaaaataaaaatacaaaagtccttcaccattatcctcaggtgatcagtagcattgccttgtcttggatcctcagtgctgccaaaaggccagtataaagaatttatatttgcactgtaaactctgcaaaaatatggtttaaagtgacatgattgcactgaaaagggatagtgcttttgtgaaatttttcaaatttgagtaatagatgcctttttaaggcagtgaatttacacaaatatgggaggggtatatggtgttactgatttttaaacctctttgaccatcttctagtttttacttctagtttttacatctaggagaattgtgaataacaccaactgttcttaaactctttaatgccatgtcttaaatgccggtatttgctgctgaagacaaaaatgaaaagtaggatgaaaataatagaatggcactgtaagtgtttattattttgtcaaaatgtaaacaaagactacataacccaatgatgggagggaaaaagggcatgtatctcattcagatgtgccttttgtttttgcagactatgacgtctttagctaatgaattgcctattgttatggaaaacagttaatatgccatgtatgtacagttttgtttatattgtatatttaaagatactgctaataacctatataaatttaagtgacttgaggcctataatacaatctgctactttactaattcataaattcaaaaaaaattctatggcatagg

SEQ ID NO: 14338 - DNA, 498 bp, Homo sapiens
tcgaggaggaagaggaagaaagtgaaaataaaagtatggatacggatcccgaaacgatacgagatgaagaagagactggagatcactcccatggacgatagttcggaggatgggaaaatggaaaccaaatcagaccacgaggaagacaatatggaagatggcatgtaataaactactgcattttaagcttcctattttttttttccagtagtattgttacctgcttgaaaacactgctgtgttaagctgttcatgcacgtgcctgacgcttccaggaagctgtagagagggacagaaggggcggttcagccaagacagatgtagacggagttggagctgggtattgttaaaaactgcattatgcaaaaattttgtacagtgttaaggcctaaaaactgtgtggttcagagactaattcctgtgtttaatagcatttatactttaagcacaactagaaaattgtaagaattgcactctacttatgtatcactacaaact

SEQ ID NO: 14339 - DNA, 1030 bp, Homo sapiens
gagtggagtgcggccagcaagtttgagacctgcccgccctcctcgcagctctgctctgtgtcctcaggaagtcacagagtctactgaggcaaggagagggtgattctttccccaaatcccttcttccctggttcccaaaccaaagacagcctgcagccctttctgcatggggtgctctgttgacaggcttcccagatccctgagtctctctttccttcctcctcgatctttagttgtccacggtcaattcagtgcttccattgggggacagtcccctccgggatgacctgattcacctccagcccagggaatggaatctagaggaatacgtggggtgggtctggacaaggagcggcaggaatcaccacccatctccagctgtgggagccctgtggaggggaaggggaagcttggggttcagaggggactcttccaggagaggggtgcccagcggaggtaaagatgatagagggttgtggggggtctctagttgaatgttttggcccatgactttggaacatggctggcagcttccagcagaagtcacgctccccatcccccaggggacataggacctttttcctgcttcctggtcactttcaaagaactatttgcgcaatctgtgggtctgtggattcacggggctttctgtgtgggtgctgcagttgcttttgtctgcagcagcaggacacatctttcctcttactcagccctttatggcccatggggaactccgtggctcagggagagctgaactccaggggtgtgacctgggacgggtgggcctgaggtgcccagctcagggcagccaggtggctcatgggctgtagtgagccagctccctgggggaaaaggctgtgggccgttaggaccatcctccaggacaggtgacctctatgaggtcacctacggctgtggccgtgcaggcctccttccagcccagagtggcccagtagagcaaggcagacagtgacctccacccccgcagccctcttaaaaggccagtactcttgggggtggggggagggag

SEQ ID NO: 14340 - DNA, 2897 bp, Homo sapiens
ttttttttttttttttccagaaaacagcgattttaatttgaaagcgattttatgtatgagaggggaaaggagccccaaagagaagggacgcagggcaaaaatcatgcagccccagcaccccacctctgcgggctggccacctcccctcaattctcaggccaggatcctgtgtccccagcctatgctatgtgcccagggctggaggagagctgtaaagggaaggcctccgggactacactcgtgaaaccatcccctgtgggggccctgtcctcacagcccaggccccttccccaagttagacaggaagagatagggggggcggcgggaagctgggaaggctagtgcttggagagccctagggacaggccatttcagggccctgcctttcccaaacacccacctccaccactggcatttcttagtcaacctgggaaagtacagtacttctttgagtctaactgcaagtctctatcctcacaggaaattaaaaatagcagatcggttcctacatctccaccagccccttcaccaccaccaccaccttttttatatttcagtctgactgcaagaaggaggtgaagtgtaaaaagagactctggacagtgaacagggcccctcccctcttcccagagaggcccccatctgcccaggtttgagaggaggcaaggcctgtcagggccctactctcatgtccatcagcttgggaggcctgccccccagtatcccacctctgggggagttccccatttccactcttcagatgggaagcaaaatgaggcaagatgagaaggaagcaaggtcctggaggcaaggccagtgctttgtgctgggggaaggacagagggtgagaaatcaccccaaatcatgggagaacccgacaaattcagagactcaaggccaccgaagagagacaaccagtcctcacaggtatctggggtcccttccaacttgggatatcaagcagatcccttggagggtttatgttcttggttctgccctgtacttctcaccccatcaaggttctgggaacatggccccccaccctccccagggcttggagtccctcttggatgtgtgctcctccagtgtgagaagcaccacgtctgggtctgagctcaggccagttgatggggagcctcaagcatcctccatgaggaaggtgtcgatgggggtgtcaccaatgagcttgaagaaaaacagatgctctagacacttaaggccaatggaccggagggcaggaagacgtagcagcagcttggcaaaccgtccctgctgctcagggtacttctgtttgcagtaggtctccagtgatgcatacactttctcccgcaggacctccacctcactagggttggagaggcccttggcatctggattaaacagaatgattgccctcaggcagccaagctctgtcttgtccatcctcatgtcacgcattttggacactagctctgtcagcacccgatcaaagatggctcctactcctgctgaatgggctgagttgcggtgcacgtgaagacctgtggcaaggaggatgccatctcgaacatcaatggatcggtgtgaaaaggaggcaatgaggagttcattccagcctgcccgcagcaatatgacctgatcatccagaggcaaggaggaaaagtgtgggatcctcttcgcccactcaacaagcgtgaatagctgtttgtcagctgcctgacagatgttagtcacagggtcatttgggctgctgccgctacccccggttcccccaggaccctcaacgccctggtcactcttctgttccacagcaagctctgcctccaggatcctgtccacaggcatctcctcgggggctcccccagccccctccccatccccatccttgtcctttccccgctgacgctcctcctgtaccgcctccctcttcatgccagtggccaggcacttctgatagcggcagtactgacagcggttccgctggcgcttgtccactgtgcagtctttgttgtcccggcaagagtatgtaaggtctttgcggatggtgcgtttgaagaagcccttgcaaccctcacagctgtaaaccccgtagtgtttgcctgagcttctgtccccgcagattgcacatagccgtttgccagccccagggccacctggagggggtggacagtgcaggccccggacccctaagactggtggcttcacatcttcaggggggccagacccacccccagggagtgacactgttgagttaatctgggggctgctgacaggcccggagaatcctgggggagctggagggggcagaccaggggaccccatggaagaactgatgactggaaagggagagcccagtgggggtggtggcatcgggggtgggggtggggccccagagcctccaagggatggagctgttgaagggggtaggggtggcccaggaggagaagggggagggactccctggggaaggggatttggggaggagctgtctgggcttcgggagtcccgcccgctgtcgcccatcccgtcccgtccagcctcccctggctccggctccggggtttgttgttctccgcctgccaccgccgccgccgccgccgctgcgggatccagccagggccgtcgccgccgccaccgggacgcgaccccacaatgcatttcttttcgcacccccaccggcccacactgccctgcggcatgccgctgagggaggaagggcgggcgagcggcccaagacatgatccctggctgagagtagggataccgaagaggtcccagggattcccaaggattgatcggaggattagctgagcacgaggaagcccctgagagaaagactctggcctggattgggtcgaattaagcccgtcgctctgctcagtaccaaaatgacagcgccaatgtggcagccggaattc

SEQ ID NO: 14341 - DNA, 1158 bp, Homo sapiens
gagcaaagatgaaacaattcacatttatgacatgaaaaagaagattgagcatggggctctagtgcatcacagtggtacaataacttgcctgaaattctatggcaacaggcatttaatcagtggagcggaagatggactcatctgtatctgggatgcaaagaaatgggaatgcctgaagtcaattaaagctcacaaaggacaggtgaccttcctttctattcacccatctggcaagttggccctgtcggttggtacagataaaactttaagaacgtggaatcttgtagaaggaagatcagcattcataaaaaatataaaacaaaatgctcacatagtagaatggtccccaagaggagagcagtatgtagttatcatacagaataaaatagacatctatcagcttgacactgcatccattagtggcaccatcacaaatgaaaagagaatttcctctgttaaatttctttcagagtctgtccttgcagtggctggagatgaagaagttataaggttttttgactgtgattcactagtgtgcctctgcgaatttaaagctcatgaaaacagggtaaaggacatgttcagttttgaaattccagagcatcatgttattgtttcagcatcgagtgatggtttcatcaaaatgtggaagcttaagcaggataagaaagttcccccatctttactctgtgaaataaacactaatgccaggctgacgtgtcttggagtgtggctagacaaagtggcagacatgaaagaaagccttcctccagctgcagagcccttctcctgtaagtaaagaacagtccaaaattggcaaaaaggagcctggtgacacagtgcacaaagaagaaaagcggtcaaaacctaacacaaagaaacgcggtttaacaggtgacagtaagaaagcaacaaaagaaagtggcctgatatcaaccaagaagaggaaaatggtagaaatgttggaaaagaagaggaaaaagaagaaaataaaaacaatgcagtgaatcacagatgtctcctgaaagaactcttttagatgaaatcattctactcaaatgtaccttaattttttttttttccctgagtaaaagcaagaaatttcttcctttggaaaaaatatatatattaaaaaaccacttttagatggtttttttt

SEQ ID NO: 14342 - DNA, 397 bp, Homo sapiens
  misc_feature (1)...(397): n = a,t,c or g
gggacagatgcctcatgttgaagcaggggtctcaacctggctcacctccagcaacattgagcctccagcacctcctgtctaccaagccccgtgccagtcctgcccagaacccccaggagcccatgagccctctgactctccacaccataccccagtccatcctcctccagagcactcggccgcctgtcctgccccagccacgtgctgttccgcccccgagaagctctatgtcataaatcttaactcagatggggagaggggagcctcagagtcacatagccctggggnccaaaccccagcttcctccacccaagtattgatgggtcaggttttttcaggcttcagttttttgttaggttgttaagatggggggagaattgattttttggggaggggt

SEQ ID NO: 14343 - DNA, 770 bp, Homo sapiens
ggtttcgggttcggggtttcctggtgggcgtcaggggcaggcaacagagtggcggccgctacggccctgtaacagggccatggagaagctgcggcgagtcctgagcggccaggacgacgaggagcagggcctgactgcgcaggattcacagattaatctcttgaggtcctggatgcctcatcccttagtttcaacaccagattgaaatggtttgccatctgcttcgtatgtggcgttttcttttctattcttggaactggattgctgtggcttcccgggcggcataaagctttttgcagtgttttataccctcggcaatcttgctgcgttagccagtacatgctttttaatgggacctgtgaagcaactgaagaaaatgtttgaagcaacaagattgcttgcaacaattgttatgcttttgtgtttcatatttaccctgtgtgctgctctttggtggcataagaagggactggctgtgttattctgcatattgcagttcttgtcaatgacctggtatagcctgtcatacatcccatatgcaagggatgcagttattaaatgctgttcttctctcctaagttgaaaatcagaaacttgtggaaaagagcacttgaatgttggtactctatgtttggtgaagtttgcttttccccataaaacactccaggaacaactgacgtgacagttgaagaccgttttgtactaagtctcattttgtatactggtaaaaactacatgcttgattaaaccattaaatgcttgtaacttta

SEQ ID NO: 14344 - DNA, 1395 bp, Homo sapiens
cttttattttttattataaaaacacatacaagagttttaagaaataacgaatataagacaaatcaaaaccatggtgagttattaaacccattttctatatacaaatactaaaattcccaaagtggaatatcatccaatgtgagacacatcatagcacggtccatatgtacacggcacacagagctctgcctgcgctcatctgtgaattgctcattacatgtcactgataaaaaaatctgcaagggaacttctactcttcagttctcctcttcctgatgcattgtcacatatttttaaggaactttagggatatgaagaaaatgcattaaagtgggtttctgctaagggctctgcatgttttgctctgatcaattacgcactacatcttgagaaaaacttttgcaactcatttccagcaaagatagcagaaaactctaggtttttgccaatttattttttcctagtcactcattggaacacaagtccaacaacaacagctcaggaaccaaatcatgtttttatattggtaagttcattataaaatgccactcaattttaagaagccactaaaaggacactttctgcagcaaaaaaagggctaagttcaagtttttgttgtttgacaaagacacaataatataacccatatgtcacagatcacaacagccttaagtgaaacgtattagatttagggaaaaacgactatgcgactgcttgtttctcctgtctccttgccaaacaataaggagagcctctggtctgttttatctattttatgtctttttgttttgaaacctccctttgtattctgaaagctgatcaaactatttgtgttcaaaatgtgtcaaggcacttctcaagcctcagtggcatcccaggtcagccaagctcctctgtgctcagggcactgacttcctctaggcagctgacaatcgcagacggaacgcttttggaggcctctctgcgccaagcttccaggatcttggaaatttctgctggattgctgggactcaagtcacaaagagcatacacggctgctaactgtataccccatggtatatcttcatcgtgagcatgctgtataaacataccaataaccgaactaatatttttcacagcagatggaaatccttctttcaaacccaattggcctaaacgaccaatcagcctcagtattgaggctataataatatcaggagtatacgcaatgtttgcatgtccttttctgtattttatccatttatccatcacaggccacagctccttacttatgatgttatcatgcgtccagatccatttctgatggcagcagagcagatcaatggcaaatatgtattcccaagtgttatcacttaggtcttcaccaaatttttcactaggttgaaattctgtttc

SEQ ID NO: 14345 - DNA, 676 bp, Homo sapiens
  misc_feature (1)...(676): n = a,t,c or g
gatgtgtagtagggtttctacataagttcccattctcagttcctaaggcttaggactcagcatgtctttggggggaacacaattcagcccatgacattgttatgattattctcactttgcatattatttaggactttgcataagttgctcaggaatcataggagtccaattaaattgtggaatagagacgcaaacctaacgacttcagtttgaagtcacaaattcttaaatggtggcatcaaaatatttcagctttgattttttttaaaagagtgtaaattattgagagagtttcacaaaaaatggttatttctcttagactgtggaaattgtannacattccacgtctgagtgtgataaaccctggacggttattcaagtcttaccatcatacttttgcttgaggcccaatgtgtgatccattcccctgccccaacaccaccctaggggccgagcccactcctccatgtggggtccctaggggacagctctctgcaaacaccccgagcacactgatgtgcctgtcttccccagggaagcaggagttccagctcaaaanccgcgggccacgggagcacatcctgaacttggggtggtgacgaaacatggctgtgctgtccaccggcttggagatctggtggatgttagtgtaaaccagaaaatttaaatctatcaa

SEQ ID NO: 14346 - DNA, 425 bp, Homo sapiens
ggtgagccaccgcgcctagccgaatgttaattgtctaaaaatttttcttctccaatgtcttctcctccacttttttcggaatttgtttcttcctaattacagcgcggtgtggaggaaactgcagctgagtgccgaaaactaggcgtcactgcgcatgcgtatgtggtagactgcagcaacagagaagagatctatcgctctctaaatcaggtgagactgcaggttcacaaatttcttcagattattttgtttcctaggacgctgacgtggaaaatgagaaaggtctttatgactgcctgatttaaattcgattttagctgctaactgaagtagttatgtcaccaaggaaggatatatactttttttcttgtatgtaatccactcagctctgcccattattattgtttcatattattaatcaattt

SEQ ID NO: 14347 - DNA, 417 bp, Homo sapiens
gaaaaatcaaaatggacattttagatctaggccataaattaggatttacaagcactttcttcttcctgttccataccttttcctacctccctcatgccactgttataactactttattgttccagttggctttttctgttttggtcctagccttctggtccacagaactttgtagcgcgaggggttgtgggaggagatagtacaatgtaataattgtataggtaatgtatatgtaatatgtgtgttatagctgtgcttgatttattattactgtctcctcaaacggtttctctagctgtctaatcttactgcagcagttagtcctcctttcttgaaacttacagttcctttgatttttggagacattcctggttttcctcttaagtttttagttaaactttcttattcttccttatg

SEQ ID NO: 14348 - DNA, 404 bp, Homo sapiens
gcatatgcagcctttcaaggaaaacatggaacaatttattattcaagccaaaattgaccaagaggcagaggaaaattcactgacagagactcataaatgctttttggagaccacggcatatttcttcatgaaaccaaaacttggagagaaggaggtgtccccaaatgctttcttcagtatctggcatgaattcagctctgactttaaagacttctggaagaaagagaacaaacttcttctacaagagagagtaaaagaagccgaagaggtgtgtagacagaagaaaggaaaatcactttataaaataaaaccaagacatgactctgggaattaaagcaaagataagcatgaaaacttgaacaatgaaaagcagaatgaaaatgagtcattgcaccgactttcca

SEQ ID NO: 14349 - DNA, 984 bp, Homo sapiens
tatttttcaaaatttgcttttatttacacgtttgagtcaattacatgcatgttttatttttgaggagtgattagcaaaatgcattaaaattttaaaatagcaattaaatatacaaaaatatagcttacaaaaaactgcgaatgtttaaaaatattctgctgcagaatttttagtgtacaaagacgtctatgaaacctgaggttcagcatttcataaacctttttttgagggagttacacaatacctagtgaggaaacccgagggccaaactacaagacgaaaaagtgccccgttcctggcaatgatgtcagaagaccaagaggcgatagttaccagcaacactctaggaagaccagctgtcaccagaagggagttcctaacacttgccacacctgctcccccgaccgggggcctgggagggaagggcagatggagaggaacggtgtgcagtgggcgtgagatgcagatccaccaggcttgggactggcaaagggagctgagaagagagttcccccaaagcacaaacaagtctgctgacactggtggggcccttacagtcacagaagtaaggactggatggtaagccaaaggtgctgatgcttggtcaaaaagtggagtacatctttgcatcttgtaacaatttgggctctacagctgaattggcaaagtaaggtttactacacaagcccctctttttcttctgatatccccactcaaatggaagcacactccccagcacatggggatcccttattaatctttactaaagaaccgtgaaccagcattttccagttatcaactggatatttaggcatgaatctggacatgtccatctgcttaagaaatctgcttaagaaatctgtaacagctacaggaaaagacacacccagggccagagattctacaaatgccagaagagtggatgtgatagagaattttttctcaagttttgggttagggcaccagttgcaattttaatccaga

SEQ ID NO: 14350 - DNA, 190 bp, Homo sapiens
gggaaaacctggaaggctaagagatgtgctgttttccttcatgggaccccactttccacagtaaacaactggtataatcatttattacgttgtatgcaaattttgccttagacaacatttgtctggttccttattaataacttgcatctgatctgcttagagttgcttaattataagtaaatataatccc

SEQ ID NO: 14351 - DNA, 1645 bp, Homo sapiens
ctaatgaatgaatgaatgaatgaatgggcagttagtggacccaaataagtattcagtggtatataaatatttgaggaactaggtactgaattaggtgctctgagttggcaccccgaaatgtttggaatcacgactatgatttacttaaacacgtaacacattcaaggatatataaatggagtctaagtattttgcttttgaagagaataatctatgaaatggaagacttgattttttttttcattttttagaagtaatacacatttatgattgttggcacataaaactatgcaaaataattctttttaagtatctgtaagaaagaattggcagtttaaacggattttgcttatttatgcactacagaatgcagcatactgtattactgttgaggctgcttaataagtttaccaatgtgaaaagcagatcttgggtataagtgtatgcctgatttgagcttttaaaactgtgcagtaggtgtatggtaatgttttacaatcctatgtagcaaaataggaaattatgaatttttgttgttattgttttaaagatttaagatggattggggtagggaacagctggagccaggtataccttctagtatgtagagggaaacaatgtttagataggaaaaaggaagccgtctgtttacagttaactttatttcatggacttctacaaaatgttgtattaatcactttttctagttcaaggaatttcaattccagggtacaaaccattgatttaaaaattacgtttccattctttttagtatcagtttaaagtaaatgcttaccatcagccagttgctgtcactgggaagaaggcaacttgaagtatttactgataaaatagcctttattcccaagtgtgacttttcttcagtgtctacatattatgtcacacgttctatttggcactgctgcaatatagatcaaagatcttgtggcataggggtaggggagtgttagtatctcccttgtcccatttgttctgttactgcttcattggactgatacaccctcatgaacttgcaatcacctaaatggaagtcttgaatgtgtcaccttttgcttggttatttcaaccatgctgctatatataatcaggtgtggcacagtttgtcagtttgattataggtgtgagtggatagaaatcattacactgtgctgttaacgatccttgtctgcttgctgttacctactttttacaggcatcataataaaagctagactatttctttggggggaaagagacttatttaatgtaatttaaaaaacttttccaatagaaaatgaaatattattgaaaataatatctattttttaggctttcagcaattgatggtgctttgttgtggtgtctgctggaagtctactgcccattatagggaacccttgcttgttagcttctctagatctctattctaaacaatctgttagtgatgataaattctgtaggagggtctattctgagccgttaacttcctgtaaggggaaaatgggtgggttaccagaaataccattgaagcagggtgggctgtggggtggaaggttggggtatttgtcttgagaattaaaaactacgaaacacttttgttacacaactgattttttaaaaaataaacacatttttaaagaaaaaa

SEQ ID NO: 14352 - DNA, 459 bp, Homo sapiens
atcacatttagatgtccttacctggttcagggagctcagcctgtggtgtcaaactgggaattcctggctccttttccatgtcaccaatgctggcactggatttatcacaaacatttaaccgtggcccagctgaatctaagcagtcagcatgattttgctctgtcagtggttcctcaagtatgcttgctgaaggagttctatgctctggaaactcatcccgcccctcctgcacagggtcactaggaagtaagaccctaaaggcacactcagagttttctttctctttaaatctgttcatgcgcttacgaggtttagtgcgcctttggtttaaacgctgccaccgctttttaggcaccacttgatttacaccattgagttcatcattctcactgttcattacagagtccagctctgggccttttccgttttcaaaagagagtcctttttcagaattttacc

SEQ ID NO: 14353 - DNA, 176 bp, Homo sapiens
  misc_feature (1)...(176): n = a,t,c or g
ggtgattaggccaggggttttgtggacaatttaatgnatgttgatgaagcagatgattgcagtagtccctccttatttatgggggatataccaagaccaagaatgccagtggatccctgaaatcatggataatactgaaccccaatatgtactgtttttttcctgtatatacatac

SEQ ID NO: 14354 - DNA, 906 bp, Homo sapiens
cagtgaccagtgactcccccaagctctggatcctggtattgggagctgtatttggtttctcctcgtatggccccattgccctgtttggagtcatagccaatgagagtgcccctcccaacttgtgtggcacctcccacgccattgtgggactcatggccaatgtgggcggctttctggctgggctgcccttcagcaccattgccaagcactacagttggagcacagccttctgggtggctgaagtgatttgtgcggccagcacagctgccttcttcctcctacgaaacatccgcaccaagatgggccgagtgtccaagaaggctgagtgaagagagtccaggttccggagcaccatcccacggtgggccttccccctgcacgctctgcggggagaaaaggaggggcctgcctggctagccctgaacctttcactttccatttctgcgccttttctgtcacccgggtggcgctggaagttatcagtggctagtgaggtcccagctccctgatcctatgctctatttaaaagataacctttggccttagactccgttagctcctatttcctgccttcagacaaacaggaaacttctgcagtcaggaaggctcctgtacccttcttcttttcctaggccctgtcctgcccgcatcctaccccatccccacctgaagtgaggctatccctgcagctgcagggcactaatgacccttgacttctgctgggtcctaagtcctctcagcagtgggtgactgctgttgccaatacctcagactccagggaaagagaggaggccatcattctcactgtaccactaggcgcagttggatataggtgggaagaaaaggtgacttgttatagaagattaaaactagatttgatactgaaaaaaaaaaaaaaaaaaaaaa

SEQ ID NO: 14355 - DNA, 431 bp, Homo sapiens
gccgactgtcagcgtgaagcgtgatctgctcttccaagccctgggccgcacctacactgacgaagaatttgatgaactatgttttgaatttggtctggagcttgatgaaattacatctgagaaggaaataataagtaaagaacaaggtaatgtaaaggcagcaggagcctctgatgttgttctttacaaaattgacgtccctgccaatagatatgatctcctgtgtctggaaggattggttcgaggacttcaggtcttcaaagaaaggataaaggctccagtgtataaacgggtaatgcctgatggaaaaatccagaaattgattatcacagaagagacagctaagatacgtccttttgcggtagcagcagttctccgtaatataaagtttactaaagatccgatatgacagcttcattgaacttcaggag

SEQ ID NO: 14356 - DNA, 373 bp, Homo sapiens
gaaactctctgttcctgtcacatgcaaaatccgtgtcttcccggagattgacaagaccgtgaggtacgcccagatgctggagaaggccggctgccagttgctgacggtgcacggacgcaccaaggagcagaaggggcccctgtcgggtgcagcgtcctgggagcatatcaaggctgtgcggaaggctgtggccatccctgtgtttgctaacgggaacatccagtgcctgcaggacgtggagcgctgcctccgggacacgggtgtgcagggcgtcatgagcgcagagggcaacctgcacaaccccgccctgttcgagggccggagccctgccggtgtgggagctggccgaggagtatctggacatcgtgcggga

SEQ ID NO: 14357 - DNA, 964 bp, Homo sapiens
  misc_feature (1)...(964): n = a,t,c or g
tttttttttgaatttataaagaaaaagtttattttcatcacaagaagcacacacactatatacaatacacaccaacagaagtaaaaaaaaagtgcattctgcatcttctactgcaaattcacagtacaaaagatactgcctttaaatatattatttaaaaaaacaagaagaaaaacaataaaaaaaatcatcgatatcttaacgcaattcacgggaacccactggcagcttctggaaaaccaaacaactcatggtgtggagctcctgattggggaagggacagggattggtctgtacctacattttgttgcaaaagagctcaggacactaacagagaggaaaactagggtggtctaggtggtaataaaatctctatgaaagaagagtatgattgtgtgactggggaatgggcaggtgctggactctggtgcagaggctgcctggcctgcgccaccccacggctggctagcagaccaagctacgttctttcattggctcctatgggacacagcatgggccaatgcctgcctggcctgcaggaaccgccagtgttgtttctagcaaggctccttggaatagatgtgaacacacaatgtaaaactgcatagcaggataaacacgtatggagtaggacaagctcacaacccaatgctgaccactactgacaagaccaagtatccaatcataacagatgagactttaacagttttgcataaatacatagtatttgtaaactattattaagacactcaattgtaaaacaataattacagtgtaggaaaagagggaggaagcagctatcttctcatgcagcaaggccgacaggaaggacagtggaggactggtgatctgcttatcgggantcctgtctgagacagtgactgaagccgggngccnagcacctatggccaaacaagaagacggcagtctctccagaaccncccagggcggcactggtcacagt

SEQ ID NO: 14358 - DNA, 1209 bp, Homo sapiens
ttaacagtctgtactttcatttattaaatgcagctttcgctggtcacattgcaactcaatacaaacagcccagcagagggtagggcattaactcttgttctcatcaatgtaaacacaatattaatattgaagattaaagaaaatgggtaaaaagtccagtgtctcctcaatctgtgtgaaggtgaaggtggttgcctacccttggacaggtcccaaagggagacctgaggttgtcacctcttcccatccacagtgaagcaggcaagaaccagagggaacccaatcactttcttcctgtaggtctccagatggatacgtgaatcttcagaactgggctttcatgaattatgaaagttcttcgaaaggcctgagaggttcgtaccttgtgttgtgcactgaagtagttccttcaaagccctttcccatgaatcagtcactgccaatagaaaatgtgaccggtgtaaaacagccagccctcgtaattccgcagtccccattcgctatagcccctggattctggagagtagggagttcaaagtcacgggagcctcggtgatcatcctgaaggaagctgcccatgtttaaatatcggccgaagatgcttgacctccttcctgggccactgctgatagagggtggttggtagaggcagctgattttcctttagagcctcaaaggatcagattttctattttggattgccagccccaaaaataaacaaaacccccaaagaaaaacaaaacaaaacaggagtgactttggggataaggaaacccatcaaccccacctccaggaccctctggttacaatgtccccattgggtttttccaagtggttggtttagatcatcggtttgccctccgtttgaatgcccagctacattgcagggcaaaggggaaagttttcacttaataaagacaatttcacttctatttcctgggacgaataacccctagaaccctgacttccctttctccccagttatgatgggaagcataattattcaaaagcatccagaacatcctaaagccctgccctgatcttgtggctttgcagtaagatgataacccttttactccctgtcaccccttgatttcccattcttgaagagactcatctaggtgggctgcatagccgccctcactacagagaccttggacaaggatccagccagtccctcttctgccccacaaccctgcattcccagag

SEQ ID NO: 14359 - DNA, 909 bp, Homo sapiens
ttttttttttttttttttcccattgggtgacagcgtttattgaaaggaaatcttgctttatccaggaattcactcacatggaggtagctgcaaggagaatgtctctttctcatgacaaccaaagcgaccaaaccataccctaaagcagagacgcaatggaataagtcaacgggcattgtagaacgacactcagaagcaggaaaaaccataaaagatacaggatgattgtctcttcagtattgcatttggccatgtatgtgtttttacataaaatatatgttttctttttaagctagctaaagaaaatactcttgatcggggttagttcttaaagcaaaaaacagaagaaaagtatgtatatataataaaattaaagaacgatagcatgttatacctggaaaggaccgtgggcactaatctgcactttgttccaggtaatccatggctctgagagtgagcacactgtcaaagtcactggggtgagatgagccgggacttgaaaacccttctcttaactttcagtctcaactcttcccactccactataccgcatgcgttgccaactccctcagagtgtaggatagcgcaattgtcaaaacgcataacagcctatttttagggtaatgatgcaagtgttttgaaaagtgacctgtgttctctttgcatgggccagttttgcttcttgtagcccagccccatggctactggaaagaactggccagaatgaggggcagctactttctcacaaaccaaaacagacacacactcccaaagttcttgggtgtgctgaccttccccagcagcgtctctaggtatgagtgggctgaggcttctctcagcaggcttactggcagatgtctaacgatgggagaagcagcagggaaattatgaacatattgagggtcaaag

SEQ ID NO: 14360 - DNA, 1566 bp, Homo sapiens
tttagattagtaaaccacagcaaagtttattcatgtgccagggacataaagatacattaattgtttgtttttctaggctgccagtataagcttttcaaactgtttaaagtaaataaaaccaataatacagctagataccacattgcaaagaaccctaatgctatttatcagctttaaaatactttccaactgaaatcaattacattttaatatacacatattatacagaaattacctatagctcttttaaaaatcctatgacattaacatgaaactttattagaatttaagattctatatgcagacctgataaagccttaaatttaattattttggagtaatgtcttcttaagaaatggtagataggataaaataatttacagatttatctgcctttgaactggaaggaattttaggtaatcacctggttcaacctactccctaaagtcacacagctctataatttccccctcactcagctacttttttctgtctaaagatatgtcaaagcgatttcatatgtaatcatgagacattcaagtgcaagataatttaccaagaaatcccactccaagatccactgtacttatttaacaagacaaattaagtttgtgtaatgaaaatacacaacaaacattgcatttagcgttttgactccacttttaattaatgaatcatagctcctatgctgaggaaacatattatgtatagattaatataaataaattactggattggctaaatgaaatgcatccagttcaatggaaaatgtgcattctattcagagccatactttagaaaaaaagaaaagaaatataaataagcaaaatataattcagagaaggttggtatatttgcagttggagcatcttggcttgaatgtctttatatatgactcagaagcctatcaaaagggctctgagcctcagacacaagatcaatgccttctttgtaagtgttccttacccaaaaatggctctgcaggagtgtccttgggcagccaggacacatagacagcctctgcaggaacacttggctctagaatttgggactgagggagatgcagcgagcccatcatgacgagtgcaaccagatgtggaagaagcccaatgtgggcatgtcacgatctcatcagcatgccagtgtaggagaagcagaggctccggggtctccctgctgatctggaagatcttgtctgctgcttctgtacacctggtgctgtctgagtaagacaggtcttccagatatttggtagtgattaagtgaaacatatgttccaagaaaatgtttactatgccaggaagaaagcaatcgctggcctctcactggaacatgatgagagggacctttgtgatgacgggtccatcagtcagaagagggtacgatggctgaagtaaaattaagatgcctggtctccagttttctgccacacaacatgcttgtagaacagaaatttgggaacactgcataacaaatggtggatgtagatgtttcaaacaacatctaatctagttagacgtgcacctggccagagtaactacggttcactaaaactattctggatta

SEQ ID NO: 14361 - DNA, 1022 bp, Homo sapiens
  misc_feature (1)...(1022): n = a,t,c or g
aaatagtattgaaaaattgaaaaataggcatattaaaacttgtaacactatttaagcttagatatattatttgtacctcatcaacattttttattttgttgagaaagtgtaaggttaattggcagcatatttctaatagtagatagaataatgtctgttttataaacattgacatcctacattacatgtgtgaaccctgaaaatctgagacagctctcagattttttagaaagtttattttgccaatcttgaggatgtgcgcccgtgatgcctcccnnnnnnnnnnnnnnnnnnnnnnnnnnnnnnnnnnnnnnnnnnnnnnnnnnnnnnnnnnnnnnnnnnnnnnnnnnnnnnnnnnnnnnnnnnnnnnnnnnnnnnnnnnnnnnnnnnnnnnnnntgagaaggccagacaggggggcttccaggtcatgggtaggtgagacacaaacagttgcattcttttgagtttctgatgagcctctccaaaggaggcaatcagatatgcatttatctcagtgagcagagggatgactttgagtagaatgggaggcaggtttgccctaagaagtttccagcttgaattttccttagtgattttggaggctcaagttttcttttcctttcacatttccccctttttctgtttaaaaatcttttggagaaagcattttagaagaaaatgagtctctggtctcaggtttttgtcttttttcttttttgagcttgtcccttgtcgccaggatgttcaggtcccacattacttggaaggcttattcctaaggtcatgtttcatggagataaaatatgatacgtaaaacagaaagatnnnnnnnnnnnnnnnnnnnnnnnnnnnnnnnnnnnnnnnnnnnnnnnnnnnnnnnnnnnnnnnngagagagactttcccagatttacagcaaaatggaaagcaaacctagaagctggttcaggctatgctactgcctcctcaattagagcagttctttggacaactattactctagcctttttggttgcatgttga

SEQ ID NO: 14362 - DNA, 2017 bp, Homo sapiens
gcagccggggcagcccggtcaccccgcccccaggcccacactaagggtgtccgcggcctgccctccaggcggaggagcccggactgcggaaggatggagctggccgccggaagcttctcggaggagcagttctgggaggcctgcgccgagctccagcagcccgctctggccggggccgactggcagctcctagtggagacctcgggcatcagcatctaccggctgctggacaagaagactggactttatgagtataaagtctttggtgttctggaggactgctcaccaactctactggcagacatctatatggactcagattacagaaaacaatgggaccagtatgttaaagaactctatgaacaagaatgcaacggagagactgtggtctactgggaagtgaagtacccttttcccatgtccaacagagactatgtctaccttcggcagcggcgagacctggacatggaagggaggaagatccatgtgatcctggcccggagcacctccatgcctcagcttggcgagaggtctggggtgatccgggtgaagcaatacaagcagagcctggcgatcgagagtgacggcaagaaggggagcaaagttttcatgtattacttcgataacccgggtggccaaattccgtcctggctcattaactgggccgccaagaatggagttcctaacttcttgaaagacatggcaagagcctgtcagaactacctcaagaaaacctaagaaagagaactgggaacattgcatccatgggttgatgtctctggaagtgcaaccacccaatgtctctggaagtgccacctggaagtgccacctggaagtgtctctggaagagcacccaccactgttcagccttcccctgctgtttctgtcttcagaggcctacacactaccacatcctttctaagcatgtttgcctgacatccagctcactcgtctgcttcctttctcgctccccccatcctggggctgggctgccttcttctacagttcaatatggggcagactagggaaacctttgcttggcttactattaggaggggaagtcttcagtagggaacacgatcattccattgtgcaattttacggggatgggtgggcggagggacacaacaaaatttaagaatgactatttgggcgggctggctcttttgcagcttgtgatttcttccagcttgggaggggctgctggaagtggcatttcgttcagagctgactttcagtgcacccaaactggatgacgtgccaatgtccatttgccttatgctttgtggagctgattaggctgggatttgaggtgataatccagtaagtctttcctcgttcctacttgtggaggatcagtagctgttatgatgccagaccatttggagaagtatcagaggcctgaccggacacataatacgacaaccacatttttcctcatcatccatgaggaaatggatgatttctcttttccatatgtcactgggggaaaggctgcctgtacctctcaagctttgcattttactggaaactgaggcgtcaagatggctgtggcagctagcaaaagcaaagatgctttgtgcatagccttgtgaaaaagtatctttctatgcaataagatgaattttcctcccagaatatttagaaatgtagaagggataacagttcacagccaggtaaaatttaactggtggcttaatgactctgcacctttttctcaggaattctgcctaagttgtctgccttttctaccaccaaaaagacttttagttttctatgctttctcctgaattttggtagggtaaggtatttctatgtcaaaggcacagccttgatgatctcagggaaaaattttaatcactgtgtataatgatactgaaccttgattaataacagaaattcaggatgtaaagccacagaatgggatttattaatgtgggatacctcagactgtttgttttctttctgggaagaaaagtgtgttctataatgaataaatatagagtggtttttaaaa

SEQ ID NO: 14363 - DNA, 407 bp, Homo sapiens
gccccctcttcgtgctctgtaactaccagccccgggtccacctgaagactgtggtcttccagtccgatgtgtaccccgcactcctcagctccctgctggggctcagcaacggctacctcagcaccctggccctcctctacgggcctaagattgtgcccagggagctggctgaggccacgggagtggtgatgtccttttatgtgtgcttgggcttaacactgggctcagcctgctctaccctcctggtgcacctcatctagaagggaggacacaaggacattggtgcttcagagcctttgaagatgagaagagagtgcaggagggctgggggccatggaggaaaggcctaaagtttcacttggggacagagagcagagcacactcgggcctcatcctccaagatgcca

SEQ ID NO: 14364 - DNA, 2203 bp, Homo sapiens
cagacaggatattcactgctgtggcaaggcctgtagagagtttcgaagttaggaggactcaagacggtccctccctggacttttctgaaggggctcaaaagatgacacgcgccagagctggaaggcgtcgccaattggtccaacttttccctcctccctttttgcggatgagaaaaactgaggcccaggtttgggatttccagagcccgggatttcccggcaacgccgacaaccacattcccccggctattctgacccgccccggttccgggacgctccctgggagccgccgccgagggcctgctgggactcccggggaccccgccgtcggggcagcccccacgcccggcgccgcccgccggaacggcgccgctgttgcgcacttgcaggggagccggcgactgagggcgaggcagggagggagcaagcggggctgggagggctgctggcgcgggctcgccggctgtgtatggtctatcgcaggcagctgacctttgaggaggaaatcgctgctctccgctccttcctgtagtaacagccgccgctgccgccgccgccaggaacccggccgggagcgagagccgcggggcgcagagccggcccggctgccggacggtgcggccccaccaggtgaacggccatggcgggctggatccaggcccagcagctgcagggagacgcgctgcgccagatgcaggtgctgtacggccagcacttccccatcgaggtccggcactacttggcccagtggattgagagccagccatgggatgccattgacttggacaatccccaggacagagcccaagccacccagctcctggagggcctggtgcaggagctgcagaagaaggcggagcaccaggtgggggaagatgggtttttactgaagatcaagctgaggcactacgccacgcagctccagaaaacatatgaccgctgccccctggagctggtccgctgcatccggcacattctgtacaatgaacagaggctggtccgagaagccaacaattgcagctctccggctgggatcctggttgacgccatgtcccagaagcaccttcagatcaaccagacatttgaggagctgcgactggtcacgcaggacacagagaatgagctgaagaaactgcagcagactcaggagtacttcatcatccagtaccaggagagcctgaggatccaagctcagtttgcccagctggcccagctgagcccccaggagcgtctgagccgggagacggccctccagcagaagcaggtgtctctggaggcctggttgcagcgtgaggcacagacactgcagcagtaccgcgtggagctggccgagaagcaccagaagaccctgcagctgctgcggaagcagcagaccatcatcctggatgacgagctgatccagtggaagcggcggcagcagctggccgggaacggcgggccccccgagggcagcctggacgtgctacagtcctggtgtgagaagttggccgagatcatctggcagaaccggcagcagatccgcagggctgagcacctctgccagcagctgcccatccccggcccagtggaggagatgctggccgaggtcaacgccaccatcacggacattatctcagccctggtgaccagcacgttcatcattgagaagcagcctcctcaggtcctgaagacccagaccaagtttgcagccactgtgcgcctgctggtgggcgggaagctgaacgtgcacatgaaccccccccaggtgaaggccaccatcatcagtgagcagcaggccaagtctctgctcaagaacgagaacacccgcaatgattacagtggcgagatcttgaacaactgctgcgtcatggagtaccaccaagccacaggcacccttagtgcccacttcaggaatatgtccctgaaacgaattaagaggtcagaccgtcgtggggcagagtcggtgacagaagaaaaatttacaatcctgtttgaatcccagttcagtgttggtggaaatgagctggtttttcaagtcaagaccctgtccctgccagtggtggtgatcgttcatggcagccaggacaacaatgcgacggccactgttctttggggacaatgcttttgcagagcctgggcagggtgccatttgccgtgcctgacaaagtgctgtggccacagctgtgtgaggcgctcaacatgaaattcaaggccgaagtgcaga

SEQ ID NO: 14365 - DNA, 3298 bp, Homo sapiens
  misc_feature (1)...(3298): n = a,t,c or g
gaattcggcacgagctagagacggaccgcatggtgactatcgaggaggggagggacctggacatgatttcagggggggagatttttcgtcttctgatttccagagcagagattcatcacagttggacttcaggggtagggacatacattctggggattttcgggatagagaaggaccacctatggactataggggtggagatggtacttctatggattatagaggtagggaggcacctcatatgaactacagagacagggatgctcacgctgttgacttcagaggtagggatgctcctccatctgacttcaggggccggggcacttatgatttagattttagaggccgggatggatcccatgcagattttaggggaagggatttatcagatttggattttagggccagagaacagtcccgttctgattttaggaatagagatgtatctgatttggactttagagacaaagacggaacacaagtagactttagaggccgaggttcaggtactactgatctagactttagggacagggatacgccacattcagatttcagaggtagacaccgatctaggactgatcaggattttaggggcagagagatgggatcttgtatggaatttaaagatagggagatgccccctgtggatccaaatattttggattacattcagccctctacacaagatagagaacattctggtatgaatgtgaacaggagagaagaatccacacatgaccatacgatagaaaggcctgcttttggcattcagaagggagaatttgagcattcagaaacaagagaaggagaaacacaaggtgtagcctttgaacatgagtctccagcagactttcagaacagccaaagtccagttcaagaccaagataagtcacagctttctggacgtgaagagcagagttcagatgctggtctgtttaaagaagaaggcggtctggactttcttgggcggcaagacaccgattacagaagcatggagtaccgtgatgtggatcataggctgccaggaagccagatgtttggctatggccagagccaagtcttttccagagggcaaaactgcccgagatgcccaacgggaccttcaggatcaagattataggaccggcccaagtgaggagaaacccagcaggcttattcgattaagtggggtacctgaagatgccacaaaagaagagattcttaatgcttttcggactcctgatggcatgcctgtaaagaacttgcagttgaaggagtataacacaggttacgactatggctatgtctgcgtggagttttcactcttggaagatgccatcggatgcatggaggccaaccagggaactctaatgatccaggacaaagaagttaccctggagtatgtatcaagcctggatttttggtactgcaaacgatgtaaggcaaacattggtgggcaccgatcttcctgttcattctgcaagaacccaagagaagtgacagaggccaagcaagaattaataacctaccctcagcctcagaaaacatccataccagcaccattggaaaaacagcccaaccagcccctaagaccagctgataaggaacctgaacccaggaagagggaagaaggccaagagtcacgcttaggacatcaaaagagagaagcagaaaggtatctgcctccttctcgaagggaagggccaactttccgaagagaccgagagagggagtcatggtctggagagacacgccaggatggagagagcaaaactatcatgctaaagcgtatctatcgttccacaccacctgaggtgatagtggaagtgctggngccctatgtccgccttactactgccaacgtccgtatcatcaagnacagaacaggccctatggggcatacctatggctttattgacctcgactcccatgcggaagctcttcgtgtggtgaagatcttacagaaccttgatccgccatttagcattnatgggaagatggtagctgtaaacctggccactggaaaacgaagaaatgattctggggaccattctgaccacatgcattactatcagggtaaaaaatatttccgagataggaggggaggtggcagaaattcagactggtcttcagatacaaatcgacaaggacaacagtcatcatctgactgctacatatatgattctgctactggctactattatgaccccttggcaggaacttattatgaccccaatacccagcaagaagtctatggtgccccagggatcctggattacctgaggaagaagagatcaaggaaaaaaaacccaccagtcaaggaaagtcaagtagcaagaaggaaatgtctaaaagagatggccaaggagaaaaaagcaccagcaggagtgacgaggtttcaggaaaatgccagtgaagggaaggcccctgcagaagacgtctttaagaagcccctgcctcctactgtgaagaaggaagagagtccccctccacctaaagtggtaaacccactgatcggcctcttgggtgaatatggaggagacagtgactatgaggaggaagaagaggaggaacagacccctcccccacagccccgcacagcacagccccagaagcgagaggagcaaaccaagaaggagaatgaagaagacaaactcactgactggaataaactggcttgtctgctttgcagaaggcagtttcccaataaagaagttctgatcaaacaccagcagctgtcagacctgcacaagcaaaacctggaaatccaccggaagataaaacagtctgagcaggagctagcctatctggaaaggagagaacgagagggaaagtttaaaggaagaggaaatgatcgcagggaaaagctccagtcttttgactctccagaaaggaaacggattaagtactccagggaaactgacagtgatcgtaaacttgttgataaagaagatatcgacactagcagcaaaggaggctgtgtccaacaggctactggctggaggaaagggacaggcctgggatatggccatcctggattggcttcatcagaggaggctgaaggccggatgaggggccccagtgttggagcctcaggaagaaccagcaaaagacagtccaacgagacttatcgagatgctgttcgaagagtcatgtttgctcgatataaagaactcgattaagaaaggagacaagttccatgggatacaacctccctcttgttttgtttgtctctccttttcttttgttactgttcttgctgctagaacttttttaaataaactttttttcaatgtgaaaaaaaaaaaaaaaaaaa

SEQ ID NO: 14366 - DNA, 1118 bp, Homo sapiens
ttttttttttttttttcagtatagcaaataataaatttattaggtgcctacaagtacaaaatactgaaagccgctgcaggggattataaagatgtgtaagagacaagccctgccctcaaagagcttacaatctaggcaattagtcacacaaataagttgtgatggcgctctaagtgacctcagcagagttcttgaaaatgttcatatccttcaaattcttctcttgtcaaattaaacagtgggaaagagaacttttgtggcattcactggtgaccctgactctggcttgcaaagcatctttctgctggttgcacgttgtcgtcatcctctcagcgtcgtttcctaactggacctttgttggagagaatctccgtgcttcctgaaccttcaccagggtttcctgtttgggagtgggtggctcagttgcagtttggccttggaatgatttgcagtccgatttttccttcagcaaatcgctcttttgattgtagttgatgctaaaatgctatgcttttgcaatctgtggttttaagggtgggagtgagatgcaatattaaggaaggcagcccagacttttcccttactttaaacatttaataatagtgcacttattgattataatctgtacagatatagagcaagttataaacctcttccttttatttattttcttcacttagactgtattcacgtaaagtgtatttacaataagaagaaaaaagccttgaggtacaaaacccaaaagaatatctgaggtataaatacaagtatatcttaaataataatctttatcatgctttatctatgtttgaaagcacagtggacatgtttcttaatagaatggtatatacaacatacaatcttacaaatctggaagccatcaaaattgaatatccatgtatatcttcatgaggaacactgatatccaaaatactcaaattttaaaactctaatctgatgccctgccccaaaattcttcaaagaacctttgaaataacactgaaaatggtaactaaattataacaaaataaaaatccttcttacagctctcattcatacattattcacttttgatccatacacaataaatttactaatactgtctcttgagtcaatcc

SEQ ID NO: 14367 - DNA, 347 bp, Homo sapiens
gatgagacgttagggatggatttgaggcacaagtgagacagtgcagaaggaatttgagggttggagggggctttcttgaatctgagcgattcagaccataaaagtaaacttgtctttgtttatttgaccaggcttacatcaaacatggtttctcttttattaatatcaaacacaatgtatttcaattcagtaaatatctgagggacagaaaccaacctaggtgctgttggtcacagtcttggaggacagaatggcagaagtaaatactccataaatacatgggaataggaaatctgtgcaaagtgccaaaaacataggaagaggtagccagttatttcattggggag

SEQ ID NO: 14368 - DNA, 1498 bp, Homo sapiens
tcaaaagctaacaatacccaactactgcttgctttccttattatagacaaggcatgtgaggaacacctagacgtttttaaagccccaaaactaggatattgtgacacagaatgttttttattcagtgctgagatgggagtttatcccaagcgactgtcctggcccctcatacaattatagtggtgaccagtcaggggctgtgggtgaggagacctgccagaggtggctggaggcactttattgccagcctggcgggctggcgagcgcccaatgaagtaaaatctggtgacacacttgagtttgcatgcggcattttattttattggttttttttaaaggaagagattataaaaagacatttcacattaaagatttgcagtcctgggacacagtttggaaaacactatttataaggttgcacatattacaaacagctcccaaatggtgaaactggtattctaagatgaaagcttaatgaacataatgaagtgaataaacgcatgtgaactaatgtttaaaaagttagagcttgtctcaagtcagtacagctcttaagataataaatacagtaacactactttttatttctttgctcttttatccctttcaggttcgatttgctgctttgattactgtgttagcactggctgaaaaactaaaggagaattatattgtcttgctaccagaatccattcctttcttagcagagttgatggaaggtaattcccaaactattcccaaccattaaacaattaaggaataattcagtaaaattctgtgaaaatgtgcccaatgataatgcagatttggatataacgtgactagcagttgatccagtcctcatacaggcagctccagtctcaaatacaggcaggctcgagctcctgttttgagttgggtggagggagcaagttgcgaagtgaccacctcctgatcatttgagagtccgtttacagtgtaatcttcacgatcttttcttttgtggtggtttgtgatcatacaagcagattacagtagtgtttttaattaacctcatacatttatatgattgaagttttggtccccagattgtatggaaatgcctagtggcattaaggatgcggtaggatgtccacttttagtagcaaccgatgttcattcactactccatgttaggtgctttacttggattatctcacttaaaaaccacaacattttatctctgttttacaaaggaagaaactagaggcttaaaagatttcagttatttgacaaagatcacaagctagtgggtgtgacatggggagctgtgacagttctggaacatagagtcttaggcccaggaaataacagtaaatgttattattaagggaggggtggtggagcaagtagatcagtcctttactgattcattgcttatctaagctacaaaagtacattctcctttgtttcttagctcttggaggggggaggtgtgagctactaaaggggtggcatccctaggaagtttgagttttgg

SEQ ID NO: 14369 - DNA, 487 bp, Homo sapiens
  misc_feature (1)...(487): n = a,t,c or g
gttacgttccttttgacattttcctcatctgctgtttgtgacaagtcatcagccagatttcctgactgacacataggtatgatcagtgcaggagagacctgcgcaccacaggctgcaaactggaggttctgttctcatggcagtttgggcagtaacttttgagagaggccaaaaaaaggaggatgacatgctgtctcctctcttcagtatagacattaggctcttattcagaaaggatttttctttaaaaatgtacttactttactgaactacttacaggcacatttcttcataaggccacacctaatccaaacaagacagtctcccaacactgaagttccaaaataatccttaccactttgtaaaccatttatgcatgttcatgaacttctgctgtacattggaataggagttaacacattcacatttactgnctattttcttgaggccttatgagatggcttttctgactggatctcaanagtcc

SEQ ID NO: 14370 - DNA, 1954 bp, Homo sapiens
tttaattaatattagagaaaatggcaaaatagtagatgagcacaaaggttttataagtggtaaatgattaggggaaaataatcatggggaaagggatcttttttccttgaccctctgaaaacagaacgatgcagctggttacaaaatcctaccgttatcagctcttctgcacattgcagtgatgctttggtatgcggggagaaacactcttagggtgctggtccttggcatgactcttgccattctaattggaattagtgccaccctcagcttggattttgaacaaggccttattctttcaggaagacaactaatggatgatagcaagttcatccacttactgggcttgtgccatgagcaaaattcaaagtcctgtatatctttcattgtagatttttaaatactccttttcctaaaaaactcaagggtttaaaaattgctattttatattttaaatgatattgagcagctacctacaatttctatgtacattttgttccccccccaccaccacccccaaattacgttccttttgacattttcctcatctgctgtttgtgacaagtcatcagccagatttcctgactgacacataggtatgatcagtgcaggagagacctgcgcaccacaggctgcaaactggaggttctgttctcatggcagtttgggcagtaacttttgagagaggccaaaaaaaggaggatgacatgctgtctcctctcttcagtatagacattaggctcttattcagaaaggatttttctttaaaaatgtacttactttactgaactacttacaggcacatttcttcataaggccacacctaatccaaacaagacagtctcccaacactgaagttccaaaataatccttaccactttgtaaaccatttatagctttgaaagtgttaagtgattccttcgttattatttatgcatgttcatgaacttctgctgtacattggaataggagttaacacattcacatttactgtctattttcttgtgtgccttatgagatggcttttctgactgtatctcaatagtctttctttctatgcaggtttataatcagtacaactactgttttctaaaatactactactcaaggctcggagtttgtatttaaattacactgaccaagtaacaatgtattccatttcaggaactgaatatttgactgttaacctttttcccatacgtccagtgtggcatggagcatatggacttgacagacatctctcacccagacgcccacgtgtgaacacacccacatccacatctctgggtggaaaccagcctagagtggggacgacgctaatggtgttgctttagaaccgtcttttcttacccttttagactcgtgttttgtatgagacaccattgcaagaaaattttatccctccagaagtattttattactaaagaacaaaagcaaaaaaagcttaaattgcactggttaaagtacagtttccaacagctgtccttcctcagtactctaatggccactccaccgcgagtggaagtcactgttgtgtgtacacaggtggtcccaatcaaaactccatcttttgagcccaattatgtccattttgttatagactaaatcaggggtttgttctacaagaacaatacatgttttaccctttcctttaactagaaggataactagtaatgcatcaacataatttctgtattaaccatcatgcgcacaagaaatacatagtaaataaggaagctgaaaactcctggcattggatcttaagctagatgattagaatgtgaaaaagattttacaaatgtaaaacttctatttctctgtagaaactttcttcactttgctgtgcaagaagacactgctttgcctatatttaaaatggcttttttaaaagagatttatgtatttggtaaatgtttgtagtcaacagttcacacaagaagctgtacacggtttg

SEQ ID NO: 14371 - DNA, 975 bp, Homo sapiens
tttttttttttttttttagtagaaatataaaagtttattgttaaattcatacattataaaagtgatcttttaaaaaaaatccaatattcacttaaagtagacataatacaaattaggctaccacccatcatatattttttgtatgcttcttatgaaaaatgtctactgttgtttcatgacatggtcttaaatcaaaatcacaatatccaagggaaaaacgactctgtggtttcttaaaataatcaagtccccttccaatcttaatcatccatccattgttgaacctaatttctcggtcatgtattgaagaagagtattgaacttccaacagcactccgtgactcctgagtgactcttctatttcttgcaggcctctactttgctgcacttgctcaatgccttcatccagagaggtgagaaggtgaatagtttttactttacatggtctcttaataagcatctcacaaaatcgaagaaagttatacagctgatgagtatgtctaatataaggatcttctatccaaacttctgtaactgtctcattaaggtattcgcgaaaaagtgactcataactgaaacctgttgcattctcttctattttaatttgcttgtgatattttccatcttctttttcttggtccaagtacttctttatgttttccgctctgtccatgtatttggaaattttttctctgagattacatctcttagtattatctttggtacctttcagaacctgcaggagcagatcaatcccctcttggtaacacaccagagcctgcggataccgcgactccgaatctagttctactgcccgctttagcacagtggctgcagctgtgctctgcgggtcctgcctcagcccggacttcgccataattctggaagttctcctccgcctcaacccaggatgaagttgaggcggggtctgcctggcgctttccggggaagtgggtcatgtggatacccaggggg

SEQ ID NO: 14372 - DNA, 509 bp, Homo sapiens
cgccgccgctgtcgccgccacctcctctgatctacgaaagtcatgttacccaacaccgggaggctggcaggatgtacagtttttatcacaggtgcaagccgtggcattggcaaagctattgcattgaaagcagcaaaggatggagcaaatattgttattgctgcaaagaccgcccagccacatccaaaacttctaggcacaatctatactgctgctgaagaaattgaagcagttggaggaaaggccttgccatgtattgttgatgtgagagatgaacagcagatcagtgctgcagtggagaaagccatcaagaaatttggaggaattgatattctggtaaataatgccagtgccattagtttgaccaatacattggacacacctaccaagagattggttctgatgatgaacgtgaacaccagaggcacctaccttgcatctaaagcatgtattccttatttgaaaaagagcaaagttgctcatatcctcaatatcagtccaccactgac

SEQ ID NO: 14373 - DNA, 451 bp, Homo sapiens
  misc_feature (1)...(451): n = a,t,c or g
ggctaaacaaggggctagggactgaaataccaagggaacaagacatatttctgccctcaaagagcccgggacctactgggggaagcagatccaggagtagatactgaggaccctgaaagaacagggtgcttgaggctgtggaaccatagacaaaggacacctgacccagggggatgtccgggaaggcctcctggaggaggtgactcctgagctcagtctagaaagaggggagagtggcaggaagggatcccaggcagaagaggcagcttaagtcataaaaagggtgtgtgcactggcagggcctgccccgggaactgtgggcatgtgcagaatggggtaaaacaagcgtgggaaggtcaacagggtctcgcagtccatggcaaaggagccatggcaggatttcgagcacaatcagacctgctggtgatggaccccctntatgggccggggt

SEQ ID NO: 14374 - DNA, 2471 bp, Homo sapiens
  misc_feature (1)...(2471): n = a,t,c or g
ggtcctatgacaacaacccctacatccgcgccctggtggacggctgtgctaccaagaaaggctaccagaagacggttctggagatcgacacccccaaagtggagcaggtgcccatcgtggacatcatgttcaatgacttcggtgaagcgtcacagaaatttggatttgaagtggggccggcttgcttcatgggctaggagccgccgagcccgggctcccgagagcaacctcgtgacctcagcatgccattcgttcgtgagtgtcccgtgcacgtcctgatcctggacagtgaaggcttctccctcccctcccacctgacttcatctacggcctcggcaccacggggtgtgggaccccagcccggagagaacagagggaaggagccgcgcccccacctggagctgaatcacatgacctagctgcaccccagcgcccngggcccggcccccacgctctgtccacacccatcgtcccccgggagcggggccatgcctccagccccccagctcgcccgacccatcctgttcgtgaataggtctcaggggttgggggagggactgccagatttggacactatatttttttctaaattcaacttgaagatgtgtatttcccctgaccttcaaaaaatgttccaaggtaagcctcgtaaaggtcatcccaccatcaccaaagcctccgtttttaacaacctccaacacgatccatttagaggccaaatgtcattctgcaggtgccttcccgatggattaaaggtgcttatgtttttgtgagttttaagtaaatatttgtattgtattgttataaatgttaagtgtgcctggctttcaatcatgcacggaaacccagtctcagtcccacggacagaatgggcgaggcatggattctgggttgcagtaccgttctgattagaaataggaagtctccccacccccgccctggccaagaacgtgcaataaattggaagtttgccccggggcagcaagaatttatgctgccattgaaaagcaggtaccaggtgccccttttcagacagtttttgattcgctctagacttttttttttttaatagggagggaaaaaatttgataattttcttgtttctacatggcacttaaggactaaaacacaggtttggattaattttatttgcttcctttttccgcttttcttccccgcagagcctgatgggagaatgtccagggcagggaaacccacattttttgtaaggtgataactcaaatgaaaattggtgcttattttttacacttctcttcttgtggctctcttgtggtgctatctgttttaaggtctccttgaaggcgcactggggtccctggccatgcctcgttctccctgctttctttatcctgttattgcctccacagtctgttgccaaggactctaagatcaatgcacgtcactttcctttccactgggcaggatagccaagcacactccctcctgcgctctcccgccccggtgcgtccactcccgagggctgttatgaggactgggttgtgcctacttgatttgaaaacacacacaagcaataaaaagcctcttcctgcattgtctgtggtgtgaccatagcagattatatttggttcctgaatgtttgtggtgctaatttctgtgtttgttccaagccgttcagtcatgccatgcgctgcctcggtagatggagtaatgtacaatgaactccatgagtctctccagggctgcctgcagcacgtcttttccaagtagcctatttggattcccatctcaaatgtcctggatgcgagcgtcagcggctccagagctcggggcgggtgaggtcccctttgggggaacccttttcctgggccatcgaggtcggggggctgccgtctgtgggcaggaggacccgaggggcagccaggaaaggcgatctcttcactgtgaaaagttgcccgggtgcagcgccttttccttctaccatgggaaatgcaggctgggcccttggggtgagcctgcggggctctggtgctgtccccgacccccaccaccaccagaatgcagttccagcttaggaagccacaaacaagccacccaggaggaacaaaacaccgccagcgtggattttccaaatttccctggaaagtaagtctcgctcttgccaaagaaaagtctggcttggagagtctctggagcccaggatgccagcatgtgccaatgactgtcaccttcatctcttcaaaagaaaagccatagccgaggactgtcccgcgacccccgtgggactgcgtctaggtcatgtgattctgttttcatttctcatcccatccaatttgtccttttctcctgtcattttcttcctctgtggtcccttcaaagttgttataatttgtactgaacttcaaaatgtgtcccgttctccccagaccactctagccacagtatattgcaataaaattacttcttatatttgcaaaaaaaaaaaaaaaaaa

SEQ ID NO: 14375 - DNA, 670 bp, Homo sapiens
gcttctgcatctcctaggaacctcgggagcggcagctccggcgcctggtagcgagaggcgggttccggagatcccggcctcacttcgtcccactgtggttaggggtgagtcctgcaaatgttaagtgatttgctcaaggtgcccatttcgcaggaattggagcccaggccagttctctgagcctatcattagggctaaaggagtgcgtgatcagaatggtgtctggacggttctacttgtcctgcctgctgctggggtccctgggctctatgtgcatcctcttcactatctactggatgcagtactggcgtggtggctttgcctggaatggcagcatctacatgttcaactggcacccagtgcttatggttgctggcatggtggtattctatggaggtgcgtcactggtgtaccgcctgccccagtcgtgggtggggcccaaactgccctggaaactcctccatgcagcgctgcacctgaatggccttcgtcctcacattgccagatgttggcagaagggctaatattgaccgtcttgactggctggagccttcaaagccactgggatgtcctccaggcacctgggtcccatgaccagctccccgtctccataggggtaggcatttcactggtttatgaagctcgagtttcattaaatatgttaagaatc

SEQ ID NO: 14376 - DNA, 559 bp, Homo sapiens
gatcaaccataaaaggcctgctttgggggtacagagtagtaatagcagaaagagtagttcctcttgtaaccctaaattgtctgagtaggtagagaagaaagagttaggactaaatgtctcaaatcagatcagctcatctcttccatcccaaaagtcttctttaaggccccctgagacagaaaaaaggagactgagaagacaaggctggaattccatagctcctatagatccagggtcgctcaccctctggtgtgcctcagagcagtcactctagtggacgtgcagggagaggaataccacatggtgtggcagcaaagcaaggagcccggcaccaccaggccgctccgtggtgctggtagcaggtgctgcatgtttataccaaggtactgtgaagcttccctggaaggggtctttctcgacatctggtggccaagctgaaagtggattaccatttgggacatctcataactaaaagatgatgagccagcggggcctctgcacagctttctgcacgatggaccctgcaaaggtacagctgttgccctgcccctgggctttt

SEQ ID NO: 14377 - DNA, 469 bp, Homo sapiens
gaaaatgggtgagggggaattgtaataaaatgaaaaagacttaagagacatcacaagctcattatggagactttttttggattctgattgcaataaatctgcaaagagcagctttaaaactattgggaaattttgaatatgaactggatgcctggatatttagtggtattggaggattattgttaatattgttaggtataataattacacagtgtttatataaaaaaagaattcttatcagtgttgcagaagtttttgcaagtataatgacattttaaggtttgttaagtattccaaccaaaagaaaataatggaatgggggcttaggtggaacaagattggcaaaatattgattattttttaaattgagtgatgggtacttgtggcttaactatactgttctgtgtacttttatgtatgtttgagaatattcaaactaaatttttaaaaataaattcactgatggtaa

SEQ ID NO: 14378 - DNA, 1854 bp, Homo sapiens
  misc_feature (1)...(1854): n = a,t,c or g
agaatgacatcacaggcctttcccggcaggtgaagcatgttatgaacttcacaaattgggcaattgcaagtggcagcagcacagcactactatacagcaagcgactgattactttccagttgcgtcatattttgaaagcacggtgtgatcctgtccctgctgctaatggagcaatacgtttcccattggtgatcccaccttcctgggcaaaggaatggtagtcaatttagggtaatctagtaatagagagtaaaccagctcctggttatactcctaatgttgtagttgggcaagttcctccaggggacaaaccacattagtaaaacccctggacaggattaactttagcacagcttcggactccagcacatgcaacnaccaagtatatgcacagaaacatcagcagttgcaacagatgaggatgcagcaaccaccagcacctgtaccaactacaacaacaacaacacaacagcatcctagacaagcagcccctcagatgttacaacaacagcctcctcgattgatcagtgtgcaaacaatgcaaagaggcaacatgaactgtggagcttttcaagcccatcagatgagactggctcagaatgctgccagaataccagggatacccagggcacagcggccctcaatattccatgatgcagccacacctccaaagacaacactcaaacccaggggcatgctggaccctttcccgtagtatcggtacacaacaccacaatcaacccaacgagccctactacagcaactatggcaaatgcaaaccgaggtcccaccagcccatctgttacagcaatagagctaatcccctcagttaccaatccagaaaaccttccatcgctggccagatattccacccatacagttggaagatgctggctcaagtagtttagataatctactaagtagatacatctcaggcagtcacctacccgccacagcctacaagcaccatgaatccttctccaggtccctctgccctttctccgggatcatcaggtttatccaattctcacacacctgtgagacccccaagtacttctagtactggcagtcgaggcagctgtgggtcatcaggaagaactgctgagaagacaagtcttagtttcaaatctgatcaggtgaaggtcaagcaagaacctgggactgaagatgaaatatgtagcttttcaggaggtgtaaaacaagaaaaaacagaggatggcaggaggagtgcttgcatgttgagcagtcctgagagtagcttgacaccacctctctcaaccaacctgcatctagaaagtgaattggatgcattggcaagcctggaaaaccatgtgaaaactgaacctgcagatatgaatgaaagctgcaaacagtcagggctcagcagccttgttaatggaaagtccccaattcgaagcctcatgcacaggtcggcaaggattggaggagatggcaacaataaagatgatgacccaaatgaagactggtgtgctgtctgccaaaacggaggagatctctttgtgctgcgaaaaatgtccaaaggtctttcatctaacttgtcatgttccaacactacttagctttccaagtggggactggatatgcacattttgtagagatattggaaagccagaagttgaatatgattgtgataatttgcaacatagtaagaaggggaaaactgcgcaggggttaagccccgtggaccaaaggaaatgtgaacgtcttctgctttacctctattgccatgaattaagtattgaattccaggagcctgttcctgcttcgataccaaactactataaaattataaagaaaccaatggatttatccaccgtgaaaaagaagcttcag

SEQ ID NO: 14379 - DNA, 2130 bp, Homo sapiens
ttaagcgtttgagacttcgtggtgattggtcagatactggacccagagcaaggccggagagtgaacgagaacgagatggagagcagagtcccaatgtgtcattgatgcagagaatgtctgatatgttatcaagatggtttgaagaagcaagtgaggttgcacaaagcaatagaggacgaggaagatctcgacccagaggtggaacaagtcaatcagatatttcaactcttcctacggtcccatcaagtcctgatttggaagtgagtgaaactgcaatggaagtagatactccagctgaacaatttcttcagccttctacatcctctacaatgtcagctcaggctcattcgacatcatctcccacagaaagccctcattctactcctttgctatcttctccagacagtgaacaaaggcagtctgttgaggcatctggacaccacacacatcatcagtctgattctccttcttctgtggttaacaaacagctcggatccatgtcacttgacgagcaacaggataacaataatgaaaagctgagccccaaaccagggacaggtgaaccagttttaagtttgcactacagcacagaaggaacaactacaagcacaataaaactgaactttacagatgaatggagcagtatagcatcaagttctagaggaattgggagccattgcaaatctgagggtcaggaggaatctttcgtcccacagagctcagtgcaaccaccagaaggagacagtgaaacaaaagctcctgaagaatcatcagaggatgtgacaaaatatcaggaaggagtatctgcagaaaacccagttgagaaccatatcaatataacacaatcagataagttcacagccaagccattggattccaactcaggagaaagaaatgacctcaatcttgatcgctcttgtggggttccagaagaatctgcttcatctgaaaaagccaaggaaccagaaacttcagatcagactagcactgagagtgctaccaatgaaaataacaccaatcctgagcctcagttccaaacagaagccactgggccttcagctcatgaagaaacatccaccagggactctgctcttcaggacacagatgacagtgatgatgacccagtcctgatcccaggtgcaaggtatcgagcaggacctggtgatagacgctctgctgttgcccgtattcaggagttcttcagacggagaaaagaaaggaaagaaatggaagaattggatactttgaacattagaaggccgctagtaaaaatggtttataaaggccatcgcaactccaggacaatgataaaagaagccaatttctggggtgctaactttgtaatgagtggttctgactgtggccacattttcatctgggatcggcacactgctgagcatttgatgcttctggaagctgataatcatgtggtaaactgcctgcagccacatccgtttgacccaattttagcctcatctggcatagattatgacataaagatctggtcaccattagaagagtcaaggatttttaaccgaaaacttgctgatgaagttataactcgaaacgaactcatgctggaagaaactagaaacaccattacagttccagcctctttcatgttgaggatgttggcttcacttaatcatatccgagctgaccggttggagggtgacagatcagaaggctctggtcaagagaatgaaaatgaggatgaggaataataaactctttttggcaagcacttaaatgttctgaaatttgtataagacatttattatatttttttctttacagagctttagtgcaattttaaggttatggtttttggagtttttccctttttttgggataacctaacattggtttggaatgattgtgtgcatgaatttgggagattgtataaaacaaaactagcagaatgtttttaaaactttttgccgtgtatgaggagtgctagaaaatgcaaagtgcaatattttccctaaccttcaaatgtgggagcttggatcaatgttgaagaataattttcatcatagtgaaaatgttggttcaaataaatttctacacttgccatttgcatgtttgttgctttctaattaaagaaactggttgttttaagataccctg

SEQ ID NO: 14380 - DNA, 1144 bp, Homo sapiens
tttttttttttttttttaaaatatatttgctttattatgtacacactatatttacatcacccaccctgaaaacagcaggttctggcttttccgtgaacccccagatgaatataaattggagcctctgagaacagttccttccccagagcggggagtgtgcacgtgtgtgtgtaaccttctgattccatgggacctggccagctcctctggagccacacagcacctccttgccttacaccctggctccagcttcactggtccgggggacgcctcagcctggggcagctgtgatgtaaaccagtcactccacctccatcttcctcttctgcaaagaatcgaggaagtcttgccactctgctgggtaaaagcgtttatagacgttgatcttactccgaatctgttttggggtatcttgatagtaattcttctcatcacgggccatggccttatagtcctccccgtggttctctaccatgtagcgtacatagtcaatgaggtcccgagacagagtatttcctttcttttctggaaggctggcttctgcctccaggtcattcagcacatagggcttccgtacaagctctttaggcctctcctctatgtccacctccatggccttcacctttctcttacggaggggcaccgccctgttggggtccacagccaaccccatctcggccaggttctggcttttccgtgaacccccagatgaatataaattggagcctctgagaacagttccttccccagagcggggagtgtgcacgtgtgtgtgtaaccttctgattccatgggacctggccagctcctctggacgcacacagcacctccttgccttacaccctggctccagcttcactggtccgggggacgcctcagcctggggagctgtgatgtaaaccagtcactccacctccatcttcctcttctgcaaagaatcgaggaagtcttgccactcttatagtcctccccgtggttctctaccatgtagcgtacatagtcaatgaggtcccgagacagagtatttcctttcttttctggaaggctggcttctgcctccaggtcattcagcacatagggcttccgtacaagctctttaggcctctcctctatgtccacctccatggccttcacctttctctta

SEQ ID NO: 14381 - DNA, 447 bp, Homo sapiens
  misc_feature (1)...(447): n = a,t,c or g
gccctaacgcaggtttccccgcaaatgactggtcacgcgggactgaacaccgcacaggcaggaggcatggccaaggtaagtgaactgaagcactttcaatacttcctacctaaccgcgggctttccctccgagtaatgcgtaaaatgggaccacgtggcccactcctgtttttcctcttgggctctccacgtgccactcatgcttggaagagacagatttctttctaggataaagatctctgccccatttctgtcttttaaaatggagaattctttaaagaagtaggacagcttgcaggtcaggcagttggaaagtacagggcctaatgtgtccgtgaacctggtagaggttgctttctgcctgtgtactgccactgaggaggtgatcactggctgtatgctcctctgtggncatccagtgaagtatctgtggcacagtatccattt

SEQ ID NO: 14382 - DNA, 703 bp, Homo sapiens
ggcacaaggcctgtcaaagctgcccctcggaacccaacactgctgctttgcaggctgccctggcccgagtcgtgccatcctacatgcaggcagtgaacagggagcgggaacgccaggtggtgatggccgtgctggaggccctgacaggggtgctccgcagctgtgggaccctcacactgaagccccctgggcgcctcgctgagctctgtggcgtgctcaaggctgtgctgcagaggaagacagcctgtcaggatactgacgaggaggaggaagaggaagatgatgatcaggctgaataccgacgccatgttgctggagcacgctggagaggccatccctgccctggcagccgcggctgggggagactcctttgccccattctttgccggtttcctgccattattggtgtgcaagacaaaacagggctgcacagtggcagagaagtcctttgcagtggggaccttggcagagactattcagggcctgggtgctgcctcagcccagtttgtgtctcggctgctccctgtgctgttgagcaccgcccaagaggcagaccccgaggtgcgaagcaatgccatcttcgggatgggcgtgctggcagagcatgggggccaccctgccaggaacacttcccaagctgctggggctcctttttcccctcctggcgcgggagcgacatgatcgtgtccgtgacaacatctgt

SEQ ID NO: 14383 - DNA, 1189 bp, Homo sapiens
gtatcctaatgaaaacactttaaaacagattgggaaaactgagcatgtgtcctgttttaagtggtggactgggagggaagtgtcaacttctgaggtctttatttacatgataatctgggagatgcatttatgcctgaatcaaagctgccttctgctcaaacaaatcagatttatttcacattcttccattattccattttcctgctggtcctgtgacttggtaacattctaaacggtccttgccccatagccatcctgattgctgatagtgttttatgcagactcttgtgacttatactcaccacagaatggattgggacacagcagcataagtgtgctacttggcagctagtaagtttaaagcaggacctgccttaactgctcctggccacttggaagtttagggtagatcttgttttccaaagtttcggcaggtgcctggagggcaaataaaaaagcagcagtcagtcagtagtcagtgatggagagaacaagaggagagatgcctgggcctctgcccaagaaattagctttgatggaagcctgagcaagtcacctggttattgtaacgtggagatctttgtaggtttagacatggctccctgtctccagtaaacatccagccattcagacaaagggggcctggagatacagagagcccaaataatgcctgctggattgtctcctgatgagtacatgtggactcacctgaggaagggaaggaagggaataatcttttatgtttcatttaccttatgaaaagtgttaaaacattgccaactcaaaataacattatttaatgcatgtgcaaagttaggtcttcccagttgtctcagtgctgaggaacctcatcagagaagcatggaagatgccaaaggatttttggaaggtaaagaaggctgaatagtgaccacatgggcctgttttcagggtcccagcttagttaagtcacccatgcacctggtcattgtgtctcccatgcacatccagcgtttctcagaagcagacccacccttaagttgacaggattgatggaacatgctctcctgctcaaggcacaacctctgggctggagtagaggactctggtgggaaggttttgctgctaatgtatttatggaatgaatgtatttcattcaaatctgtattcctctaggaaggattaaaattaaacttttttaaaatacagg

SEQ ID NO: 14384 - DNA, 1223 bp, Homo sapiens
  misc_feature (1)...(1223): n = a,t,c or g
aaaacttttttttttttttttccggggaagtcaaacatactttattcaacataggaatgtctgaacaggaggaccttgggcagggttccctgaactctgcttcaaaccccactggaaacagagcaaagatcatcacgaaaacccaggacaccagggcaggggggctgcacaaggtcgggtcaggtcacagtgggccagcacacagtggccccgcccaggccagtcccagcctgggagaggggatgagggctccaggcagctcactcagaaaagccagggtaggaggagggcaccagcctgggcccactcagggaattctttctaccactgaaagcggtggggattaacttagccagggctgccacgccagcacacgattacaaggttcggggtgacaaggaggaagccccttggcaggactgtgcagccctcacagccacatgcacggcagccctgccaatggcttccaaacagcaaaccatcagtgacactgaccttccctgcccaggacacccctcctgagacctggggccagtgtggtgaggagggggcactaggggcggagccaggcaggctgcaggcagaaccaagaggaccccagtccccacactgaagacatcatgattgggggtggggaagatctcagggtctccatcagggaagagcatcagtctgcaccctcggcctgagggtgtgcttgtgggcagggcccatgcaaggcctgggaagaagccaaccccgagagagggaagccctgtgcactgcggagcagccaaggcctctgttccaagcatcccggctgtgctatgtagtgcagggcatgaacggggagagaggaaaggatgggagtgcagggtggggtcagaaaggcggtgtagatatcctatgacccctggggatgacagggagaagccactcatgatggcctagttgggtccagctgaatgccaggggggtgggcaaaagacgcaaatatcatcttcctggacccacccctgctaatccaagagtgggacatgttaccagtgtccccttctagggaagaatctgtattactccccccactactcctgctagaaactacggtggcagatgcagggaactcaaagtctagatgtgaatggcatgggtgctccttccatctacaatgcacggggaagatgaaagggctttgggatggcgtgggaatgcagactgnctgcaacaccaggaggtgggaaggc

SEQ ID NO: 14385 - DNA, 813 bp, Homo sapiens
tttttttttgtcttatccattgaaggtactttaattttgcagttattgattaattaaaaaacacagttgttttcagcatttcctagctacagtagtgcataggaaattccattctaaacaaagaagtaattaatgaaataacaacacaccttaacattttacattgataggttacagtttacaaggtgctttcacatacattatttcatttgattcttacaacaagcagaaaaaacagtgggaaagattttttttttcaggcttacaatgagtattttcaggccaatgggcagttaacacaagaatataccaagaatgagacagcaatacccataagccacaatatcgtttttggtaggttgacagtttgattcaactgggtattcagcatcgggtgagtgagaaaggaattaggacagacaccaaggctcttatgatattcaaataattttaagaacactgtcagagataagaagaaagatgccctaaaatatattgccttattgagacttacttcaaagcaatatacccttcaaaatatcagataaaaagacaatcttgtcatcgactgtgaaagttaggaggaatcttacaaactgcctaatccagttcttccattttacagacaagagaactgaggctgagatcatactgatagttttccagcctgaaattcagatgtcttgactttcagtctagggctccttcttacacaatgccatctcttaattatttactgagcataacataatatcttctgtttcaaatatgtaattttaggttaaatactgatttatgctacttacttcttat

SEQ ID NO: 14386 - DNA, 963 bp, Homo sapiens
ttagaaggacaaccttgagctgcttgaggtttatttataaagtacaaggtacacttactgggcctggcctttttaatttttactcttttgccttcctttccacccagccaagatttttgcttgctctcacctgggagttgagccgatttcacaaatctgctcttggctgtcatgagccaaataccagcacaaccttccctggacctgagggtggcttcatcttagaaggcccacaaggatcctgctgaagcaaatgactctgctccagtcagctcaggcctctatggagcaaagaaactggtgtccttcttggagcgctgccttcatctccttgaactgagccaactggcaggcctcctccagccccagccagcggtaggcttggtgctcatgggagaggcggatctccacgtcatagtccttcacctccgccagccagtaaatgactgttttaggcttgttcctggccacataattgagttcccttttgaacccctcaataatggtcagctggcctgcttctatgcctgcttcctcttgggtctccctcagggctgtttccaagtcatcctctcctggttccacatggcctttgggaggagtccagtgatgaatgccatctgatgcctgcagcagtaaaaactcaattgcattgttgtccactttgggaatgaggcatcttcggaagatgatcaagccacatgctctcaaggccatggtcttatcctaaggactttgtgtataactgcaggaccctggcaactaccctcagtcaatgtggcctctatcccaactcctccagggctccctgtaaaacacgggctggcatgtgtttgttgtgacactggagatcctcagaagcaaacgcaccgaagcagaaggaggtaggaggcggaccttggacggaaactgaagtacaccggccaatcagaagagcctggttacgcttgggcccatcaatag

SEQ ID NO: 14387 - DNA, 610 bp, Homo sapiens
ggtctcctgccagtccccatcccccacccttcacacatagaaatgctgcttttaaccagctgcctcatttggcgaataatcttaacaaacccccctctccgtggagcagctaccagagtccgtcaccaacaccctcctcttcctggagcccgggcggtggtggatatggtggctggggaggttcccaaggccgagatcaccgcagagggctgaatggtggaataacgcccctgaactccatctcgcctttgaagaaaaattttgcaagcaatcatattcagctccagaagtatgctcgccccagctctgcctttgcacctaaatcctggatggaagatagcttgaacagggctgacaacatttttccttttccggtctgaacagcctgaattgatggacttggcaattcctcttaaacctctgcaaattttggcctacctttcatcagtaaggactatctagtgagagaaatgatctaaatgttttcttcatccccatttatttttgaacactgtgaaactgttcatctcagagtgactctttatgcctttcacccatttgtttattttccaatgttaacattgaagatgtagataattaaaccattcct

SEQ ID NO: 14388 - DNA, 439 bp, Homo sapiens
gcccagatgaagcaaagagggaagaaattgcaaacgcttgcaatgcagttatacagaagccaggcaaaaagctgtcagatctggaaagagttacctccctgaaagtatataattggtttgctaacagaaggaaggagatcaagaggagagccaatattgcagcaatcctggagagtcatgggatagatgtgcagagtccaggaggccactcaaacagtgatgatgtcgacgggaatgactactctgagcaggatacttggcaagtacgcaatggggaggaggaggagggaagaagttcagagggaggcagagaagcagagaaggatgacagtacgagccatagtgaccaccaagaccccatctcattagctgtggaaatggcagcagtcaaccacactatcttggcattgcccgacaaggaccacgaaatcaagacaga

SEQ ID NO: 14389 - DNA, 627 bp, Homo sapiens
  misc_feature (1)...(627): n = a,t,c or g
ggcagagctggaacccacgcggaggaaggaagagacgcaggcaggctgcggcntacccaagcggccacccgggcctcagggaccccttccccgagagacggcaccatgacccagggaaagctctccgtggctaacaaggcccctgggaccgaggggcagcagcaggtgcatggcgagaagaaggaggctccagcagtgccctcagccccaccctcctatgaggaagccacctctggggaggggatgaaggcaggggccttccccccagcccccacagcggtgcctctccaccctagctgggcctatgtggaccccagcagcagctccagctatgacaacggtttccccaccggagaccatgagctcttcaccactttcagctgggatgaccagaaagttcgtcgagtctttgtcagaaaggtctacaccatcctgctgattcagctgctggtgaccttggctgtcgtggctctctttactttctgtgaccctgtcaaggactatgtccaggccaacccaggctggtactgggcatcctatgctgtgttctttgcaacctacctgaccctggcttgctgttctggacccaggaggcatttcccctggaacctgattctcctgaccgtc

SEQ ID NO: 14390 - DNA, 4613 bp, Homo sapiens
ggaatttccaagaacatttatttcaccattcttaaggtggttatgtacaagtacatacataaccaggagagcaacccgggccctcctggccctcgattataaaactccgatggtcaagacaggtcccacccatcaacccaattacaccctgccgctccaccttctacccggaagccccgattaaaacgttttaaataatgaacgggcctggctggcttgcagtttgaatcctggtttatttaagtagcattcaggagttatactgtaaataaacatcattatggctaatgactaattaaaatcaccattcattacaaataccaaccaggttagataatactattaactatcttttccccttcggtctggggttcatattcttccttttctggaagtcattttcatggataaaatatttagcattttttgttacctcttccttcaccaactgtactcaacacacttctgtaaacagagtgagaacctgggttcatggacaagctcttttccacttatccttcgggttaaacccaaaactttttcaggcaactttgcccctgtccaagttttgcagaacaccagctgcctcttcctgttctaggcattctagggctagatacctgtgaacggacttcaagcattaaagaagtcatcagcatttcctatacctcacacacactcatttgcccaccctgaacttcactgacattaatttaggagcctggccttttgcctttcacatgttttctatttcccccactgtactgtaaaataagatctgccctgacattaagaaaaaaggcaactgttaaatttacttttccctttaaataacgggattttttccttttctataagattagcaaaatatttcacaatacctatattttttcccttaaataaaaatgtatgcaaaattactataatagacattgctcaataggtgctggtaggtttatcagcacactcttcctcctttcattgaaatgcggagattcccttgaagttggatactcttgaatgcaccatggagtctttagaaagcaacggtgccaattattaagtattgcaggaaaattactttctccttgagagaggaagagtaacaacatttctatcatgctctgggtgttatttcaatgccaaataactatgaagcttgaggtggattacagaaattatgagaataagaattatgagaataattcttaaaaacaacttccgaggttaatgtctttcaaaacctgaaaattaacagatatccccataaaaaatccacattagccaaagaaaaatactcagtttcaataaaagcagaaagaaaaatggttctatatgaagttgaagttacacttgtcaatgcactaaaatagttttatccaaatcaactgaaaaactgtcttcatactattcatccaatgtctaaagtgaaaatttaagttctggtctttagtttgctccccaaaatacctgtagcaggtattgtcttggtaactcaacgatgggctctatacagattcatcagattaaaaataagcaagggcttctatcccataccccaatgacagaataaagatcatctctgagcagcaggcagttatttaatacaaggtcactcctcaatagcgttggctgtaccagtcgttgttgtttaactgaagaagttctgtcacaacctgcaggatattgtaattgtgtttcttcagcagccgtaggttcagctgcctgtcacagaatcccatttcaaagagatgggccatcagggctgctgtctgatcttcagaaattattggctgtgcagtgactggtggcccagcaaacagggccttgtatgcagaggcagcaacagacaaagcccccttcaccagtcctccagcaatgctgctcccatgatggtgccttgagtggtcatagctcttctgtctgctgtttacaagtcctgatgagcctctgggctctcctctgatctgatcagggactgaagaaacttctggtatggtaactggtaaatccactcctggggaaccatgatgatgtacacaaggagagctcctgggcagtgacggtggaagctccactacctctgggattaggggcactgtttccagagtctgtgaggtcgtgaggatgtcacttatgctgtgctcctgtggctggttctcccctccagggagtctttccccagcctcagctggttcctgcccagcctcaaccccaggcttgccttcagcacctcgctccaggcctggctgtgagagcgcagagctgtacatagaatcccccagggggcggctggtatcaaagcactcaggcaggatgatgatgtaatcctctgaggaagcagaggactgactttgaacttcatctttgagctcatcctcctcctcctcatcctcctcatcctcctcctcctccatgacagcttcttcctcagcgatatggataatctcctccttctcatttccaagtggtccttcaggcaaggcaaatgtcatctgcaaggacttctgtctgcaaggagggttgtggtctggggcagcatccaaggtaagggatcggattactgtctcacacacaaactgggtcccactcaggtcttcttctgcttcctccacagaagcaatgttctcagccttcctctttactgacaccatagaatcaggaagtgctttaaatcctgccccttcattctcttcctctatctgccccaagcctggcttctctattaaaggactgtcatgtggcagaggagacatgcagggagtcacatccacaggggtgttgtggggcactctctccaactcttgaacaatgtttatatccaacagctcaaaggacagcaggtcctgggcagtcagaagatccacagatgggatgtagagctccctctcactggcaacattttttgccttctgtgggatgcaggctgctgtcccttctgtctgctcagtcacttcaccaagctgtctttcttctttagccagaagaaaagtttcctcttgctggcaggtgagatcatcagttttgcttgagctgatcatgcccttttcaatgttatcagggctctcttcggaggggaaaggatctactatgatactgcaccagacccgaggcccaaattgctggcctttgtgagaaagacgccaatgggaagtatacgttccctccaaggctggggcaatgaactccacagatacaactcccacatggccggccttgaggcagggaaccaaaacatccttcttttctgtggaagccaaagtcaggtttccccacatgaacttgagctttgtgtctgcactccactttacatttcctgtatttttcatcctccagtgtttgataaacttggttcctggctgaaggtgagtcccatcaggcaaattctcatccacaaatgctgcactgagcattggcataacggaggtacagggctgcaaagggagcatcagggtattagactggagcaagctctcaggtcggcctaaaggagacttggggctctggagtccatggattgaattccacaggtgaattttcctatggagtttaagctgctttttaagttccttgacctctgctttacgttgtttcttctcagctcgcaacctttgcttttctgctttaagaaagttcttatcaacctgtttctggagcctgacttgttccagagcagcaggaagacgaggagtagagtactttgagtgacagaacggttcagaggagcccacaacaggtctccgcaacttcagcaggacgtggttagtgtcatggccatatggccctgcttcacaatcttcacagatattgtaggatggggcataggctacactggtagcggacaccaacaatccttctttggcagttgttgcaagcaatatgccagctgaactggttttctggcaaaaacaatgtttcttctgaagtaggcattgagacttctgagggacaagaacccaaggatgggttctggaggacaagcttttcatgtaatttctgttcaagcttctcaaccgtttcgttaaccacttgttctctgaacgtctccaggtagcttgtgaaccagtctgggggcttgtcttgaggctggtctgtgtcacatggaacaagtggaaacgactgcactgcaggatcctctggggtcttcatgtctgatcccaagactctcaccagtgaagagtaatgtgcaagtggcttcttccctgccctggcagctagtcgttttgctcctacaactgggggtggggcttcatcaacgacatggtgcccttcgtggacttgcatctgcagttggtttccctgtttaactgccatcttaagcgcttcttcatattctccttgactgttgatggatacctcttcattttcctcatccaggtattttatttgaatagtattcagatcaaatgaaacttttaccatagcttcgatatcagcccaagttgtattttctggatcagaaaccagaaagctttgaatttcatttttaaaagtcacatttagagtaacctgtggttccatgctgtgaggcagcttcccgcccccggggggcgcctgccggaggccaatgcaaggaccgtccgctaccggctctgccgctatcccggaattcc

SEQ ID NO: 14391 - DNA, 445 bp, Homo sapiens
  misc_feature (1)...(445): n = a,t,c or g
tatcggggatgtctgctttctccctgttctaaagctttggtactagaatagtagagtgattaagagtagaggctttgagataaataaaactggcttcaagtctctgctttacaacttactatctgggtcatcttaggaaaatctctgagcttcagtgctttgaatgataaaatacagacaatgtataaatgtagggttaggagtagtcattgagataatgtatgcagtgggcagagcacagtgcttggaacatagtaggtgctcagtaaatggcaatgattattgcagttagtacaaattcctctccagtcttctctgcttctccaaatcttgtccaatgtggacccagatcaagctacatctttaccctgaaggtttctctgcccctgaagctcatggtggtgatccctttctgagttcttatagccctttgcctantgcctag

SEQ ID NO: 14392 - DNA, 1558 bp, Homo sapiens
ccatcatgtaatttcagattaataccaattttgttccctgatagatggagcttaaacagtatatgctgctttaaatttctacctctagcagatctttattggagggagtgttcctttgtattttttaatgtatgatattctgtttccagtagcttggaaagtagagatgactaatgttttagccttttcttggagaaaaggaagaactcttcttgaatattttcacagatgattgtgattgctttaaatgacctctgtggcaatttaaattagatggatttaatctcagtaatgtgctggtcgcataaatgtcatgttttaataggaaaagttacttgtaaatctttagacctttgttgtcacttaggctggggagtcactaccctatttggcatcttactagttggggggaccttttccgtgtacagtgatgggacttttgtgacctttactctcactatgcaatagagggtttcatgtagttaatctgacatgtcaaaattgggaagactgtaaccttttttttttttttttaagatttctcttttttgtgtccctcaatacttagcagatgttcatttggtggaaattcttattacttacatgaatgagtttgaatttagtggcaaggaagaaaaaaaaaactcaaattattgttttaaaagaagaaaacttgcaaagtacataagtattttttaaaaatcaatcgaacagaaaggaatgcatgctgtttttcaatggcttagacatgctttttattcactgactagtattcacttttttacaacttgtatcaaaacaaatgatctttgtttttgtcacaggcaaaaacaggttgacactggtgggttggctttattaattaattttttttctattaggttttctttaataatgttaaatttctaaattatagcatatgttttagttaattctgaaatcagttacttcatttgttaatttatccctcatatcatgaatattgttttttaaatgttctatacaaatttgcatcacttcttttcttacagcttttgcagttaatatattctaaacttgaaaatgtggtatcaatcaataatagaagtatcactggaggatttatttagctttgtatttcttaattttagtcctagctactaaagtatgtaagccttaaagtttaaaatgtttttcttaaattagctttatacacaaacattttcatttactttatgaaatgggaggagatagtccactgtgcttatgtttttttgtttaatttctatattctgaagcagtgcagatatagggtatgctaatcaagtgagcaaggtggaacatgtacaatataaggagaagctgtaaaaatcacagtataaaattatgaagtttggtaactgtaaaatgtactgtatttatatgtaactctcattctaaaagttgccacaaaagctgaattggaagcttcatgtctgcatgaaatttcctatatttttaatgtgtatgatgaaattaatttttcttgaatattaaagtctgccaattgctatgaaaaaaaaaaaaaaaaaaaaaaaaa

SEQ ID NO: 14393 - DNA, 7330 bp, Homo sapiens
  misc_feature (1)...(7330): n = a,t,c or g
caaggccagcccttcctcagctaataagcggaaaaacaaacccctttcagacatggagctgaattctagctcagaggactccaaagggagcaagcgtgtccgtactaattccatgggctcagccactggcccccttcctgggacaaaggtagaacccactgttctggacagaaactgcccctcccccgtcctaattgactgtccccacccaaactgcaacaagaagtacaagcacatcaatggacttaagtaccaccaagctcatgcccatacagatgatgacagcaagccggaagcggatggggacagtgagtacggagaggaacctattctccatgcagatcttgggagctgcaacggtgcatctgtctcacaaaaaggttccttgtcccctgcccgctcagctacccccaaagttcgacttgtagagccccatagcccttctccttcaagcaaattcagcacaaaaggcctctgtaagaaaaagttgagtggggaaggggacacagaccttggggccttatccaatgatggctctgatgatggaccctcagtgatggatgaaacaagcaatgatgcctttgattctttagaaaggaagtgtatggaaaaagaaaaatgtaaaaaaccctctagtttaaaacctgaaaagattccttccaagagcctaaagtcagcccgtcccattggcccctgccatccccccacagcaaatctacaccttccagacagccaccttcacagcagcgagcccaggctcttcctcaggcttgaccgccacagtggcacaagccatgcccaacagtccccaactcaagcccattcagcccaagcccactgttatgggagaacctttcacagtcaaccctgccttgactccagccaaggacaagaaaaagaaagacaaaaaaaagaaggaatcttcaaaggaacttgaaagtcctctgacccctgggaaggtgtgtcgagcagaggaaggcaaaagcccattcagggaatcttcaggaaatgggatgaaaatggaggggctcctaaatggctcatcagacccccaccaaagccgactggctagcatcaaggctgaagccgacaagatctacagtttcacggacaatgcccccagcccttccattggaggcagtagccgccttgaaaacactacccctactcagcccctgactcccttacatgtggtgacccagaatggagctgaagccagctcagtcaaaaccaacagccctgcatactctgacatctctgatgctggggaggatggggagggcaaggtagacagtgtcaaatcaaaggacgccgaacagttggttaaagaaggggctaagaaaactctttttccccctcagcctcagagcaaagactcaccatattaccaaggctttgagagttactattctccaagttatgcacagtccagccctggggctctgaaccccagcagccaggcaggagtggagagccaggccctgaagacaaaaagggatgaggaacctgagagcatagaagggaaagtgaagaacgatatctgtgaagaaaagaagcccgagctgagcagttccagtcagcagccctcggtcatccagcagcgtcccaatatgtacatgcagtccctgtactacaaccagtatgcctatgtacccccctatggctacagcgaccagagttaccacacccaccttctgagcactaacacggcttaccggcagcagtacgaagaacagcagaaacgccagagcttagagcagcagcagcggggagtggacaagaaggcagagatgggcctgaaggagcgggaggcagcactcaaggaagagtggaagcaaaagccgtcaattccaccaactctcaccaaggcccccagcctgacagacctggtgaaatcaggacctggcaaggccaaggagccaggggctgacccagccaaatcagtcatcattcccaagttagatgactcttcaaaactcccgggccaggcccctgaaggccttaaagtgaagctgagtgatgccagccacctaagcaaggaggcctctgaggccaagacaggtgctgagtgtggtcgacaggcagagatggatccaatactctggtaccgacaggaggcagagccccggatgtggacatatgtttatcctgccaagtactcagacatcaagtcagaggatgagcggtggaaggaggagcgggaccgcaaattgaaggaggaaaggagtcggagtaaggactctgtccccaaggaagatgggaaggaaagcacaagtagtgactgcaagctgcccacgtcagaggagtctcgccttgggagcaaggagccccggccaagtgtccatgtgcctgtgtcctccccacttacccagcaccagtcctacatcccctacatgcacggctattcctacagtcagtcctacgaccccaaccaccccagctaccggagcatgcctgctgtgatgatgcagaactacccaggttcctacctgccttccagctactctttttccccatatggcagcaaggtctcaggtggtgaagatgctgacaaggcacgagccagccccagtgtgacttgtaaatccagctcagagtccaaagccctggacatcttgcagcagcatgccagtcactacaagagcaagtctcccacgataagtgataaaacttctcaggagagagatcgaggaggctgtggggtggttgggggtggtggcagctgtagcagcgtcgggggagcaagtgggggtgaacggagtgttgaccggccccgcacctctccttcccagcgcctgatgtccacacaccaccaccaccaccacttggggtactcattgctcccagcacagtacaacttaccctatgcagcagggctttcttctacagccattgttgccagccaacaaggctcaactccctcactctacccaccccccaggaggtgagaatgacaccaagtgcccggataaagtcagcttcacgggcccggactggcttacccaaggaggtgctgaaggtgccgtttagacatcagttaaatggtgttgatcatcctgtttgccgtttccaccatgactgaaggcagacccttggctatctcacctccaccagacctccggactacctgaccctacctcttcctcaggagctggagagctggtacttagcaaaaatatttattctctcagccacagttatgactattgtggcctctgtggagatgaaggcacgggaagcaaccaggggaacatggcctcagcccagagaagccactgctctgttccccaagcccttggtctgctgctggagcagtaccagcccccccgcccaccagggagggacccccacccccaagcactgggtaaggtctgaagacagcacagcagccatacccctcaccatcattaccaccatcaccagattctgcatctccctagtgctttgcaccctgggaattggcagcatgtggaggaactagaatctcaggaaagaaattgggggttgttttctacataattgtgaaaacaaggtcttcaaatgtggagacttctccccatttacatgagcacatataaacgctcacaacctagcctggaaaggaagaccaaggcatctgccccaacatggccttgagctgcctgtgaggcagggggcaggggttccaacaccagcacagggctccccagggacactgggagtaagctggtgctggagcatgaatgacgtctgtgaagtagaacctgcgtccccactaagtcctgctgcttcttattccccaactccttgcccttttcccttccctcctaaccccttggtgcctttcccagggggatccccacactggtcttgcctcttcttttccactgcttggctcttaagcctcaggcagataaactagtattccccccagcttggggaaccttggagtctgccaggtcaccttagggcaaggcccagaaggcagcccctgggagcacccagcagttcttggagatgtcctgtcatctagccatctgatatcttcctcatttgaggccacagatatatacagcccaattcctctgtctacaagtacatgattttatatagctcagtctataacctccatgtgggccaatataagctgtgtttcttggtaacacatattttgtttgaggggccactggccatgggaggttatttgttccttagaccctggaataacacatccaagccattacttattagagtctcagaatgtactcagtggagctgtgctttgaggcagccaacatttctctgctctccttagaaatgcagtctcccaatggaagctttatactctttgtactgggaaagtgaggatgatttggtagctttattggggtcatgtcttccccaaggtgtggggagcttagcttacttggcttttgaggtatcatccctctgttctcccctcctatctttccatgaccctctggattgagagagagagataaagactgacagacaccagtgtaggctggaaaagggagtgtgtgaccagagtgccaaaagtgactaggagcaggaacttggctccgactcagtttggaaaatgggaaataggggacagtaagcacaatgcccagtagtagttgatttccaaggaccctggaaccctacacttgagaggcttagggtcaccatctgctcaagaggatcccctctgatctacaggccttttccctaggtttctgcctcctcgtttttgttcaagttgggttctgagtcctccccaaaaaccattgttttagacctcttggcagggccccaaaacagcctccctcatacccatcattccgtctgccttctgctgccctcatgggcagtgctctgagcagtgacctccctttcctccgtggaagtagctagtgcagacaccgtcatcccaccccacctgagtcaccccaaccaagagggtgactgaatttcagcctgattatgccctcctggggctcctgtgaggtggagccaaggttccctctctgttcctgtttgtctttaaatattgttgtgtgttttgtatctgtggcactggcctgcagcatactctgtatatattgtaaagaaaccgttaggagtaattttcttttgcattgggcaggcatggccctgcattcctgccctttccactcattctgtaacacagaggacgaacttctgtattagctgggcagccttgggttctccagaagagaacaggtttttcttttcctttttaatttttcttcttaaacatttggctctttgatcctcatatccaagtctcccctgaagagtaggagctgctcagaagagcaggtgaaagccaccatggcagatcctgatgcctgccgggcctagtcttccctctgaaataacatgaagcagcagctgtggagattcttgacaagtgctgagtgaaagatttgctgcccacctctacatggggaggagaaacacaggtgggagctacctgtggcatccatgacctagtcagagggatgagatgctcagcaggggtccccatcctatcccaccccacaaacaaaggctggaaaaatttgctaccaagggccaagaccaccagaccaagcctgtttatgagccacccctgcccaggccctcacagacattgctcacggggcttcccatagaggagaagctaaagagggagggggcctcatccccagatagatcaggcaaggcttggagagctgctctttaggatccacatcaactacttcctcattttaaggtatggcagttcccttcatccccttttcctgccttgtacatgtacatgtatgaaatttccttctcttaccgaactctctccacacatcacaaggtcaaagaaccacacgcttagaagggtaagaggggcaccctatgaaatgaaatggtgatttcttgagtctcttttttccacgtttaaggggccatggcaggacttagagttgcgagttaagactgcagagggctagagaattatttcatacaggctttgaggccacccatgtcacttatcccgtataccctctcaccatccccttgtctactctgatgcccccaagatgcaactgggcagctagttggccccataattctgggcctttgttgtttgttttaattacttgggcatcccaaggaagctttccagtgatctcctaccatgggcccccctcctgggatcaagcccctcccaggccctgtccccagcccctcctgccccagcccacccgcttgccttggtgctcagcncctcccattgggagcaggttggggcgagctggaggcccgggctggaggggcagtgttgctgttcatagattttgttccattggcgttgctctgttgaatttaatttcagtcttcctgattcttcccttctgtaaagtgtacattaccaagttccttgtttttttatatatatatataaatatatatatatacaaactgtactctttttgcctttgtacattcaggcaagaagagaaaataaatctttttaagagacaatcacaaatctgtgagggctgctggttatttctcctggagtttgctgctgagctgcctcttccttcctcccaattttcctgttctccctcagctctcctgatcttcctggccctgctccatatgcatcctcagcttcactttccctggctgatggcaagctgttgaatccagtgtccagactacctgccttgtaacccttttctgcccagcattgttttctggcttggccactggcttagcccaggagctttactctgtgccctggcctcccctctcttcacctttagatttccattcaccgaagtggctttggacccctgggtactctgggacctgtttcctggaggccctggcttgggacactcacctgtgaaactatgcagctgggagctctctgcctaagagtttgcactatttaaacctgcctgggagttaggacggatggttttaggaatgaccggaaaactacccctaaaactcccccgacattccagcctctagaatgctctgatccagagctcagtggatgattcccagctggtggactcctgtggctaccccatcagaacaagggctaagggtttatgggtcaagagtatttgatcagaattttaaagggtggtatactctgaaacacagcccaaccaaaccattgtttggccgctttctcttttcctctaccttcctcatccccacttttttccctttctctctacttcctcttcttaattggctttggaattgaaatatatttttaaattatttgttgtatttattgaataaagtttttaatgtccctgttctt

SEQ ID NO: 14394 - DNA, 490 bp, Homo sapiens
  misc_feature (1)...(490): n = a,t,c or g
ggagnnnntttggactcctatgacnnnnnnnnnnnnnnnnnnnnnnnnnnnnnnnnnnnnnnnnnnnnnnnnnnnnnnnnnnggcacgagnnnnnnnnnnnnnnnnnnnnnnnnnnnnnnnnnnnnnnnnnnnnnnnnnnnnnnnnnnnnnnnnnnnnnnnnnnnnnnnnnnnnnnnnnnnnnnnnnnnnnnnnnnnnnnnnnnnnnnnnnnnnnnnnnnnnnnnnnnnnnnnnnnnnnnnnnnnnnnnnnnnnnnnnnnnnnnnnnnnnnnnnnnnnnnnnnnnnnnnnnnnnnnnnnnnnnnnnnnnnnnnnnnnnnnnnnnnnnnnnnnnnnnnnnnnnnnnnnnnnnnnnnnnnnnnnnnnnnnnnnnnnnnnnnnnnnnnnnnnnnnnnnnnnnnnnnnnnnnnnnnnnnnnnnnnnnnnnnnnnnngtcaccagctgcattagcccctacagtagagtctgcctgtctatgaagctttgaaacg

SEQ ID NO: 14395 - DNA, 790 bp, Homo sapiens
tttttaggaaagacattttgcttttttattttctgtaaaactctgtaaataaaatacaaaaccaagggatgtggctgggcagcggcagggtggccaagccccagacactgatttgtggcaagggatgtgctgagccgaggctgggaggcacttgactgcaggcactgactctccaaccccagggggcaacagaagaatatattagattttcattgctaggaatctgtgggggaggggtatctggagccagcccttaccctccctgccagtgcctggtgagccctgaaagtggggggaaaggggcaccaggaacccatgggtgaatagtttagaatgctgtgctggccatgctgccaggcccaaagatgcggggcagggcgtccagggactcctccagccgtcgatgggcagactgtccctcttctccacactgctgtaggctttgccggggcagcttccctcacagcttctgtgtcagtttggcaagaggtacacccaggggctcaatgccctcgggagccttgatgcagcctagggcccaggcagccagccactcgagtctgcacgtcctcatcctccagctggtcccaggaagcacaggagggccctctcccggaaggtagggcccagtgacaggctccggagctgggtgctgacagcagccatgaccttgttgttgccatggacgagcagggagctgaggcccgcagcccgtcccttcgcagacgcccctcgggcgccaatctcagggccttcagcacaacagcctgatcatccgagttcagattcc

SEQ ID NO: 14396 - DNA, 116 bp, Homo sapiens
ggctcagcccatttaaaaatctataaagcagttaacccagaaaacaaaacttataaaacatattaataaaagtgaaaacatacaaattagtatctctgtaaaatagtaacagctgt

SEQ ID NO: 14397 - DNA, 301 bp, Homo sapiens
gcaagcagtgagccttggcgacctgcacatgctgcttattctgcaggcacacagcaagagctgtgaggcatagcagcttccacctagatttcaaaggatgtatcagacagcttgtgggcccacgcagagacttactgcaagggcacaaccactgcagagaacccctctgctagggcaatgctgagtggaaatgtggggaccagagcttgcttgcaggaaagttcccaacagaggcagtgcactctgggagccgcaggggcaggaccaccctggggacctcagaactgtagagctaccagta

SEQ ID NO: 14398 - DNA, 964 bp, Homo sapiens
gctcctggttggcatctttcctgcaggcctacaggcctagtaagtatcttcctcctctgtgctcctgcatacctccattcctttgttatgacatctataactttaataagtactaaaatctgtagtcctacaaaactcaggcatagaactcatttcctttatggctctataatggaactttacccaactctcacgttccccatgaccacagatgtgagaaatttgaatcttgacagttcaaggtgaactcagtcattttcagagttttcatagtcccttcaagattgaaactcagttcctgcaatgtttgccccttttctcctcttttgtctatgctgggagaggcattgtggggagggttgtctggcttatggctcccattgtcctctgcttgataaaccacctgagctttggtcattagcagtctcctgtgcctttcacactcaggtagtgtctgcacaggccactctatgtcttttccatgctgaagaaattcctttccaggccatgtctgtgttcctcctgccacacaggaaatttttgagcatgttcatcctccaagctgaatgcagggtcttgggtagtggtcctcacctgctccagagacttctccagccattgccactctccactcaggtgatgaagctggatgagggactgcacccaccagagtcaggccagggtcctgtctgctctgtgagtccctccaattgttcttattccgagatttccattgttctgccccctcttgactcccagggctctcaagggagtgggggtagtgaagggagccctttcccaagctcccccaagagctctagtcacatcacttctgatacttcttttcccaccagctggaagaaagaactttcatttgtcttgaaatgagaaaaatgttcttagaatattttgtattactctctgctctgtcatttatggtaaacaaaataaaataataaaaaaa

SEQ ID NO: 14399 - DNA, 1183 bp, Homo sapiens
tttctttttttttaagtcagagttgtcctttatttttagattcttaaatattctagaatgaggtttaacgagcctgccagtacaaagtgtaaattctacatggtgcatctttggcgcttcatgcatgattatttcaatgaacctcttcctggtcactcttaagatagatctgagtttttgactcgccagtcaagggctttgcgcgacactcaatgacataatattcttggaaaaagcagtagcatttctgacttttcatattcagctcggaggtgtattgtctcgggctcctgtgcagtcgagcgccacggctggctcatcggatgatccaggatgggtccttggcaattttcgggttctcgggtccgaggatggcccaggccgtgtgtgcttttccccagtgccgaggtatctaatcgcctcacggcccaggagcttgtcgtggctgacagcaaagagctgctctctgtgggcctgcttcatctcatccgagaggccgtacaagaagtggtccattcctttgtctgaaggagcgacaggagcatctacggttgagaagacagaaagtttggcttcgtcgatgtcttgctgtgtgaattttccagacttagcccagtcgacagccttcccaaaagactggagcgtctctattgtatttgggtccctgtaagagtaaagggtgaaaatcccattgtggctgagttttgcgcctccaccataagcaccgcctttttctcgaatttctgtatgcaagaatttggcagtcatcaaacgtgcaaggattttaagactggcatgatctgggtccgtgtaggggacagttcggatgcattcacccacgtaattcaccgggaagggcatcaggaagtgagtcttcatctgccagggcttgaaggtgggttccatgaccagcttcctaatgacctgggagccatggggaacgtgggcatctccaccagagctgctgggcacaggtttctcgaccgtgtgtgggcgcacaggcctccgttcctttttactccgaccgatgcttctaaggaatgcttcgaccgctttttctgtctgaggcatctgctgaggagtcgcattcactgaacacctcatattatcaccatttaacaagtgtttcttgatacgtgggagcttcctcaggatgggtttgatatctgtcatttctgcaatc

SEQ ID NO: 14400 - DNA, 494 bp, Homo sapiens
  misc_feature (1)...(494): n = a,t,c or g
gcggcacgagcggcacgagcggcacgagtacaggcatgagccaccatgctcggccatgagttggaactcttgatcaggcccctctgagttcaccatgccatgctcaggctgctttcatcaacagagccaaagcacttgacctcttcgtgccttggttttgccatccatgaaacaggaaaataatcctagcgtcagaaatataaaatgttgtccttgcctggcagcctttggaagatccacctctttgggatggcagtagggaggtgtgctctcctggcagcacgggctgcctgcggcccttgctggacaggagaattctggaaaacaacttcattcctgtcttcagtagatctgacaggcccagaggagaaagcctgaaatagaaactggctgccttaaccctccacgggttcaagagagctgttgctagctctgaataacccatctataagaataattccggaaattncttaagnggcaaggnctgganttgg

SEQ ID NO: 14401 - DNA, 3395 bp, Homo sapiens
  misc_feature (1)...(3395): n = a,t,c or g
tttcaccatccaattatacttttaattaagaaaacatgttttaagctgcattatttcagattatcagtgattctgaaaattacaagtggcagggtgcaggaccttaagtcaaatagacgttaagttcaaaccatcagtccattcgtcactagctgtatgtcttcgggcaaattattttacctctcagcctaatgtaataatgcaggtaacactgctcacgcggtgtgttgcacatagcaaacacttgggaacagttagctattcatcgtggtacattaaattgcttttccccaagagccactttannnnnnnnnnnnnnnnnnnnnnnnnnnnnnnnnnnnnnnnnnnnnnnnnnnnnnnnnnnnnnnnnnnnnnnnnnnnnnnnnnnnnnnnnnnnnnnnnnnnnnnnnnnnnnnnnnnnnnnnnnnnnnnnnnnnnnnnnnnnnnnnnnnnnnnnnnnnnnnnnnnnnnnnnnnnnnnnnnnnnnnnnnnnnnnnnnnnnnnnnnnnnnnnnnnnnnnnnnnnnnnnnnnnnnnnnnnnnnnnnnnnnnnnnnnnnnnnnnnnnnnnnnnnnnnnnnnnnnnnnngcacccagcccccaaaaagccactttaaaccttatcctaggaggacagtttcacattgcgtctaacctcttcctggcctcttaatcttgggttgttaaatcttatttgctttatttccttggttcctctaagttgtaatctcggagttaaaaacagctttagaaccccgcccccccaaaaaaaaaaaaaaaacttttgagaatttttttcaaataaatgtccattgcatagaatgggtctgtgactggctgcttctacatctgcacccaacatctggcccccttcagaactctgagtggacaggatcaggatttgactcaggaggattagaatgtgaagaatccgtgtttgagggattcagttctccaactgcctcaaagggtctcaagtttgcataagtcacctcctgggccagctgctccagggaaggacggcctaatatcagatttcgaagtgagatacaagtcatcaggaagctgcggcgaaagacatagagctttcgcaacaagaagcggaagaatcgctcatggaaaggagtatttcgccggcgttcaatctcctggagcctttgttggcgtctaagaaaggtctgaaccagaggtgttggctcagggcccccttttacttccccttccaacagaggctgcagctctgctaggtagaggccctgtttcacttccattctccaccttttcctttaattcttgcagatatgccaggtcttgctccagtgcaagctctgtagtgttgacatagacgtacatgtagcaagaagggctaggtgatgtcgtatacaccttatggtactcaccagcaggcaactgcattttttctccctctcgaagagtctggttcttctgttctgccacaagctccacagtcacttccccctgcagcagctggatgctagtgttgcccaggtcttcactcacaaaattctccaagtgcagtccagggaaatctgcaatgaagaccacctcagtgtggttgtctaggctgctcttgatttcctgtaacttggccctccagggagacaggtccatcaagagtggttgcacccaggatgtgcgctgaaagggtgaccaagcggcctgcacgatgtccacacgagggtcaaaaatcctctgctggaagcggtcattgatggagacccaaatatcaaagtagatctggggctcagtgacattatacttgggaagcaggcggctcaggcaagtggcatattgcttcagcatgtctgcatgatccttccatcgccgactctgtgtaaataccccagggttaaggtagcccagttcgccagtgcggccatcacggtaggtgatcttcacgtgctggtgggaacgggagtgcaccatcatgtcccaggaatagccatacagcccatttgtccagttgttatagccctgggtgagaaaatgagaatagggcaggaatagctgctccaggaggtagagcagggtgaaggcagctcccagctgatggcgcagccctggcttctggccacttttgccccggctcctcttatacacacaggaaacactgggctgaggggctgccttgaggggcaacagttgttgcaacctttgggggcagtaggacaccagcttccgaggccactcaggggagcagaagagagggctgctggccagcatgacgtaggagaacataccaatgctgaaaagctgggaattcatgcagtggaagtaggacacaaagaacaggccaatggatcttgagacatcaaaaaagagcaggaaaccagctgagaggtcaagcagcagcccaccccagtgcacgaccagcaggctagtcagctcctcagacaacagcagtttgaagggactgaagagccagtgccgggacaaatattccatggaatagccttcaacccagtctgcatccagctttttcacacccgcaatgaagtacacaatgaagatctggccacggagcactgcatagttccaaaggggcacgtgggcattcctcctatgggcattcagcagaccgtccacagaccagtagtggtttgcatccatgaatgttagctgaaaggccaacaacccatacagataggagtggttgttccatgatgtcttgtccaggagaaacacataccagtatggcagcaggaataacacacagcttatccggtagcacaggcccagcatcatgcccagtgcccccagaaacatgatggtgtagacaagatacatccagtcaagtggcagtgggcgtagggcatccagcaaggggaagcggcacacatccagcccatcaaggtatttccggtccagagagctgagcccccgctccctggggaatgtctagcaccatcaagaacccaaaaagaaaacgaaagacagctaagcttgcagggtccgttggtcgattcagcagggtcaccagcctccgcaaactggacaaatctgtccactcaaaacccaagagtttccctattcggctgtcctgcctgggccctgagatcagttcagccttgtctttctgtactttatctgagctgggcgaggtccgcgcggacccggcagacaccgccattgctctgcggaggaggcaggtgggcacagcttcccccccacctcccacccctgtttctacaggctgctgagtttgcgacccctggttggaaatagcactaaaaacatgtttcctaacccaaacctctctcacaccctcacgccattttcacttcatttccccttccctctcttgcttcactttcatcttaagtcctccttccccaggtctttggatttctcttggttcactcgaattctcctttct

SEQ ID NO: 14402 - DNA, 762 bp, Homo sapiens
ccccacctgattttcctggtggtggtatccaaaatcttcagtaactaggaaggaaaccagggtctcatggtttaaaagactttgaagcaggaatgttgcatttgacgcctttaaaactacctttttgctgttgggaggagtcgggggcgagccttagcagctgcaccgccatccccatgctggttggtgctgccctgcctctcgtgccgggtgttgcttcagcccagagccagagggctgggtcccgggtcctccacaggtgaccccggtggacacacgcgttcccatcctggcctccgtctctgcttttccacttctacctgcgtgtgggtttgccgccttgtcatcggttgtgtgagtgtcgcagacctttccagagctccggttcactctttccaaacaggcctccctgtcggtgggcactgcactcctagaaccttcagtttctacgatggtttgtttggtccttttgaaccaccccaaagaactcaacatggcaaagcaaatggtaaaagcttcccgactgttctactttgggtccgcgcgaagcccactcacgtgtgatttgtgttgcccctctcggtggtcccaggcgatccagccatgccccctgcccctctgcccagatgcttcaggggcccggcttttcaggcttgccctcaccagcggccgtcagccgacactcagggatgtagctaacaccactccgcagtgctttcagtaggaagagctgaggctgctgggaggcccggggcgaccgga

SEQ ID NO: 14403 - DNA, 237 bp, Homo sapiens
gttctttttgaaagttcctattttgtaacatctttatcaacatttagtattttcagtctttgtaattgctgtaaatcccccaaatataaaatcgtatcttaatgtcgggtttatttgtccttctttgatgaccaataaagttaaacatctttttttacatttgttgaccatttaggccttttcttttctcagtgattgttcattatttttccctattgtcaatagaaagttgtattt

SEQ ID NO: 14404 - DNA, 1051 bp, Homo sapiens
gcacgagggtgctgactggcttgcgtctctgccactttctttcagcttagtggcgcgcggcgggcgacgaccgccgggagcttgtgcagcggcggcggcggaagtggccggcgagcccggtccccgccggcaccatgcttcccttgtcactgctgaagacggctcagaatcaccccatgttggtggagctgaaaaatggggagacgtacaatggacacctggtgagctgcgacaactggatgaacattaacctgcgagaagtcatctgcacgtccagggacggggacaagttctggcggatgcccgagtgctacatccgcggcagcaccatcaagtacctgcgcatccccgacgagatcatcgacatggtcaaggaggaggtggtggccaagggccgcggccgcggaggcctgcagcagcagaagcagcagaaaggccgcggcatgggcggcgctggccgaggtgtgtttggtggccggggccgaggtgggatcccgggcacaggcagaggccagccagagaagaagcctggcagacaggcggggcaaacagtgagcgcccacccagaccggctgctgcgccccctcctgccagggtgagcgattccgctccacagtctcggacggatctgctcagaaaggaagaggcaggcgccaggggggaacccccttcgtgttttgtgaccctcccttttaggtgaagcccctttttcttgctaaaaccggcaattctccggttagaaaatgttacttggtgttttttggttttgtgaaacggccgtcccaaaagctgggctggattcctagaagagtctgtgttgaaaggcatcttttcaagccctcgctctggttctcagggcagcattttccaggcgggtttgttttgcatttcttggagcctctccgagcagcaaccagacgggagatttttattttaagctgttcatgctgggactgacagcctgcagggtttccttgggcgcggcccaaaaatttgccttcaaaacaaacccgggacggttgaaagccttcgaaccgtgcaggggaatgct

SEQ ID NO: 14405 - DNA, 3342 bp, Homo sapiens
gcggaggtcggcggtcgggtccgtctctgcccgcggctgtggcggcgccggcggatccagccttagcgttcctctctgggcggcggcggcggcggctcggttgacgcctcctccgccagctgagcccgcgggagcccaggacgccgcttccccgcccatccccgctccccgaggccggccgcctggtcatggcgcagccgggcccggcttcccagcctgacgtttctcttcagcaacgggtagcagaattggaaaaaattaatgcagaatttttacgtgcacaacagcagcttgaacaagaatttaatcaaaagagagcaaaatttaaggagttatatttggctaaagaggaggatctgaagaggcaaaatgcagtattacaagctgcacaagatgatttgggacaccttcgaacccagctgtgggaagctcaagcagagatggagaatattaaggcgattgccacagtctctgagaacaccaagcaagaagctatagatgaagtgaaaagacagtggagagaagaagttgcttcacttcaggctgttatgaaagaaacagttcgtgactatgagcaccagttccaccttaggctggagcaggagcgaacacagtgggcacagtatagagaatacgcagagagggaaatagctgatttaagaagaaggctgtctgaaggtcaagaggaggaaaatttagaaaatgaaatgaaaaaggcccaagaggatgctgagaaacttcggtccgttgtgatgccaatggaaaaggaaattgcagctttgaaggataaactgacagaggctgaagacaaaattaaagagctggaggcctcaaaggttaaagaactgaatcattatctggaagctgagaaatcttgtaggactgatctagagatgtatgtagctgttttgaatactcagaaatctgttctacaggaagatgctgagaaactgcggaaagaattgcatgaagtttgccatctcttggagcaagagcgacaacaacacaaccagttaaaacatacgtggcagaaggccaatgaccagtttctggaatctcagcgtttactgatgagagacatgcagcgaatggagattgtgctaacttcagaacagctccgacaagttgaagaactgaagaagaaagatcaggaggatgatgaacaacaaagactcaataagagaaaggatcacaaaaaagcagatgttgaggaagaaataaaaataccagtagtgtgtgctttaactcaagaagaatcttcagcccagttatcaaatgaagaggagcatttagacagcacccgtggctcagttcattccttagatgcaggcttgctgttgccatctggagatcctttcagtaaatcggacaatgacatgtttaaagatggactcaggagagcacagtctacagacagcttgggaacctcgggctcattgcaatccaaagctttaggctataactacaaagcaaaatctgctggaaacctggacgagtcagattttggaccactggtaggagcagattcagtgtctgagaactttgatactgcatcccttgggtcactccagatgccaagtgggtttatgttaaccaaagatcaggaaagagcaatcaaggcgatgacaccagaacaagaagagacagcgtccctcctctccagcgttacccagggcatggagagtgcctatgtgtcccctagtggttatcgtttagttagtgaaacagaatggaatctcttgcagaaagaggtacataatgctggaaataaacttggtagacgttgtgatatgtgttccaattacgaaaaacagttacaaggaattcagattcaggaggctgaaacgagagaccaggtgaaaaaactacagctgatgctaaggcaagctaatgaccagttagagaagacaatgaaagataagcaggagctggaagacttcataaagcaaagcagcgaagattcgagtcaccagatctctgcactcgtcctaagagcccaggcctccgagatcttacttgaagagttacagcaggggctttcccaggcaaagagggatgttcaggaacagatggcggtgctgatgcagtcacgggaacaggtttcagaagagctggtgaggttacagaaagataatgacagtctccagggaaagcacagcctgcatgtgtcattacagcaagcagaagacttcatcctcccagacactacagaggcactgcgggagttggtattaaaataccgtgaggacatcattaatgtgcggacagcagcagaccacgtagaagaaaagctgaaggctgagatacttttcctaaaagagcagatccaagcagaacagtgtttaaaagaaaatcttgaagaaactctgcaactagaaatagaaaactgcaaggaggaaatagcttctatttctagcctaaaagctgaattagaaagaataaaagtggaaaaaggacagttggagtccacattaagagagaagtctcaacagcttgagagtcttcaggaaataaagatcagtttggaagagcagttaaagaaagagactgctgctaaggctaccgttgaacagctaatgtttgaagagaagaacaaagctcagagattacagacagaattagatgtcagtgagcaagtccagagagattttgtaaagctttcacagacccttcaggtgcagttagagcggatccggcaagctgactccttggagagaatccgggcaattctgaatgatactaaactgacagacattaaccagcttcctgagacatgacaccctcatggcaggattctagcctgcactttgggtttttaactcatctttagagcaacagtaattattatttaactcttaactgaagaaagagaagtcacaacaaaaggaagactggagaaatgcttacttctagagggagaagactgtgcggcacaggaaacagcaaacagcggggtgatctgcagcccagagaccttcaaatgcgaacactataaactccaggcttgattccaacaggcgtgggatcagatttggtgatggaaaaagcgctgtttccttgcctgctttctccaagacagattttcggaacacatttccctaccctaaagcgacatcccagtagtgtttggaattttctgttcatagatattggaagagagaatttgctttatctgttgtctagagctcatcagtaacagtattcagttagcagacagaagtgtagtatgctgtatgaatattttatattaaaatatgaaggtttgagagcaggccattggctaactggactgtatttcccttggcttcagtacatttttgttttcctttttaccattttatc

SEQ ID NO: 14406 - DNA, 637 bp, Homo sapiens
  misc_feature (1)...(637): n = a,t,c or g
gcacacacatatcacagttttgttccttatgagttgaaaagtcaggaataaatttgttgaaaattatctggggattcaaaggaaaaatctttgggtgattccctgattagcactctgaatgtttaattatgaaactttgtagctataactggaaaattacctgactctttgtaagagtattaaatacaaagtgatttttctctagaaatgtgacctggtcttttataaagcccactcttagaccaggattatctaatgccacatcagaagcaaacaggcaaatttaaacttgggcaagtaatttctgtgcccaatttgtaaagggaattcctgaattttttttttttttttaatagaggcatnnnnnnnnnnnnnnnnnnnnnnnnnnnnnnnnnnnnnnnnnnnnnnnnnnnnnnnnnnnnnnnnnnnnnnnnnnnnnnnnnnnnnnnnnnnnnnnnnnnnncctgacttctctatacagagtcttcacttgataggcactcgtctgtagtaactcagtttgaatatctttagaaaatgtttagaatttatttgtaacaagatggtaaggaataagattatcccatatgcatttctgtagagcagaatttgatagcttagtgttcaatctttttga

SEQ ID NO: 14407 - DNA, 279 bp, Homo sapiens
cataatccacacaaaataaaaagctgtgaggttttgtttaatccttttgatgacatcattccaagggaaattaaaaggctgaaaaaagagaaaccagaggaggaagtaaagaaattgaaacccaaaggcacaaaaaattttagtttactttcatttggagaggaagctgaggaagaagaggaggaagtaaatcgagttagtcagagcatgaagggcaaaagcaaaagtagtcatgacttgcttaaggatgatccacatctcagttcctgttccagttgt

SEQ ID NO: 14408 - DNA, 1159 bp, Homo sapiens
gggagtctgaagcaatttctgaagaagaccaaaaagaaccacaagacgatgaatgaaaaggcatggaagcgttggtgcacacaaatcctctctgccctaagctacctgcactcctgtgacccccccatcatccatgggaacctgacctgtgacaccatcttcatccagcacaacggactcatcaagattggctctgtggctcctgacactatcaacaatcatgtgaagacttgtcgagaagagcagaagaatctacacttctttgcaccagagtatggagaagtcactaatgtgacaacagcagtggacatctactcctttggcatgtgtgcactggagatggcagtgctggagattcagggcaatggagagtcctcatatgtgccacaggaagccatcagcagtgccatccagcttctagaagacccattacagagggagttcattcaaaagtgcctgcagtctgagcctgctcgcagaccaacagccagagaacttctgttccacccagcattgtttgagtgccctcgctcttgtcgtgtctgttcaaaccggcacggtctgatccggaaatatggcctcaatatgtgccgccagtgtttccgtcagtacgcgaaggatatcggtttcattaagaaagacctgagctgtcttccttggcactgcctatggaggtgacacccatctcctccatcatggccatcctgagaccgctcgcgaagcccaagatcatcaaaaagagcaccaagttcactgggaaccagtcagactgatatgtcaaaattaagggtaactggtggaaacacagaggtattaacaacagggttcatagaaggtttgagggccagatctatgcccaacattggttatgggagaaacaaaaagacaaagcacatactgcccagtggcttctggaagttcctggtccacaacgttaaggagctggaagtactgctggtgagcaacaaatcttactgtgttgagatcactcatgatgtttcttccaagaactgcaaagccatcttggaaagagcagcccaggtggtcatcagagtcaccaatgccaatgccagcctgcacagtgcagaaagtgaatagacagtgaatgtgtttgttttattggggtttaaataaaaccaataaaactgtaaaaacaaaa

SEQ ID NO: 14409 - DNA, 887 bp, Homo sapiens
ggatagaagatcttggcgttgtggtagattgccttcctgtgctcaccaattgtttacaggaagaaaaacaatatatctcacttggctgctgtgttgacttgttgcctctagtaaagtcactacttaaaagcaaatttgaagaatatgttatagttggtttaaactggcttcaagcagtcattaaaaggtggtggtcagaactatcatccaaaacagaaattataaatgatggaaatattcaaattttaaaacaacaattaagtggattatgggaacaggaaaaccatcttactttggttccaggatatactggtaatatagctaaggatgtagatgcttatttattacagttacattgagagatttcatctactaaagagcatttggtttttcaaaacatccctgaactgtataatttacaaaaaaaaaagtctcgtctgagaactgtgaactgtggaagaaatcaaaactattttttcttttaaaaagccacgtaatgaaaccactaatgaaatcccagcaatctgcttcacattgaagtggaaaaatatccaaaaggagcagcttcaatttcattgaggtgaaagtgcactatgaagattgttcacctttgctgcatttgggagttatatggttatttggtaacattaagaactactggattttaatgcaatcctgcataaaaatataatttatactatgtgaaaaaataagacaggacttaccactaggaaccaccaagaccaatcatcattaacttttttaagattgtgttttattaaaaaaaaaaaacacttaaatgtgtgcagctattttcttatgttgaaaagactgaaagtttaaaacatgaaaaaaatcaatattaaacattttttgttcacactgag

SEQ ID NO: 14410 - DNA, 701 bp, Homo sapiens
  misc_feature (1)...(701): n = a,t,c or g
gaggcatttctattcaataaatactggaagtcctagccagagcaatgaactagcaaaagaaatgaaatgcctcaaaatcagaaagaaagaagtaaaattatatttgtttgtagatgacatgatcttctgtgcagaaaatcacaaagagtcaaccaaaatactactggaactaagtaacatattcagtggatttgcacaatacagtatcagcaccaaaaattagttgaatttccatacattaacaataaacaattttaaaagaaaattttaaaacacttccatttgctagagaacttaaagtaagaaatacttaggaataaacgtaaaaaggtgagaagtttgtaccttgaaatctacaaacattgatcaaaatgattaaaaacatacatagagatacaacccatattgatggattggaaaaattaatactgttaaatgattacataacccaatgtgatttagattcaacacggtacccataaaaatgcctatcagtttttgttgaagaaacaaaaaacagactgggaaaggtgctcaccttctgttggcnnnnnnnnnnnnnnnnnnnnnnnnnnnnnnnnnnnnnnnnnnnnnnnnnnnnnnnnnnnnnnnnnnnnnnnnnnnnnnnnnnnnnnnnnnnnnnnnatcctcttaacataaacactttaatctcaactaatacttgaactcaatgttaagtc

SEQ ID NO: 14411 - DNA, 787 bp, Homo sapiens
  misc_feature (1)...(787): n = a,t,c or g
atcagaaccaatgatcccttggcctacttagttaaaaccagttcatacatcccttagggtttttattattattattattattattacagttgttattgttgtttttgttgttattattatttggggtttcttgtgttttttctttgcgactctccacactaaacttgcaatattgtggggagaagctgtgactaaactctacgctgcggtgagatgtagcagtaatcagctcccagcgacgtgtgtagctggggctgccgctcgcaataatcactattgatttaaagctttacttagccttgatctgtaccctcgtagtcaataaggtcttgccacattttattagtgaggtggagaaacgtattatttgtttgttgtttttgcccttcccccaccccccaatattaaactgtgaaatttgtgatttgtttaaactctgggtgaatcatagcttagtttgcatgtccagctaatttgtttctatacattttgtttgattctctttctccttctctcagggcttttacaaaaaaatatatatatatggatcttctgaaaagttttttgaggtgcaagttttttctcttgtttttttttttttttttttctcattgattaatgggacatgatgctgaggattcaatcactacatgaaacacctggctgtgaaaacaaaacaacccagagggctgtgttccaagcagcgtggggggaaggctacgtaacagtcgggtgccngttttggggaggnttcaccnggcgttctggaccccctgtttcgnctctt

SEQ ID NO: 14412 - DNA, 642 bp, Homo sapiens
tttttttttttttttaacatgtaatgtggaaggaaagttattttatttcagatttagcaatataaaaggtcagctaggaaaaaacacatgtaccagtaaccaaaagcatttgcttacatcattccacaatttgcaaaacaagataattgtttttcaaaaccagacaacaggttcaaaaatacttcttttcacacccctaagtgatgctgttgggaacaatggctgttacaaggccattgtaggcacatttccagcaagttctggttatcattattctcattttatcttctttcttttttctctctcatcagctttttgctttcttccctccttcttttattcactggattccgaggatcatagatttcaaatgtatctgagtcttgcatgcttgcatctttcacttttctgcttttatcctcaaactgaagtacatgtgacatccatccttcatcatcttctacttctgtttcaggaatgtcattttcaggcgtttcagcaattgcttgagtgagtttagatttaaactggttcagcagtgcaagggtctgatcttcccgggaagttcccttctttgactgttgtttcctcaaagcttcatacttctgcttttgtgcgaccggccgctaatttagtagtagt

SEQ ID NO: 14413 - DNA, 1521 bp, Homo sapiens
ggaggatggagccgctgaaggtggaaaagttcgcaaccgccaacaggggaaacgggctgcgcgccgtgaccccgctgcgccccggagagctactcttccgctcggatcccttggcgtacacggtgtgcaaggggagtcgtggcgtcgtctgcgaccgctgccttctcgggaaggaaaagctgatgcgatgctctcagtgccgcgtcgccaaatactgtagtgctaagtgtcagaaaaaagcttggccagaccacaagcgggaatgcaaatgccttaaaagctgcaaacccagatatcctccagactccgttcgacttcttggcagagttgtcttcaaacttatggatggagcaccttcagaatcagagaagctttactcattttatgatctggagtcaaatattaacaaactgactgaagataagaaagagggcctcaggcaactcgtaatgacatttcaacatttcatgagagaagaaatacaggatgcctctcagctgccacctgcctttgacctttttgaagcctttgcaaaagtgatctgcaactctttcaccatctgtaatgcggagatgcaggaagttggtgttggcctatatcccagtatctctttgctcaatcacagctgtgaccccaactgttcgattgtgttcaatgggccccacctcttactgcgagcagtccgagacatcgaggtgggagaggagctcaccatctgctacctggatatgctgatgaccagtggaggagcgccggaagcagctgagggaccagtactgctttgaatgtgactgtttccgttgccaaacccaggacaaggatgctgatatgctaactggtgatgagcaagtatggaaggaagttcaagaatccctgaaaaaaattgaagaactgaaggcacactggaagtgggagcaggttctggccatgtgccaggccgatcataagcagcaattctgaacggcttcccgatatcaacatctaccagctgaaggtgctcgactgcgccatggatgcctgcatcaacctcggcctgttggaggaagccttgttctatggtactcggaccatggagccatacaggatttttttcccaggaagccatcccgtcagaggggttcaagtgatgaaagttggcaaactgccagctacatcaaggcatgtttccccaagcaatgaagaatctgagactggcttttgatattatgagagtgacacatggcagagaacacagcctgattgaagatttgattctacttttagaagaatgccgacgccaacatcagagcatcctaagggaacgcagtcagagggaaatacggcgtgtgtctttgttgaatgccttattgaggtcacacactctatgctttgttagctgtgtgaacctctcctattggaaattctgttccgtgtttgtgtaggtaaataaaggcagacatggtttgcaaaccacaagaatcattagttgtagagaagcacgattataataaattcaaaacatttggttgaggaaaaaaaaaa

SEQ ID NO: 14414 - DNA, 1220 bp, Homo sapiens
ggtaacaaaggcaagaagttaaagtaagaccacatttgagtattacttactctgtagaatcaaaacagagtaggttaacaccaattatgcaaactacttttttttccagcagaaagggagctgacatgatcaaatccatgttttcaaatgaactgaaaaaggcatccagcaccacttataacacatttatttcagttccaggctgacagccctggggcatctagcaggatgcataattgtcatctggtgagagttgggactttgctcaattttaataccaatctctcctgattgtaattacctccactactttcatgatccccctacaatatttttttaaatgatatatttattcactgaatcaaatgtcattaatgagttatcttctgtggaggatgactgttctctttgttaatgttcacaatcaagatcttgggctgagaagaggcccttcacccaaggagtttgaagtatcacagcgtgtgggaaggtgggaaccaggatacccattcatttccaaccgagacacagagaagtgagtcacagaatttgagcccgctctcttgactgcccagccagagacactgatttctgtaacctcttcacttgatcctgcctcttaagcattaaaacattctcctaaacctctgagtgttttgtgggttctgggtgttttgtacattttagccaagctaaccacttgtctgcaagtactgactttcctatgaattctttgaagattattgagtcagaaaggaaaaatatagccccaaattcccaggcttttaatgcattacattaactgcctattgaaatgagaagttcttcacaaacttgtatacccactaacaagattgcacataaacatgcattaaagtatatactaagaaacccctctgtccaacggctcatgcatatgaagtccgaacatgggagtttgccaattgcattcatcaagtcgttttgcggagtcagatccctgatggaagagctcacaggctctgccttccaagtcctgggttcctaactggtgaccttagcctggggtctgtggggagaccaaccctggcttccaagaaaaccacattccatggactatcagaaatagacacagatttgggtgacaaagctggctctgtatttgcattttatttttgtgttcttgtcagtttgggaatgattaatattaaacatttatttgagaaacaaaaaaaaaaaaa

SEQ ID NO: 14415 - DNA, 1714 bp, Homo sapiens
tagaatacttgggtgacatctgcctgagagatctccagaattacagaagaccaaaattcctaattgcttttgagaaagcggtagttttggggggagggggaaaaagcaactgctttcctgatctgcaacttggctggatgctaagatgtcagtggacatgaatagccaggggtctgacagcaatgaagaggactatgacccaaattgtgaggaagaggaagaagaagaagaagacgacccctggggacatagaggactattacgtgggagtagccagcgatgtggagcagcagggggctgatgcctttgatcccgaggagtaccagttcacttgcttgacctacaaggaatctgagggtgccctcaatgagcacatgaccagcttagcttctgtccctaaaggtatctcattcagttgctaaacttatattagttaatttccactggcaagtttcagagatattggacagatacaagtccaattctgctcaactgcttgttgaggctcgagttcagcctaatccatcaaaacatgttcccacatcccatccccctcaccactgtgcagtgtgtatgcagtttgtgcgaaaggaaaacctactctctctggcctgtcagcaccagttttgccgcagctgctgggagcagcactgctcatgttctcgtcaaggacggcgtgggcgtgggagtctcttgcatggctcacggactgtccactccgtacaccagaggactttgtgtttccattgcttcccaatgaagaattgagagagaaatacaggcgctacctcttcagggactatgtggagagtcattaccagctccagctgtgccctggtgcagactgccccatgggttattcgggtacaggagcctagagctcgccgagtacagtgcaatcggtgcaacgaggtcttctgtttcaagtgtcgtcagatgtatcacgcacccacagactgtgccacaatccggaaatggctcacgaagttagcaagacgactctgaaacagccaactacattaagtgctcacactaaagactgtcccaagtgcaacatctgcattgagaagaatggaggctgcaatcacatgcaatgctccaaatgtaaacacgacttctgctggatgtgtctaggagattggaagactcatggcagtgaatactatgagtgcagtcgttacaaggagaatcctgacatcgtgaaccagagccaacaagcccaggcgagggaagccctcaagaagtacttattctactttgagaggtgggaaaaccacaataaaagcttgcagctagaggcacagacataccagcggattcacgagaagattcaggagagggtcatgaacaatctggggacatggatcgactggcagtacctacagaatgctgccaagctcttggccaagtgtcgatacaccctgcaatacacctacccatatgcatattacatggagtccggacccaggaagaagctgtttgaataccagcaggctcagctggaggctgagatcgaaaacctctcatggaaagtggagcgtgcagacagctatgacagaggggacttggagaaccagatgcatatagcggacgagcggaggagaaccctgctgaaagatttccatgacacctaagttgggatgtggatgtgccggggtgaggaagatgtggctgcaaggtctcccggctgccatactgcatgctgcaggctctg

SEQ ID NO: 14416 - DNA, 1688 bp, Homo sapiens
tagtcgcgggtccccgagtgagcacgccagggagcaggagaccaaacgacgggggtcggagtcagagtcgcagtgggagtccccggaccggagcacgagcctgagcgggagagcgccgctcgcacgcccgtcgccacccgcgtacccggcgcagccagagccaccagcgcagcgctgccatggagcccagcagcaagaagctgacgggtcgcctcatgctggctgtgggaggagcagtgcttggctccctgcagtttggctacaacactggagtcatcaatgccccccagaaggtgatcgaggagttctacaaccagacatgggtccaccgctatggggagagcatcctgcccaccacgctcaccacgctctggtccctctcagtggccatcttttctgttgggggcatgattggctccttctctgtgggccttttcgttaaccgctttggccggcggaattcaatgctgatgatgaacctgctggccttcgtgtccgccgtgctcatgggcttctcgaaactgggcaagtcctttgagatgctgatcctgggccgcttcatcatcggtgtgtactgcggcctgaccacaggcttcgtgcccatgtatgtgggtgaagtgtcacccacagcctttcgtggggccctgggcaccctgcaccagctgggcatcgtcgtcggcatcctcatcgcccaggtgttcggcctggactccatcatgggcaacaaggacctgtggcccctgctgctgagcatcatcttcatcccggccctgctgcagtgcatcgtgctgcccttctgccccgagagtccccgcttcctgctcatcaaccgcaacgaggagaaccgggccaagagtgtgctaaagaagctgcgcgggacagctgacgtgacccatgacctgcaggagatgaaggaagagagtcggcagatgatgcgggagaagaaggtcaccatcctggagctgttccgctcccccgcctaccgccagcccatcctcatcgctgtggtgctgcagctgtcccagcagctgtctggcatcaacgctgtcttctattactccacgagcatcttcgagaaggcgggggtgcagcagcctgtgtatgccaccattggctccggtatcgtcaacacggccttcactgtcgtgtcgctgtttgtggtggagcgagcaggccggcggaccctgcacctcataggcctcgctggcatggcgggttgtgccatactcatgaccatcgcgctagcactgctggagcagctaccctggatgtcctatctgagcatcgtggccatctttggctttgtggccttctttgaagtgggtcctggccccatcccatggttcatcgtggctgaactcttcagccagggtccacgtccagctgccattgccgttgcaggcttctccaactggacctcaaatttcattgtgggcatgtgcttccagtatgtggagcaactgtgtggtccctacgtcttcatcatcttcactgtgctcctggttctgttcttcatcttcacctacttcaaagttcctgagactaaaggccggaccttcgatgagatcggttccggcttccggcaggggggagccagccaaagtgacaagacacccgagggagctgttccatcccctggggggcttgattcccaagtgtgagttcgccccagatcaacagcccgggcc

SEQ ID NO: 14417 - DNA, 2367 bp, Homo sapiens
  misc_feature (1)...(2367): n = a,t,c or g
aagttcttttttattttcctccacactggcaaaagttccgagggagcctaaagttttgtaaacattttaactatccctcttacccacccccaacttttgaatttacaaagcaaaggagagtaggagccccaatttttaatggtttcctctcccctcatgctatttgatccaaaaactatatacaattttgtagcagtctctgtatagttattacacatgtttagaagggagggaggcaagaagggatagggagaatggtgatccaaaataataaaaatagaagccaaatataatactccaaacccaaactggctctcaggagcaactccagccttcttcaggcaacaatgacaggcagcaaaggtgcttttccaggggctgccagaccacagcacctctcggcacagggcacaggtggcccaatgactccaacccagtgtgagtggcaattccaggtgatgttctgtaggggtttggtggaggcaggaaaagtatttgtttataaatagggcttgagtacatttctacttgaagtttaaggttttaggaggccatgaccagaagcccaggcccaggcttcctggctccccattttcgcccatcccctccagcccactgcatcctcctgtatagtagattccatggatgaaggtcttaaagatggacaggttctgtatgttctcttttcagaaaaggcaaacaacttgccatcccagaatctttacacaaaaccttttccgggctacagcaagacacacacgcaatgctctgaggaccagatgaaattccaggcttttatcagaagcaaaagtttatccctatccaaaaatgaaattatacaaattcatacatatggtaaagattctagctgcctcttaaacgagacaaattttcagcagaagggcccaaaacaaaatggtcctagtcctctgaagtaaaaatatttatgggaaaaatcagtttttgtaagaaagaaaaattaagaatagtctctctcccaggccatagagcttcctttgtccaatcaggttggagcatgccaggggagatcagcttgctcagaagtcactatctaacgaagaaaaacataaatcctttcagagaaaggacactcagaaagaacaggtgaggagtgtgtaacatcaaaccaaaccaacctcatctcaaccccactcagggcctctctgatgcaatcccaaagttagcagtggcaatgcaactttcagaccgggagagctctgactgcctgttggatactcgagtcacagtccatggggtgttttgttattggccaatgtctgttaaccattaactctcttcatgattgcaccagttagaccatttgccctgatggggggaaaaagaagaagaaaaaacaaaatagaagaaaaaaagtgacaagagaaagcaagctgctaatggccgatcccaacacactttctgggagacagtagatgaaatcacagcacagtgaacacatgctgcctaaaatcagccttgttggggagtaatcccaactgccacccccaagacacagggtccagtccacttatctatagtctgagatgttcaccaacaaaaatggattaaagaatcttggacacaaagggccagaagaaaaagcctgagatgatcggttctgtgatttgttgcagagtgataaagagtaaatggtgagtaagtgttgtgtccagtccacttatctatagtctgagatgttcaccaacaaaaatggattaaagaatcttggacacaaagggccagaagaaaaagcctgagatgatcggttctgtgatttgttgcagagtgataaagagtaaatggtgagtaagtgttgtgtccaaaggtggagactccatagtcggcagacaggagagggatggccagtccactggcaggtgctcagtagtcatccaacgtctcgatttcacccatgttgagtcgctccgatgatgcattgactgaaaatcctaataaactgggatctgctcggaccatcttctgctttttcttcttcttgccactctgcacagcctcaaaattggattgttggttgttgctttgattggtctgaaatactgaatggagtgtactgtggttcatcccccacacagagtcctgctgttgtggctgctgtggcggctgctgtggcggctgctgctgctgctgctgtggcagatgctgctgctgacgctgctggttggctttctgtttggcacggngctcaaggaactgcttgggaaactccttggcctcagaagtatctcctaaataggccctgatataatcatggacctcaataaggagattcttcttcttttcaaggaaaggaaacaaattgtggggaacatccaaggttatttgccg

SEQ ID NO: 14418 - DNA, 1936 bp, Homo sapiens
tatttatatttgcatatttatgaactttatttcaaatatgttttcacacattttatctaaatacataatacagaagcctgtgtgacttgggcaatgtggccaggagggctgagactaacaaatccaccttggcagaaggacataaaatacgtcttatggtcagaaaaatcaacattttgtgtatttacttagtttacgaaaagtactgaaaatgctaatattagctgaatttgtgatttccttttgaaattctgagttatccttatttttcccattttgtttttgcaccaaggagactgcagtcaaataaaacagatactacacacacttgtcggggcagccgtactgcagaagcacgttgatgcactcctggctggaggcctgccgggcgtaggtcagcgctgtgttcccgtgggcatctcgggccatgacgtccaccccgtaccagatcaggagctgcgccaggaccacattccccttgcggcaggccagatggagcgccgtgcagccgtctccctccccacaggtctcgttcacctcctcacgggagccatgtgccagcagcaggatggctgtctgcaggtcctcatcagcggtggcccgcagcagctgctggcccaggggacagctcagtgcagggtagtggggccagaaagagcttctcctcatattctggaacggatccaccgttccttctcttccctcgtggacttttctgagggttttgtctcgccctggctgctcccttcccagatgctgttggctaggtcattgacaatagatgacataaccttcctgagctcaactggccagtcatccagctccagagatcgcacacgggaaaggcgggtgcccaagactgcggtggatacctgagcattcaatacacatgaggactcccaagttcaaactggccccacttaggattctgggtctcacagtccacacagtgggcgttcccacgcatgttttggatcgactgcaggccatggcttcgctctggctggtcagctggaacttgcttttactctctcgcatgactgcaggctggccaggatctggctctggatggcttggacccaggcatcccgctcctcatacgtcgtggcttcaaagtgccacgtttggccagtggcagacacaatcataaagttgttggtgcttttcttctttaggtgtttctttttattagcatgaggagaggggggcgggttgagcttggggctggtggtgctggagatactggggctgaagcatatggagtcacccagcccggtgtccaatgtccttggataggccattgcttttagagctggagatgggtgtgcaggccgatgtggctagggatggccacttttcctgggacttttgattggtagatgtctgaaggtcaatctctttttttatgaataattcttcataataatcacctaagcttgaataataggtgagcacaccattggaacacagggtgacgtatttctttttccatgtcttcagccatttcccacttcgctttaagagcatgccctgtttaatggggatggctctgccgctcccgatggtgtcagcatgattcctccggggctttccctctctttgtcctgggtcactccctttctcagatgtaaacaggttggaccagcgcatggaccgcttgcaaacgggggtgggtgtgttggcagtgggaggaacactgaactgagggtcctcctggctggtgctgggagtcggtggaatggaggaggaatagttatttaaactcccacctccatttcttttcttcataatgtgcacggtggaaaccgcaaatgagtgtaactgttcatcaggtatgctcaaagatctatctgcatctctttgtgtgatatgatgaggtatctccaaggtcacagatattattgtcattgtaagataatgctggatggctgtgctc

SEQ ID NO: 14419 - DNA, 417 bp, Homo sapiens
  misc_feature (1)...(417): n = a,t,c or g
ttnnnnnnnnnnnnnnnnnnnnnnnnnnnnnnnnnnnnnnnnnnnnnnnnnnnnnnnnnnnnnnnnnnggcacgagcccagctgacatgggcaccgcaggagccatgcagctgtgctgggtgatcctgggcttcctcctgttccgaggccacaactcccagcccacaatgacccagacctctagctctcagggaggccttggcggtctaagtctgaccacagagccagtttcttccaacccaggatacatcccttcctcagaggctaacaggccaagccatctgtccagcactggtaccccagacacatttcaaactgttccccccaattcaaccaccatgagcctgagcatgagggaagatgcgaccatcctgccagccccacgtcagagactgtgctcactgtggctgcatttgg

SEQ ID NO: 14420 - DNA, 554 bp, Homo sapiens
ctccactatggacagagcctccactgagctgctgcctgcccgccacatacccagctgacatgggcaccgcaggagccattgcagctgtgctggggtgatcctgggcttcctcctgttccgaggccacaactcccagcccacaatgacccagacctctagctctcagggaggccttggcggtctaagtctgaccacagagccagtttcttccaacccaggatacatcccttcctcagaggctaacaggccaagccatctgtccagcactggtaccccagggcgcaggtgtccccagcagtgggaagagacggaggcacaagcagagacacatttcaaactgttccccccaattcaaccaccatgagcctgagcatgagggaagatgcgaccatcctgcccagccccacgtcagagactgtgctcactgtggctgcatttggtgttatcagcttcattgtcatcctggtggttgtggtgatcatcctagttggtgtggtcagcctgaggttcaagtgtcggaagagcaaggagtctgaagatccccagaaacctgg

SEQ ID NO: 14421 - DNA, 428 bp, Homo sapiens
tcaatttcatttagttctgctctgatctttgttatttcctttcttctgctgggtttgggtttggtttgttctagttccctagttccttgagttgtgaccttagattgtctgtttgtgctctttcagaatttttgatgtaggcatttagggcaatgaactatcctcttagcaccaccttagctgtatcccagaggttttgataggttgggtcattattgtctttcagttcaagaattttttaatttccatcttgattttgtttttgacccatagctcattcaggagcaggttatttaatttccaaaccctaagtgttcccccagaaaactgctagaactgattatataattcagcaaagtttcaagatactggatgaatgtacacagatcagtagctcttctatgcatctacagtgaccaagcagagaa

SEQ ID NO: 14422 - DNA, 785 bp, Homo sapiens
gcggcacgagaaaatggattggtgctatgaagctggagagcctttatgtgaagaagatgcaacactgaaagaacttctgatatgttctggagatactttgcttttaattgaaggacaacttcctcctctgggtttcctgaaggtgcccatctggtggtaccagcttcagggtccctcaggacactgggagagtcatcaggaccagaccaactgtacttcgtcttggggcagagtttggagagccacttccagccaaggtgcttctgggaacgagcctgcgcaagtttctctcctctacttgggagacatagagatctcagaagatgccacgctggcggagctgaagtctcaggccatgaccttgcctcctttcctggagttcggtgtcccgtccccagcccacctcagagcctggacggtggagaggaagcgcccaggcaggcttttacgaactgaccggcagccactcagggaatataaactaggacggagaattgagatctgcttagagccccttcagaaaggcgaaaacttgggcccccaggacgtgctgctgaggacacaggtgcgcatccctggtgagaggacctatgcccctgccctggacctggtgtggaacgcggcccagggtgggactgccggctccctgaggcagagagttgccgatttctatcgtcttcccgtggagaagattgaaattgccaaatactttcccgaaaagttcgagtggcttccgatatctagctggaaccaacaaataaccaagaggaacaacaacaaaacaa

SEQ ID NO: 14423 - DNA, 747 bp, Homo sapiens
ttttttttttttttcttataaaagtattttttaataaatcaatgtatttcaatgttgtaacatgatagcccaatgctatatcaaggtagcaaaagtgaagattcctggtattttgatataaacactatgaatgacagtacacttgcattcaacttcacaagaaattatcttcaggtccatgaagattctttgacagctgtaacacttttcaaacagtaaagatgtacatgtattgaaagagaagacaacgaaagcctactaactgatctgggctctaaaccatactgaagagaaagagatacaatggttgtatggctagcttgctgaaaaaacatctaaatcttttaaagaaagaaaatacagcatatatcaaagttacagagtagcttacagaaatggagtcataaggagacacacagattagaaccctgaagcagtgaatgtgtttctacccgttttgtgatggaaagaagccatggatatcgagtcctgcagctgtctgtggtgttgaatctcctcatacacacaatgctaccaatggactaaaaccagaattccctgctctgtacaaatgctggtgatgggtaacttgctctattgctgtgggtcagagcaacagctggctggattcaggcatcaggacgaggctaagatcatacaccactgccttctacactcctacagagtcacactttccaaagctgatgctccccttgtaagggtttaaaaaaaaacccaagggtattt

SEQ ID NO: 14424 - DNA, 1852 bp, Homo sapiens
ggaagagcctgctacggtggactgtgagactcagtgcactgtcctcctcccagcgaccccacgctggaccccctgccggaccctccacccttcggcccccaagcttcccaggggcttcctttggactggactgtccctgctcatccattctcctgccacccccagacctcctcagctccaggttgccacctcctctcgccagagtgatgaggtcccggcttctgctctccgtggcccatctgcccacaattcgggagaccacggaggagatgctgcttgggggtcctggacagggagcccccaccctctcctagcctggatgactacgtgaggtctatatctcgactgggcacagcccacctctgtgctggacaaggccacggcccaggggcaaacccaggccaccccacaggccagcccaggcctgccggaaagggccgccctgctgtgtccctgcgaaaaaatcaccgcacgtttcagtggccagcagcccacactgcccatggcttgaatactgtggacccccctgggactggcttttttggggaagtccaggaaaagcagccaagccagagggacctgccaaggaggactggcccctctgctggcctctggggtccacatagacagatggacagcagcaagcccatgggggcccccagagggaggctctgtgaagccaggatgcctgggcattccctggcaagaccaccgcaggatgggcagcagagctctgacctaagaagctggacttttgggcagtctgcccaagccatggcctcccgccaccgcccccgccccagcagtgtcctcagaacactctactcgcacctcccggtgatccatgaactctgacccctccccagtaaaggcttctgtagagagcatgctgggtctgcatctcctctcgtctcctccatggtggtcactgcccctggcaggtctctgaaagggaaatgcttttctgcagaggcccctgcttgggcagttcacagtgagaccgaccccctctgaatatgataacagcctgtttcacatgaggagatgttaccaatcccgttcgctctgacccttgctggctgatcaccttgagcaacttacttaacatctgtgttcctcagtttctcatgggtaatatagggataattactggcacctgcctcccaggccattctgacgtgtaaccgcatataggagcccactggctgagtagctaccatcatcgctggtggggaaactggtggtaggggtgtgagggtagtgggggtgtcagcccccccaaggtgtttcaagaacaaggcctcgggcactcccaagtctgcctcttggctccccaccctcaaaagcccatgttctggtgaggcccaagagaacacatggagtcttagcaaatgcactaatgtattccgggggactgtcacctgggcaccactggggcactctgctggctacaactcatacgttcctgtggtggcattgggaaaagttccccccatgatgagggccaagatagaatctgtaccactcagtgctaccatccccacccctacaccacttccacacaggggcctcatggccatggtcagggtcccagctgtgggtgagagcagggccactgtccagctgtccactggggaagtcaagatgtcctaaggcccaggtcagggcatctggagtctgaaggaccctagttcctagaggcatctggcagcaagaaggtgaggcatcagggaacgggaatcaggctgggactgatcagaggtgaagggacagagagaggagaggaggaagattgagctgggggcaacagccaagctcacctggggcaggtctctgcacctccttgctctgt

SEQ ID NO: 14425 - DNA, 881 bp, Homo sapiens
  misc_feature (1)...(881): n = a,t,c or g
ttttttttttttttttctctttttaacctttatttacaaagaacacaactcctcttgacacaaacacacacacatttcaaggaggagcccattaagaacaacaacagactggcgagaatgacggggccttattgaacactgtcaataaggaacactggtctgtgtaccccagactaggggtcactgcaaacattttctcagatatgacttttcacctccaagacaggaaaagagatcttgacgtggaggcccgcccacctacaaggcagaaagctccacactcaatcttcagcatcgtcaaactgtcctgtttcaaagaccatcttggaataatagggtatcagtggaggcggatggtgccagctggggtcatagatcatgtctccttgtggggcacagcacacccaaggtttaagctcttgagaaatgctctcctggatgtcgtcagcatcatatggattcccttgatctgctttcaactccgagtcccagtcctcattaaaaagatcgccaggctgttccttgggtggacagtttgtcccttctgacagctcccaggtattcagttctccatcagagtcctcctcatccatggcaaagccttcctcttcagaatgggtgccctcaccccgggcaggactgtcattaggaatgctctgtgttccacgggctagtcgatccatagccttctcagtctctctctcctgactggagtggtcagctgtagcaaagccagcctccgggctgggggngccccccgcgcgctaggcagcggcgggccccgagacgntcggcgccccctgcgccgtggccccggcggcctgaaggtcgctatncgtcggcccgcgaaatntnctnntcgagggccaaattccctatag

SEQ ID NO: 14426 - DNA, 879 bp, Homo sapiens
tttcgaaatgtcctccatgacttgacagactgagagccagccagccagccaggagacctgcagaacttaaacacagagcatttattgttagaaagggcaagtcttacactcaaataggttttaacatgaacacattaaagggagatggccctggcccccacagtgtctgctctctccaaggcatgcttcagttatactgcagcctggccaaccactgttccctgtagaagttgaagttcctctgtattatccagcagctggaggagacggagtatggcagactctggaatgccatttgtgtgagttccacctactttctaggcttcagggtaaatggaaaaagtcgcaataggcgaaatgtatttcctaaaaagctggacagaggtatgtgacattcctttgcttaacaagcaaaacaaaatcaatgagtctggtgaactgacgccatgacagcaatgtggagaagactgggagtctacactgggaatggtgctgtggacgctctgggcacaggagcccaatttggaacctcttctcagaagcatgggaggtggtggaggccaagcccaccagaggcggggcctctccccagctgcctcgggatcatctctggttctcctgggccaggctccatggagtcatcaatcctcagtcacaggtggaggaatgagctgcagctggaagttctcattctggaagatgctgttgaaagcaggagcactctgcgagccactgaatggcctatagctctcgctgctgcgattctgggagagttccgtgaggagagccagcctggagcttcctcggtagagacggcaaagctgatcaaatgcttggatttgctgtggatccagaacaggttctgaggttcccttttta

SEQ ID NO: 14427 - DNA, 461 bp, Homo sapiens
tgggattacaggcatgagcactgcgtcctgacctgaaatagatgttttaaccttagtatttaaaaataggtatgttctggtcacttcaaaatcactaaatacttttgcttggcatctttctaaaaggcattataatctggtaacttttttgctaaataccttacaagcttccaccagtctgcagaagaatttctttgtctgacattttgagagaaagtagtgtggccccaagctttttttcctgtttagtccactgttcacatgctgaaatatttctgttcttgtttttatgctctcttgatttgtagtacttcaccttcctccacatcatcacataagctaaatctttctcacacttaaagaccagttcatcctgcaggcctctgatagcaaagaaaaaaaaagttcaagtagtaccctttgttttttgtaaagccttggtttgatttaatccccagccg

SEQ ID NO: 14428 - DNA, 410 bp, Homo sapiens
  misc_feature (1)...(410): n = a,t,c or g
atttgataaccgttatgactgattacgaatttaatacgactcnnnnnnnnnnnnnnnnnnnnnnnnnnnnnnnnnnggcacgagtttttttttcttnnnnnnnnnnnnnnnnnnnnnnnnnnnnnnnnnnnnnnnnnnnnnnnnnnnnnnnnnnnnnnnnnnnnnnnnnnnnnnnnnnnnnnnnnnnnnnnnnnnnnnnnnnnnnnnnnnnnnnnnnnnnnnnnnnnnnnnnnnnnnnnnnnnnnnnnnnnnnnnnnnnnnnnnnnnnnnnnnnnnnnnnnnnnnnnnnnnnnnnnnnnnnnnnnnnnnnnnactaaaagttgaaaaaagtttaatagaaaaaagtttacagaataaggctacgaagaaaaaatatttttgaacagcttgtaaacaaaaatattttctac

SEQ ID NO: 14429 - DNA, 1533 bp, Homo sapiens
  misc_feature (1)...(1533): n = a,t,c or g
tttttttttttcttggtgccacaaaaatgattttattttgaaccagaaaggaacagcaatcaagacaatagtcagggccgagggcttggcagtgtgacttaagtaccggggattgaatttgtccaggtgcaaggagtgacataaagagaatcaatttttcatgtccaagccaagctgatacagatgatgatacttatcagtgattcccatttacacaggcttgaattgcttttcagatatcagatttttggaactattttataaatatttttaaaggtgatggagccactggagtgtaggtgaattgggtgcccctccccttttctttttcgggtgtatcaagcatataatcaatgacaggaaaagtgaaaggtttttatgagagttttgcattaaaagaaaaccaacgatcaagtttctacactgcagcactgttgatatttgagcaagacaactcttcgtggtcgggggctgcgcttgcactgtaggatgtttaacggcgtccatgacctctacgcacntagattgcttggtagcttcccttccccggctgcgacaaccaaaagttgccattgcattgccaaatgtctacctggaggggcaaaatcgagcactggttgagaagcgctgttttcaaaaacatcctcctgcccccatcattgtcttggtgtgctttttaccattttattaagatagaccagatggtcaacttcccaacaccaaatgcacatgtatgcccagcatatatgcgtgtctctttgcaggtatctgcatgttcctggagctgagatggaattccacggtcactggaggacgttagttcagttcctcagcaagtttaaggtcaatatatcagtaccgtaataaaaaagcctgtctgtattcaagctgtttcttttcctccagcagaaaccatcgtcaatatttgcagtcagtttttgaagtcactttcttttaaagctggaaagaatcttcacccaggcccaccctcatcttaatccactatttagagtcctacttgaatgatatcgccagcaactttcaactttggatccagatttctttatttgtatccaccaggaagagaggtaccacgtttctgagttcttttatgagcactcgctatgtaatttgcaaggcccagtgcgaagtgaaaacgcannnnnnnnnnnnnnnnnnnnnnnnnnnnnnaagacatcaacagcagagcattaaatcaggcttagggcccttctgaactcctgggctctgggcatacccatgacaccagacctggcagtcttggttggtgctgcattgattttgttgtattaatttaattggcactgcccatctcttttgcccctgtatcgcagtgtttcctgtggtgaggaccccaaataataaaatactgtgacctcaatcagtttaaagagaatgcaaaattacactgcagcaaatttttacagcatacattttttagactttcaaaaaaaaattcacacgggaatcttttctacatcattatagtaattaaacacggtggcctttcac

SEQ ID NO: 14430 - DNA, 436 bp, Homo sapiens
gtccagggctgaaagctgctattcaggtctttttgtcccatggggtgttcccttgatgtaataatattctctcccttttcctgtggatgtggcttcctttgagctgaactgtagtgactgttgtctgtcttctgggtctagccatccagcagagtcttcgtggctccaggctggcactgggggctgtctgcacagagtcctgtgatgtgaaccatccattggtctctcagccgtgaataccagcgcctgttcaggtggaggtggctgggggtggggggtgcaatggactctgtgagggttcttagctttggtggtttaatgctctatttttgtgctggttggcctcctgccaggaggtggtgctttccagagagcatcagctgtggtagtatagggatgatcaggcatgtgcagtgccctagagttcccaagggag

SEQ ID NO: 14431 - DNA, 501 bp, Homo sapiens
tctcttttttaacagaaactaaagtcttttattagtactgtgtagggaaggctaaagaaatatacatttaattcagaataatttttaagaaaaaacgtggggttccaagaaatggtgatttacattcaaatgaacatgtacatttgcaaacctggataagtagatattttcatgaagcacgctacaagaaaattcacacagaattatttgtttttcaaaggcctctttcaaagtacagactccaagtccaaagcaaatacccatggcatgaacaaataggatgcctaagattctaacatttgcttcggcatggctttcctcctcacttccctacctcacaacaagaaaaaatttcctagatgggacaatggcaagatattgtgctaatacatttcataggatttctagatgctgggctataacatccaggttacaatttggtgacggatttttttatttctattgcaaatggactacactccaaacacaaaaagattcttg

SEQ ID NO: 14432 - DNA, 564 bp, Homo sapiens
gcgcagggtttaacaaggccctgcatccttaggttattaatgatggcttctagttgtttcctagcttctggttttaggggatattgtctttaattagggaaggagatgagatccctgagatggatttggactggtgagactgttgtagctcagccagtattttcctgaattgcccaaacatctggattaatatcagtctccaccagagggaggcaaagagtctgtcctgggagccataaggatggtggttcccatgtgagctaaaatatccctacctcagaggagtcgggctttcagggccatgaaatgacaagcattggactgctacttggtgtttctgctgcaaaactaggcaccatggatatgtctattactcggcttcttagcattcgcattcctgctctcttacccccaacgtccacagagctggatgttcctcacaatgtccaagtgggctgcagtggttgggcattggccttgtatatcaaggggacagctcacagacatactgcagaagtcctgttgggctgagataggacggcctcctggtcctgaaatggaata

SEQ ID NO: 14433 - DNA, 1074 bp, Homo sapiens
  misc_feature (1)...(1074): n = a,t,c or g
ctttgatatcagtattttcttaacctttgtgactgtttcaatattacccccgtgaaagcttttcttaatgtaactttgagtacattttaattgccttctatttttaaaactcaaaatcattagttgggctttactgttcttgctattgtatggcatatacatctgcctggatatatttctactcttgaccaaagttttgtaaagaacaatataagatttcgggtaggggtatggggagggaagatattttattgagaactacttaacaaaagatttatctgtaagcttgaactcaggagtacagttttagctatctagactctaacagcttttgctttaaaattattaaagtgtttcttaatgaaaaagaaaagatcttgctaaagttaaaataaggaacatttcaccttttaaatatttaattcttatgtggacttatttccagaaaactttggtgataattcttgagacaaaaggtggttaagtagcattattatgtaatgcttatataccatagagtttttaatagaagagaaatccatttcctccgagggtcactattaacaatgtacttccttaaatttagtttaatgattgtaatgggtgctgcatttgcacattgcattaagttatgatgagacgaattgttgttaaaaattatagcaaaaagaaatgtaaacttggttaaaatcctttcactctttgtattgttttttttaaggtttttattccttaaatgtaaaatgactacctaattttttgatgtaaatacattaaattcaaagagaaaaaaaatcagctgatgtagcagtatatcttttccttgatggttaaatattgatctagtatttatattgctgaattattttctgtggaggaccagataagcagtaagtatgtcttatcctatatgttttgcaacataaaaatattgctaattgaaaagaattaggcaattatgtgtgttgctgggttgtttttttgttttttttttttgagacggagcttgnccctgtcgcccagggatggagtgcaacannnnnnnnnnnnnnnnnnnnnnnnnnnnnnnnntgg

SEQ ID NO: 14434 - DNA, 3312 bp, Homo sapiens
aaagtctacagacataccatagagataatagcaatacttacctccacagggttatcgaggagaataaatgagataatgcatgcagaacctctcacacagctaagaatttaatatgttagactattattaattatgaaaacacataaagaattctgcatataatttcagaggtctatgatttctaggggatccttagcctggttccggatggtcagtaagacaactttcttcaatgcctacattttccctctgaattccatctgtgtttactaagcatctgctgtgtcctgggcagtccaacccacatgagtatcttggtcactagtgtcatcagcacctttgaggggtagggatcattcctattctactgatgaggtgagataacttgtccaaggtcgcatggtgaagtcgctgttgaaatctgtcttctgactcgttgctctgtcttcatctgaggaaagacttgtgaggcttctgaggaggctgctctccatcctgctgtgttctgtcagtgacactttgtgcacacaggagatcctaagacacataccctaggccctcagagccggcagtgacttcttcaaaatcagttccggcagcgctgagtgtccatggaaaagagctcttattcagagcagcccttcctgtgtgcagagctacgcaagtaattaaatcacttcagcaacaagatcaaggggacggataagtgttagagactgtgtttcagtcctgactgcctcttatgcatgacctcaggaatgccacttcacctctctgagtctggtttcctcacctataaaagtgaaggacagttctgactccacagggtgctgtgtgagggttacgtgaagtcgagggttacatgaagcctttgcataatacctggcacaacgtcagtcttccgggagtggtaggactagtctgcatttcttggtttgcagattagatgaggaaacccaggccccaaagaagcaaacaaacaatagctcacccagtcttctctgtttattcttctcaactacaccatgctgctttgcaggttggtttgacaaacatttccccacaattagatgcatgatgaccaagggaggaaagaaaattttcacagggtatttaaaaagctcagggaacaaacagatcagtgcaaatcagtaaggctaacaccttgaaaatgacgtctgcacaggtgaggaagtggagcagaagagggaggggctggttcagggaacaggatttaatatgtcagtgaagaccctgcctctctctgtaacaagatgcctaaagaagaatagtggtgcttccagccccagctccctcttgttttgggaacaacagtcatttctcagaaacctcactttgcaaaggcagcccttccaaaaacctgagagccttagttttggagaaatttattttaagctcactttttggctggagaggaaatgaatttaaactaggacacacagagaagcaacaaagagtgttaaagaagcaactgaaaaggtagtcaaagatctggcttaaggattagaagcactggctttctagactatggacaagtgtccattcaacagttatccagcctggcaggaagcagatatctttctgtgtatatctggatccaactaacatttatccaatgtctgttgcatgccaggtactgagcaaaaaccttcttcctataaatttcatttaatgccattaaggccaagaaggtggcataaccaacttcctttttcagctgaggaaacaggagcacagtgaataactaactggctgggatttgtcctaggtcccctgaactccaagcacagtgctatctccactagaccaagctgccttgtctctgggctcaagagaagcctgcataggagctgaaggtcaagaggttgcaggcttatctcatatgcacatacttggacctcctaccacacagctgcccagcgacaagaaagggcttcttttccttccagccaggtccagaattcaatgtcatttttctagcttagattatctaaaaaaaatgccacaacaggggatacaaattttaacatattttattgatttaggggccaaacaaggcagcatttggtcagttaagaaaggcacctcattgaaaataatacatcacagtgctgttgagtgatcccagtcacaggatttgagaatggaaaggacaatctttggatgacatagcttaggacacttgctcatttatttaaaagagtcccttcacacagtgcagataaaagaaggcaagacgataggattgtgggcatgtgcctgggtagctgtgagaggttactccatgaaagtaggtagcctagtaaattagtggtaagtcaggggaagggaatcagcctccctttccatttcattcccttccccctccccttgattccagtttgcttgatttgttgagccaccatccctatgaatacaccttacatctctttcaaatgtggagatggttttttgatcttacagtgtgtggaaccggagtcagtaatcaaagctccctgttccaagctatagacagacaggacaacaatttgatttcctgtactcttggtctgggaacccatggggttctgagataaaagctgaggtcttagagcactggctttaaaaaatattttcaccagtccagagtaaatgaaaacccgattccttagaaataatattgtgtctatttctacccccaccctccaagcatggtgttttttaaaaaattaatttttcccttacactttaaaaactctcacctatgtataaaagaaactgccacactacaataacactgctgttgttccaagtattcctctgagcccctcaccagccctccctcaccatcctcaccctgaccacccttcccctctgcccagcacctaagagcagggatcacgccgcggggtgatgagcagtgttgcagtctcgcctggccttcctgaatactaggcctggtctctttttggggaagtagatttgactgctcctcagatgatcagccctggatgttcagaagacaatctgaattcaaaaggacctttcacctggtttaattctctggcaacaattcagttttcaaacccaattcccaaataattgctattttcagcatcatgatgcagatcacaaaaatattccaatttggcctggctctttttatgacgatatcctctcccagtaatttctgtaacctgcaaagtaagtgcctttttccttccacctagggggaaaaaattaatgatccctgttcacacactgactcacgtgggttttcatcatgggttagaaaacaaaatggaattctct

SEQ ID NO: 14435 - DNA, 1044 bp, Homo sapiens
  misc_feature (1)...(1044): n = a,t,c or g
cgatccaatggtgaatcctccagatccccagagactgaatctcctctccagggcagcctgcactcagatggctccagcgggggcagcagtggcaatacccatgatgactttgttatgattagactttaaacccagctttttctaaagatgacattcttccgatggacctggggaccttctatcgggagtttcagaacccacctcagctgagcagcctctccatagatattggagcacagtccatggctgaagacttggactcattaccagagaagctggctgtgcatgagaagaatgtccgcgagtttgatgcctttgtggaaaccctgcagtaaaagtatccttgagtcccagcagcaccccctttttggtggccccagggcataagcagcctcccatgcatcagctgctcccacccctcatcctgctctgagccaggtggaagggaggctggcttctcccatggggacccagaagtccctactcttggacctcctggagactccgtggcggcagtcaagcccagtgcccagttggagaagactcacgttgcttggccttggaagatggggaagaacctttcgtacgaaaaagccctcagcagggcaatctgtgtgccctgcccatcaccaactgctttcccaaggggtgtcatcctgttcctcctgctgccgcctcctgccctgggcctgccttgcaagctggccccttccctgcctgctgtcaccaatccactgtttgacattccagctggtggccaagagattggtgtggaggcagaaagaggaaggagacagtgccaggaggaagaaggaaggagtcccttagctctcttcattgtcccctttacttcctgctatcttcttctcctcttcttctctctcttgcctctatgcctgtatttctggcaatatgacaggcctgcctacccaagatcagaactccaaaaccactcccacccctgaaggtcgggagggtctngnnnccctggtggctgcctgtgctcaggtcctcagctccatgggaaataaaaatggcaccctg

SEQ ID NO: 14436 - DNA, 1830 bp, Homo sapiens
  misc_feature (1)...(1830): n = a,t,c or g
ggaatcttggaatttttatagacagcacctcagtttctgactccagccgcacacctcctgcctctgccagcaggggttgccgccagaccagagccagggccaggtccctgggtccatcccccccggtaggatggacgtgagccatccttctaggggacttttttcagtgtgcgaactcgtctctgttaggtggtaggagccagtttgtgtggcctgttcaacgctccacagtgcgtggctnggctcatgtgtgtggcctgtgtcccctgtccctgcaggacccagcaggcatcgtggcgtgacagctgtgtccaagccactgcccgggcatcccatcacccaccagggtgcacggtctctcctgctgggggctttctgtcgcatgtgtgtctcctgtcgactctgcagtttgttctcagagcagaatgtttcctgttctcagtgcacaaagacactggttttcaatcggcgtctaaaaccacgttcctgcctttcattgcaacacggtgtgttcatttgtttaaaacagtttaatgagtaagtttagatgactggtcaatatcttaaaaatgtatattagtaagaagttcttcctggaatttttctttcgattctggcagaataaacaggtgtttttagttttcccactgtctgagccaagcaggaccctgtcccagagcaagagatgtccccttccatctctgacccttgcctgggacaagctttgatggggggccccagcttcaaggctgtggtgggaacagcacccccaaatgccagcctctcctttcttcccatccaccagtatactgcggggccatttctggtctttgtccaacaggaaacccatttctggtgggatatgccttccagtgccacagggccactcaccccatgcatctctgtcctgcccgtcagtgctgggacggacagcaagggcaagcccagtgtctggcagataggtgggtgggaacagagaggggagaatgccgtcctaagcttctgcttggggatcccccacacgacctgggtactgcctgggaaacctgtcctaagtaaaactatggacctcgcctcgcccaccggcctgcgaagccagcatctccgtgaaggtggatggaagcgcctttgtcctcattttgagctgcaagctgggtcagcggctctgaagccctcgagtgactttctaacccaagacccagcccctggcaggaggagggtgggtgcagggctggtgggacaaaaagaggcctcagcaggcctggaagacccttccagtacatcccacagcgtgtcgagcagctgggaggaacttgtgtcaagctcgagccgtcataggtccccatgaggtgtctgaagccccatcttggtgatggaaggcagaggtgctgacgttctggagcatggacgtgagtcctcagctggctccgcgtgggccccttggagggtgccaggtgtgtggtgaccttctggatgcctttaacttcatggctgcgtcattcctgatttagaactttaaccggagcttcatctagtgattgcaaaactggaccaatgggaggcacggcggcgcagcccgctccctccgtggaatggagctcagctcttcggaggcatcaaagcacctgtcgcctccgtggtccccctgctgagggagtgcggcctctgcaaggttcgggggtggcttcgtttgcctggagtggccggccctgcttgtgccatgtggatgtttgtgagcctcggtcctacagcactgtgtaggctgcatctgtttcgtgctggtcctgttgacttgtatgatatccacaaataaatattttcatggcgaaa

SEQ ID NO: 14437 - DNA, 468 bp, Homo sapiens
gcatggcggggctccgacgcccgcagcccggctgctactgccgcaccgccgcggccgtgaacctcctgctgggcgtcttccaggtcctgctgccctgctgtcgcccgggaggggctcagggacaagcgattgagccgttgccgaacgtggtggagctgtggcaggcagaagaaggggaactcctgctgcccactcagggtgattctgaagagggtctggaggagccttctcaagaacagagcttctcggacaaactatttagtggaaaaggcttacattttcagccatcagttttagattttggaatacagttcctgggacatcctgtagcaaaggattctccatgcttacaaccctagtagggacagcgaggttgtggtgaattcagtgtttgcagctgctggacatttccatgtaccgccagttccctgcagggtaattccagcaatggggaaaacttccttcaga

SEQ ID NO: 14438 - DNA, 2162 bp, Homo sapiens
ctcttcctggtcggagagcacttccagagagcaatgtggtgttaaaaatgatgaaagtagcagctcatccattatctttgctgagcccaccccagaaaaagaaaaacgctttggagaatctgacactgaaaatcagaataacaagtcggtgaagtacaccaccaatttagtcataagagaatctggtgaacttgagtcgacccctggagctccaggaaaatggcttggctggtttgtctgccagttcaattgtggaacagcagctgccactcaggcgtaattcccacctagaggagagtttcacatccaccgaagaatcttccgaagaaaatgtcaactttttgggtcagacagaggcacagtaccacctgatgctgcacatccagatgcagctgtgtgagctctcgctgtgggattggatagtcgagagaaacaagcggggccgggagtatgtggacgagtctgcctgtccttatgttatggccaatgttgcaacaaaaatttttcaagaattggtagaaggtgtgttttacatacataacatgggaattgtgcaccgagatctgaagccaagaaatatttttcttcatggccctgatcagcaagtaaaaataggagactttggtctggcctgcacagacatcctacagaagaacacagactggaccaacagaaacgggaagagaacaccaacacatacgtcccaaagtgggtaccttgtctgtacgcttcacccgaacagttggaaggatctgagtatgatgccaagtcagatatgtacagcttgggtgtggtcctgctagagctctttcagccgtttggaacagaaatggagcgagcagaagttctaacaggtttaagaactggtcagttgccggaatccctccgtaaaaggtgtccagtgcaagccaagtatatccagcacttaacgagaaggaactcatcgcagagaccatctgccattcagctgctgcagagtgaacttttccaaaattctggaaatgttaacctcaccctacagatgaagataatagagcaagaaaaagaaattgcagaactaaagaagcagctaaacctcctttctcaagacaaaggggtgagggatgacggaaaggatgggggcgtgggatgaaagtggacttaacttttaaggtagttaactggaatgtaaatttttaatctttattagggtatagttggtacaatgcttcgttgtatttagtaagcctttacaagacttgttaaagatgtcagagtgccccaagctgccgttccttcccttcctgccccacaagctccttttcctgaatttcctacctaaatattaaccatatgcctagtctctgaaactaaaaacttggacctcatcctcaattattttctcctttcaactctgttgaccctctgtctggtcttcctctagaaggttctaccgcagaaattgatgtgtgctccctgccctcgtcactgcccaagcccgggcctgcacatactcactggactgttccagttttgacagctgccagtcttcctgcccctttcacactgcagctgaagttcattacctgaaggacgcctcatcatttcattccttggctccaaaccttctgctgcctctaagataaaagctcaacttcttaacagtgtacagtgtgcaacttccaacctttttatctgttctctccaccttcagtttagcgtcattccaaaaccacacccttgcaaagctttgtactccgcaccccagatgatctccaggcagctcagatctctttcctgcctttgccctgcactgttccccggtacttcctcctttattgtagcactcagctccccagccaatctgtacatccctcagaggcagcgatctgatgaattggtttttgaatcccagaaagggtctgccatggagttggcagtcatcacggtagatggcgtatgattttgctgaattttaaataaaatgaaaaccataaattacatgatgcttttattgacacttgacaactggcctaaataaaaagactctgactctaatacaagtccccttactgataataggcattgaaagagcaccattcttaaaatctaaaccctttaaaatcagttacggcaattcacttaaggagcttgagggccgtgttaaaagggagccagatttt

SEQ ID NO: 14439 - DNA, 816 bp, Homo sapiens
gtaagggatttgaatgaaatacactattatatcttatatgttagcttgaaccagaaaaagttgacatttttgtaggtcaaaaacaattgagcatcaatttcatatggttcaacctcatatatgatactatgcttttcttctatcagtgaaaatgtcatcatcaattccattgtcaacattagtagccttaaaacaataacataataataatgatgataatgatacttatagctatcatctattaaatgcctatgtttcaggcatgatactaggcaatttatatatatcatcctaatctttctaaaaactctattagggtggccctatccacttaatagatgccaattcaaagaggttaaatgattagactaaggcacctaacttatgtgagtgtcaggcttcaatgcctgtgttaggagctactccttcacacaaaatagttcagaacatagagaaggaccaaggttaataaatgattttcatcccaaacactaaacatgattgatgggtagaggctgcccgaagtactgtgtaaagatggaatctgagatagaagaatgctgtggtcaattagtaattcttgcccatggagggattagtgacacatgccttgtatatttgtcatctgtggcctaaactctgcccctgaaggtttgttttctaattcagaggtttaaattaatctagcccacttaataaaaccagagatcctatgggaaatttagcctaagacagtgctggaaattgccatatgttgatacaaagaagtgtttggccacattacaggtctcagactcaactgctatgtgtgactgc

SEQ ID NO: 14440 - DNA, 581 bp, Homo sapiens
tatgaccagcacggcttccgcatcctcttccattttgcccgggacccactgccagggcgctccgacgtgctggtggtggtggtttccatgctgagcaccgccccccagcccatccgcaacatcgtgttccagtcagctgtccccaaggttatgaaggtgaagctgcagccaccctcgggcacggagctgccagccttttaaccccatcgtccacccctcagcaatcacccaggtcctgctgcttgccaacccccagaaggagaaggttcgccttccgctacaagctcaccttcaccatgggtgaccagacctacaacgagatgggggatgtggaccagttccccccacctgaaacctggggtagcctctagaacagaggggctggggagaggaaggggcagagggaccggtcactgtccagcctggagggaggcattggtggccaaggacaccctttgttgcccatggccattcacccccaggcctggtgcttctccccacacccctgtaggcctcaagtgactcttccccctcctgctccggccccgcccctgctgagccaaacccagtaggaggctggg

SEQ ID NO: 14441 - DNA, 914 bp, Homo sapiens
gtgcttccatagtgccccgaatatctgtctagtgtcgtagtattttagcatgttatactgtatgcatttgtcttgctcatttgtttgtgaacttcttgaagggtgggactccgttatgtctcttgggtagagcacaatgctgggtacatgatgggcattgactaaatgtttgttgaataaataaatagcctgactctcattagtccccatcacccctcagttgctggttaaaacttctgactttttaaaaattcattcaatgtgagtctttcacaaatctccctgggtgaatatccataccttaaaagctggcacacacacgtctaagttccttttccctggtcaatcataaactaatggctggtcctcctggcttgcaggctggcctctttcaattgaggttcccaatatctgcagatggctctggtctgatgagctcatgggagaatttaaattttccggtctacaatccaaataaaattagtctgctataaccccagagctgctggtaaagcagtcgttgcagctttagaattctgatgccaaaaaggggttatatgcacagtgaatgaatagtgccatggggttatgaacagtggttgttcccatcactgcagctgcttgggtgaggcatcagaaaccccttcaagtgtactactgctacagttagctataaaggttttcccagcaccttcagctgccatggtctccacctcagttctctttacatcttattagtaaaatatcttaggaaaaagctataagcaaagatactgtgtaatagctatatggagagtttgacaaacatgctggatagttgcttacaacatttcagtcacctgattctattactaataaaatattttttactgatgacttggctggtaaatggcatgtttatctaattatggggg

SEQ ID NO: 14442 - DNA, 1363 bp, Homo sapiens
tttaattctattatcatgtcagctgacattatgactatataatgtagttagagacaatttttatcttgcttatagtaaaggttcagcctgccaattgtaaatcattctaatttggcaggcttatttttgacattggaaagggcagaaagcgatttgccccagtagtgtaataggagttatagaccagaggctgaaacccaaactatataaaaaggaattcagtggagggggctttgtaatctccattaatttgtgttgctacttccaggatcaccaaaaattacatgtaattttacatgttaaacacattgaaacataacctatgtttataaagcataacgggcttcccttccagaagctctcctgcttgtcatgaagtgagaacaatgaaaagtcatagcagatactcagtttaactctgtgtagaacctagtagtgtttgagctgttattcagatttgaattcagactgtgtgttgtttgcttatggacactgcctgtcgttctgtcactgttaaattaatgagtctataaggtttttcttccagaggccataggtgacatcactaaaattgcaagataaattgtaatctttgctgctgctgcactccccaacctctcccccaccccccgtggtgtgctgctttctagatgagcgtgttttggagcaggcccatctgggacactctatgctttcaccaaggaagtgcgatctgagcagccacaatccagccaaaagaggatcgtagatatttgctctgatcaactagatgaaaatatagcagaatggatttagcccactgctctgttttatccaactgagtctctgaccagcaattggtgcataattattacagcaaaagttaagaaatgaaactgtagcaattatgtaaatgaatgtgttggcctcttaatacctgttactagtggacttcctgtgaggaagttagttttttgttttgatgaaatgctttcgttttttaaatcttaattctgctgtccacatcctcccaaagtgtgcttacttcatttgtttaatttaaatgaactttcctccttgtatgtatgaggtgacttggtgggtggggtgggtggtttttgtttttgtgttttttctttcttagggcatctgtaggcctcaaaggacctttcctttaggtcatattcctcagaaagtcttcaatcttcccttgtttttgtttgtttgtttttcttaaagaatattttcaaagcttaaatttgtatattaatttaggactatttagaagtataggctgtcgttggcggcagcagtatattctgaaatgtctcatagatatatatttttgaataaagatggtgttgttgaaaaaaaaaaaaaaaaa

SEQ ID NO: 14443 - DNA, 1644 bp, Homo sapiens
  misc_feature (1)...(1644): n = a,t,c or g
gaactagtctcgagtttttnttttttttttttttttgctatgggatttaatgggaaaaatatgtaaaaactgtcactagtcagctggctctttttcctatgaaatctatcagtacctttctccatccgttgttctcaataatgaccacagagcctgagtataccaagaaaaccaatattcgcattacaggttgctcctgtccttccagacacctttcctgcctgtgtgactaacctaattttgctagttccataaatacacgattagtttagtaacagccatcacaatgtaccatgtacattcatggtgagagctaaagatcgacacagacttctaggagctttgttcatactgattacttaatccaattgtatagattgaatatttgagtggaaggaatttacactctgtttaaatgatgggattctatcgagatagcactcatgatcatgacctttttggtagtattcttaaacaaaattctacagagactaaatgttagcgatgatcctccattttcaattttaaccaattctgtcccctttctcaaaaccctgagccctgtgcatgctttctcagtcttgtggtgggactggatacaatgactaacttcccctcctcccctctttaaacaccattttccatggagttcaaaaaaattttttttcttaacgttacatatcatagtgaatgggtttccccagtgtatatgaatgttttaagtgtctccaataggcttatgcagtctaggagctttccaatactcatttaattaagatttaatcatttgctaatggaaatcttaccacctttcattttccctctgttaccaaatttcagctcttaggagctgctctacaattctgaatttgcttttcttgcctctctttagtcacctgtcacagggagggttcctgcttcagtaatggatattgtgagttagggataattaactttttttttttgtgcttcagatttaggaggaaaagatcctgtttccatttgaaaggaactgtaagcttttatcttttaaccaactgaacaatacaccaaaagcagcctagggatgagcatttctttgaaagcaattaggttattcacctggtattaaaactatttactgttaaaaaatctgtgacttcatgaagttgatttttaaaggcagcatcaaaaactgaaaaggcaagggaaaaaataggcagcttctctgcacttgtttggagctccccaaaacaggagcccatggagaagtggcatcaagaccgggctgccctttcgagaacaccctgtggcagttcagagacacgcttttcctacactgcatgcagcccctctttccagcactggaaagaagtggtcttgagcccagctgagaagcacttcacactcctctctcttgttctgaatggtgtttgtgtcagtctgcagctgtgtatggtattatgtcttataatcctgcatcacttctatcctatccagtcatatctaatgtagaaaattagtttccagtgaaagtaatatgtagtgcttttatgatatttgtgtgcaatatcccctcttccattgaggatatttgatgtaaaggaaaaaaaaaaactcagttccacaataaaatacaaaagtggcaaaagttaaaaaaaaaaa

SEQ ID NO: 14444 - DNA, 1095 bp, Homo sapiens
aaattccactgggtctgcagctcacacataggcatgaccagcatagagatagagaggccccagtgctgctgagtaactgtgattccccaggtgatggcatcagctgagaagggaaggaagcccatgtgaggacactgaagaaggagtgagcagacaataagaagcccacagaagacagagaaggaacaactagagggagaagccaaggcaggcgtgtgtggtaacacataggaactgagggagaggacatttcaagatggaggggatgccatacaacaggactatgtgatggtttttggctgtgtccataggaagtcacaacaggcaagggaaagaaaccagaacccagtcatggagttaagaagtgagtcagagaggagatgggtagggacagtgaggtaaggcctctttctaaggaagtttggctgaaggatagactagctggacacatgctggctgtgtggggtagagggaggaatgatggagggtaggagagccttgccacctgcgagaagagtctcctagaatagagaagctgaggttaaagttgtggaagacagtggggataactgagtgacagataatcaggagaagaaaaggagatccagaatcatgacagagagatgacctttgccaagagcacagccatctttcactgtcacagagaggtaggacaaaacgattggtgttcaagaattggtttgtagcacaatattttaactatgtcctttaaaaagtttctccacagacactacccaaagcagtccttcactacagtggcagacagacctgaaaattttcatctgaagcagcagagtgaactgcagagtcagagatagaatctcactatgttggaccaggctggtcttgaactcttggcacccaagcgatccttttgcctggaatcccaaagtgtcagatttactgaagaatatttcattgtaattactttttatactttataggtcaagagctctgttttaaagacaaaatttattgaatatactttttcaaacaaagtttcatgttctaatcattgtctgatttcagcattaaatgaaacacagtaaagaaagttgggctgaaaaaaaaaaa

SEQ ID NO: 14445 - DNA, 1355 bp, Homo sapiens
cagggcaggaaggaatggaaggatggagctagaaatcctcagagtgggccagagcaggggtgtgacacttgcaaagacagggctctgactctgatccctcccagggagcctccgacacccatcccactcccaaccaccaagaccctgggttagggaagaagttgtatcttaagtgccaccttcaagtttcttagtggtgcctggtgcattccgaggctacatccaggctcatggaaggagtgtagtattcatttagccatgtctgccatgggtccagaaatgggaaagggaattgctgtccttgccctgtggtatgctgccacctctttgggaagcaggccttgcccctgttcccaccactcattctcagctttgaatgggaggcctttctatagtggaggcctttccttgaagcctatgaactgcaggcccccttttgccattgatctcaaagcacttgtcctcaggatagggaagagcagggggatgcaggaatagcagggatagcttgctcccagccccctccccaatttggttccgttgacataggaattttacgattcccaaaccatgcaggggctgagccttccttatgatgactttgttctccctcccactgggggaatcctccctatgccttaaaactgccgagccccactccatgtaataggattcctgggccttcctcaatgggggttcatgttcttggactgcgggccctcagtccttaactggaaagtgaccgtccactgccccatgggagcccatctggacacagcacagccccaaaaccgttagcagctggctctgtttccaagcctggggaggggttcctcagtgcaggagttggggacaggctggggatccaagctgcttgagggggtcaaccttggaccaaagttgccttaagcctgtggtaaaagggcttcagggaaggtaagtgggccacctgctggaagctgccagctgcccggctggcaatggtgtgagtgtcttggccctgtccctgccctggggtccagcaggtcatccctcccttcttctctctcctttggcgtttgttcctgtagtcactgggctaatctccccctagcttcaagctgtacatagggcctcccagtgcaaatcctcctgcccataccgtgcacccttagaagcctgcgtgtgcatagagcgccccctacttcccagttaactcccagttcttctccctgagcttggtatttgtcatgtgccaactctgactctgaggtgggcagtgagggaagcagccccgggcctgcttgcttcctgtccccgaaatgttcgtttcttctgaagtaaatatacatatataaataaatgtataaatactg

SEQ ID NO: 14446 - DNA, 616 bp, Homo sapiens
  misc_feature (1)...(616): n = a,t,c or g
tgtgatctgaattcccagccaaggtccacagatggcacgtttgatctgactgtccttagcaatgatggagttcacagcacagtcacgagcaacatccgagttttctttgctggattttccaatgccacagtggataacagcatcttacttcgtctcggcgtaccaacagtaaaggacttcttgaccaaccactatcttcattttttacgcattgccagctcacagctgacaggcttagggactgctgtgcaactgtacagtgcatatgaagagaacaatagaacgtttcttttggcagctgtgaagcgaaatcataatcagtatgtgaatcccagtgggcgtagccaccttctttgaaagcatcaaagagatccttctccggcagagtggagtaaaggtggaatctgtggatcatgactcctgtgtgcatggcccatgtcagaatggagggagctgtctacgaagattggctgtgagctccgtattaaaaagccgtgagagtcttccagtcatcatcgtggcaaatgaacctctgcagcctttcttatgcaagtgtctgccaggatatgcgggtagctggtgtgaaatagatatagatgaatgcttccctcncctt

SEQ ID NO: 14447 - DNA, 859 bp, Homo sapiens
ctgtcatggacgcctgggtccgcttcagtgctcagagccaagcccgggagcggctgtgtagggccgcccagtatgcttgctctcttcttggccatgcgctgcagaggcatggagccagtcctgagttacagaaacagattcgacaactggagagccacctgagccttggaagaaagcttctacgcctgggtaactcagcagatgcccttgagtcagccaaaagagctgttcacctatcagatgttgtcctgagattctgcatcactgttagtcacctcaatcgagccttgtacttcgcctgtgacaatgtcctgtgggactggaaagtctggactgggctccccgtgtggatcaggagaagtggggcccagcgttcattcaggtactatttgttttccctcatcatgaatttgagccgtgatgcttatgagattcgcctactgatggagcaagagtcttctgcttgtagccggcgactgaaaggttctggaggaggagtcccaggaggaagtgaaactgggggacttgggggaccagggactccaggaggaggtctgccccaactggctctgaaacttcggctgcaagtcctgctcctggctcgagtccttagaggtcatcccccacttctgctagacgtggtcagaaatgcctgtgatctcttcattcctctggacaaactaggcctctggcgctgtggccctgggattgtggggctttgtggcctcgtgtcctccatcctgtctattctcaccctaatctatccctggctacgactcaagccctgaccttccggtacaggataaggaggggacctgaattggtgagatgggatttttagatcgtcccccatgtgcca

SEQ ID NO: 14448 - DNA, 338 bp, Homo sapiens
gcgaggccaccagggtgactgcgggattccgatctgcgccggagctgcgatgctagagcactcttgccacccccaccccacggacgtgttgcagtgatatcagaattttgcgtgcggtttacccgtgtttaacctctttgcgtctcgcttctgaatcgtatccacttgagcatcactagactgatctattttaacactggtggggggcagcgaggatggacagattcctggtgaaaggggctcaagggggccttttgaggaagcaggaggagcaagagccaactggagaagagccagctgtgttgggaggagacaaagaaagcacaaggaagaggccc

SEQ ID NO: 14449 - DNA, 651 bp, Homo sapiens
aggccaccagggtgactgcgggattccgatctgcgccggagctgcgatgctagagcactcttgccacccccaccccacggacgtgttgcagtgatatcagaattttgcgtgcggtttacccgtgtttaacctctttgcgtctcgcttctgaatcgtatccacttgagcatcactagactgatctattttaacactggtggggggcagcgaggacatggttttaaactttaaaatgaaaatgtgaaactaggaatgttgctgtgagaccccttggacaaacagatttttgcactggggatagaacttgagcaatttctgtcttgggcctcgccactgacgtcccttctttcctgtggggacaggatggacagattcctggtgaaaggggctcaagggggccttttgaggaagcaggaggagcaagagccaactggagaagagccagctgtgttgggaggagacaaagaaagcacaaggaagaggcccaggagagaggccccagggaatggaggccactcagcaggccctagctggcggcacattcgggctgagggcctggactgcagttacacaagcctgtttggcaaagctgaggcagatgagattttccaagagttggagaaagaagtagaatattttacaggagcactg

SEQ ID NO: 14450 - DNA, 1617 bp, Homo sapiens
gcggggatggagcacgcgccctggagccccggagccagatgctctgacctttgaccctgccgttcagctctagggcccgtgcaggccacaccatgaacacctccccaggcacggtgggcagtgacccggtcatcctggccactgcaggctacgaccacaccgtgcgcttctggcaggcccacagcggcatctgcacccggacggtgcagcaccaggactcccaggtgaatgccttggaggtcacaccggaccgcagcatgattgctgctgcaggttaccagcacatccgcatgtatgatctcaactccaataaccctaaccccatcattcagcttacggacggcgtcaacaagaacatcgcgtctgtgggcttccacgaagacggccgctggatgttacacgggcggcgaggactgcacagccaggatctgggacctcaggtcggaaaacctgcagtgccagcggatcttccaggtgaacgcacccattaactgcgtgtgcctgcaccccaaccaggcagagctcatcgtgggtgaccagagcggggctatccacatctgggacttgaaaacagaccacaacgagcagctgatccctgagcccgaggtctccatcacgtccgcccacatcgatcccgacgccagctacatggcagctgtcaatagcaccggaaactgctatgtctggaatctgacggggggcattggtgacgaggtgacccagctcatccccaagactaagatccctgcccacacgcgctacgccctgcagtgtcgcttcagccccgactccacgctcctcgccacctgctcggcctgatcagacgtgcaagatctggaggacgtccaacttctccctgatgacggagctgagcatcaagagcggcaaccccggggagtcctcccgcggctggatgtggggctgcgctctcatcgggggactcccagtacatcgtcactgcttcctcggacaacctggcccggctctggtgtgtggagactggagagatcaagagagagtatggcggccaccagaaggctgttgtctgcctggccttcaatgacagtgtgctgggctagcctgtgacccctcgggactgcctggtgcaggtggtggcagctggagggacccatgcagcacccaggtcagagcagaccctcccctgccggcctgcgccagctggacctgatggccccctgtggcgccttgacctgctgggccaggctgccctgggactctcagcccccagttgcttatccagatgtgacagagctcgacccaagccaggctgcacactcctggactgggctagcctgcactgcctgggaaagctcggccgagggcccaaagctgctgaggggtctgaggctggtgcccacccccaagctagtgtgttctctgcccctccctgcccgcgtttcagggcctcggtccatagagaacaccaccaccatggccaggtggaagggtttattagtccctgccagcagctgtcctccctggtgcaggtggcctggccagcccactggattggggacgggccaggctgggccaggtcgggggctcagtctgggaggtaataaaagcagaccgacacgcagatgttgctcgggaaaa

SEQ ID NO: 14451 - DNA, 651 bp, Homo sapiens
tacaccatttcagggtagtaaacatggccctaaacaaaaagaaaactctgtcagttttgtacctgttgtgatacaatcaatcctttgcacttggtgtttctgaaacaatgtgttgccagcattgattctttcctaagaagtaagcagatcctaataatctgctggaacatataaataaaattagaaggctgtggagggcagcaaatttacttaaatagtgaccccataaatgtgtcatctgtaaataatcttttaaattaatcttaggctactcctttttaaacatttaattttttatatatatatatttctatttgtataaaatgcatagaattaattactaaaaacactgaaacttgtggggaaaattaagtccttcattttcagtgtgactaaaaatgtactgctggtttttactttatgatctaatactgtaatttttaaaatcaatttcaggcacatttatttcattgatgattattaaataaaacactgcttgtgttaatggagtgaagaaaacttatccattattagcttattgtgaacgctgtactagagctgtactagtggtatacaattcatttatcaaagaaacgctgtaaatccaaaacatctagagttttacactccaatgctttgtactgtttattc

SEQ ID NO: 14452 - DNA, 487 bp, Homo sapiens
  misc_feature (1)...(487): n = a,t,c or g
ggtgcttgnactctggatacccctatgacatgattacgaatttaatacnnnnnnnnnnnnnnnnnnnnnnnnnnnnnnnnnnnnnnnnnggcacgagttatttctcacagttctgggatttgtcgtggcagggtatgtgtcttagtccattttttactgctgtaacattctaacacagactgggtaatttacnnnnnnnnnnnnnnnnnnnnnnnnnnnnnnnnnnnnnnnnnnnnnnnnnnnnnnnnnnnnnnnnnnnnnnnnnnnnnnnnnnnnnctggtcccttaagcccttttatgagggccctaatcctatccgtgagggcactgcccttatgacttgattacttcctgaaggcctcacctctcaacactatcacattggtaattatgtttcaacatatgaatttggggggacatattcagacgctagcaatatgtaatgtagtttttttcttccgataatactttctttggctaatttgtg

SEQ ID NO: 14453 - DNA, 713 bp, Homo sapiens
attgacatcccaagattgggagagggttcatctgatcgtggcaggtggttatgacgagagagtcctggagaatgtggaacattatcaggaattgaagaaaatggtccaacagtccgaccttggccagtatgtgaccttcttgaggtctttctcagacaaacagaaaatctccctcctccacagctgcacgtgtgtgctttacacaccaagcaatgagcactttggcattgtccctctggaagccatgtacatgccagtgcccagtcattgctgttaattcgggtggacccttggagtccattgaccacagtgtcacagggtttctgtgtgagcctgacccggtgcacttctcagaagcaatagaaaagttcatccgtgaaccttccttaaaagccaccatgggcctggctggaagagccagagtgaaggaaaaattttcccctgaagcatttacagaacagctctaccgatatgttaccaaactgctggtataatcagattgtttttaagatctccattaatgtcatttttatggattgtagacccagttttgaaaccaaaaaagaaacctagaatctaatgcagaagagatcttttaaaaaataaacttgagtcttgaatgtgagccactttcctatataccacacctccctgtccacttttcagaaaaaccatgtcttttatgctataatcattccaaattttgccagtgt

SEQ ID NO: 14454 - DNA, 932 bp, Homo sapiens
ggtaaatttgatgtgatgtatatttgaccacaatttgctcaatgcaccattgctggtttgaaggtggagggaccacaggaccagggacaaggacttgggaacctcagtcctacagccatgaggagttgacttgtcaacagcctgaatggtcctggaggcagatgcttccccggagcctccaggtgagagtgcagcccaccaaggcctgacgtcagtctgagagaccccgctcagggcacccactgagcccaccgcgacttctgccctggagagctgcgagatcataaatgggcactgcttgcagtccttacatccatgctgcttcttacgcagcatagaaaaccagtgcagcttgtgtctgggtggagccctccaggccgtgggcaaccagtgtcttgcagtctgccctgggctgctgcctccagtgtggtttcctttgtgcttgctcccagcccgttcccatggagggatttggtgagctaccccttacccttgcaatctgttccccaaatggagcctggctctctggctgggcctttcactcccttccctcctcacagctcggaccctcccctcagggatcccatgagggctgacagcaggggcgtcttcacctctgtgggcagccaggtggcaggagaggggcagaggcgcagccatcgctctcctgcagccaccgaagactacccgagcatcctcttggaccaatagcaactgccttcggagtggagacaatgtgtgggtcccaccctgggagcatctcaagaggctgggctcctggggctggcggccacatgctctgaggagcaaggggatcatggggctgtggtggaatgttctacaggggacctgtgaggctattgtggaatgttctagaggggatcatggggctgttgcagaatgttctggaggggattatggagctgctgtgc

SEQ ID NO: 14455 - DNA, 717 bp, Homo sapiens
ttttttttttttttgcaacagagcagaaaggatgctttatttgcaaaagagtggtgaaacatctaaaaagttgacattgtatatgattacaaagtaaagagtactcttgtgagagaagttacatgttcattgttaaggaaattatatgtaaatcacaaagatcatggtctgtgaataatgtgccatatctcacaaaatatggtcattggaatcttattaaaattatctacaggtgacttcagtttccattctccaccctctgccttaagatacgaagccttgacatgaccacatcccagtcagcataagctccttctagatggcgggatatctcagttcctgcttcatagctacgtcggccatgaagtaagcgccagttatcaaaagtaatcacatcacctggattcatcttgaaggtaaacttggattctttgctgttcatgaggtcaacaaactccttcagagcagcataaaaaggctgaactctttcaacaggcacatcaaatattgtgtccctagttgcgttattgaagttgatgcgaaccacttggcctttatcatctaactctataattttatgttttgattgtacagaaaaatcacagtaatccactccaatgtctgtaaagtccacaaaggtagaggacaaaatctggaatgcctgaggattatttttctttagtttttggcacacattaaacccatctacaatttctg

SEQ ID NO: 14456 - DNA, 436 bp, Homo sapiens
gaatattttagtacagcaacattttgacttggcttcaactactattacaaatattccaatgaaggaagaacagcatgctaacacatctgccaattatgatgtggagctacttcatcacaaagatgcacatgtagatttcctgaaaagtggtgattcgcatctaggtggcggcagtcgagaaggctcgtttaaagaaacaataacattaaagtggtgtacaccaaggacaaataacattgaattacactattgtactggagcttatcggatttcacctgtagatgtaaatagtagaccttcctcctgccttactaattttcttctaaatggtcgttctgttttattggaacaaccacgaaagtcaggttctaaagtcattagtcatatgcttagtagccatggaggagagatttttttgacgtcttagcagttctcg

SEQ ID NO: 14457 - DNA, 983 bp, Homo sapiens
aaggttttaaaagcagcatttattgattgaaaataaatgtgtagataggctctcagtatggaatccatgttattttttaatgaagtacatgaagactccttagatcttccaccatgtatcttgtgtgtgcttataacaaccaccatattcaaatggaggggaattttcaacattttactgaaaaaaaaatgagaaattcttccttcagcagctctgcatagtttgacaaacttttggaaagagataaaaacacactccagtgtttgtacgttgaacgtttattacaactaattggcgatgtgataagacagtgctcacgtggcctgaatgttggtcacaatcacaacaaagcttaatccagcccagcatatataagtgaaaatataaaccatgaagacatgtttagatatgtataagtacttagaaaagtgacgctgaacaattacatagctttaaaaaatatagagccatctaatgccattttacctcattcaactcttttttgtaagaaatgtgtctttttaaatttttataagacttctgttaactaggcagtgccatggaaagaaaggaagctgctgtaaagtgtgcagcacttctaagtggagggaagcaaaataaatttagctttaacaagtacccccagagggaacattcgtgctttaaacaatgactttacacataatactgtgaagagagcaacacgttttttgtaagatactgttatgaagaattcctggcaaattaccattctcactttattttggggcatcaaaaacaactaagtatttgattatgaccacaaaaaattcatctcaggagtcaaatgtgccttggccttaaaaattatgtgcttactattgtgaaacaatcctgtttctcatcccagattcagaatgcctaagaaataatttttagtgtaagaagtatcactccaatttagtcattaaaaataatctgtagtcctttaaaaaaaaaaaaaa

SEQ ID NO: 14458 - DNA, 746 bp, Homo sapiens
gaggatgatgatcacatctgctcccagggtggctgtcttaaatgagttaacacgtatctgatgattagaagagtgcctgacacatagtaaacactcaaatatttgctatgttatatgttaatgtaatgtggtagagttcagttgccattaagtgggataaatcctcacagggcacacattatttaaataatttgttacattaaaacttattttacttgtacataattgactaaaaaatggggggttgtacattcaaacatttatgaccatgtgcaacactgagaatctcaaaccgacagtgtgctctgtgacccaaggcaagtcttggagcctttcaaggcctcaatttcttctgtaaccttgtggtttcacaattgtcaaccttttgttctgccgaccattgtcgtcatagtcttacttgcagagggcatagtgctgatgggacaagtgacatgggtatgagccccatgtaaactaaaacataattacctttcctttaggtgttggctacagttatcccaaacttggacttgaggtcttgtatatgcatgccattggtcacataccatcagaatagaattctcaaaaactctttagtaaataagataaacatcctacttataacagctcattatggattttatttttattgtctggctctttcagaccccagcaactgcaattctgacttaataatcaattgtttctaatcattaaaaatggtatatagaaaaactgaaaaaaaa

SEQ ID NO: 14459 - DNA, 2520 bp, Homo sapiens
gacttggaatttaaagcaaacagaaagagaataatgacttatctctttgagtattaagctgacttattctcttgctatttttgtgtttcctgtttatccattttctcattctcctttcacttcattgtcatttttattttatttagtgaaaaggatttggtgaaacaggcaaagaccttaaatagtgcagcaaataaactgatcccaaaacatcattaggcatttttaagttggtcacgtcgcaagtccgatatcacaacttaattgtaaaaggaagaaatctgaaagttactacatttaagctctgattctatataaaatgtcaccaaaaagttgactttgaatttgttggacttttaaaaaaccagttggaaatataggttgggtttttttcttattgttttctccccagggttagaaaaattggtataagttcctaattaaaagctgaataaactttgagaaattatttctgagttgaccaataaataaaaataccactttctttaaaaaagcctagggaattgaagctctgtacatatactaatgatgcctttacaacccagtccttgataataccagattctcggtgcattgttcatgtctgtatctgcaagcctgttctgccattgcagtgtgatgaacctagaggtaactaccatgtgaacttgaactcttctaaaatagttctgtgtctcttagaccatgaccccttttcacttttgttatataggtttaatccccaagccaaggatagtacttagtatttcactacacttctattctcagtaaccaagattgcttgcaactttttttgccttggtgacttttgaaaaaaaaagaaaagaaaaagcagcatccttatatttctttaaaatacatagaaataaagttagtaattaggtaacctatgataacataataatgtggacgcctggggaaaccctcctcatgtttgtcatcttctacctctgccattttcctgcaattccgcttcctacttaggcagttcagagagaacaattctaataaaaacactcctctcctattaacaaaaaatgatgcagtacccatttttcgtatcctgcttttcttatattggagtaaaaaggacagggtatagacatgaatgatgatattctgcctggcctgtcatttcttacctgggaaacatttacttaagagtttctgttactttttgttcagatgggggatttgctaaaggttctgggaagctaataattgaattattaggaaaaacattttcaggaatagggaagtaaatgataaacttatattctttattattatttagtacaaaaatagattcccagtaggatatccacaaggcaatattaggcaggggcttctgtttctaaggtgaccacagactaaccctttctagggctttaacattgtaaataatcctattaaacagtttgattttttaaggtggatttttgatttgaagagacaggctttacataagccttcattccttcaaaaggtcctgacaaaatacttgggtttttttctctttttttcattctggtatgctttgcagcatttcagctgctttggtggggacacagataaccccttcgcttccagctcttaaaattctttatctttttcttggcaaaaccagaattaagagtgtaagatagattccatgtgtgcttatataggtccctgcacagattggacttgaaccaaaattaagtccaaagaacatatgtttagaccaacttcatggaagtggaagatcctgtgctcttgaacttattttaattcttataatttgcacctatataaacaaagctcctactgtattcttctcttcatcaaccttttgtggtgatgggttgccttttctacgagcatttggaaggagtgatcaaataccgaaattgaactttctaaaacctacacatagcatgcgtttaaattctattatataaagccccaagtgctttaccttctaaaacatgcttctctataggtgcaaagttataagatatgtagaagaaaacatccatcagaatcttctggagaatatggtcagagtcttaaacaggcccagtgctgagttctttgtccacttagtcacacatcttttgtgggaatgggaaaggaaggagacagccaaactctgacaaaggcttttccttatagaataacccaaagcctaggtgagggttgatatataatgtcccatgatttaatatatgtggtttgggggaaaggacaagaaaaaactataattccacatataagaaggtagttgcccatttacaagttccagttatgtgtgtaaaacagaaaaattaagtaccaaacctattaggaaatttttttaaaaagtggatttaacttaaattactgtgtacttgaggttggctttggatatggattttctaaaaagtgatgttttattgtttatcatctaatggctgtaaactgtagtactagaataaaaaaaatggaaaatcagcttttcctctgcctggttcaccttca

SEQ ID NO: 14460 - DNA, 792 bp, Homo sapiens
ttcgccgaccgctgtaaggaggtacagcagatccgcgaccagcaccccagcaaaatcccggtgatcatcgagcgctacaagggtgagaagcagctgcccgtcctggacaagaccaagtttttggtcccggaccatgtcaacatgagcgagttggtcaagatcatccggcgccgcctgcagctgaaccccacgcaggccttcttcctgctggtgaaccagcacagcatggtgagtgtgttccacgcccatcgcggacatctacgagcaggagaaagacgaggacggcttcctctatatggtctacgcctcccaggaaaccttcggcttctgagccagcagtaggggggctcggcctgggagtcggggggccccggtcaggccctgcccagagagctcctggttcctgaactgagctgcctctaccgtggtgggctgggcaggcatgtgcccccctagtcagagggcaccaacccacctactctgcccctgggtggatcctgggccggtcgtgttagggttgtccctctgggtgctggctggtgggatgggggagggtggggagcagctcccagcacccctgctgtgtggttcatcttttttttaggcccctgcctgtctgcccatctgcccctcacccacccagagctctgcccaccgcctggacctgcccacccctgaaagactggcccctgctccccgcccctcggtctccacgtggtgtatggatctgtggtcattgtccctctgcagaataaagattgctcaggcctgcctggaaaaaaaaaaaaaaaa

SEQ ID NO: 14461 - DNA, 442 bp, Homo sapiens
ggaagatacaagtcacggttgatgatcctgtcacaaagccagtggtgcagattcatcctccctctggggctgtggagtatgtggggaacatgaccctgacatgccatgtggaagggggcactcggctagcttaccaatggctaaaaaatgggagacctgtccacaccagctccacctactccttttctccccaaaacaatacccttcatattgctccagtaaccaaggaagacattgggaattacagctgcctgggtgaggaaccctgtcagtgaaatggaaagtgatatcattatgcccatcatatattatgggaccttatgggacttcaagtgaattctgataaagggctaaaagtaggggaagtgtttactgttgaccttggagaggccatcctatttgattgttctgctgattctcatccccccaacacctactcctg

SEQ ID NO: 14462 - DNA, 1849 bp, Homo sapiens
acatcttttttttttttttttttctcttacaaaactgtaacctttatttgttgatccaacagtacgttaaccacttttaccccatccccactttacacggtacaccaacctgaacagattttgtgccacaatttcattcaaagggtttgtcattcactttatgattgtgctggataatctagatgtaagcaagtctggagattttaaaatacgggtcccctgtatgagagtagcatagtttatagcatacttttaaaaatggcattcggtaattttgccttctggacagaaagatatcttcaaattgcaaacacatctatttccacaaaacaatttggtcaggaaattttatttgaacattctaaagcaataatgctttagatgttacttaagtgtcccagacaggattaacaaaattaagtgtctctaaattacaaatttggctcctgtaggagtctcagaaaataaacagaagaaaacaacccccctcccaaaagaagtatgacacacacattttgaagaaaccccaatgtttcatgcaatggtaggcaagatgtaaaagcccacccaaatcacacatttctacaccaatcatcataagaaaaaagtactctgtagtcgatctgtacatccaaatgcatttgggaatctacacctacgttacattatttaatgttatatacatttattacccaccccccttgtttttaataatttcttatgtaaaaccttcattcaaacccaaaagatttaagactaacttggggggaaaaaagataatcactttagacattcagttaaaatgtagtttatctaaatctcaaaatgtttaataaaaacaagtatcttctccatttaacactttgctttctaactgtacagtaaattgcattgtagagagtacacttctgtcttcaaactgtatcttctttggatggaattaagatgtaactgtatagttttaagataaataaatgggaagttggtccaactaagatgacagcagatatattacatgcaggatttaatattttctaattctctcttttaaaaaaaagggatgctgttggattgggaaaaaaaaaagtcaaaaaagaacccagattcaatatataaaaatgtcccacaataggtcgacaatggcagtaaaaataagaggaaaaaagtaatctttctggaacatcatttttcaataacatagaaacactaagtgccaggaagattcctattcatgtaattttagcatccaagtttccctctatttattttattggaacaaatgctttaaataaactatttgtcctcttcactgaagagagctggtctatttcatctttaatgagctagtttttgggaagattagccatgtactgtagtaatgcctactgcataaaatccaagcatttgctgtgaacagttggagaaagcagtcaggaagaacctaggatcaatggaaatagatgttactttaagccaccgacgaaagagagacccacaaagtacccagtgtgttaaagcccaaatctcttcttgcgtttgtttgtttttgctgtgcaagttccacccctatgaaaaagaaattgatccaaagttccaggttttcttgggtctctagtcaattttcacattagtatagatttttcggacaaaggcacttgttcccatgtaaccaatcgctccacacattatccccaaggctgtgctaaataccgccatatatccaaagtaaaatgatgtttgaaataagccatacatctttgttttgaaaaaatagtagtaaaaggaatacatgtaaacatagattgcagttgatgcagcagagagaaaacttgtccattgccaccggtaa

SEQ ID NO: 14463 - DNA, 1668 bp, Homo sapiens
  misc_feature (1)...(1668): n = a,t,c or g
ggcagggaatctggcttgattggcgtgctgagacgcagcctggcgcaaccctcccttctgaatcgaagttcaagtcccgcggacactgcaaccatgaaggagagacgggccccccagccagtcgtggccagatgtaagctcgttctggtcggggacgtgcagtgtgggaagaccgcgatgttgcaagtgttagcgaaggattgctatccagagacctatgtgcccaccgtgttcgaaaattacacagcctgtttggagacagaggaacagagggtggagcttagtctctgggatacctcaggatctccctactacgataatgtccgtccactctgctacagcgactcggatgcagtattactatgttttgacatcagccgtccagagacagtggacagcgcactcaagaagtggaggacagaaatcctagattatttgttcccagcacccgcgtttttgcttcattggctgcaagacagacctgcgaacagacctgagtactctgatggagctgtcccaccagaagcaggcgcccatctcctatgagcagggttgtgcaatagcaaagcagctgggtccagaaatctacctggaaggctcagctttcacctcagaaaagagcatccacagcatctttcggacggcatccatgctgtgtctgaacaagcctagcccactgccccagaagagccctgtccgaagcctctccaaacgactgctccacctccccagtcgctctgaactcatctctcctaccttcaagaaggaaaaggccaaangctgttccattatgtgaagtggaaattggaggggggagacaaccccctacttcctcccttggggtgcagaggcacggggagagggaggatgagacaatttaggacactggacatgagtttttcagatggccacggtgagggcttggaaggagacaggaatggggcgaggaaggagccaggcccggcatgaggacctgacgctganagagaaccatcataccccaagccaggcactanattttggagggggcgactaccccagtgccccccccgctccagangaaggaaagctgtgggggacggggggcatgctggcctcatgggcttgggggcctacagcagcctcaccttcagcttcatgcctcttccacacagcgtttccatgcaggtcaggggatgggaggggtccctgagcccttcccttcccctctaaggaggcagcaacggcagagtggggaantggagcggcagctcccttgggggcttagccccaggtgccttccgtaactgcaattcggaagtgcaggagctggtcagagccaatgagaaggaaacctcatctttgcatagcccatgccctcatggagaggtgacatcatacattcacatgcttctcacctaagtccccagggtccaagggagaagccccagacccccttctcttgcagagtgtgggggtggtggtgctgcaggggcagggctgggtgggggtcaccagactttttctgcccttagggtagtacagctggcatttgttttatagactcttgtctttggaattggggggagggggggagtgtttcaatctgttatatgttctgtgtttaatgaagaaaacctatttattaatgaaaaatataatacatataaagtaaaaaaaaaaaaaaaa

SEQ ID NO: 14464 - DNA, 468 bp, Homo sapiens
  misc_feature (1)...(468): n = a,t,c or g
gatatctctcaatcatgaaggtcaggaatttgggcaagtcttggcaattcttctcttaaatgtagcatcatcagctaatggtattcagctaataggtgggcaggactggaggattctaagcagctttatttacacgtccggtgatttggctaggaaggctggaaggctaagctcagttgggcctatgtctgcgccatggtctttccagcatgacggttttagggtagttggaatctgagcagaagctataaagctttttatgacgttctaagatccaagccttgttctgtagtcaaacaagtcttactaaggtcacctgaatttaatgtagagggaattttgggagggaataaccaagaataactaattaccacacaaggttattaggagttttttttttgctgttcccggatttgtttgcttttagggagaattgtncattagtttcttgggctttcttagggnatc

SEQ ID NO: 14465 - DNA, 312 bp, Homo sapiens
cggacgcgtggggtgaacttgaggaaggccactggcgtccgagggctggagaagattgccaagttaaacatcccgccccggctcattgattacctctcctacaactgaattgcaggtggggtccggaccgtgactgcccccgttgtgcccagcattgcccgggtgagggctctgcctgttcctctgaagcagcgtgattgctgtagatagaacaacgctccttcgagtcccttcctgcgatcctgtttaggcttctctcctggatcctggataatgtttccagggtgttgggaaggcctgcgtctcaggtca

SEQ ID NO: 14466 - DNA, 839 bp, Homo sapiens
tacccatcaagggttaatcatctcattttagtggagccttggggtttccctgaacgaccagaccttgctgatcaagacagaccaattccagtttggatcagagccttgggagcagcattgactccctttaaccctttagctggcctaaggattgcaggaccctttggtttaagtctagtgcagcgtttaaggcctgatttcaaacgaaagtattcttcaatgttcgaagacgatactgtgacagaatacatctaccactgtaatgtgcagactccaagtggtgagcacagctttcaagaatatgactattccttatggatgggcaaaaagggccaatgctccagcgaattggtaaaatgcaccctggacattccagtttcagtgatctttggcgcccgatcctgcatagatggcaattctggcaccagcatccagtccttacgaccacattcatatgtgaagacaatagctattcttggggcaggacattatgtatatgcagatcaaccagaagaattcaaccagaaagtaaaggagatctgcgacactgtggactgaacacactgaagctctgatgggaaaacctggtgactgatatagttgttcagcaataattcatagtctgtgatgaagagtagtgaatacaacacacaaccaggcagccttcttgactatactttgcacatgttttctttaggaattcactcacacatttaaaccagttagtgccttctagaagaatggctttcctttctcctacacaaaattgaaatatacaagtctctaaatataatacctttaaataaaaggttatttgtccctctgaaaaaaaaaaaaaa

SEQ ID NO: 14467 - DNA, 988 bp, Homo sapiens
tttttttttttttttttttcaactgcttcagtgtaatttattttcccacatcccagaaagctctggaaaaacacataaatgaatacatttattctctcacaggatactacactgttacccagtgtgaagggagcagccatgtggctcccaagctcccttagcaaaagggtggttctcagaactgctccattcacgagtcctgcaaccagaggcctgggctcaactcacacaaagttctgagcaatggccagcaccttggaatactcgccttcccgcttgcgcaggctggtggggatgggtgtcttaattcgtgtccccacagggttcccgttgtcctcaatgaggaccacgttgttggagtcgaatctgggggtcattcgggggccaggcatgcagtgcccccacaatgagcgcctttttcttctgtcccttgatggccagtagtatctggtcgcccaccttgcccactccattcttcttatagacatggatgcagcgaggagcccgatggtatgggctgttccccagggcactgttgtccaccactcgtacccgcgtcatcttctgaatcgcactcagactcccagtggtgctgaaacagtgatggctcagcactctgcttacacaggtgaaggggccccagagcccagtaaagaaagccatgggatcccaagatagatccgctctcgccgcccgggaaaatcccgccgcgggccccaccagcctgcgcaagcgggaaggcgagtattccaaggtgctggccattgctcagaactttgtgtgagttgagcccaggcctctggttgcaggactcgtgaatggagcagttctgagaaccacccttctgctaaggaagcttgggagccacatggctgctcccttcacactgggtaacagtgtagtatcctgtgagagaataaatgtattcatttatgtgtttttccagagctttctgggatgtgggaaaataaattacactgaagcagtt

SEQ ID NO: 14468 - DNA, 400 bp, Homo sapiens
gagaatacctattcaaaccgtaccctgatgggcaacttggacatattattccaatctgtccacacttcaccatggatggcgatgcaccactaatgagaatacctattcaaaccgtaccctgatgggcaactggaaccaggaaagatatgacctgaggaatatcgtgcagcccaaacccttgccttcccaggatttaagcgagagcctcactggttcccaggacatcaacctgaactggatcctccccgatacaaatgcacagaaaagtcaacttacatgaatagctattcaaagccttaaattgggcatcactcaggatgtgtataagatcttaatattgactagtttcacatccaggtttctaagaaatgataagatacttcacttttccagagtgaaa

SEQ ID NO: 14469 - DNA, 707 bp, Homo sapiens
ggactgtgtctcgcatgctcctgacgcagaaggttttgaaccttttttcacctcgtctgaaatggctgcctcccagtgtctctgctgctcaaaatttctcttccagagacgagaacctcgcctgtttcctcacaaacccacactgtggcagccttgttaatgcagatggccatggtgaagtgtggacagattggaataatatgtccaagtttttccagtatggatggcgatgcaccactaatgagaatacctattcaaaccgtaccctgatgggcaactggaaccaggaaagatatgacctgaggaatatcgtgcagcccaaacccttgccttcccagtttgggacactactttgaaacaacatatgatacaagctacaacaacaaaatgccactttcaacacatagatttaagcgagagcctcactggttcccaggacatcaacctgaactggatcctccccgatacaaatgcacagaaaagtcaacttacatgaatagctattcaaagccttaaattgggcatcactcaggatgtgtataagatcttaatattgactagtttcacatccaggtttctaagaaatgataagatacttcacttttccagagtgaaatgtaggagggagcacattctaagtacagctaaaaatttagctcactgtaacacagtttcactctctgaataaataaagcaaaaaacacagt

SEQ ID NO: 14470 - DNA, 792 bp, Homo sapiens
cggatggggcgtaggtgggcggtgcgcccacaggctgcctgggtaaggcccaagatggctgtcttcgccttagtactcgtgtgaagttggcggggacggttcctgtcatcttcttgggcttatttggtgtgctgttgaaggggggagactagagaaatggcagggaacctcttatccggggcaggtaggcgcctgtgggactgggtgcctctggcgtgcagaagcttctctcttggtgtgcctagattgatcggtataaggctcactctcccgccccccaaagtggttgatcgttggaacgagaaaagggccatgttcggagtgtatgacaacatcgggatcctgggaaactttgaaaagcaccccaaagaactgatcagggggcccatatggcttcgaggttggaaagggaatgaattgcaacgttgtatccgaaagaggaaaatggttggaagtagaatgttcgctgatgacctgcacaaccttaataaacgcatccgctatctctacaaacactttaaccgacatgggaagtttcgatagaagagaaagctgagaacttcggaaaaggctcatctgtcaccctggagaagggaaactgtacttttccctgtgaggaaacggctttgtattttctctgtaataaaatggggcttctttggaatttgatagccacatacttttgttttcctctagatgctgcctctactcatgtagactatgaagtcttgactcatcctagatcttaggatcttaggtttgggcttcacaccacttgcctttttacagtct

SEQ ID NO: 14471 - DNA, 900 bp, Homo sapiens
  misc_feature (1)...(900): n = a,t,c or g
tcggcggcggcctgcggccatggccaccgtgatggcagcgacggcggcggaacgggcggtgctggaggaggagttccgctggctgctgcacgacgaggtgcacgctgtgttgaagcagctgcaggacatcctcaaggaggcctctctgcgcttcactctgccgggctccggcactgaggggcccgccaagcaagagaacttcatcctaggcagctgtggcacagaccaggtgaagggtgtgctgactctgcagggggatgccctcagccagggcggatgtgaacctgaagatgccccggaacaaccagctgctgcactttcgccttccgggaggacaagcagtggaagctgcagcagatccaggatgccagaaaccatgtgagccaagccatttacctgcttaccagccgggaccagagctaccagttcaagacgggcgctgaggtcctcaagctgatggacgcagtgatgctgcagctgaccagagcccgaaaccggctcaccacccccgccaccctcaccctccccgagatcgccgccagcggcctcacgcggatgttcgcccctgccctgccgtccgacctgctggtcaacgtctacatcaacctcaacaagctctgcctcacggtgtaccagctgcatgccctgcagcccaactccaccaagaacttccgcccagctgggggcgcggtgctgcatagccctggggccatgttcgagtggggctctcagcgcctggaggtgagccacgtgcacaaagtgggagtgcgtgatcccctggctnaacgacgccctggtctacttcaccgtctccctgcagctctgccagcagctcaaggacaagatctccgtgttctccagctactggagctacagacccttctgatcacagcacccagg

SEQ ID NO: 14472 - DNA, 398 bp, Homo sapiens
tttatttggaagcaaaatttttattttttaagaacagagctatttcataaagccagctacaacatctgtggtacaaactcatcccagctctctcgccatattccctctctgtagacccagagaccatatccataacccaaagggacacagggagggcagacagaccttctttaggagagaagtttagaaactgatccacttcatgaggctccagcttaattttaggaataatggtctggcacgaggaatcaaccccagtgttcatttccagaggaggttcctccttttccaacggggtggagatggctgtgatggtcagagtgacagacggaacgagtcctgggggtggttcgtctgtaactggctctgtcttgatggatgttgaagggaagtctgta

SEQ ID NO: 14473 - DNA, 793 bp, Homo sapiens
gcctttaatggttcctgatatggcaggctatcctcacatccgttacatttcatcaggattggatggaacatcattcagaggtcctttcaggggcaattttgaggaactgattcatttggaagaaagattaggcaatgtcaatcgtggagcatcccaggggacaattgaaagatgtacatatccacataaatacaaaaaggtaacaactgattggttctcacagaggaaactgcactgcaaacaagatggggaagaagggactgaggaagacacagaggaaaaatgtactatctgtttgtctattttagaggaaggtgaagatgtgagacgtcttccatgtatgcaccttttccaccaagtgtgtgttgaccaatggttgattaccaattaagaagtgccccatatgcagagtggacattgaggcccagctgccaagtgaaagttgacaccatgtttcagaactcttgccctccctctcattcccatccttcctggtactgcagtcaaccaaagatggcatgacttacctgcgcagatttggaagcattgaacttagagtgctggctctgctatatggtacaactaatgctagacctacagtttatgtatacagttgattttgatgtatttataaaagcttttttttctagatttgacatttttctgtatcattttactgtatttttgcatggttccttgtattgcatttctttgcacatattatgggcttgtgaccctaaacttgcaggcaaggttagctgctttagtaagtagaattttgtggtctttttgt

SEQ ID NO: 14474 - DNA, 1591 bp, Homo sapiens
  misc_feature (1)...(1591): n = a,t,c or g
tttttttttttttttttgcaaactcaatctttattgcagctgaaatactattttcgttaagtctcggacacttagacccactgatcctgttactctgcttgtctctggtgtgcagggaatcattttgctggattagaggaaaggtgccgccgtctgtttccatgacttctttaaaaactgccttgaaatgaaattagttcatctgcttgcttccgtgtggcagcctcctggcccgcagctgtgccaggcaccagtcctaagaggcatctatagactagtgcttatgtgggaccccaagcctcggcacagctccataccacctatcctgagctgcctcctgggggaccgtgctcttcagcttctaccagcaaggagggcagatacgggtgcgtgcgtggggcagaagacacacagccttctgagttcagggtctcccagatcttcactgggctctgaccttcttggcctgtggctcctctgtgtgggcccgcttctgctgaggctccccatcctccaggccgcctgccagctccctggacaggagggccgccccgcacctgcccgcagctcccgcttctccctgcgctcctccatctcctcgatgtcgccagcaaacagggctttcagtgggggaatcagcttgggcattgttggaaagtctccaaagcagaccttcatgtggtcaaaggcaactcccactttctcgctgaagttggggctgaagagggggaccttggcatagcgcctggcctgaagtggttcagcataatgaactccgcgttcatccgcatccccacgctgatggcttgggacgttgtgctgtgtgtcttttccactgcttcctcttccaaaccatcttccagggtggcttcatgtatcaggagggtggcatctttccccatccggaccagagcctcgcagggcatggtgtccccggaatagaccactttccagccagaggtgtgcaccagcgcacagccaaacgcatgcttgcagtgccgcaccagacaggtctgaaactcttccaaatcacatgttcgcaacagcgaactgatcaatctttccactgcaggactggagatctcagccccttcctgaaggcatttggcaggaatcatactgatgtggtgcaggacctcctggcactggttgtggtaactgctggagccaggctttgagctggttgggggcaaccaccagcaaagggtgaagcggctttcccaaagatgccaaggcgcgttctctctgcagcaagatacttggcaagcccgtgtggtgatctgcgtgcaggtgggacacaaacacagcagccagggtgcccaggaccctgtccacctggtctccgtaatgacggcacagctgcccaaatgtgccctcaccacagtccagtagcagagacgtgtcggggcttatgttgacaagtgtggcactgacatttcgaatcttcatcgggatggcagaccctgttccaaggaagatgatttctgggtactgacttcttttctctgctggggctgggccgtcctgcgcactcctcctgtactcctgcnanctctgctggaagttgggaagctgcagcgcctcaactatg

SEQ ID NO: 14475 - DNA, 1984 bp, Homo sapiens
ttttccatatttaacatttattttactttgctgagcaagaatcatagacagctactaccacggctgcttcgtttggacaaaaataaccaggaggcatccacgggattagttacacggtatcaacttaccaccacagcagaatcaacagtgactcgctaattaacagaaccgtttgctagaaagcactaatctagttatataaatactgaaataggtcacatgcaaaacactataaacgttttgtgtgatgtacttttagttctccatagttttgtttggtataaaggaaatataatttggctgtgacgtagactgttgatgtaattttcaagttttcctgtatggggaaagttgccctgactgtggcccttttcaaggtggagcctccaacaccacgttggcagattcagactccgtgaacagtctaaatgagcaagtcagctgaatgccactttcagatggaagggaaatgagatggaaaacaacaaaaaaggactgccaggcggaacagtttccaaccgagttttcgttgagtgaggatccagcagccatcaaactcaaacataggggcccgcagggaaactggaggaaatacttcagagacagcaaagctgaaggtttctgtgctctgagggatccgagagtggatgtcccactcctgtatcctcagccagacacagaactagccagattcattagggaagctcggatgctctcattctataaagtaaggcccccagcagggcacgtacatacattgggaaagaagaaaccccttagtaccatgttggtcaaaggcaagagagagaattctatttcccatctggaatgtcattcttgtttacttcttccaacagtgaaatacttccaggccttcgaaaggccatcctttggacacatgtaaaaagctgtcttgttggcccgttattcccactgacccgtctgagtgatcacccaggagcgcggcggcagcaagcagagctcaccggatttgggacaaggattttaaaggcagctacaaagctgagctctatttgctgatgatagtctctgttcagctgtttaaaatgactgtctgactcaccatggtaatttttcacaaattaaagacacattttgggttgtgcaacagtgttctcatctttccaggcaggcagattattttaatgctgttatacagggaattgggactctcggattttcttttttaacctttttatgcctttcagtaggggaagtttccttgaaagagagctgcaaatctcttaagtatcaacgtaaagaagccgatgacccaattcgggaggtggttcaagtgttctgttcgtttacaaaagcacagaccacgaccatggacacacccagtggaagtaaccacacccggtgtgttcctagaagctcacctgtgacagttcaacaagaacttactattccagaaaagtattacacaaagttatttaaaaaaatgtctgtacaatcgttaacacggccaagccaggccttgggttttgcctcttggtgtccagctgtgctggggaatgccatgaagaccagcggctggaaactgacttgggcatggagaagagactgagggagagggaggggacagcacgactgagcaagggcacagtgctggctgcctcatgggctccaggctccttctgccaggatgaggaagaggccccagagcagcgttacacaggaaatcaacctatttgctaatcctttggaaaaacgtttgtttctggtccacaaacagaaaatccaaacaggatggcagctccttgtgagggtggaggggagggcaccagatgctgtgcggctggaaattccaaggtgctcagaaccaggcgcctgcacctctccttatgccagaccacaatcttcaaagaggccggcagccacattctcgatggggaggtggacaaggccaccctgggagttgctttcaatctgtcctcacaaatcaacaactccccgccac

SEQ ID NO: 14476 - DNA, 1501 bp, Homo sapiens
caccaatttttgtcatttccaaatacatcctgtccattggctaagacaggattacctaggcttgctgaactttgggcatggaagaaagactggaaactagttggaaacaacatacttatggaaaagaaagtcagcctttttatgctgttaacagatgtcagagtgattctcaccaaaaaaagttaaactatgttgtaagcagccaactgtaaatgtctattttgaaattccctatgctaagggtgccttagaatcattgtgtctcttttatccagctttacttttttgctccacatttaatgcaaaagaatcttgtgatgtctacaaggagagaagtgggatatattttcctttctgacacataatttggggcaaaaaaagaaagtcttaagagtttatcttttctctgctgatacggttgcttgataaagacatctcaaaatgtttaccaatgttttaagaagctttgtgtgatattcttccaaatgtagttaccaaatataatatggtagaaaaggctaaatcatacttaatgagcaaattgaagtaagcttttaaagtatatttctcttttggtgaaaggccaatggagacattgtgaatttaagtgaacatttgcctcaagatgttaactataaacacactgcatacaattttcttctgaataacaaatgaatgcttattgctgcatgatgtaagcaaaagtcattatttttcctattcatttgaaataagttatggcttaaaatgcttttggagtttatttctcaaaattaaaatctggtcacatgagctttagtttgttttctggtttaaaaaataaaaaggtttctcttaacagtatttccagtgacaatgcaaggtaagtatatcaaaggaaatcaacagttgtgcttgggggctttttgttatgggatattgatttcttgttttttttccgtaacattgtctgctgcaatttaaataaaaattacgacattttaagatatttcatagacaaaccaaacaaaaatatatgtttttactttaaagtgaatgtttttctcttcagctgatctaaaaatgaaagcaagatatcttatgtagaaatattttgataatatttttacagtgagctttcccatgtttttatgtcttaagtttctttgctgcgtttatgtaggttgcacaagaacttttactcacttgtaattgtgcctcagactttttgaaagtctaccttctaaattgccccgacgatctagattctacatgttaccattggtttattcttgtgctttctgtatttaaaactttggctgtactaagcaaatgcaaggttataatttagctaatagtagtttacagacaattctgatgattatgatttcatttggtttaactaagctgtactagttcatttcataaggaaatgatactgtagacaaatgtaaataaagcctgtgagtcaagcatcaagtggtgtttgttagaaataaactagagatttttaaaaaaaaaa

SEQ ID NO: 14477 - DNA, 526 bp, Homo sapiens
  misc_feature (1)...(526): n = a,t,c or g
gggaagacagagcaacttagcagaataagaggaaaaccctctctcttacctcctgaatccaaacctttctggttcctgcaggctgcctgccatctccaatgttcccacactgccctgatgttaaccttcttcactggttgcctcctcccgtagggtgtcctgggccgggtctatgagacagtggtgatgttgatgctcctcactctgctggtgctaggtatggtgtgggtggcatcagccattgtggacaagaacaaggccaacagagagtcactctatgacttttgggagtactatctcccctacctctactcatgcatctccttccttggggttctgctgctcctggtgtgtactccactgggtctcgcccgcatgttctccgtcactgggaagctgctagtcaagccccggctgctggaagacctggaggagcagctgtactgctcagcctttgaggaggcagccctgacccgcagggntctgtaatcctacttcctgcttggctgcctttagacatggagct

SEQ ID NO: 14478 - DNA, 1170 bp, Homo sapiens
ggaacaggggcagtgtgaggagctgctatggtgctgagtttcctggtagagccggccgagctgaggcggtcgcggccatgaaggtgggggagtggtactaaggatcaagtatactgttaaaagaaaacaaaaacccaagcatgaggaaggcgggtgccacgtctatgtgggcttcgtgctgtgggctgctgaatgaagtcatgggaactggagctgtcaggggccagcagtcagcatttgcaggagccaccggtccattcagatttacaccaaaccctgagttttccacctacccaccagcagctacggaagggcccaacatagtttgtaaagcctgtgggctttcattttcagtctttagaaagaagcatgtttgctgtgactgcaagaaggatttttgctccgtttgttcagtcttacaagaaaatctccgtagatgttctacttgtcacttatttacaagagacagcatttcagcgccctcagttaatgcgactgaaggtgaaggacctgcggcagtatctcattctgagaaatatacccatagatacttgtcgtgagaaagaagacttggtggatctagtactgtgccatcatggactaggctctgaggacgacatggacacaagcagtctgaattcttcaaggtcccagacttctagcttttttacacgttcgtttttttcaaactatacagccccctctgctactatgtcttcgtttcagggagagcttatggatggagaccaaacatccagatctggagtgccggcacaggtacgagggggtaactaattacacccagggcccggcacgcttattcttggccgtatatggtggggcctttagtgcttgatgacttctgataaacttcaagtcatgtgctggagtgaagcttccacacccagctgaactctgcacttaaaggctgtcctgatgtatagtgtctgctgaggtgctaggtggctccaaagtctgctgtctgaagggtcccaaaatagctcatcagtctcttggccttagttaatttctctgtcttacacagttaagacactaactgttgaagaaatggctgtgaaaaagtaagcacatacacatttggtagtggttatgtggttagtgcacgtgttttcagtgaccacagaaaaccaatcagtagtgtaagttagg

SEQ ID NO: 14479 - DNA, 1082 bp, Homo sapiens
  misc_feature (1)...(1082): n = a,t,c or g
aacttaagatgttgaggtgactgttggatatttgaatccagagtttgggaaagaggtctgtaatatcccttggtatgtgttaaaatccttaggccagtacatacagttcacttatttaatcagattgttaagataatagttttctccttatcctatatgtagagccaatacaatttatttttcaccttagggagttaggaaaagagggaacaaattcaaccccaaataagtagggaaataaggaaatttcatggaaataggaaacaaacaatggagaaattttaaaagtgaaaagttggccttttgaaaaggtaaataaattgataaaccccaagcaagacttaccaagnnnnnnnnnnnnnnnnnnnnnnnnnnnnnnnnnnnnnnnnnnnnnnnnnnnnnnnnnnnnnnnnnnnnnnnnnnnnnnnnnnnnnnnnnnnnnnnnnnnnnnnnnnnnnactgggagtcctcagtaaacttacagtcatggcagaaggcaaaggggaagcaaggcaccttcttcacagggcagcaggagaatgtgtgccagcaggggaaaatgccagacgcttataaaaccatcagatctcgtgagaactcacccactatcatgagaacagcatgggggaaactgcccccatgattcaattatctccacctggtcccacccttgacatgtggggattatggggattacaattcgagatgaaatttgggtgcggaacagagccaaaccatatcactgggtgatttatcgaagaaaaaaggtttaactcgattcacaggtctcgcatgggctcgggtaggcctcgggaaacttacaatcatggcagaaggcaaaggggaagcaaggcatgtcttacatggcagcagagagaanagcaagaagggaagtgncacacttttaaatcatcagatctcangagaactcatgtactatcatgggancagctgggtagaattgcccccatgatccaatcagctcccaccaggtaccttcctccacatgtgannnnnnnnnnnnnnnnnnnnnnnnnnnnnnnnnnnnnnnnnnnnnnnnnnnnnttccaaccctggcccct

SEQ ID NO: 14480 - DNA, 2043 bp, Homo sapiens
tggacggtccctgaacacctaggaatgcacacacctgtgcttctcagacactggagacgcaaaggcaggaggatgcagtccggtgagaggacacgatctttacctgcacaatcagactgtaagcccagcagagaaccccaggggcgcctgggtacttctcggaaggtcatcttagttgtggtggggaagacaaagaaataagcaaacaagaaactagagttactatacaagaaactctcctgagtttgtaaaccttaagcataagggattcagttgacctttttcttggttcatcaatctggaaagaacttacataaagcgccattgacactgtcacctgggagctccatgggccgtaagtctttgacagccaatttaatttgaggtcagagggccttgaggtacacagtcagcactgtttgaacacttttcctgaaagcaaaactcacagctccctgcgccctctgacaacactagctatttctgccagagtaagaacttctattactattttattattgttcatatgtcttttgatgatggttgtgtgacagggggaagcaggatctatttggtttcttccccctccccccaccccttcctttttgtctctctttttttttctctaagaaaatcaccagactagtttttccatcttgagtaatttcttatgtgggacagttttgatcctcattttgaaagcatgcgtgcgcacatgtgtgttgcctgtggtgccaggtgagacaggtggcactaactccagctgcttggaaggcatcccaagggcgcatcttaaagttggagcagacctcccttttccagcccctggggccattagaccacgtgctggaactagcattgtaaaattcccatcccagttccactcccctgaagtgaaacccttttttttttgtgacagtaaatcttaaaaatcattgtctctttatgaacatttcctcagtttcttctctgctgaaaatgtaagccatgctactttttaatgtattttgaattttgtgctcattggaaattgatatgctaatgcctcccccaccccccgccagacttttctttttatactttgtcttgtttttactggggtaggctgggcatgcgtgcgtgcctttagggcagcattttaaacctttgccaaaattgcaaatgggacatgtacattcttctgctccatcctacttaaacacctatcagctatttttatctttaaccttttctgtatgtttgaagtgtgtggggggtgtgtgtgtgtgtgaaagagcgagagaatgatgtcatctaaagttttttgaagaattatttggttttcattgcattaaaattctatcactcccagctttgttttcatttaaaaaaatatacaaagagctttgtaaatacaacacattttatttctcccccttcttttaatgtacagcttttttgccacttatatatacttaaaatattcccatgaattatgtccagttcttcttggaaaaaaatttggttttgaatgaacctgcaaagcatcctgcagcgtgagcagctcctccacctggagctccgaagcatcttctcaggccaaagcggcattacccgtgaatctgtcttctccgccacagcatggtttgaggcgcagtctgttaatatagctgggccatgtcagtgactgttgtgtttgtggggtcaggtggggggcatggtatttgcaaaaaaaacaaattatggctaatttattattttgttgcagtggggttaactgtaaactcatgtaagagtctgtgatttcctcattggttgatctctctctctgtaatcctcattgcaaattttcaccaggacagcgttttttgattagaggggagctctggcacagtatgctttaatttagcaggaacttccagatgatttaaattctcgatgctgtgatgacacacatatgatctttcgtgtttctgagcgactctactttcattgtttgccagcgtggctcgttgctgttgcccaataaagcttgtgtacgttctgcaaaaaaaaaaaaaaaaa

SEQ ID NO: 14481 - DNA, 1792 bp, Homo sapiens
tgcggccgcgccccttcagctagctcgctcgctcgctctgcttccctgctgccggctgcgcatggctttgggcgttggcggcgctgcgcggcggatcgagccggcctgcggagccggtaccagcagttgcagaatgaagaagagtctggagaacctgaacaggctgcaggtgatgctcctccaccttacagcagcatttctgcagagagcgcacgatattttgactacaaggatgagtctgggtttccaaagcccccatcttacaatgtagctacaacactgcccagttatgatgaagcggagaggaccaaggctgaagctactatccctttggttcctgggagagatgaaggattttgtgggtcgggatgattttgatgatgctgaccagctgaggataggaaatgatgggattttcatgttaacttttttcatggcattcctctttaactggattgggtttttcctgtctttttgcctgaccacttcagctgcaggaaggtatggggccatttcaggatttggtctctctctaattaaatggatcctgattgtcaggttttccacctatttccctggatattttgatggtcagtactggctctggtgggtgttccttgttttaggctttctcctgtttctcagaggatttatcaattatgcaaaagttcggaagatgccagaaactttctcaaatctccccaggaccagagttctctttatttattaaagatgttttctggcaaaggccttcctgcatttatgaattctctctcaagaagcaagagaacacctgcaggaagtgaatcaagatgcagaacacagaggaataatcacctgctttaaaaaaataaagtactgttgaaaagatcatttctctctatttgttcctaggtgtaaaattttaatagttaatgcagaattctgtaatcattgaatcattagtggttaatgtttgaaaaagctcttgcaatcaagtctgtgatgtattaataatgccttatatattgtttgtagtcattttaagtagcatgagccatgtccctgtagtcggtagggggcagtcttgctttattcatcctccatctcaaaatgaacttggaattaaatattgtaagatatgtataatgctggccattttaaaggggttttctcaaaagttaaacttttgttatgactgtgtttttgcacataatccatatttgctgttcaagttaatctagaaatttattcaattctgtatgaacacctggaagcaaaatcatagtgcaaaaatacatttaaggtgtggtcaaaaataagtctttaattggtaaataataagcattaattttttatagcctgtattcacaattctgcggtaccttattgtacctaagggattctaaaggtgttgtcactgtataaaacagaaagcactaggatacaaatgaagcttaattactaaaatgtaattcttgacactctttctataattagcgttcttcacccccacccccacccccaccccccttattttccttttgtctcctggtgattaggccaaagtctgggagtaaggagaggattaggtacttaggagcaaagaaagaagtagcttggaacttttgagatgatccctaacatactgtactacttgcttttacaatgtgttagcagaaaccagtgggttataatgtagaatgatgtgctttctgcccaagtggtaattcatcttggtttgctatgttaaaactgtaaatacaacagaacattaataaatatctcttgtgtagcaccttttactgtaaaa

SEQ ID NO: 14482 - DNA, 687 bp, Homo sapiens
gggaagcctatcagcgagtggctaatgagcaggagatttatgaaggttccagacagttggctgctgagtgaaccctctgtccctgagctaacccacatactagcagaggaggaagtcagagtcggccactaaccagatgcaaatccccacactcttccccttagcgcttgaccgtgcctcccagctgctaactggcctcaaatgatgcatgtgaggtcaggattcattgagtagaatgcccccaccaagtgcctccctctttaattagaggtcatcatggaaatggtcgggatatttacgtggtgcctggcttgagtaaaaatctgaagccagatgcttcaggattaagaccccatgctctggccttggccccacagcccagctccatgaccttctccagctgaggcaggagaatgcctacctgaccaccatcaccaagcagatcacgccctacgtccgctccattgccaaggtgaaggagcggctggagcccaggtttcaggcacccgtggatgagccagtcagagagtctacagaacacgcacgacgacagcaggaacaacgcggcctcagccaggaataatccaggaagtgtcccggaaaagagagagaagacatcagagcctaaaggaaacagctgggctccgaacggcctctcagaagagcctctactgaaaaatatggatc

SEQ ID NO: 14483 - DNA, 439 bp, Homo sapiens
gccagttcacgctcttctgtattgaaagactcggaatatggttgtttgaagattccaccaagatgtatgtttgatcatccagatgcagataaaacactgaatcaccttatatcggggtttgaaaattttgaaaagaaaatcaactacagattcaagaataaggcttaccttctccaggcttttacacatgcctcctaccactacaatactatcactggtaaggagcccacgaccagacttcatttctgggaaaatgagactttgtgttgatctcatcgtgttggccttgtaaaagtgatctatgcatgtacagtgttcatgcttaatattcaagggatggggcggggaacaaaaggaatagaaagaattcttttccttgttatttggggagcacgtattgctttataactttggttgttgggagtatggctatcatata

SEQ ID NO: 14484 - DNA, 597 bp, Homo sapiens
ggtcgacctggtgttctgagccggaccctttcttcgtctctgaaaattgttgaggaggccttgcgagcaggagtggtaaagaaaatgatgaaattcctgaagacaggaggtgagactgcatcacgttatgctataaagatactagctatctgcacgaatagttatcatgaagctcgggaagaagtaataagactggataaaaagttgagcgttatgatgaagctgctcagctcggaggatgaggttctggtgggcaacgctgccctctgccttggtaactgcatggaggtgcccaacgttgcgtcttccctgctaaagacggaccttttgcaggtcttgttaaagcttgcaggcagtgacacacagaagacggccgtgcaggtgaacgcaggcattgctctggggaagctgtgcacagctgagcccagatttgctgctcaactgagaaagcttcatggcctagaaattctcaactctacgatgaaatacatcagtgattcttgagagagacagggtttgtgtgcatttggggaacacacagatgcacaccgtgtgttgttcctatgctaataaagacctttgatgtatccacttcag

SEQ ID NO: 14485 - DNA, 1198 bp, Homo sapiens
ccgggctggagctgtcctgggggagcttgtttgcggcacggctgctgctgccactgctgtgctgggggcccggtcgccaggcaaaaagccctcccacgtttgaggggagtcatgagccgtttcctgaatgtgttaagaagttggctggttatggtgtccatcatagccatggggaacacgctgcagagcttccgagaccacacttttctctatgaaaagctctacactggcaagccaaaccttgtgaatggcctccaagctcggacctttgggatctggacgctgctctcatcagtgattcgctgcctctgtgccattgacattcacaacaagacgctctatcacatcacactctggaccttcctccttgccctggggcatttcctctctgagttgtttgtctatggaactgcagctcccacgattggcgtcctggcacccctgatggtggcaagtttctccatcctgggtatgctggtcgggctccggtatctagaagtagaaccagtatccagacagaagaagagaaactgaggccagcattatcacctccaggactttctcgttttccaccttgggccatcttcttccttcgtcgtctctcctctttaatttcttttctattccatcatctgcccttttattcacttttagcctctttttttaatttttaaaatttaaagatatgcatactgaaaagtatataacatgtacgtacaatttaaagaataattttaaagtgaatactacgtaactccatccaagtcaagaaattgccagcttctcggaagcccactgtgtctccttcccctacctgcaacctcttccaggctcccttttccagccttcccctttttcccttttattttcatgccttgatttgacttgtgtggtgggaacatgtgaactatgaaacttaaacctgctgcccacccagagcagctgtgaccaagggctgcctcaaggggttgtccacgcaggttgggctcctctctgctgctggacccaagactctgaaccttccaagggacaggcagttcttctaagaagggctcccctgtgtgtgagcaagaccacagctctccttctatctacagatgcatgagggttggaagagtctgggctgtttttagaccttctggtcagctgtatttgtgtaacaacttttgtaataaatagaaaaaccctctgctctgaa

SEQ ID NO: 14486 - DNA, 1094 bp, Homo sapiens
gcgctgagtcgagctgggcaggagatgagcctagcggccctgaagcaacacgacccctatatcaccagcatcgcagacctcacgggccaggtcgctctgtacaccttctgccccaaggccaaccagtgggagaagactgatatagaagggaccttattcgtatatcgaaggtcagcttccccttaccatggttttaccattgtgaatcgactaaatatgcacaatctagttgaaccagtgaataaagatttggaatttcaactccatgaaccatttcttctgtatagaaatgcaagcttgtcgatatatagtatctggtttatgacaagaatgactgtcaccgcatagcaaaactcatggctgatgtggtagagagaggacacggcgatcccagcaagctgctcgggacaaacagagtcccagccaggccaatggctgcagcgaccacaggcccatcgacatcctggagatgctgagcagagccaaggatgagtatgagaggaatcagatgggtgactcaaatatctccagccctgggttacagccaagcactcagctctccaatctgggaagcaccgagactctagaagaaatgccctccgggtcacaggataagtctgctccatctggacacaagcatctgacggtagaagagttatttggaacctctttgccaaaggaacaaccagcagttgtgggtctggattcagaagaaatggagaggttgccaggagatgcctcccagaaagagcccaattcattcctaccatttccctttgagcagttaggaggagcccctcaatcagaaaccctgggtgtcccttctgctgcccaccattcagtccagcctgaaatcaccaccccggtgctaatcactccagcctccatcacacagtccaatgaaaagcatgctccaacctacacaatcccgttgagccctgttctcagtcccactctgccagctgaagctcctactgcacaggttccccccagcttacctcgaaacagcaccatgatgcaggcagtgaagaccacgcctagacagaggtctccactcctgaaccagccagtccctgagctaagccatgccagtc

SEQ ID NO: 14487 - DNA, 2902 bp, Homo sapiens
ccgcagagggccggggctacggggcagccccgggcgatgaggggccggcgttgaccgggaagagcgggcaccgcggcagtggctccgaggggacccgcgatggcagcgccctgagaggaggctccaggcagggcgggctgcgctggcagcggccgctgaggtgctggccggccggctggctggcgacgggggcagaagcgacgagaggcgcgctcggcacccgcacccccgtgcccccgcctcagttgtctaaacttcgggctctcttccaccgtctgcgcgcccagagtcaacaacttcttcacccccctccgcccccgcccttccctccgtcagccccgggagctcgccgcggcccggggaccaggaacctccagcgctgagatgtggccgtgaggcgttggcgggcgccgaggagaagctcggcggcgtcccggggccggagggccgtggggccggggcgcaggggcgcgagcaccccgcgcctctcccccgcctcctcctgccgtctccgccgctgcccgtgccttgcaagcagcagccggagctgccaagcgtcagggccgcggagatgtcgtcgtcgtcgccgccgggcgggggctgccagcgccgccatctcggcctcggagaaagtggacggcttcacccggaaatcggtccgcaaggcgcagaggcagaagcgctcccagggctcgtcgcagtttcgcagccagggcagccaggcagagctgcacccgctgccccagctcaaagatgccacttcaaatgaacaacaagagcttttctgtcagaagttgcagcagtgttgtatactgtttgatttcatggactctgtttcagacttgaagagcaaagaaattaaaagagcaacactgaatgaactggttgagtatgtttcaactaatcgtggtgtaattgttgaatcagcgtattctgatatagtaaaaatgatcagtgctaacatcttccgtacacttcctccaagtgataatccagattttgatccagaagaggatgaacccacgcttgagggcctcttggcctcacatacagttggtatatgaattcttcttgagatttttggagagccctgatttccagcctagcattgcaaaacgatacattgatcagaaattcgtacaacagctcctggagctttttgatagtgaagatcccagagaacgtgacttcctgaagactgttctgcaccgaatttatgggaaatttcttggattaagagcattcatcagaaaacaaattaacaacattttcctcaggtttatatatgaaacagaacatttcaatggtgttgctgaacttcttgaaatattaggaagtattatcaatggctttgcattgccactgaaagcagaacataaacaatttctaatgaaggttcttattcctatgcatactgcaaaaggattagctttgtttcatgctcagctagcatattgtgttgtacagttcctggagaaagatacaacactaacagagccagtgatcagaggactgttgaaattttggccaaaaacctgcagtcagaaagaggtgatgtttttaggagaaattgaagaaatcttagatgtcattgaaccaacacagttcaaaaaaattgaagagccacttttcaagcagatatccaagtgtgtatccagttctcattttcaggttgcagaaagggcattgtacttgctgggaatagcgaatatattcttagtttggattgaggagaacattgataaaattctgccaattatgtttgccagtttgtacaaaatttccaaagaacactggaatccgaccattgtagcactggtatacaatgtgctgaaaaccctaatggaaatgaatggcaagcttttcgatgaccttactagctcatacaaagctgaaagacagagagagaaaaagaaggaattggaacgtgaagaattatggaaaaaattagaggagctaaagctaaagaaagctctagaaaaacagaatagtgcttacaacatgcacagtattctcagcaatacaagtgccgaataaaaaaaaagcctcccacctctgccggataggcagagttttgtatgcttttttgaaatatgtaaaaattacaaaacaaacctcatcagtataatataattaaaaggccaattttttctggcaactgtaaatggaaaaatatatggactaaacgtagccctgtgctgtatcatggccatagtatattgtaacctttgtctaatcattggatttattgtgtcacttctgaagtttcacagaaatgaatgaattttatcatctatgatatgagtgagataattatgggagtggtaagaattatgacttgaattcttctttgattgtgttgcacatagatacggtagtctgctctgtatatttttcccttttataatgtgcttttcacactgctgcaaaccttagttacatcctaggaaaaaatacttcctaaaataaaactaaggtatcatccttacccttctctttgtctcacccagaaatatgatggggggaattacctgccctaacccctccctcaataaatacattactgtactctggaatttaggcaaaaccttaaatctccaggctttttaaagcacaaaatataaataaaagctgggaaagtaaaccaaaattcttcagattgttcctcatgaatatcccccttcctctgcaattctccagagtggtaacagatgggtagaggcagctcaggtgaattacccagcttgcctctcaattcattcctcctcttcctctcaaaggctgaaggcagggcctttccagtcctcacaacctgtccttcaccctagtcccctccctgacccagggatggaggctttgagttcccacagtgttggttgattacagagcattagttgttcat

SEQ ID NO: 14488 - DNA, 972 bp, Homo sapiens
tttttttttgatgttttaaaactttaattatgaaaaagggataaacaattcaagatgggggaaccagccccaaactggctggggcagagagagaccagtccccagccatacaatagcagcaaggggaagaccccaccccacagatgctctgccccagcccttcccagagaccttaaataatttaaatagcagggatggcggagggcaggttgccctggtgtctgcccaatgctaagatgaggggcagcgccggcccagcctcagcctcgggcagggctctggggctgctgcagggctgggaggtatttgagggcagcagccccatggtggcgggacaagtcctggtggaattcgtccttgagggcctggaggcagtcacgataggtggggctggagcggaagcgggagatgtccaggcttggagcgtggggcagatggatggtgaaggcctcgggcagcaccaggagctcatattcctgggcatccagctccacaatgtgggccactttgttccagccgaagcccacaaagcgaggatcatagcggggacagtctcgtggcaccaccacgtagggttcatagttggccgcccattgcacacggtacggggcctgagctcccgccagcgggcatagtctgtgggtgcgtggcctcggggcatcgtggtacctgtgcagcagggtcgggtgggagccaggctgaggctaggagctcgtgggtagtgggggccagtgtgggcaagtgagtggagtgggcagagaagtagcctctcctacctgaaggtgtagagagtgcccgcatccagcaaggccaacagctccaccttggaatgggggaagctgaagcggtagcgcagggtctcaaatgccggcaccaccagtgctgccttgcgccggctgcccagccccagctgctcaatggaggccctgaggtagtcgtagagagaataggcaggcaggaagtcaatgtcac

SEQ ID NO: 14489 - DNA, 1677 bp, Homo sapiens
  misc_feature (1)...(1677): n = a,t,c or g
gatgtagcgtgtgccccagggtcgttggcagcccttcgtgctagtgggtgaggcggccggggtgcaggagtgcccagccctttcctccggggaggagatcacacagtcgtagcgcaggaagcggcagccacctccctcatagtccaggcccttgtggttgagggcaacgttgagggtgaaggtggatgagtcgtggtgtggccgcagagacggctgctcgtctggccggtagcgaaccacaaagttcatcaccgcccggcgccttggtgtggtaaccgggaaacaggctctcggtcatggggcccacatacgtccgcagcagctgcagccactggtcctcgtaccccacctgcttcatgtggatgtccacggtgggcacattctcgtagcctccagccagccttgaatcctcatgccggccgcctgaccactggccgtagtgctccatctctgccaccagctcatcacacatttgttctgacagcagtgggaaccagtacacgtccgggcatggctgctccacgattcctctccccttccagggcccggctgtagttctcgtggatgtactgctccttccagtcgacggggttgtcgaagatctgccagaggtcggggtgcaggtgctccgtgtcgtatctggaagtgcccaggagccggccaaattcatgctgattgctcagatagaggaagatgcccttgtctcgaaagctcttactgaaggccatgtccgggtctgtgtcactgcccgagaacacatcctctggggcagctccatccgcagggtatcaccccggatcacataggcctgggagatgtatggtacattccacacacccagcntgttccgctgcaccagctccacgtagtcctcggagcgggcgtagtactcagtcnggctcagggcgcccccagaagttggaccacagcttgccgtggcgggacagcatgggggcgatcaccttcctgttctcctcaatgaggatacgcagggtctgcaggttggtgaggacagcgtcggcgtccaggctgaagtagaactcacactcggggtcctgccgacacaggtccatggccatgtccctggcctcgcctgggctcagagcctcctccggccccacgagcttcacagctgagaagtggtcctggagctgcggcccangagtcagcgatgtggggttcatggaagacctcgttgttgtgcaggaaaagggtggaccctgtcggggggatagtccaggagtagcagccgctgcaggaagcggggcagaaacggagtaggctgttccacaaacacggccagaaacaaccgggggggaggctgcccccccgggagtgtcctccggtcctggttgcagaagccacagcctccctcaggagtccagccattggggacgtagtttcccaggtagttgagctgcagcttagtgggaccgtttccatggaccacaatggggagcgtgtcgtaggccacgttccggatacgcacacggttccgatcaaactttaaaaccacttcatctaaagccccgttgaggttctgaaagatccgagacttatgatccagattaaggctgagtttctccctcagtcctgggtccaggtagagccgtgtgtagaacagctggtcgtcgtcatcatccttgtacttccactggcgcacgatttggtggatgg

SEQ ID NO: 14490 - DNA, 4482 bp, Homo sapiens
gtggaagaggaggctatggtggtggaggtggtggcagcagaggtagttatggaggaggtgatggtggatataatggatttggaggtgatggtggcaactatggcggtggtcctggttatagtagtagagggggctatggtggtggtggaccaggatatggaaaccaaggtggtggatatggtggaggtggaggatatgatggttacaatgaaggaggaaattttggcggtggtaactatggtggtggtgggaactataatgattttggaaattatagtggacaacagcaatcaaattatggacccatgaaagggggcagttttggtggaagaagctcgggcagtccctatggtggtggttatggatctggtggtggaagtggtggatatggtagcagaaggttctaaaaacagcagaaaagggctacagttcttagcaggagagagagcgaggagttgtcaggaaagctgcaggttactttgagacagtcgtcccaaatgcattagaggaactgtaaaaatctgccacagaaggaacgatgatccatagtcagaaaagttactgcagcttaaacaggaaacccttcttgttcaggactgtcatagccacagtttgcaaaaagtgcagctattgattaatgcaatgtagtgtcaattagatgtacattcctgaggtcttttatctgttgtagctttgtctttttctttttcttttcattacatcaggtatattgccctgtaaattgtggtagtggtaccaggaataaaaaattaaggaatttttaacttttcaatatttgtgtagttcagtttttctacattttagtacagaaactttaacaaaatgcagtttcgaaggtgtttccttgtgagttaacaagtaaagaagatcattgttaattactattttgtatgaattttgctaaagttaactgtaaagaaacacctgctgacttgcagtttaaggggaatctattctccccatttccaaaccatgataggaatgggcgctgacatggggagagaatagataatttgtgtgtttgcaatgtgtgttttagataaataggattgggtatttaaattagcatttgtgaatttaatagcattaagattaccttcaaatgaaaaaaaatctcaaaatttctatttggtttttgtgcattttcttttaaaatgtaatcatatgattttagtgtgttagacttgctgagtcctagctgtgtttagaacatctctattctacatttaccttggtcaaatttgaactgctgccataggttttgggtgtaaagaatgtttactgccctccatttaaattctgaaaagggatggtggatgttttccctctcctacgttagaaaccattcttaaaaacttttgaaaatatagaaccattaagcctgctatatctgagcaaattaatgggtaccttttttttcttatttaaagcacaagaggcccataaatcttgagttactttaaattcttttttttgatacaagttttcagagcaagagaataaaaatcatgtgttattaaacccctaactggctggcatgctttcctgtttgtattctatacattttgctggatgaaaccaaggatagttcaggtataattgtccaaaataacctaactgcagcagaaatgtagcacagttgcttagtacaggcttctcacttcctacagacctgaattcaaatttggatagtctgagttcttaaattcccaaagaacacactgttatttcttgtgtatatttcaacataaatcatgttgttaccaatttgtttggaaggccctggttgagaagagttttagttaataaggtcatatatacatatattaatataaaccaatgtctactgttttgctccagctagtgcttacagtttcattcgagccctgagtatgtgccctgctgttactctctttggtagttgaacgttgaattcaagtcttttgttttaagaagtactaagcaaacaagcaataaaaaggggaatggggtgtgctagtgtttgaatatgctctcttgttgctctaattctgtgcctctgtgcattaatatttggatgcatgcaatgccagcatggaaattggtcttcacacatactgcagttttccagaaacattcacaaaccaataaatgtaacagacattccatttgttaatgggcatatatgtgaaaagcagtgtagaaaataggctaatattagaaaatggttaagtcctaaataacttcaagtgtggttatataatggacactgtcaatgttcataacttaaacctgggtacctggtcaaaataatgcttgggaaacattaaaattgagctaaattgtctcaagttcttttattcatataaataaagtttaaaggaatgggggagattaacatttcctgttttatgtttgtgaaattgtttgacacaaccttgacagtatcctttaatggcatgaggttaattgtactgttaaccaactttctatgttctggaactagtattatagtgaaaacatttacagtaagttgatgtttacaacctataagcaggtgaaatctgtgtatgtgacctgtttataagttgtattagcttagctcttgtgaacagtgtggaaaagtaagccatgaggagagcgatttaaccacctttaaaggacctaagatgtgctttttaagcacagtgtggatcacagaaactcactaagacaggacttcagcagccttttgtgtttggacaagtcagcataaataaagaatgacaaggcagcagcaagagcttcaactacagagaagtgaaggcataagatactatgatgatagtgagcaactttccaaaagctagttaaatctgcttattacaactgaaatatcgaagaaagtctagcaggaaggagctcttcgccttttggaacatcaatgagagatagttgccacagtcactaggtctagcatttagacctgcaaggaagggcaataagcattaggtaaggcttgaatttgaattttttcactaattaaagagtaattttttgtaaagcaaggtaagagtaatctttttgatttgcaggttgaatgagaaccctacttgcctaaatgaggaatgtctttcctaccatctaaaatacgaaggtttctggctgggtaaggtttgtagttgacagtaaaacctgatgacaccatttgtttccctgcaagtctacattacatatttcacaactttgtccctctctagtaggcacattggaaaaattcttcaactgaaaactaccttggtaccatgtcctacacgttttaaaccttagttttaaaaattcccctgcgaaatagccataagtattcatatcaagtcagttgtgactccttgtgtatacaattcattttttgtgtcttcaggggtaaactcaatttttggtaaagtggtttcagcttttgtgaaaaccgtttttgtgtgtaagcatgacacacaacagactcagtaagctgcccatcctcatactaggaaaacaccttcaaaggaacattaaaagttaccaggggccagggcacagtgggcttcacgcctggtaattcccaggcactttggggagggctgaggcagatggatcccaagtccagggaatttggaggacggagcctgggggcaacatagtgagagcctgttcaacaaaaaatcagaaaaattagctggggcttggtgatacacatctgtagtccccagctatttgggaggctgccttgatatcaggcagtcgaggctgcagtgagctgactgccccactgtattccagcctgggtgaccccatctcaaagaagaaaagttaccagatgtcatgggtaaaggttggtcttcaagtggcctcataagttgtcttgcatttaaattcagggaattcattggaccaataggttacattttcgttccttttttgttttggttcatctgttaagcagtgggggcctaattactgctcctttgtaaaaacacattttcccaaagaacactgaattaccgttcaaactggttgttgatgggtaataagggctgtttttgctgccccaaaagggcttaacaatttaggcggatagtttacttaaaaaaaaaaatcctttggagacatactgaaaatgcaaactagtttctaaattatcaattccctacatgaagaagcagtttgccagagtttagtctcagaaaatgactggttggctctatttaaatcagaacccaatttctacgcgtgttgaataaggtaacagcctttgatgaatttccttcacaacatggttttagtgaagcaaacattttttttttaagggcattgttctttctagtttatttctttttatgaaataaaattattttatttaaacagttccattgtcgtttctgaaaactacagtattctcagaagttgtagcagcagtaaaaaaaaaaaagttgttctataagtgattggggcagatttaactgattt

SEQ ID NO: 14491 - DNA, 301 bp, Homo sapiens
  misc_feature (1)...(301): n = a,t,c or g
gtgaatctgtctcagcaactgaagatctggcacctgatgcagcccaaggggaagacaattctgagatcaaggagctcttataaaaagaatgagcctctaccagcctgcaatggccccgcccaggcccagccctctcctaccactgaaagggccaagtcccaggaggaagttctccccagctccacaactccatcaccaggcggagccctgagcccttcagggcagccttcatcatctgtcgacgcggccgcgaattccnnnnnnnnnnnnnnnnnnnnnnnnnnnnnnnnnnnnnnnnnnn

SEQ ID NO: 14492 - DNA, 412 bp, Homo sapiens
tgaccatcttccaaaacatttccaacttgagggatgtcttctacagggaaatgagcaagctgaaccacaatctctacgaggtgatgagcaaactggagaagcaacattccaataaagtctttgtggtgaagggactgtcaagcagcagcaggcgctctttagtcatttctcccccagttcgaacagctacagtctccagtcctcttacctcacctactagtccctctacactttccttgaagagtgagagtgaatctgtctcagcaactgaagatctggcacctgatgcagcccaaggggaagacaattctgagatcaaggagctcttagaagaggaggaaatagagaaggaaggatctgaagcaagctcctctgaggaagatgagcctctaccagcctgcaatggccccgc

SEQ ID NO: 14493 - DNA, 350 bp, Homo sapiens
ggcaactgttgtggctgccgcattgctcccgccgggctgtagctgagcgcggagcccgtgggggccggtgagtttgagttcctgagatctagttggtgagagacatgatgttctaccggttgctgtcgattgttggaagacaaagagccagcccaggatggcagaactggtcctctgcaagaaacagcgcgtcagctgccgaggcgctttccatggccctgcccacccaggcacaggtggtcgtctgtggaggtggaatcacgggcacttctgtggcccatcaccaatccaaaatggggtggaaggatattgtccttttggagcagggcaggctggctgctggctctacc

SEQ ID NO: 14494 - DNA, 538 bp, Homo sapiens
gaaatttagcaaatatgaatgaaaccttaatttttgtgaatagtatgaaatcacagcataagtgttcacgtttttctttcttgtgtctaaaggatctctcttacaatggaagttgacaggaatattataaatattataaatgtctttgttgcataactttcaaatttctggtcgtgaatagttttcagcttttaggtctgttatttgagttttgtaggtgtactttgagcttgatcaggtacagtggaaatgttacatgttatgttttagttatgactaccccggaaagatggggaaagataccccctcttaaaattgatttaggaaagaaacgccaatttagtatctggggaaaggacaccaaccacatttttaaaaaatgtgtagtggcttccccaattaagcttaacgtaaaactttttaagcattgagaattgtttaccataaaatatagtttcttgagaataagttgctctcttttatgtttcagccagaaagtccatgtatatacagattacagcaggtccttgaataatgt

SEQ ID NO: 14495 - DNA, 532 bp, Homo sapiens
ggagcgggtccgggtgctgcagggtgtccggctgtctgaaaacgtggtgaaccgcatgaaggagcccagctctccaccccctgctcccacatcttctacctttggccttcaagatggcaacttgagagcccctcacaaagaatccacactgcccaggtcggggagcagtggtggccagcagccctcagggatgaaggagggtgtcaagaggtatgaacaggagcatgctgctatccaggataagctcttccaggtggcaaagagggaaagagaggctgccaccaagcactccaaggcatccctgcccacgggcgaaggcagcatcagccatgaggagcagaagtcagtccggctggccagggagctggagagcagagaggcagagctaagacgccgtgacaccttctacaaggagcagctggagcgtattgagaggaagaatgctgagatgtataaactgtcttcagagcaattccatgaggcagcctcaaagatggagagcacaataaagccccgcagggtggagcccgtc

SEQ ID NO: 14496 - DNA, 325 bp, Homo sapiens
gttgagactgcatagggctcgggggaaaaaaaagaaaagaaagaaacaaagagcatccactttccacctttcacacacaacacagccaattaaatcaaaagattccactatcatagcataataccccttgagttttcaggcagataagacactcagacacaccttgcttgttatagaacaggcccaaatgagacacaataaaacgatgattccatgttaggaattccctaccaaccatatcctcctctttttggtgactagattgtaaaataagtcaattaagagttcataacggaagtgctgaagcaaccgcaaatccagacac

SEQ ID NO: 14497 - DNA, 1687 bp, Homo sapiens
gtcttggggcccttcaagctgtgaaattgtccttgtactctcagctcctgcatggatctgggtcaagtagaaggtactggggatggggacattcctgcccataaaggatttggggaaagaagattaatcctaaaatacaggtgtgttccatctgaattgaaaatgatatatttgagatataattttaggactggttctgtgtagatagagatggtgtcaaggaggtgcaggatggagatgggagatttcatggagcctggtcagccagctctgtaccaggttgaacaccgaggagctgtcaaagtatttggagtttcttcattgtaaggagtaagggcttccaagatggggcaggtagtccgtacagcctaccaggaacatgttgtgttttctttatttttttaaaatcattattattgagttgtgtttttcagcactatattggtcaagatagcccaagcagtttgtataatttctgtcactagtgtcatacagttttctggtcaacatgtgtgatctttgtgtctcctttttgccaagcacattctgattttcttgttggaacacaggtctagtttctaaaggacaaattttttgttccttgtcttttttctgtaagggacaagatttgttgtttttgtaagaaatgagatgcaggaaagaaaaccaaatcccattcctgcaccccagtccaataagcagataccacttaagataggagtctaaactccacagaaaaggataataccaagagcttgtattgttaccttagtcacttgcctagcagtgtgtggctttaaaaactagagatttttcagtcttagtctgcaaactgggcatttccgattttccagcataaaaatccacctgtgtctggctggaatgtgtatgtatgtgctcactgtgggctttaggattctgtcccgggggttagccctgttgggccctgacaggaagggaggaagcctgggttgaatttagtgagcagctggcctggggtcacagtgacctgacctcaaaccagcttaaggctttaagtcctctctcagaacttggcatttccaacttcttcctttccgggtgagagaagaagcggagaagggttcagtgtagccactctgggctcatagggacacttggtcactccagagtttttaatagctcccaggaggtgatattattttcagtgctcagctgaaataccaaccccaggaataagaactccatttcaaacagttctggccattctgagcctgcttttgtgattgctcatccattgtcctccactagaggggctaagcttgactgcccttagccaggcaagcacagtaatgtgtgttttgttcagcattattatgcaaaaattcactagttgagatggtttgttttaggataggaaatgaaattgcctctcagtgacaggagtggcccgagcctgcttcctattttgattttttttttttttaactgatagatggtgcagcatgtctacatggttgtttgttgctaaactttatataatgtgtggtttcaattcagcttgaaaaataatctcactacatgtagcagtacattatatgtaccattatatgtaatgttagtatttctgctttgaatccttgatattgcaatggaattcctactttattaaatgtatttgatatgctaaaaaaaaaaaaaaaaaaaa

SEQ ID NO: 14498 - DNA, 5091 bp, Homo sapiens
ggagagaacatggtttaattaaaggcaaagctgattttcagcagctgcaggtcttgcacagacaaaaacaaaaaacaaaacccagaaaacaaaacaaaaaaccacaaaagaaagtttactacacaaaaccagtttctgataaagattctcctccccctcattactccacagtgaggatgataaggcgaggaatcccgccccaagagtcagaaaacattccaaacaccaaattctcatgcagaatggggctttagataggagctgggtattactgggagtgagatggtaaacctggttagcttgtctagggcgcaagaatcagtgacagttcaaacactggaatgttgcagctgcctgaatgcaggagctcaaacacacaaactgggtaaaggtagtaggaaaaaggcttgggaagaggagagaaaggtggacacagggaaggggctgaagagaagcacaaaaggtttcatattgccattgggtagggggcttcaccttttcagacctttcaaaaaaacaaaacccaaacaccatgtcaaactaaaagagcaataatgtaagcatacggggcggggggggctccaaccactctctctgaagagcaatgagcgttatctcaccccttttcattgctggggttgcccagactgcagtgacaactggggctcctggatgtgctttgctctacagctgtcttccagctcttaagttccacactaactccatacactcgcacacacaacccctcccctctgggacagcagatgggcacgtgtgtgtacacaaacatacagacacacaaaggagagacctcccagaaaataaaccctaccactagcacagcaattgaacaattagattgtttccataatttccccttaaaatattacttttccaggaaatgactaacagaaatgctgtccttctgtttctacacaagaacattttcagtcctctttcctcctaataaatatcatacaaagagtttattttcctttctttcgtctcttccaaaatggacgacgtcgtgttttcttctgtgcctgatgggcacatgtccgtgctgccttgaatttcactctgaaagtggaggctgggagactgcagctgggccaggggccctgggccctctgtgggctaccgccagatactgctgcttccttcctcttcagactgtcttttgggccccaactgctggaccccatgctgttgccttcttggggagatgtgatgttgcacacattaggaataaaaacaattactagcatacagcattgggtaaaagaagggatggagatggggcaggagggtgggaagtagaatgggggcacaaaaaccaaccaaagaaaaaataaccacactgaaagcttctacctattagaacgtgtcaggctgtgaatggactagcctgccttctgtgagactgcttgctgtgcgactgtaaaatgtacaggaatcaaaaacgtaatttgaaatcctacagcagtctacctgctagtccagcccagcaccaccacccacactgtatcctcgattggggctcgagcacctacagagtgaagggcattccctgctggagtctcctggccagaggaaggcctaccagagccttctgacaggccttgaactctcccttatggaacatttccactggctgaagaggtcggttccccatcctgtcaccaccaacctctcacaggagcagtgaacggggctttccttgctacacactgactagaagcacacctgtgtatggaagaattcagtgtgatattttactactgagagtaataataataaaagatgtttaatttcaactacattctcagtcagcaaagcaatcattaatggattcctattttattccccaaagaggaaaaaaggactgagaagttcccattggcttctcccatctgccttcccttctcagctttcacttcccatgtggctggggacatgcacgatggagaaggtgagaggcggtgataccaagtaactgagtgagataaacagcagttcctctctctctccctccggaaggccccggggggacggagagttcctgatggatttttctttttgttgcactgcgaacatttcgtgcacactcagcgggctggtggaatacttacaccctcttgacagcgagaaacagaaaagagggctgccacctgcaggggactgtgtgggccagtcctgcaaacccaacatgccatggtttatggagccttcattcccaggttgccactttggcctcagtgtggagggttcatggtgccttgtccccgttgctgtttctgcttctgctgcattaacagctgctccagagcagaaggtccaggatgcatcatggaactggaccagatagactttaggctttccatgaggacagcagaggaatcctccatggaagggccatggcctgtccaggtgccactcggagtgctggcctgatgccaactgctctcagaggatgacgttgctgagagataatcaatgccaaacccacccatggctggcttatcagttttccaccgatctgcagtccttctatccctgttatctggagtcccaatgggtccaaaattggagaatggaacagaattatggttgtgtgttggaggagagctgggtaggctgcttgggttagaggaatgaggagactggctggctggtgttgaatgatctgaactggcaggaagtgatggagaccacggagtcccttcaaaaagggaatacagagatgtttcctggggggccattgagggactgagttctgctttggagctggatgtcaggtttttcccatatacctcattgaacatactattatttgggtatctttcctgattgagagagaatccggtgagggacaggaaagaggatgaatgtgacatgagctctgagggcttctccaataaggatttctcaaacggcattctgggtacaggatcctgctctggacggaagattcctggtgaccgtttgcccctgcggtctatgtttgcttgctgtgccattacagatctgttatcagccatgctgtaggaagaatcccagtagaattctgggaccttgacttctgagggattatggttatatggctccatgggaaaaggcttcatttttttttctagaggctgctgctgcattacaggaggttgcaatgacggctcaaacagttttatggggtcttgggtctgaaggtagtagggctgtttcacaggcataattttccctaatgggccttgaacctgagggggattccacagctgtttggaggcatctgcctgttgatactgctggaatccagagtggtgaggcgggcttttccccaaagccggcacagcttttgtaggggattgttgttgctgagttagagcttgaacctgcagctggcttgtagactgtgctgttggctgagctggtaaagatgtaaggggttgctgggaaggtggctgtgattgttgaggtccctggttcattggccctggtccagagggccgttgcctggctgtaaggaatgtgggaactgtttcccagcttgcacctggtttcctgctggagagtgagctgtaggctgaagaaaggttcctgggacagaaacaccagctgggaaggtgtaacctgagcccatagaaaatgccacaggcggggggataacatatgttgggggcggaaaccctggcctgctgggaagaggagggaaggctccagggtgatgaatggggatgaactgggagttacttgcttgagttggggtttgagttacaggtgtttttctggcttcagacactggagtctttcttagttctgtctgggattttacctgcactgccacattctgctttcctgtttcctgtaacttttctaaggtgcatttcttggtttcagttttcctcttgttgttgtccttctttccatcattcttagttacagttattcctttgctatagtcccttctcacctctttgggaggaaaacttcttccttggtctctgttcacttctcgtgtcttaatgttttctttgaaggtaaccactggcttctctcctgtgtcacagttgttgcttaaatttcggcttgtagatagcactgattttagccctgggctcccatctgcagccagcgactctatcacagatgtttcttgcagaatgaggttctctttggcttcactggggtcttccagtattaattctgggatttctgtgataaacaacaatttccctacctcattttcacactgaatcagccttggctgattatcagcaatccatttgcctatagagatcaagcgttgctgtcgtattcgtcgttgctggccttctttgtcccctgtaataccctggtgacctttggaaaaatccaagttcctgaaagaaggtctcaatgccaaaaatccttgtaattcaaactcctctggaagtggtgtcgcactaatacttgagaggtcctcttcatggggatggaaactattcagaagagaaatcaaccagggccaaatgtactgtctttcatccaccactgcctcctgaaagaccctgggtctgagtcttagccagtccatggagaccttgactgctggaagaggataggcattgtaggactcctcctgagactcattctgtagaggacacttgcacaggatgccaagaaaagacataaagagggccagcaactgtgtccaacatagctgctcatcttggctataagtgtgctgctcggtttcattgctaaagtcacgaaggtgatgaagttgaaacaggttaatgacagtgacatgaactaactgctgagagttgaaagctttttggaatagcagcctcttaaactgttcttccaatttctctcgaagaggggctcaacttttccaagctcttactcaggtacacatgaccgtggaatttaataaaggccttgatgaagtcagaaacaccccacttggttttcacctcatctcggctttccagtgctttagaaagtgctttttgcagattagtggaggcagctgggaaagggaacttcacagcaatgcttcattggaggggacaagctgagctgcatgcctatagtaggactctgcctggc

SEQ ID NO: 14499 - DNA, 2068 bp, Homo sapiens
  misc_feature (1)...(2068): n = a,t,c or g
tgagagttcatcttgacttttattacacactagacatatatgaactaatcagagatgtgcatgattctctgtactcttaaaatcacaggaaatataattccacctccccctttttttctgatattggagtagcatttcagattttggagattagcttagggcaaagtaaaagtcatggaaggcagtgtataaataacattaattatgaagctacttttcagaagctagtagtaacttgcttagtaataaccacaaggttgtacagcgttcacaatgctggtattaatcagctacatattttgaacatctactgttactggataccaaagaaagtgagttatttaagaatcttccattcttgttataagcttcctatgatccagtaacttctcaaaggcctttggcaaaaagcgtaagtccttggctttttgagaatttttttttgtgcacccaggaaatgtaaatgcaaccatcactgcttcttgtgcaggtgtgtgctttaacaatcagggctgcttttggtatcaagagtatgagctattaagagtttctaaaaatactgacctaactagtcagttgcctccaccttatatactattcaggcaagtccttcggaaagtatactactgtattcctagtccaaaataaggtaggcatgaatatattcaaccttctttgcacatacaccaaggaagaatttaaatttctgcccttgggtagttttgtgttaggcaggaggaaaaacatattcaattttgaggtaggtaatcaacaggaatgagaaaaatacaagacagtctaagatctaacctttgcctacctttctaggcttatgtcttaatactcccgaagtggcacaagctaggttatttctagttcttaacagactactgtgcttttgcacaatgctctcaagttcagcttaagcagtgctcctctggaagttcacaccctaactgaactgtcactcttctttattttcttctagaatcctgggattatctgaataataaatgccatcacattgtacttttaatacatacttcatctctttcacctagtgcactatgaattactacgaggaagaatctgtgtgcctatcttcctgtcttcagtgatgatatactgaaagaatggtgtaggagtagaaatattctatttaccagtgctaactctttttcacaaaaccaggcagagatctgctcatttttactctgtaaacttggaaaagttaatttattcaatctctattttgtcctaactagactgatcatcttattactaagatgaaggaatctattgcaagttacacgttactatcatcccctggtatgaaagagcgattttgaacctgaacatataaaagcattcaagatagtgtctggcacagtagaacagggattaacaagacactggacttgatcctcaaattatttaagccacagaagggattcagactctggccttttgattgaccaccttttaagattgcttgaaaagacaacgcccttcctattagcacagctgaagccaatccagaactaaacatcagcacacaaaaaataccagatagatggaatcaaaagactctgaagccaaaaggaggctagggagagcaactgaacttagcaagctgaggacttcagtgtccatcatccgatcctgccctgtaacaacaggtctatatgatagagatattccatctnnnnnnnnnnnnnnnnnnnnnnnnnnnnntaacacagaacagaaaaccaaatacatgttctcatttagaagtaggagctaaatgatgannaactcaaggacacaaagannnnnnnnnnnnnnnnnnnnnnnnnnnnnnnnnnnnnnnnnnnnnnnnnnnnnnnnnnnnnnnnnnnnnnnnnnnnnnnnnnnnnnnnnnnnnnnnnnnnnncaaaataatctgtacaacaaaaccacttgacatgagtttacctatataacaacctgcacatgtacccctgaacctaaaagttaaaaaaataaaagggatagtctatctgatgcttaaattgatctttaataaccttctgcatcccaccacccc

SEQ ID NO: 14500 - DNA, 2231 bp, Homo sapiens
gcgtccgagctccttcaccagcttggtggtgggcgtgttcgtggtctacgtggtgcacacctgctgggtcatgtacggcatcgtctacacccgcccgtgctccggcgacgccaactgcatccagccctacctggcgcggcggcccaagctgcagctgagcgtgtacaccacgacgaggtcccacctgggtgctgagaacaacatcgacctggtcttgaatgtggaagactttgatgtggagtccaaatttgaaaggacagttaatgtttctgtaccaaagaaaacgagaaacaatgggacgctgtatgcctacatcttcctccatcacgctggggtcctgccgtggcacgacgggaagcaggtgcacctgggtcagtcctctgaccacctacatgggtccccaagccagaagaaatcaacctgctcaccggggagtctgatacacagcagatcgaggcggagaagaagccgacgagtgccctggatgagccagtgtcccactggcgaccgcggctggcgctgaacgtgatggcggacaactttgtctttgacgggtcctccctgcctgccgatgtgcatcggtacatgaagatgatccagctggggaaaaccgtgcattacctgcccatcctgttcatcgaccagctcagcaaccgcgtgaaggacctgatggtcataaaccgctccaccaccgagctgcccctcaccgtgtcctacgacaaggtctcactggggcggctgcgcttctggatccacatgcaggacgccgtgtactccctgcagcagttcgggttttcagagaaagatgctgatgaggtgaaaggaatttttgtagataccaacttatacttcctggcgctgaccttctttgtcgcagcgttccatcttctctttgatttcctggcctttaaaaatgacatcagtttctggaagaagaagaagagcatgatcggcatgtccaccaaggcagtgcctctggcgctgcttcagcaccgtggtcatctttctgttcctgctggacgagcagacgagcctgctggtgctggtcccggcgggtgttggagccgccattgagctgtggaaagtgaagaaggcattgaagatgactattttttggagaggcctgatgcccgaatttcagtttggcacttacagcgaatctgagaggaaaaccgaggagtacgatactcaggccatgaagtacttgtcatacctgctgtaccctctctgtgtcgggggtgctgtctattcactcctgaatatcaaatataagagctggtactcctggttaatcaacagcttcgtcaacggggtctatgcctttggtttcctcttcatgctgccccagctctttgtgaactacaagttgaagtcagtggcacatctgccctggaaggccttcacctacaaggctttcaacaccttcattgatgacgtctttgccttcatcatcaccatgcccacgtctcaccggctggcctgcttccgggacgacgtggtgtttctggtctacctgtaccagcggtggctttatcctgtggataaacgcagagtgaacgagtttggggagtcctacgaggagaaggccacgcgggcgccccacacggactgaaggccgcccgggctgccgccagccaagtgcaacttgaattgtcaatgagtatttttggaagcatttggaggaattcctagacattgcgttttctgtgttgccaaaatcccttcggacatttctcagacatctcccaagttcccatcacgtcagatttggagctggtagcgcttacgatgcccccacgtgtgaacatctgtcttggtcacagagctgggtgctgccggtcaccttgagctgtggtggctcccggcacacgagtgtccggggttcggccatgtcctcacgcgggcaggggtgggagccctcacaggcaagggggctgttggatttccatttcaggtggttttctaagtgctccttatgtgaatttcaaacacgtatggaattcattccgcatggactctgggatcaaaggctctttcctcttttgtttgagagttggttgttttaaagcttaatgtatgtttctattttaaaataaatttttctggctgtggcatttttcttgacctggtataatgaaagtatttcagatatttgagtttaacccttttccagaaagtaatacatgatatggatttatttatgcattaaaagagcaaatttaaagaaaaaa

SEQ ID NO: 14501 - DNA, 1009 bp, Homo sapiens
ggttttttccttttattcataaaaacaaatttgcaacaatttattaaaaatcgataccatgcagtaggggtacgagaaattcctcatttacatttgattctggcagttccagtctaatttaaagcgttttgtgcactaacatcattggaaaatgccttcaggccgaagcctcttcagaaatggacggtgtgtttgctgcatataaaagaacagaaccattaagtagctagagtcacttctgtgggtcttgttatttgcgaggaaattaaaaaaaaatgggtgaacctacagtatcagtaagacagagaatgtacttcgtgagttaacctagaagacagcgcacgctcaggagtcacaaagggttacagacgcacaggctcacctccgacagtccaatacttttgtttgttttcctgctatgctggaataatatttctacaggtatttttttttgtgtgtgtgtatacattatgtacaattaattgtctctttccctttgaaaaattaatgtggtcctttaaattaaatttggttttggtgaaatcaagaaagcaagtaaatactggtaatacacagtgagtgacaacaccgatttttagtgcctaaacagagaatgacttcaacttgacctgtgatgtgttaacatttttttttccctaaaagctacagtacctccataacctctctttggggaaggggagcagaaagctatgcctacgtgaaatagggtgctttgaaatgttggcattggtaagattcctgtgggcccttttgtcaaagcctggtggagaaaacagtttattcctgactgcagtggttctgggaagagattattgcctgcctgttgaagctgccaataggtttctttagggagtgagcgagctgctcagttgtgcagacatcctggacattgtcattcaggcctttcttgagcaaagaatgaacctgtctaggaatgtcagaaaagtcactgggagcctccctccagcccggatgttctgggtagagg

SEQ ID NO: 14502 - DNA, 319 bp, Homo sapiens
gcacaaccaaaaaggtggaggcaaagagagggcaaaacgggattcctaggtcactcattatacttggggccttcagatcctgctacttttatcccctaggaaccttgaagaaccagtgttcttgaggacagaaaaatcaaggtatcagaatttgttcggtagtgctcctgcttggggctgtagggttagtgatggccaggaggtggttacagcctactgtgtttctggtgcccactgagctttgctggagcagctggaacaagtaacagtcacacaactcatgttgttatcagtgatgtctacattatcaggcggtcaa

SEQ ID NO: 14503 - DNA, 2566 bp, Homo sapiens
cgcgcactccctttgcgtctcgggctcgcgcgcgttgcccgcaccggaagtgactgagcttgcaagttcccctgtctcttcaggggaaactgaggccggcttgttcgggagagacggcgcgacagtcagccaggtaggccggcagccaggtaggccggcccgggtccgcggcgcgaactcggccgcgaagagctcttgcgtctggaagctaccgggccgatgaagggggatgtggcccccacggctcgcggggctcgcagaatcttatcttggctttggatcttagaagagaatcactaaccagagacgagactcagtgagtgagcaggtgttttggacaatggactggttgagcccatccctattataaaaatgtctcatagcaaccgggagctggtggttgactttctctcctacaagctttcccagaaaggatacagcttgagtcagtttatttgtgtggcagagaacaggactgaggccccagaagggactgaatcggagatggagacccccagtgccatcaatggcaacccatcctggcacctggcagacagccccgcggtgaatggagccactggccacagcagcagtttggatgcccgggaggtgatccccatggcagcagtaaagcaagcgctgagggaggcaggcgacgagtttgaactgcggtaccggcgggcattcagtgacctgacatcccagctccacatcaccccagggacagcatatcagagctttgaacaggtagtgaatgaactcttccgggatggggtaaactggggtcgcattgtggcctttttctccttcggcggggcactgtgcgtggaaagcgtagacaaggagatgcaggtattggtgagtcggatcgcagcttggatggccacttacctgaatgaccacctagagccttggatccaggagaacggcggctgggatacttttgtggaactctatgggaacaatgcagcagccgagagccgaaagggccaggaacgcttcaaccgctggttcctgacgggcatgactgtggccggcgtggttctgctgggctcactcttcagtcggaaatgaccagacactgaccatccactctaccctcccacccccttctctgctccaccacatcctccgtccagccgccattgccaccaggagaaccactacatgcagcccatgcccacctgcccatcacagggttgggcccagatctggtcccttgcagctagttttctagaatttatcacacttctgtgagacccccacacctcagttcccttggcctcagaattcacaaaatttccacaaaatctgtccaaaggaggctggcaggtatggaagggtttgtggctgggggcaggagggccctacctgattggtgcaacccttaccccttagcctccctgaaaatgtttttctgccagggagcttgaaagttttcagaacctcttccccagaaaggagactagattgcctttgttttgatgtttgtggcctcagaattgatcattttccccccactctccccacactaacctgggttccctttccttccatccctaccccctaagagccatttaggggccacttttgactagggattcaggctgcttgggataaagatgcaaggaccaggactccctcctcacctctggactggctagagtcctcactcccagtccaaatgtcctccagaagcctctggctagaggccagccccacccaggagggagggggctatagctacaggaagcaccccatgccaaagctagggtggcccttgcagttcagcaccaccctagtcccttcccctccctggctcccatgaccatactgagggaccaactgggcccaagacagatgccccagagctgtttatggcctcagctgcctcacttcctacaagagcagcctgtggcatctttgccttgggctgctcctcatggtgggttcaggggactcagccctgaggtgaaagggagctatcaggaacagctatgggagccccagggtcttccctacctcaggcaggaagggcaggaaggagagcctgctgcatggggtggggtagggctgactagaagggccagtcctgcctggccaggcagatctgtgccccatgcctgtccagcctgggcagccaggctgccaaggccagagtggcctggccaggagctcttcaggcctccctctctcttctgctccacccttggcctgtctcatccccaggggtcccagccaccccgggctctctgctgtacatatttgagactagtttttattccttgtgaagatgatatactatttttgttaagcgtgtctgtatttatgtgtgaggagctgctggcttgcagtgcgcgtgcacgtggagagctggtgcccggagattggacggcctgatgctccctcccctgccctggtccagggaagctggccgagggtcctggctcctgaggggcatctgcccctcccccaacccccaccccacacttgttccagctctttgaaatagtctgtgtgaaggtgaaagtgcagttcagtaataaactgtgtttactcagtgaac

SEQ ID NO: 14504 - DNA, 764 bp, Homo sapiens
ttttttttttttttgcagcttaaaccaataatcagttttattttttctcatgtgatagaagtctggaagtccagggctgctgccagacactcaaagaggccacaggggaggccagggtcgctgtgagctttctgcagtcacttccttagactgtggttttcatatgcacggtcgttaaggtggatcttccaatactaggtactggatctctttgcaaggtgaaaagtaaagcaaagaacaaaacatacagggaggaattcatgtttaagaacgatccccattcaagagctttctcagaagcccatgtggtgacatctgctgatctgtcagtggccagggctgtgagacatggatggtaccagctgcaagaaaacctgtaagagattttttaaaatttagattagcacaccttactaatctgacagaacctggattctcttgatattggaagaagatgagagtggataccggggaagtcactagaagtatctgtcactcttggctggacagcaggctgcaaacatattaccacttgatggaggcatcatgctctggtcgcaatccgtgtgcatcaggtaccagtaacaaagtggtactgagaaatatcctcatgtcacatagatctcaatatgccattggtcaaggaggttgtccagaaggaaattaggacgttatcaaggatgaagctatagtaaaaatactataaacaaacctttcttgatgaggcttaagggttatttagaggagtataaccttaaaaataa

SEQ ID NO: 14505 - DNA, 1740 bp, Homo sapiens
tttttttttttttttaacacctcaaactcccctcagccccaatatcctggcatctttagtgagtcaggacaatcctaacctagaagcatatatgcctgggagcttcctggcctcaaaggaataaatcttttcacagcattcacaggactgaaaaataatataaataggattcctacagtaaacaagtattgtttctgtttcaaaaccatcctgcaagcataacaatcagctggtcctaaagcctgtaatacgtacacaggtcacagggcagacaggcaggcaggaaaagggattttccccagtgcaggctcctttggttctgcctcagaggcacttagaagtctaggccctgggttaacagcaaccccagagtctgcttggatatggttctagttgtatgcttcgtaagtgaacaccaaaataccataaaggtagaggagagtgaacacataacccacttgcaaataagaattaccttgcaagattcctatttttttatcttaacagtctatgcgtatgaacattttattcctataatataacttttatataaaaataggtcatccttatgactcctaaaccatttggtaagtaaaactgatgcttcaagaagatgcaggtttttaagtttgcagttttacattcccctagtacatccctgcttactcgggagcacaaagcttggttgtaagaaattgtgatttggaagtagagaaaagcaaggaagtccaacctcaggagtgtctctgttactaagaggagagtgagatccagggtgtgggagatgatctgaaggtctatgggtggggagtgccacaggaagaagggttctggtcggagttaaaggaggatatatctatatgctgggagatgagctgaattcagaacacatggaatgggaacaattctccccatactgcgtttaagccaaattaggctaaaatgggggtgggactagcaaaaacctacaatggaaattcccatttggtaatatacattccagcccttcacgttgtgacaagcccataaaacctgcagaattcacccaaataattctggttctattagatcctttactgactattttggaaattcaagcaatttgaattcagaaatactgatttcaacttttaatcagacttctttggtccttttttttccccctaaggtcatttccgttccacctcttcaatcatttttttcatttccacagcactgaattatgaatatcaagtcctggataacttcatatactaaaaatatctcttcctcatctttaactctttctccaacacctttttccagtcatccatcttaattcatggcaccacaattttcacaaatgtagaactggacttttagggactgtccacaagagttaatttggccctaccttgctctcatttatttcatgcttcaatatgaacaaaattgggtttttgttaataggcagggagaaaactctgacttcccttcaagattattccagatccttcctaacaaagcgatactgtttggtaatacaatattatgggggctggctttcctgagtaagttcaaagcagccattgagggattacctgaaggacctttcttaattgctcctggtggatcaaaggggctcttttccttgacctaccacaaccaggggatgagaagcacacagtaagcataaaactggtcatcccttggagagatatgtgcctgctgtggatctggggacacatctggtggaagtac

SEQ ID NO: 14506 - DNA, 326 bp, Homo sapiens
aagcattgcttgaggttgcccagagacttatttttgagctcgctgtaagactgagaaatcacgtagtccttcctgaaaccactaagaggaaaaatgtctgtgacactgcatacagatgtaggtgatattaaaattgaagtcttctgtgagaggacacccaaaacatgtgaggaactggaagaggaggcaacagtatttggggcaagaagtttgaggatgaatacagtgaatatcttaagcacaatgttagaggtgttgtatctatggctaataatggcccgaacaccaatggatctcagttcttcatcacctatggcaaacagcca

SEQ ID NO: 14507 - DNA, 1471 bp, Homo sapiens
  misc_feature (1)...(1471): n = a,t,c or g
caccagatcatctagtcaatatatagaatcattttggcagtcatcacaaagtcaaaacttcacagctcatgataagcaacgttcagtgctaagctcaggatatcaaaaaactccccaggaatgggccccacaaactgcaagaataaggaccaggatgcaaaatgacagcattctgaaatcagagcttggaaaccagtcaccatcaacctccagccgacaagtgactggacaaccccaaaatgcatcttttgtcaagaggaaccggtggtgcctacttcctctgatagctgctcttgcctctgggagtttttggttctttagtactcctgaggtagaaaccactgctgttcaagagttccagaaccagatgaatcaacttaagaataagtaccaaggtcaagatgagaagctgtggaaaaggagccaaacattcctggaaaaacatcttaatagctcccatcctcggtctcagcctgctatcttactgctcactgctgcccgagatgctgaagaagcacttaggtgtctgagtgaacaaattgctgatgcctattcttcttttcgtagtgtccgtgccatccggattgatgggacagataaagctactcaagacagtgatactgtcaaactagaggtagaccaagaactgagcaatggatttaagaatggccagaatgcagctgtggtacaccgctttgagtcatttcccgcaggctctactttgatcttctacaaatattgtgaccatgaaaacgcagccttcaaagatgtagccttagtcctgactgtcttattggaggaagagacacttggaacaagtctaggcctaaaggaagttgaagaaaaagtaagagattttcttaaagtcaagttcaccaattctaacacacccaactcctacaatcatatggacccagacaaactgaatggcctctggagccgtatttctcacttagttctgcctgtgcaacctgaaaatgccctgaaaaggggcatctgcttataagaagtgagagagaagaaaaatcatgtcccaagttctgagaattgttcacactttctaaccagagacagaattcagagctctttttgaaagaactagtttctttttaaagaagttaagtgcttacataaacatggaacatataaatcattcattcaacctaattatctgtgatatgagagaatcatttcagtttccattgagagctctgttaaaggtatcttaggagtgcagattatatgcagttccttagagaaatctgttttgattctgggctgagttattacagttatggtatgaccagtgagagcgatttgtgtcctttcttatgaaccttcctgattttttaacttagatttctcactaagtttcctgagttattagtaagattggctccctaaatgtaaccagggatttttccattatggttcccttttataaccattttaggtgtggagttccnttagc

SEQ ID NO: 14508 - DNA, 447 bp, Homo sapiens
  misc_feature (1)...(447): n = a,t,c or g
ggtgtnnnnnttganacttttgacnnnnnnnnnnnnnnnnnnnnnnnnnnnnnnnnnnnnnnnnnnnnnnnnnnnnnnnnnnggcacgaggcaccatgagcttcaatccctgaactttaaataaaagttggaaagtaaaaaaaaaccaaatgtnnnnnnnnnnnnnnnnnnnnnnnnnnnnnnnnnnnnnnnnnnnnnnnnnnnnnnnnnnnnnnnnnnnaggatgctaggaacatcttttgttctaatattttatttttgaccccagttcctgatacagagctcctaaatcccttggaatttcctgggtgacaggtgtatctttcattctaatgaggtgactcttggtgggcttctggatcacttcaggataggaactggccaccagaaagagcaggccatgattagagggttgaaactttcagaccactaccctcatcttcacag

SEQ ID NO: 14509 - DNA, 2622 bp, Homo sapiens
atgctagaacccagcgcaggagtaaattgaaagaatcacttgattctggaaaccaaaatggaggaaatgatgataagactaagaatgctgagaggaactatttaaatgttttacctggggaattttatattacacggcattctaatctctcagaaatccatgttgctttccatctctgtgtggatgaccatgtgaaatcgggaaacatcactgctcgtgatcctgccattatgggactccgaaatatactcaaagtttgctgtacccatgacatcacaacaataagcattcctctcttgctggtacatgatatgtcagaggaaatgactataccctggtgcttaaggagagcggaacttgtgttccaagtgtgtcaaaggtttcatgatggaaatggcttcatgggatggaggaatttctaggacagtgcaatttctagtaccacagagtatttctgaagaaatgttttatcaacttagtaacatgcttccccagatcttccgagtatcatcaacactcactctgacatccaagcactaaacccttatagattgacatgctggcagaagatgattgttaaactctccaggaacttgtgctatgctgggaatctgtcaagcaaaagatgcccagaaagagaacttgcagctcaatccacaaatcaagatacatgtgtgtgaaaccattccaaaaatttatatactgcacaaactggtgatcaacccctaacttaaacacttaaagtctctttatgaatttctctttttctcttctctgtgttacctgtgaatattagtaatctaaaactttttatttatcacacatggacacttgggaaaggaaacttgattatatttacatggaggcatttgactttttcaagaggcttgactcgtctcaggtgcaatccttaattaaacatacaaacaaaattttccttttactttctttgccaaaacaaaatgtaaaagcactgaaatatacattgcaagtacaaatttcctgtgaaaatctttttatagaaacacaaatgtataagacaaatgtgcttgttcttttaaattctcctgtttcagaatctctttttaatctactcctaaggatgtacaagttagagtcagaagacgttttggattttttccctctctctcatcctcccgctgtgcccttgcacttgcatattaataacatttcatggactgggaaatagtgttcttttttgcaagcttgatgtcaagttagtctaaaccagcacctggcagtattttagtgctcatcaacattgtgacaatcacacaaggaagatcatttctacatttctgtcctccctgcgttctcagcttgcttaaccattcctctacctcttgcatttttttgcggataaatgtatccccatttctgcttctgctgtttcccctccttttccattgtttttccttatggtactactttctcaggtgctacatatcatatatttgtcccatctataacatatttaaatgctataagtagtaactccattaaacaaaggcatttacaaaagcacacaggtgtttagaaaagcaatagtttcatcaattccaagttatgtgggatattgtaactgggccacaagaatgaaatgggaggggcatttggtgtcataagatggcatgtcttgatgacaagaaacaaaacgcccttcattaatatgcctcagtgtaataactattatagaaactgttggcaagcagagtgctttcctataacagaatgtgtcttaattttctactcgagggaaaggtttgtccagggtaacaacactaaaggacaaccctaaggaacacccactccaggcagtatgtccattagacactaaaactctccaaattatttgtcagggagcctgggcgattctgccaagaaggcagggtgttttgcccttagagcctatacagttctcttggagaaattgtctttcaggcaccactgttaatcactgagactgattctaatgcaaagcagggaagacagaggcagaaaccaggagagtggtagatcagtgcagcccagatatcggaatggaggagcaaagtttcattcacggatgtttgttgaatgctgctgcccaactcttcctttgtcacctctaggctattccactaagttacttataaactggtggctttaactgagggctgtgtaaaggtactatttggcatgtgaagtcaggataaatttatcgaatgtccgttttccacatgcaactgtgttacagaagtagtaaaattggaagaatcatgtttatgggtgttaccactgatggaaacacacaaacaccaagctaataataaatatataacttaaaaagctaattatatgcactgaaatggtgggaattttagtgatgcagtaattgaggagtctggagttttgtatttggaccaagaattatgagatgaggatctttttctgagtgttctaaagggcttcttgagggggagtggtttaaagcacttcatgaatgatgtgaagaaggtaccttgggctgagacagcattctaggtgcagatggcactctgttcaaccaactgtggatggaaaatattctgaaaaaaaatacaataaaaattttaaaaatac

SEQ ID NO: 14510 - DNA, 166 bp, Homo sapiens
tttgctcacaagggaattccttatggacaaagaactcaaagtcttcacatgaaacaaatgcataaatgattgctttctctgtttcatgtttcactaagccagattaaggtataactgactattcctctactctcctctcacatgtaaattgtatattcagtgaaag

SEQ ID NO: 14511 - DNA, 716 bp, Homo sapiens
ttttttttttttttttttcaggtatgcatgattttatttaaaatgtgtccaataagacttgccacttggaatgaacatttttacttctttcctcatattattagaaacagtatttcctcatttcatggagtttcttagaaagttctaagtattaacagaagagaaaaatgaaaccgtgggggagattaaataacaggaagtttacaccacagcaagggtgctcacccatcccaatttcgggggacacacaagtgactattgggtgaaatagacccgatcatgcaaatcatcgtatgatcacttggtatcctttggcagttctgacattcattgtcactagcacagatattaaaatgagtcagatgactgcagtgaatgggaaatcatcttttgcttttggtggtggagagaagacaggaacacaaagggcgcggccgtaggaccatttcctaacatcggacgagactgttcgcagctgaccatccgttgctctgagccccagagggcgcacctggtgtctacgccaccgtctgccaggggtggtcgcagtatcctctgccttccatctaatggcactggtttatctgtggacagcagcacaccacaaatcagcatcgagagcacgttttcaccaagtgggcagttgtggttttaaatcactagaacctggcaatgttaaatttgtgttttcatgagccaaaggtcatagcacaaat

SEQ ID NO: 14512 - DNA, 434 bp, Homo sapiens
  misc_feature (1)...(434): n = a,t,c or g
gctgaactacacagatgagcttctaaaactgatgcaaacagtttctgacactgtataatatgcttttgggtgatttggggggcaaccacaagttttgcgttttgactacttaaatcatcatggctataaataccaaaacgatttggatccatttatgtttgtaggataatatactactgactgacttgactgtcaggttcacaacagctagatgatatatttatgactatgtctaatagttgaaataaaatctgaatattgatttactatacccaagaggggagaaaaattaaccattgtaaatttttaaaaattttttcaaaaatgttaaaatgaggcaaatttaagtttacaaattttgaaattttcttttgaatatttatgaaattgtcagtaaacttacctaagatcctggaccttttgaantttttaat

SEQ ID NO: 14513 - DNA, 1650 bp, Homo sapiens
attcggaacgagggcggctgcggccagtctgcagcatggcgtacccggggcatcctggcgccggcggcgggtactacccaggcgggtatggaggggctcccggagggcctgcgtttcccggacaaactcaggatccgctgtatggttactttgctgctgtagctggacaggatgggcagatagatgctgatgaattgcagagatgtctgacacagtctgggcattgctggaggatacaaaccttttaacctggagacttgcccgtcttatggtttcaatgctggatagagatatgtctggcacaatgggtttcaatgaatttaaagaactctgggctgtactgaatggctggagacaacactttatcagttttgatactgacaggagtggaaccagtagacccacaagaattgcagaaggccctgacaacaatgggatttaggttgagtccccaggctgtgaattcaattgcaaaacgatacagcaccaatggaaagatcaccttcgacgactacatcgcctgctgcgtcaaactgagggctcttacagacagctttcgaagacgggatactgctcagcaaggtgttgtgaatttcccatatgatgatttcattcaatgtgtcatgagtgtttaaatcaagaggaagctgcatgaatgtaatcaacattccaactggagctctcctttgcttgtcctctttgccttcggtaatatgtataaacttacatcacgactttctcttaacagctgttgtaaagtttattactttatgtacaactgaagttttgttttagttttgataataaattctttggaactttaataagatctagtctgttacaccatttagaactttcctcagccattatcagtcatgccttattttcttgctaaaactctatgtaaatttaagtatgcaaaatgtttaagtcacattatttatttttcattgtgagatactaaaaactgttaatcagactacagctgttatctttcctctcctacaaagaatactccacacataaaaacttaggtaaatgacatagacgcacttgggtgaaataaaacaacaaaaaaggtaatccagtaatccacgtcaggattcaccttagaagtttagcacacgcccttcaaaacctgttgaataatttgattggcaaatactatctgtcaccaagtccctttttgtcatctatttaaacctttgttaactctccttaaaaatcttgtacattataagcttaactatataaaaagaaaattgatagaaaaagactaagggaatatatggaaatattaacaatgtttattttggatgaatggaattctagatgactttaattttctttatatcagtatttttcagattttctatatgctttccttttaaaatcagattttagtttttaaaatactgatatatccattttgatataccatgtattcacactttaaaaaatacacatagcagagtatcggaaagtatgtaccaaaacattgatctggctaccactgggagtcaggatcatgagttcatcttcttccttcttcttactgcttttccaaacattctccagtaagcaggtactacatttataatggaaggaattttttaaaaaattttaagctgtacactttcaagtaagatc

SEQ ID NO: 14514 - DNA, 841 bp, Homo sapiens
atgcaattttgaaaattgtgtccagaattaaaagtgcatagaaatagcctttacaattgtagcatggacctttaaaaattgttttaaaatcttatttaaatttaaaccagaagctgaaaaatagatcagctttattatacacaaaattattactgcttatctttgctcttttccttgttatcccgcaaggtttagttgagaagatacaaaatgtttacagtgttggcacttagagtttttaaattcaagtacatgaaattcagtaatagcattgccttgagctaactaggaagtaccgggaaaaaagttaaatctacatcaagtttcttttgaactttgaagtgttttctgacccactgctaactgtagcaacaaaatttaaaagaaaaaaaacatactttatctggctattataacataaactgtcacgtaggtttgctgccttcagaataccgcaatttaattgcgggaatataataatattgggactgtttcacagcacaaactcatctttacagtgttgatcaatgcatcagttaagaaataatgccacctcaggaattaactggcattgggaacatttgcctcattctcctgctatcctcttcattcacccctgccactgtaatatctataagtacttaagagacttgtgagcaaaacatactatttataacagtatatgattgatttatggcttatgtggttgttcagtttgttcccatgtaactcgtttgttttaaatattttgccagatttcttgtatttattccacatcattatgcctataatgtgccgctttgtgattgggcatttgcctacttttctttcataattaggg

SEQ ID NO: 14515 - DNA, 428 bp, Homo sapiens
  misc_feature (1)...(428): n = a,t,c or g
ttgganacccgctatgactgattacgaatttaatacgactcnnnnnnnnnnnnnnnnnnnnnnnnnnnnnnnnnnggcacgagaaaaaagtaggggtgactaacaataaaatgtcaccaaaaaaagatggaaaatagtaagaatgaggcctgaaaataggctattccatttggcaagtaagaggccattgctgatcttagagcaatttccacagaatgagaggcagaagcaagataatagtgactgagaaaaaaactattcagtactctcaggaagcttgctaaattgctaaaattttaatttgcacttattggataaaaatataattttcctaggcatctaaaaattatttttagtatttagtgcaggggaaagcatactgagaatactattttggacaaattttttgataagcactttgaccagtt

SEQ ID NO: 14516 - DNA, 1001 bp, Homo sapiens
gttttttttttttttttcattttaattaacactttacaaagtacaaaatatactgtcttttttgggggaacattaggtaattttttttctccaacatacagtacatgaatctcgagggttttgtgtttcttcaacaagaaaataagcttgagggccccggggggttagggataagatggcaggttctccccttcacccagatcttgggagcgatggaacgccgctgctgctgctgggtgacccgggcacgccaggtgagggttggagggggttgtgggcaggaagtcccctgcccccactacgatggtgggggctcctggggcagggcagaggcccctcagttacaccatccatccactcacccccatctcaggataacggaaatgattttggcatagagaaagaggagggcttgggactgttatcagctccctactcttttagagggaactctgctcaactcttcctagactgtcttctgaatacaggtaaactgaggcagtggaagggaaaccgcactggccttggcctgtcttgggacctgaacttggcctgctgttcaccctgccacctccaaagtttgggtgaggggcaggggtctccaattcttctggaccttcttccagaatgagccccagtagatgagggagtgccggcccccacaaactctccctgtgaacaccatctgcaggatgggatgcctttgaagagtcagcacgggcagccccagccccttccaatcagagctgggctgtatcaaaccagagcatggtggaggcaacggcgtgtgaattctgaggctagggataaaaataacacgttggcttttaccctgggcccttgaatctcttgctctggggggaagccgagcgccatattgtgaagacactcaagcagccctgtgggttggcccacctggggaaggactgaggcctcctgcctacagccaggccttacttagaagtgcatcctccaatccttagctaagatttcagacaaca

SEQ ID NO: 14517 - DNA, 1033 bp, Homo sapiens
gcggcacgagttttctcaagagtcaggtgttgccgagatgaaaaacttttttcagtctcggagttttcaataactgataatgaatggttctatattaaaatagcaacttctgaactttctaattcaggacatggaaaaggaaatcagtaatgccctaggccatggcccacaggatgaaatcctaagtagtgctttcaaattgcgaattactcgaggagatattcagacattaaagaactatcactggctcaatgatgaagtcattaatttttacatgaatcttctggtggaaagaaataaaaagcaaggctatccagcacttcatgtattcagtactttcttctatcctaaattaaagtctgggggttaccaagcagtgaaacgaatggaccaaaggggtaaatctctttgaacaagaaattattctggtgcctattcatcggaaggtacattggagcctggtggtgattgacctaagaaaaaagtgtcttaaatatctggattctatgggacaaaagggccacaggatctgtgagattctccttcagtatttacaggatgaaagtaagaccaaaagaaatagtgatctgaatcttttagagtggacccatcacagcatgaaaccacacgagattcctcaacagctgaatgggagtgattgtggaatgtttacttgtaaatatgcagattatatttctagggacaaacctatcacatttactcagcaccagatgcctctcttccggaagaagatggtgtgggaaatccttcatcagcagttgctgtgagaaaactttgcctggtccctctagctgctggtggttctttcacagacatttccatatacctcatgcattgtgggttaaaaagtccctgcatcacttctgttctcacaggtactgagctgtcaaaagtgcatgaaggcctctcactgttactctagtcctgacttggggtgcagagggctgcttgcaatcctgtttgtaaaggctgtgtctgctcagagctttggggcttgttcaaccccacacaa

SEQ ID NO: 14518 - DNA, 760 bp, Homo sapiens
  misc_feature (1)...(760): n = a,t,c or g
attggcccagttagttggtatggtgaaggggcaccgtactaacagatttggagactgaaacctaatcccatcaccaacacttagcaggtatatgatcatgggcaattcattcaattgcctgccaattatagactatatagggggaagagcactggatttggagtcaagaaacctggacacttggctccacacttccttagctgggtaactttgggcaaaccgcttggtctctcaagcctaaggttcttcagctataaaatgggaataatacttcactaactacctcacagagttgtggtaagaatataatcagataactggataaaaacactatataaactggaaagcgccgtacaaatgtgagagatcagttttattatcaaatcactgttttccactgcctcttgaatcggctttattctaaccaaccattacatctttctcatcttttggagtatgggtaattgaggcttgggtgtgtcatcagggactggagttatttcagctcccatgtagaggtgggagaggtggttgatggggcagtggaagttagataccagcgatgtatatggtaggacattttcctgggtcactttgacagtaccttgggaaattgtcagtccttgcagagggcctaggctgggcacaagggagaaagcgaacagttgactaagaattgaggggagggtctggagcgctactgccctcctgtcattgctgtgggtgggagagctaanacttcaggttgactggaggccta

SEQ ID NO: 14519 - DNA, 1119 bp, Homo sapiens
ggaaagggaaacaaccacataaacgcaagaaaaaatccaggaaaaagtctctcaaaaaacctgctttattcttagaggcagaaagtaacacttcacattcagatgattcagcatccagcagttctgaggaaagtgaggaaagagacactaagaaaaccaaaaggaaaaagagagagaaaaaagcccatacctctgtagccaacaatgaaatacaggagaggacaaacaaacgcacaaattggaaagtagctacagatgaaaggtctgctgagagctcagaggatgactaaatgggaaacacttttgttttccacatgactgtggatatttacagttcttactccttgtggttttgccagtgactcttgttcagcacggggcctgaggtcagagctgtcttgtgccatctgtatgttctgacagacgtcttgtcttcctattttggcgttaagcttgatccccttttctttgttaaaagggaatctggtattttgttatgaaggttttcttgaaagagattttttttttttgcaattaattacgtttagtgtagagtgcatatacagcaaattaaaggacccagaaagctggatccaatagtgacctgggtacaccaatcggaatattgaatttggggaagtcaagggctgggatccaagaggtggattggaactaatgccatgtaggatggtatgacaaggcaacactgtattgctctctgtttatatagcaggtgtcacaactaacttgtctttagccttggtgctttgatccttctatattttgaccccacaggtgtggtccggtttacttaatcaggacatgggcctaagaacaaaccttttcccttcatgataacatccatagacaacttattagaagggactagagtttttgcaaatttccctgctggatggggcctatagctatacttagtatatgcctaaacatggtaattggatagtaaatggttttctagttccattgctgtatatttgcctaaatggacttgtgttcaaattatttcttcaattgtcatagataatcctgtaccaaatggggaagaattaggaaataatcatgttgtctaatggtactctggattcagggcagcaactc

SEQ ID NO: 14520 - DNA, 156 bp, Homo sapiens
tttttttttaaatttgcttctttttacttttagatggtacatgtgcaggtttattaactagatatatattgcatgatgctgaggtttggagtacaagtgatcctgtcaaccaggtagtgagcacagtacccaacagtttttcaacccttgctcccc

SEQ ID NO: 14521 - DNA, 436 bp, Homo sapiens
gagaacaaaattttccacaggatgcccttgtgtttgcctttcacatctggattgttgtcatagtcctgccattcgcagtaatttacatttgagtcacatttctctcttgaggagtaaatatagtacagtacttccctttaaatgtcctttactcaaggagaaaaacgtatttggggtacatattttcacaaccatcctggcataaattttaaaatctgtgtgcaaatgggtggtgattgcatcatgttaggttgctcagagaatgtctttaagatgacatgattgagaattgattcattaacactgttactattttttcagagctcattccgcaaaaccatgtctgagagccaggaagtctggattcttgtcccagtgccccaaccaatgagctgagtggccttggcaagtcacccagtctgcaccagttttttgt

SEQ ID NO: 14522 - DNA, 581 bp, Homo sapiens
ggtcgacataaattgctgttgtgttccttagctgcttgtactgcatatataattgttctttgagagttatataaatgtctggatgtgaataagcaaggccgcaaaataatgttttatatcctttaaaataagtgtttgcccactttttctgtaaagggccagctaaatatttttggttttataagccatctgtaggatctcaactactgtgctctggcattctagtacaaaaacagctataagtaatatgtaaatgcgcaagcatggctgtgtccaaaaaactatttacaaaaataggtagtatgccatagtttgccagtcattactttagaacaccagttagataatactaaaacaaattatttcctttgtatggttgagtattttctgtgggttatattcctatgactcacatgataaagttaagaactgttaacagttcttcacataaggcgcgcatgagatagttaggtaaggctgggcgtgttggcctgttgctgtaatcgcagcaccttgggaggctgcagcaggttgatcgccgaagtccagagtttgaacccgcccggcaacatggtaaaccc

SEQ ID NO: 14523 - DNA, 531 bp, Homo sapiens
ctttctcagagcccagtggccgccgggcttctcttcccttctgagatgatgtcaccccaaagaagactggggtaggagtagggagcacaggggttgttggtgttttcagtgcttagaaaactgggttgtcctgcaggtgtctcctcccacccctccactcgcaacacttgctagggaatccgaccagtggtaaacacatcagcactttttggtgttcaggggtcagcacatttgttaatttaaaccacagactgcttccaggtacaaaggttcatttggacttctggtttgcaagggatgagggttaaaaaaaacaaaacaaaacaaacaacaacaaccacaaaaacaacccagaaagtatcttctagagccagccgcaagagctgtgagctgcttccaagttaggcgagctggtggtggtaccctggacataatgcaattctgtagtcagagcaatatccctggcgagagcctgacatcgcctgttaaaggtggctgcctctgaataaaggaaagcgtctgaaaggtgaa

SEQ ID NO: 14524 - DNA, 1543 bp, Homo sapiens
ggcacctgccagggcatcagtcattctcgctgggcttggctttacccctaaaatgcagcagcagcccaacccgggagtttctcaggttgcctggaggatgaggctggccctggccggggccctcctttgctaggccagatcttctgctgttagatgaacctacaaacatgctggatgtcagggccatcctgtggctggagaattacctgcagacgtggccctccaccatcctagtcgtctcccacgaccgcaacttcttgaatgccatcgccacagacatcatccacctgcacagccagcggtagatggttaccggggagactttgagaccttcatcaagagtaagcaggagccggcgtgctcaaccagcagcgtgaatatgaggcgcacagcagtatcgccagcacatccaggttttcattgaccggtttcgctacaatgccaacagggcctctcaagtgcagagtaaactcaagatgctggagaagctgcctgagctgaagcctgtggacaaggaatcagaggtcgtaatgaagttccctgatgggtttgagaagttctcgccgccaattctgcagctagatgaggtggatttctactacgatccgaagcacgtcatcttcagtcgcctctctgtgtctgctgatctcgagtctcgcatctgtgtggttggagagaatggggctgggaagtctaccatgctgaagctgcttttgggggacctggcacctgttcggggcatcagacacgctcacaggaatctgaagattggctatttcagccagcaccatgtggagcagctggacctaaacgtcagtgcttgtggaactgctgggcacgcaagtttcctggggcggcctgaggaggagtaccgtcaccagctgggtcggtatggcatctccggagaactgggccatgcgtcctcttgccagcctgtctgggggccagaagagccgagtggcctttgctcagatgactatgccctgccccaacttctacattctggatgaacccacaaaccacctggacatggagaccattgaggctctgggccgtgccctcaacaatttcaggggtggtgtgattctggtgtcccacgatgagcgctttatcaggctggtgtgccgggagttgtgggtatgcgaaggaggcggcgtcacccgtgtggaaggaggatttgaccagtaccgcgccctcctccaggaacagttccgccgcgaaggcttcctctagggccaccaggctgaggactcgccccaggacatggactggtctctcagacccctgggccaccatgtaggccaccactccaggccgtggacttccccccaacttggggacagccttattcccaaatgtctctatccttttgactggagcatcttctgcacaaccttgggagcccatccaagggttggtgaggactggtctcccgggggtgggggtctggggggtacctctggggttatagattcccccactgccccagctctgactggaccccaagtggctgctatgtaaattaaatctctccccgcgtctc

SEQ ID NO: 14525 - DNA, 755 bp, Homo sapiens
aagacggatctcgctctgttgcccaggctgtctcgagaaaaacctgcaacacgaggcccttggttgccttccggggccctcttcgtttcctaatattcataaggagaccacattggcaaacacgtattgctttatttagtgtttctctggattgcagaagtgtcagcagtgggctgagacccccagaagggcatagaggcagctgggcagcccccaggcccttgagggtaggagcagggagaagcagcagaaggaggtgatgcccctgccgctcctcccaaggccagccccgtccccacgctcccatgccagggaggggtcaggggccagaaaaggccctacatccttgagtggggcccgagtgtgcgggcaagctgtctgtcatcccaaggcctggactctggcagaggcgcttttcccacctggtggctcccagggccgattgctggtcaaggagccagatatactcttaagacatgatgtgggttttatggggctccctggctctgggagtggcagtgaggcacgctgaggaagggctgccatcttggttttgtggcaacctgccgtatgaccgtgggcaagtgccttctcctgtttgggcatctgtcttctgctctgtaacatcaaggggctgggctggatgatctctcagcgtcttccaacctctatggtctaagacggccttccccactccagcactgcctcaaactgggatgatgaggacagtaaaagggcgttcttttttttttttt

SEQ ID NO: 14526 - DNA, 1145 bp, Homo sapiens
aacagggaaggggcctctcttgaaacagtagttgggaaggaggcagacatgcaccagtgatgtggtgacaggtgctctgaaggaggtcaccaggacctgacctctttgaaggatcagaaaatacttccctgaaggactgacatttgagcctagacctgaagggtgagccatcaagctaagacaattggggaagagcattccagggagagggaggagttgtgcaaaggccctggggctccttctagctggaggaatgcaaggctagcttgtctggagcactgagaggatggcctgaactgagtggagagagacagaccaggaccaaaccatgcagaggtcaagggccacatttcaccttttcagagtgacttcaatcaaatttgtagtttgtaaaagtattttaacagctctgcggcaaagtgcaaatgaaaagtcttgatggcatggactggagcggggacagtggggatggagaaaggggaatggattgtggatgtgtttagaaggtagattcgatgtgaaggatgaatctggcttgaccttctgggtggctgatgggccatttactgagatggggcagcctggaagaggaacagaagcagggtcggggtggagggagaatactaaacttagcttgagacattttgcaataaggaagctatatctagagtgcttatgtgactcacctaaggccactcaacaagtttgtggcagaactggattagaactgcacagaaaacagccaagctgggatttgaacccatgtagtccaactccaaggcctctgcccctaaccactgtgccataccacctcccaataatcaacagcaaaattataggtctaacaatgttttatagacacccctccatttatgtgatgggtttgcatcctgataaacccatcataagttgaaaatatgatcataagttgaaaatatgatcataagtcaaaaatgtatttaatatacctaacctaccaaacatcatagcttagcctagcctgccttaaacatgctcagaacacttacattagcctacagtgggcaaaactatccaacacaaaatctatattgtaataaagttataaagaattttgaataaaaattcaatatttgaagtacagtttctactgaaaaaaaaaaaaa

SEQ ID NO: 14527 - DNA, 2428 bp, Homo sapiens
cagcacctgaagtccaaggcactgcgggagcgctggctgctggaggggacgccgtcctcggcctcagagggggatgaggacctgaggaggcagatgcaggacgacgagcagaagacacggctgctggaggactcggtgtccaggttggagaaggaaattgaggtgctggagcgtggagactccgccccagccactgccaaggagaacgcggcggccccgagcccagtccgggccccagccccgagtccagccaaggaggagcgcaagacagaggtggtgatgaattcacagcagacgccggtgggcacgcccaaagacaagcgagtctccaacacgcccctgaggacggttgacggctcccccatgatgaaggcagccatgtactcggttgagatcactgtggagaaggacaaggtgacaggggagaccagggtgctgtccagcaccacgctgctccctcggcagccgctccctctgggcatcaaagtctacgaggacgagaccaaagtggtccatgctgtggacggcaccgccgagaacgggatccaccccctgagctcctccgaggtggacgaactcatccacaaagcggacgaggtcacgctgagcgaggcagggtccacggccggggcggcagagacccggggggctgtggagggggcagcccggaccacgccctcccggcgggagatcaccggtgtgcaggcacagccaggcgaggccacgtccggcccgccggggatccagcccggccaggagcccccggtcacaatgatcttcatgggttaccagaacgtggaggatgaggccgagaccaagaaggtgctgggccttcaagataccatcacggcggagctggtggtcatcgaagacgcggctgagcccaaggagcctgcaccacccaacggcagtgctgccgagcctcccacggaggccgcctccagggaagagaatcaggcggggcccgaggccaccaccagcgacccccaggacctcgacatgaagaagcaccgttgtaaatgctgctccatcatgtgagccggcccccgagaccccggcccccaccccacaccacagacacccaccagcccggcccctcccggcgcctgcccaccctccacccacagcctcacgggtccaggacttggcgtgttgttacatgttccttccgagttttctttcgctggaaagagggacaggggcccccacccgtcaccacgccccaacactccccccgaaccagagccgtgcacttgtgcctggtaggagagagacaggacagacccgcttttcccgagacaaggaccccccatgtcacggcagcttcacagacgcggctcgcgcccaccggggtcctggcgggtgggacccgcagcctccacgcggcccaggccagcctgccaccctctgggcctcctacctgtgcctttctctgaggggacaccccgccagagagggccccgggagccgggggtgggtactgaggcctgctcaggccctggaagtgaggctctatggggttccctggccaaggcgctggccccccaatctcaggcagttggggtgaggccgtgcctctttgggggctaaaggtcttgggtggaggacaggcccctctgctgtgcccctatgccctgtgtgggcccaaccagtggacaatggagtctgggggagggggaaccccggggacatgcccccacccgggaggggccggtaacccctgggctatcttctagacggggcgaaccaggggtcattgacctgccccctgcacagggcagggaccgagtgagccactccttgtcccgagctcccgcccccactgggccctccttcctcctggtgctaatttggggaccccaggggccgcccccggcctcttctccatcctgcttggaccagggtcctgggtcttcccaaccataccccgagatcaggccccacctgccagctctactgggcttggagcacgtccgggcagtggagggagggacacagcctgggacaggaagcctcttgggttggagcaggagaccctcatttgccacccagaccaatgtgagcctgcccccagccccctctcattggaagtggcaaggggcttccctcctgggggcagctacactcgtccccagaggcacattcgtgcacattctcacagacaccgtctcacacgttggctttggacaaccaggccccaacttggtccctgccctagggacctccagcctggtgcccagtgctcaggccacctcctggtccagtcaccacctgcagcctcggcagggcaggtacaggggccacctcggatgggagcctgggtccctgcctccgctctgcccctgggtggctgggaggagaggccctctcgggggtgacctgggcgtcagccgtggaaccccctcctcctccctggagtctgcctgag

SEQ ID NO: 14528 - DNA, 1358 bp, Homo sapiens
tgagcagggcgacggcggcggtggaacctgcggggctggggcgcgcgccatgggcgcctgcactgcactgaggacccggtgccggaggccgtgggcggcgacatgcagcagctgaaccagctgggcgcgcacgagttctcagccctgacagaggtgcttttccacttcctaactgagccaaaagaggtggaaagatttctggctcagctctctgaatttgccaccaccaatcagatcagtcttggctccctcagaagcatcgtgaaaagcctccttctggttccaaatggtgctttgaagaagagtctcacagccaagcaggtccaggcggatttcataactctgggtcttagtgaggagaaagccacttacttttctgaaaagtggaagcagaatgctcccacccttgctcgatgggccataggtcagactctgatgattaaccagctcatagatatggagtggaaatttggagtgacatctgggagcagcgaattggagaaagtgggaagtatatttttacaactaaagttggtggttaagaaaggaaatcaaaccgaaaatgtgtatatagaattaaccttgcctcagttctacagcttcctgcacgagatggagcgagtcagaaccagcatggagtgtttctgctgatttctgtccctgcatctcccctggccccgttccctgccctcctcccttccctgggtgactgctctgagaggcacttcactcacaggcctgtgggatgctccatggggccctgctggctccatggggcccaggtgcaaagggtttctgaaaaacagcaggattaagtactgaaagagcccaacacaattaccctgtaaactctctgttaggggcaaccaccaccacctgtcttccaggacacatttttagatactctgacaggccactgcatctcagattcaggggagaaaataagttgtcacctccccttcaaagttccagagtaaacaaatggtgccatcattcaagataacatgctgatcaccctcctcccaaaaagcaagagcttggtttatggctgagggatcggcggattgtctgaatgacacatatacagagcccccacggatttctgcacactctgggtgctgtgctggtggaacattgccaatcagttcttaatgaggcacctgtgtgtaaatacatgcttggtcttctctgcagagaactgaggctaaactctgtccctacttctggttttgccctgtcatgtcgtaacgaggtgggccttttgaggccattttagtttgagttagagccaaccacctctgttggttagatgatgaataaaaaggttctgaagaaaaaaaaaaaaaaaaaaaaaaaaa

SEQ ID NO: 14529 - DNA, 466 bp, Homo sapiens
gagggctcagcgtggatattcattccatggctggggctcatacttggactactaaaaggtcgaggactaacaggataactgtcttgagactttggacttcggcctcccgaacatcgtacttcactatctgtaccattcaccatttctataaactgacgcacttttaatgtgaaaaggagattaggatttctttcaagtaaacttgggtataactgttgtgttgtttcaatggcttctcccattcttcctgctaataccaatttctgaattctttgtctattcttaatggaagctaattcttctagaacggtctggtctgtagatctggcaaaggcctctgctgtggcacagtacccatggtggactaaataagatgaaaccattttttgtatcatggtctgccattctccttctcgatctccgataggaaatcgatcggttaccattctgatgttggagcgtgtcc

SEQ ID NO: 14530 - DNA, 386 bp, Homo sapiens
aatctgctgaaaacgcacaagtttattgttgggacaagatgaagattcccttcatagtgttccagttgcacaaatgggtaactatcaggaatatctgaagacattggcttctccactgcgagagattgatccagaccaacccaaaagactgcatacttttggcaatccgtttaaacaagataagaagggaatgatgattgatgaagcagatgagtttgtagcagggccacaaaacaaagtgaaacgtccaggggaacccaacatgtcctatgtcatctaagagaaggcggaatgctactatcattcacgatggccatgaggagaagatggaaaatggtcagatcacacctgatggcttctgtcaaaatctgctccatcagagctta

SEQ ID NO: 14531 - DNA, 1693 bp, Homo sapiens
  misc_feature (1)...(1693): n = a,t,c or g
ttttttttttttttttttcgaatacaaagttatatttattttcaacaatgaaaacaacacaacaaagtggagtcaatccactaattttttaaatctaacacaatgcttagcacaaacaatactcaataaataacacattaaccaagtaacattattcttaacactctctagagttgtgtgcgcgttttaaggaaaactgaggggtaggtaaagaaagacatccggcagacttgactgagaagggctccaaaaaaagaacagccaaagagcagggtacccaaatactaagttagcaaaatgaatacagcattttcaaagcagtctagaaatcagagctcactgggggaaatgacaagggtttggggataatccgtgttcaaggcctcataattaaatcttctcctatttctagattctttatttggaatctatcccaatctaaaggagcttctgccaaaggacaggagattacttatgctgcctgaaatggcctatgcctcctaaatttcctttcactttgtcactactatagcaagggttccattccaacaatggattactactatgtagaccaactcctgtctgatttagatcttcctttcataaacacattgatacttgttcaaggacagctgtaaatacatccaatttcttttctttttatccccctctacaactctgcttggctacaaaaatctaggactcacagagcaacagcagcgatggtcagaaaataagtgccagttccaatgcaagaactctctaaagttcattggtcacaattttttttaaccacctcacctaccatgacttttttcttttctcattatcttgccaattatttctttcgaaattcaatcctccgagctacattctgagcaccaaattttttgaccaatgcctctctggtatcctcatcatctttttgcaaatctatgtcatcttgtcgggaccaaatgggatatccatcagctctctgaccagacgctaagaaggcggaagtagcctccagctcaccactattttttaggaaggcctgtgtaactgttgatagatccaagttaaacttctccattaactgccgaatgatcttaatggcagctcccacctctggttgagaaactttttcttcttcttcttcttcctcctcatcaggctgtgtttctgagtcttcctcaggtgtgggtggatcatcatcacacatagttatatgtatttcaaaatcaggagggctctcatccaccacaacctcctcaaactcccggggtggcttccacaagcatctttttgactgcttcttcattctcctggatttcttccttcacatactcttcttcaggcaaatctggagttctcttattctgtggttccccgctatccgcggcctccgggtcctcctccgccttccgcttgagcttctgggaggaggggctcaccggcgcgtcccccagcaggtacttatgctcctggccccgcaggtgcttgaggtagcggtccttcagggactgccacgagtgctgcgtgagcgagctcttctccatcgctttccacaaggcgttaccggtgacggagctgggcgagcgggcattttccttcacgtaggtaaggatggctacgtcgtccgcatccgtgaagcgatcgcccgngtgcgctgcgctccgntccgcgtgcgcgtcgccaggccccgggcttc

SEQ ID NO: 14532 - DNA, 1615 bp, Homo sapiens
ttagaatttttaaacaggtttttataaataatgtgttcaaagatttcgaccccattacataaagtaggaatcccactccttaagaaaaatatacagattttggtaagagtttaagttctgagatattcaagcctgacgccaagcctttaggtttctactacttcaattccaaaggaccagtagatagcaattttagtacacaaaactccactatgctgtatagttccttttctcctgggtcaggacagctttattctgcttcattaaccccttctttgctccttgatggatcttggaatccaatttccagatttttggaattcctttaaataggaaacttcacaaccatttcctgaggatttttgcagatgaaaacaaatggagaatcagattcttgactgatgtctggaaactgctccttaaattgcttctgggacaagcagtcaattaggtccacacagcccagaagacaacctgacggatagtcattaggaaattccacatctttcccacgaagaagacgatatgtagcctggagttctgagacttcttgaggggagggttttttagctgtggctgctatccaaagtcgtcctctgtggggggtgtaccaggatctgccctccacccttttaatccctctgacaagcagagaagcccagggctgatgtacagagaggcaccagccaccatcaaagccttcctgaaattcttgatcctggattcgcaactggtgctgaaatgagttgaactctagtccaaatcctgaagaacggaaagccttcttctgtgaggctgcacctgtgtggtcaacccactggggaggggactggtacatgttgggatttaccagaactcccaaaggctcttcagaagatctatccaatttggtcagtggctggttcaaggttccattggcaatggcctgtattgtctcatctagtctgctatgatactctgctagtgaattttcttcttccaggatcttccttcctgcaaagtcaatggtgaccttcttagaaagtcgagaggcgtgtcgaagttctctcagctcctcctctcgcttctgcaaggtttcccgctcaagtttggacaaccattggttagaatcactggcaaagtaatctgactcatcatcaatgacttgggtccttcgaatactagttctgtcaaactctaacagtttgtctttatgcttgatagccttctccagaccagacttaattcgcaattcttgatgaggaagaaggtccttggtagagatgtccacctttccagaattctccactcctgacatgagtttctttagcagtttctggctcttgtttgagtcacgctgtaaaatatcttgttcctcatgagtacacaccagagtgccacagaataagcaagggcctgagccttcttgttcacagacaatgcgcccacagatcagacagttattgatgagcttgtgcttctggcccaggcaatcacaagggtgacgaccagggagcaggactgcaagcctgtcctgtctttctcttgtgtataaattgacaaactttgtcttcttctttacggagttgctgttctcttgtgccttggccaaatcaaaaggtgttttaacctctgc

SEQ ID NO: 14533 - DNA, 534 bp, Homo sapiens
gggcttggtccagtacccgaggctctagccctggacccaggaaaacgaaagcaacatttgatgagttgggcctgctttctatatcaggcattgccttcagaacagggttaggccataaaccgactctgaaaacactagagttgcactctggcaagacagtgttagtatgaagcagagagttgtagaattttctaaagtattctgttctaaaaacaacagaagtggaggtggagaggggatgctttggtttttcttgattatgactttgggcagaagtaaaaataaaaactacacatttccattcttaggaattgggaattaccaagaataaatgggaatgcacccagctggtacctgtctaggaagaaggactttgggatgaagaggttgttgacagcaggcctctggacattgttaagggactgaaacatagaatattggctccaaggaagagactgtccagacctaactggatccaaaggaaggaaattattaggacagtgctttttaatattttgtccttttttaaccccc

SEQ ID NO: 14534 - DNA, 391 bp, Homo sapiens
  misc_feature (1)...(391): n = a,t,c or g
gagaaagcaacttggaagtgtaaagagtcaccttcattttctgtaactcaatcaagactggtgggtccatggccctgtgttagttcatgcattcagttgagtcccaaatgaaagtttcatctcccgaaatgcagttccttagatgcccatctggacgtgatgccgcgcctgccatgtaagaaggtgcaatcctagataacacagctagccagatagaagacacttttttctccaaaatgatgccttggggtggggagtggtaaggcnnactgngttgatnatgccnctncnttgntcnaaatannggaactgtcttaatcttatactcatggcttgnagttaccttanttncnngtatatgggaaattttgctgggtngataaaantgccc

SEQ ID NO: 14535 - DNA, 4535 bp, Homo sapiens
  misc_feature (1)...(4535): n = a,t,c or g
ctgctgctgcttctgccgctcccggggatgcccgcggctcctgggacccggccggttacctgctctactgcccctgcatggcggctttgggaaccaggccgatcacttcttgggctctctggcatttgcaaagctgctaaaccgtaccttggctgtccctccttggattgagtaccagcatcacaagcctcccttcaccaacctccatgtgtcctaccagaagtacttcaagctggagcccctccaggcttaccatcgggtcatcagcttggaggatttcatggagaagctggcacccacccactggccccctgagaagcgggtggcatactgctttgaggtggcagcccagcgaagcccagataagaagacgtgccccatgaaggaaggaaacccctttggcccattctgggatcagtttcatgtgagtttcaacaagtcggagctttttacaggcatttccttcagtgcttcctacagagaacaatggagccagagattttctccaaaggaacatccggtgcttgccctgccaggagccccagcccagttccccgtcctagaggaacacaggccactacagaagtacatggtatggtcagacgaaatggtgaagacgggagaggcccagattcatgcccaccttgtccggccctatgtgggcattcatctgcgcattggctctgactggaagaacgcctgtgccatgctgaaggacgggactgcaggctcgcactttatggcctctccgcagtgtgtgggctacagccgcagcacagcggcccccctcacgatgactatgtgcctgcctgacctgaaggagatccagagggctgtgaagctctgggtgaggtcgctggatgcccagtcggtctacgttgctactgattccgagagttatgtgcctgagctccaacagctcttcaaagggaaggtgaaggtggtgagcctggagcctgaggtggcccaggtcgacctgtacatcctcggccaagccgaccactttattggcaactgtgtctcctccttcactgcctttgtgaagcgggagcgggacctccaggggaggccgtcttctttcttcggcatggacaggccccctaagctgcgggacgagttctgattctggccggagcaccagaccctctgatcctggagggaccagagtctgagctggtccttccagccaggcctggcagccagaggtgctccgggattgcaaactcctcttctcacctgccaaagatggagaagagtgccagggacccctcaaggagggagacgctccatatcccagggcataggacttgcaggttcctaggagcaggagcatctcccatcgcacgtgctttctgctcttctgggaatttctcacactggcaaagcagtccagcctccgtcttctggtccactctgctctgagcagcctgggatgctgaactcttcagagagatttttttatagagagatttctataattttgatacaaggtcatgactatcctagaactctctgtggtttttgaaaatcattgaattctattaatgtaggtacctaaagtgaccttaactgaatgtggatgaggctggggctggtgtgggtcttttggctgcttttcaaggtgtcccccaatgtggccctcaagagccatccccactgcctggccagagccattgttgtcccctacttcctaggccatttctggggcttgggggatgaatgctgtcctgtgctgtaaacactatgcaaatggaagttatcggttgtggtgctgtgcagcgctctgtgggcgactaagtgccactcacgcagcatgttcctggcaaggagcacataccatcaagccacactatcatggtattgttctcacagtcttttggtggttgatggccactgcaaacctggcaccatcagatctcttctgatctcttgccccagtggggcctggttggtagaatgttggcattcggttgatatccaaagcctgttctcccagccgtcctcctgcagctggagccttcaggccgtattctcacgagggaacgtttgccaaggctctgacctcacagaagatgcccagggcccagaagccatcagaattatcagtggagaagcaccttttgactcttcccttccaatgtaatctctgccaacaccatgaggcttaaggtgctctaagtcatgagtgttttggtctcaaatgctgcagttttaataatctgtgactcctgagagcccatggttttttgaaccttgtggttctaaaattccttgtctgacccctgtagatcttttccttgccatgtcacctcccttgggcctttgatcctggaaaggtgggcagagcctccactgaggccagggnccagagctccttgcagtgccttcttccttgtttacctgtgggaggaaacactttttttgtcaggggcagcctggttcagagctcagaggtcacactgtatcaaagatctcaaacagcaaagtcagcatttgctgtatagagctgccacccaactctaagcaggagaaactgtacagaaagggctttgctatttttcccttttgggaaaacaatgaagtgttttaagtcctgggtggactgagagatggtttgcctgtccagacttgctctcaagcctcatccagagaaggagctgcagatgagggagcccgtacactccctgccaccactaggttgtaagcctgtagctggctggctgatttcattttggaattcatttgccatccacagccttacactaggcacacactttagagtctggggctccagtgggggcccgcctaattttttttcnnnnnnnnnnnnnnnnnnnnnnnnnnnnnnnnnnnnnnnnnnnnnnnnnnnnnnnnnnnnnnnnnnnnnnnnnnnnnnnnnnnnnnnnnnnnnnnnnnnnnnnnnnnnnnnnnnnnnnnnnnnnnngcatgcccagctccaaatcaccttgattcatatcagcagtaataatcacttgtgttctgaaagaaagggcaccagaagttctagcaaaattcagttgtgttctgtgagctagcactttttcctctgacccaattttcttacctataaaatggtgataaaaaccgacaggttgttcaaaggcccagatcagctaaagcatgtatataagagcacgttgtaaacttgaaagagacaaaggcacaaatgtggctgttgattaatttgactgcttctcgttgctcgtcacctccatgccaggcactgtgcttgctaattgctttatgggggcattctcttatttattccccagccctgggaaataggagctgtcattatccttctctttctgcacaaggaaaaattaatgccctgagaattgtcataattttcccaaggctgcccagctggtggtgttaagccagaatttgacctcccagagccagtttccattagctgccatgctctgctgcctctaattcacagaatgcactttctaccctgtgtgccatggagacctcctatggaaaaatgatcagccaccttaccttctactgggtacctgctgtgagtctgcctatgccagaaggattaaggaggggaggttacccaagaaacaaagcctacatgccgcttacagcccccgttggatggttgctcagtacaacagtcttgcattcagcaggtgtttgttcatcacctactatgtgtcaggctctatgctaggtactggggatacaggagagaatcaagcgtaaagtctttgttctcaaggaatttgcattctagaaagtagaagatgtaataaatgtactgtgggacatgttaataagtgctataaagaaatataaagggtttgggagcaaaaagagggagtggatctattttagatgagcccaggtaagacctctctgaagagctgtcatgaaggagggagggagcacattcctggcagagaaaacagcacgtgcaaaggccccgagactggagtgtgttcctgaagagcagccaggaggccagcatggctggagaggcaggcataggcagggaaccgagcagcaggtcagagcaggcgagctgacattctgcagcctggacggccatggcaggaagcttttagttggagagatacaggaagcctcctagggttctgagcagaagaggggcatgagctgattcacattctgaaggacctctctagctggccagtgctgaggaggttggagagagaaagggtgaaagcagagagaccagtgcagggctgttaacagggttgcaggcgagagactggggtgctgggctcccctagactaggactccagtgccctcctctcccaagagacaaaggccattgcattgaaggaggtgggaaatgattagattctgaacatatgtaattatttttcagtctttttcaaagatacaaatatttacatagttttaatcatgtaatatatacaatttaatgtcctagtgttttacttaatagtgtatcatgttttccctgttggtatgtagcctggataaatgctcttaattataaaaaattctgtcg

SEQ ID NO: 14536 - DNA, 624 bp, Homo sapiens
agaatttctgaagccaaagaagaactaaaggagtccaaaaagcccaaaaaagatgaagtaaaagaaacaaaagaattaaagaaagttaaaaagggtgaaataagagatttaaagacgaaaacaagagaagatcccaaagaaaatagaaaaacaaaaaaagaaaaatttgtcgaatcccaggtggaatctgaatcaagtgtacttaatgattctccctttccagaggatgacagtgaagggctacattccgacagcagagaagagaaacaaaacactaaaagtgcaagagagagagcagggcaggacatggggctggagcatggctttgagaagcccctagacagtgccatgagtgctgaggaggataccgatgtcagaggcaggaggaaaaagaagaccccgagaaaggctgaggacactagagagaacaggaagctagagaacaagaacgctttcttagagaagaaaactgtgcctaaaaagcagaggaatcaagacagaagcaaaagtgctgcagagtttagagaagctgatgcctgtatctgcccaaacgccaaagggcccgaggttgagcggggaagagagaggcctctggtccacggactcagccgaggaggacaaaga

SEQ ID NO: 14537 - DNA, 1023 bp, Homo sapiens
ctgccgggttccgggaaaaggagctcctgctgccactgctcttccggagcctgcagcatggggcccctgccgcgcaccgtggagctcttctatgacgtgctgtccccctactcctggctgggcttcgagatcctgtgccggtatcagaatatctggaacatcaacctgcagttgcggcccagcctcataacagggatcatgaaagacagtggaaacaagcctccaggtctgcttccccgcaaaggactatacatggcaaatgacttaaagctcctgagacaccatctccagattcccatccacttccccaaggatttcttgtctgtgatgcttgaaaaaggaagtttgtctgccatgcgtttcctcaccgccgtgaacttggagcatccagagatgctggagaaagcgtcccgggagctgtggatgcgcgtctggtcaaggaatgaagacatcaccgagccgcagagcatcctgggcggctgcagagaaggctggtatgtctgcagaacaagcccagggacttctggaaaagatcgcaacgccaaaggtgaagaaccagctcaaggagaccactgaggcagcctgcagatacggagcctttgggctgcccatcaccgtggcccatgtggatggccaaacccacatgttatttggctctgaccggatggaaggctgctggcgcacctgctgggagagaagtggatgggccctatacctccagccgtgaatgccagactttaagattgcccggaggaagcaaactcttcgtataaaaaaagcaggccatctgcttaacccttggctccaccataaggcactgggactcggatttctctatctgatagaggtattttctgtggccctgggagctgtctgtctttcccctacccccaaggatgccaggaagacgtccaccattagccatgtggcaacctttacttctatgcctcacaagtgcctttcagagagccccaattctgctttcccacaaaataaacctaatgccatcaggcaaaacattaa

SEQ ID NO: 14538 - DNA, 564 bp, Homo sapiens
tcccccatgtcaagatgtggcacctcaaactttgtgcagtcctcatgatcttcctgttgctgttgggccagatagatggctccccaataccagaagtgagttcggcaaagagaaggccacggagaatgaccccattttggagaggggtttccctcaggcctattggagcctcctgccgggatgattctgagtgtatcacaaggctatgcagaaaaagacgctgttccttaagtgtggcccaggaatgatgtacataccagggaaagaaaggacagcagtcacctccgacaatgctccgttctatggaatattgattaactgcattttggctggagacacccaagtgaagcaatcttgtatttttaatatttaaaggcagatgtacgctttaaattggtctccatttcttcttagaatgttgatatatggataagcataactaaacttgtcaatttagagtttatttttctatggatactattaaatgtctcaaattggaaattttagcagtctgggatttcaagcttttgaggggaaaggagggttcacttttgtatactaaag

SEQ ID NO: 14539 - DNA, 354 bp, Homo sapiens
  misc_feature (1)...(354): n = a,t,c or g
ttcggtggctcagctgggtaaccggggatcaccatggcggcctcattggtggggaagaagatcgtgtttgtaacggggaacgccaagaagctggaggaggtacaggggcccgtgctggttgaggacacttgtctgtgcttcaatgcccttggagggctccccggcccctacataaagtggtttctggagaagttaaagcctgaaggtctccaccagctcctggccgggttcgaggacaagtcagcctatgcgctctgcacgtttgcactcagcaccggggacccaagccagcccgtgcgcctgttcaagggccggacctcgggccggatcgtggcacccagaggctgncaggac

SEQ ID NO: 14540 - DNA, 1145 bp, Homo sapiens
ttcagggttcaaaacagatatagctggtttattttggaaacaagtctcatccagaaatgttatttactgcatttaaaaaccatggaaggcgatttgcatggttcctccccacgccctcactcccaccaagtacagctttaccacccaaggtcctttcaggaccccaggcctggcggctgtaggagagagcagtgaatcctaagggcaagagaatggcgtccacttgccagagtttctcagagcagagccagctgctcctccagacaggccggtgaggctactcgacaccctcacaaaggggaaaccctgaaggaagtacttcagggggtgcctgcccgatgcgggaggttttgggctagccctccccagatccccggcctgaggggcctcctccagctgcagaagtcaagctgccaaacttgccaaagtattcctgcagctccagcagggcccggaagcgatgggagacagcgttcttctccgccttaggcatctctgcgtacgtctgctcatatccatcaggctgaaagcaggggtcccagccaaagtcctggcagcctctgggtgccacgatccggcccgaggtccggccccctgaacaggcgcacgggctggcttgggtccccggtgctgagtgcaaaccgtgcagagcgcataggctgacttgtcctcgaacccggccaggagctggtggagaccttcaggctttaacttctccagaaaccactttatgtaggggccggggagccctccaagggcattgaagcacagacaagtgtcctcaaccagcacgggcccctgtacctggcgaactgcctcctgacatttctgtatggaaatctcatccggctccccctggtactccggcaggtcaattttctgtgccaccaaagtgcatggaaacttatctcctagaatctgaacgacctcctccagcttcttggcgttccccgttacaaacacgatcttcttccccaccaatgaggccgccatggtgatccccggttacccagctgagccaccgaaaactccttggcgtccagtgacagaaaacttccggctggtggcggaagtgaacggctcagtttccggccaggtcccggggaaagcgacccggaccccaaggcgcgtagtcggcggagtcg

SEQ ID NO: 14541 - DNA, 890 bp, Homo sapiens
  misc_feature (1)...(890): n = a,t,c or g
aatggctatgatgtagtaaaggaatgccttgttcatcaaagcgaaatttttgcagacagaccatgccttcctttattcatgaagatgacaaaaatgggaggcttactcaattccagatatggccgaggatgggttgatcacagacgattagctgtaaacagttttcgatattttggatatggccaaaagtcttttgaatctaaaatcttggaagaaaccaaatttttcaatgatgctattgaaacatacaaaggtagaccttttgactttaaacagttaataacgaatgctgtttcaaacataaccaatctgatcagttttggagaacgattcacttatgaagacaccgattttcagcacatgattgagttatttagtgaaaatgtggaactagctgccagtgcctcagtcttcttgtataatgcctttccatggattgggcancctgccttttggaaaacatcaacagctgtttaggaaatgacagctgtagtctatgattttctctccagactcattgaaaaagcttcagtcaacagaaaggcctcagctacctcagcattttgttgatgcttatttagatgagatggatcaaggtaaaaatgacccatcatctactttctccaaagaaaacctaattttctcagtgggtgaactcatcattgctggaactgaaactacaaccaatgtgctacggtgggcgattcttttcatgggccctttatcctaatattcaaggacaagttcagaaagagattgatttaattatgggccctaatgggaagccttcttgggacgacaaatgcaaaatgccttatactgaggcagttttgcatgaagttttaagattccggtaatatagttccattagggatttccatgcaacctct

SEQ ID NO: 14542 - DNA, 1312 bp, Homo sapiens
gttttgggaatgtatgatttttttaataaaacaattctgcttcagtgcaaatatgtagtccaaaacaacaaaaaaagaaaatgtcttatgtgacttagcacgaacagtttccacagcctttcacactattgacaatttcttcttgtagtttctttctttcctcctctttggatatattttctttctttgcttcccatttggggttatcatggttctgcacacggctgctctgtgtatgccacatttctgaatagatactatgagggttagcaagcaaaccatggtgggtaccacgttcggctaccttaccctgatccaagacaatgatttcatctgcatcaaccactgttgacaatctgtgtgcaatgaaaatagaagttctgtgtttgaccacatccttcatggcaccaagaatagtctcttcagtaatcgaatctaacgatgaagtagcttcatcatagagtatgactggggggtccttcaaaatggctcttgcaattgctactctttgcttttctcctcctgaaagcttgagtcctcgttcccctacttgggtgtcatatccatgtggcattcgaagaattgcatcatgaagtccagctaattttgccactgcatacacttcctcaggtgaagcactgatgtttccatataagaggttgtaataaatagtattatggaagaggacagcatcctgaggtaccactcccactgcccgtcgaaggcttaccaggctcacatcttgtatattttgaccagcaagataaatgctacccttttgaggctcatagaagcgaaataatagcctcactattgtgcttttccctgacccactacctcctacaatggccactttctttcctgcagggacttcaaaggatattccactaaggactttctggccctcaatgtattcaaaatgcacattatcaaaggccacggtagctgtctgtggtgtgatctgaaggggagatgccatcactttgtctttaatttgggtgtctaccttgagtagagtaaacaaggtgttcatatctatgagtgcttgtctagtctctctatatacagttcccagaaagttcaggggtaatgaaagctgaaaaagcagtccattcaccattactagatctccaacagtaagggtacctgccacaattccctgactggcgagcaccattatagctgttaaaccgacactgaaaatagcactttgaccaaagttcagcatagccagagtagaggtacttttcaatgaagcagtctcatacgtcttcaaaaatccatcatatctctgtgcttccccacgcgtccg

SEQ ID NO: 14543 - DNA, 588 bp, Homo sapiens
ccgagggctgtgtcagaaggctgggcagccatggcgtcctatttcgatgaacacgactgcgagccgtcggaccctgagcaggagacgcgaaccaacatgctgctggagctcgcaaggtcacttttcaataggatggactttgaagacttggggttggtagtagattgggaccaccacctgcctccaccagctgccaagactgtggttgagaacctccccaggacagtcatcagaggctctcaggctgagctcaagtgccccgtgtgtcttttggaatttgaggaggaggagactgccattgagatgccttgccatcaccttttccattccagcttgcattctgccctggctaagcaagacaaattcctgtcccttgtgcccgctatgagctgcccactgatgacgacacttatgaggagcacagacgagataaggctcgaaaacagcagcagcaacaccgactggagaacctccatggagccatgtacacgtgaggaggttggggctgagtgctggccctctgcgtcttccttattaaccttgaatcctcattaaaggtttctttacccagaaaaaaaaaaaaagtcg

SEQ ID NO: 14544 - DNA, 434 bp, Homo sapiens
taactgatgaatgaataagcacagtgtaatatgagcagataagagaatactccacacagcagccagggtgaacttttgagattacaaacttgatctgtgatattaaggttaaaagacaaatgagacaattgtagcaagtttgttaacagttttaaagtatttgactatataagtgtatataatgtcttgtcttggtacctgtgtaagtcattttggaactgatacacattgttgctgacctgctgacttgcttctttggtatgaagcagcatctgggcttgcaatttctctacttccctgaattctctttcagtttttctgactcctaagccaggtgtatgtgtttagctccataatgaaggactccagcttctgtggagtctggctcatattcatgagacaatagcctttttctgatcttcatttcctgcctg

SEQ ID NO: 14545 - DNA, 587 bp, Homo sapiens
gtgcaaagagaaataggctcgtttatttattcattgatcaactggcacttcttgaaagcctgctgtgtgccaagcctttccccaaaggaggatatcagtggtggagccaagtctcagggtggaaaggacctggaccacacagagcaggactccagagcctcctccatatggcaggaatcaagctttcacaggggaaacgcaggatttcccacacatgcccatgcaacacttcaagtcacgcttgcactggccatccatctcacagaaattgggggggttaagcatcaaacattggccataagtcactgggcacttcccaggcttcctccttgttgggtttggggtgtcaacaggatccaggcatttgatgccacaagtgtcaggacaacatctcttcttccctggacactgccagtcactctggcactcaggtttcttgtatctaaggcactgggcagatttcttaggaggacagactccagctttgaaggactttccagagccttccacagcccaaggtgccagagttcccagggcaagcagcaccaggaaggggaagaggccgctggacttcatggtgaaggcag

SEQ ID NO: 14546 - DNA, 399 bp, Homo sapiens
gctcgaccaactggaactcatccctggggtgaaggtggctgggaattagacaagagtgtgtgttagccaaaaggcacatgcatgctgtcagcaggagaatgaggagcactggttctgggcaggcagtggcaggggctccctcaggcccctgattcccagcccacagctctttctactctgcagacagagttccttggagactggccctgcattcaggcagggagcagaggggtccctgcctgcagcacccagagctgaacctgaagctacaaagatgggctgatgaggtggcccatgaggtgtcagcaacatcccaaccccctgagtctccccagtgagtcagggcactgatttgctatagctggagctacatgcacctctcgctcgcccccgtcgacg

SEQ ID NO: 14547 - DNA, 596 bp, Homo sapiens
gcccgcctcggactctcaaagtgctgggattctgtgtgttttgtgcacctccactttaggtaatcatagggagcacatttacaggatggtctaataacatgaaaacaggctagtttcaagcaacagcaatgtcggttggaaagcaggcgtcatttgccttgaaaaaagccttttgacaacatacaggcattcttttaaaaccaggcttgaaacattttatttccgagacttaacgttgtgtttcctgtttcttaaacctagcacctctgtgtatttgaaaataatgagacatctttcattggattttggaaaattgttccccatgggattctaacctcactacccaaatgagtgaaagcttgattaagagttcttccatatactagcctccttggaagaagtgatcagaaggtgataagaaggacagaaaggactattttaaagttggactgaaggagaaaaaagcaaaattcttgtttcatcccaattctagttagaacaaagttaaacccccgtaatcttaaagagaaaatctttggaggttttaattaaacattttatacatttaaagtcttgttaatggtgctttaagtgtc

SEQ ID NO: 14548 - DNA, 1043 bp, Homo sapiens
ggctgaaagactatgtattgggtactatgctcacaacctggatgatgggatcattcataccacaggacctcagtatcacacaatatacccatgtaacaacctgcactctgcacatgtacccttagaatctaaaataaaagttgaaattatttttttaaaaaaaggatggcgctggtcatagaaaaagtcaaagtaaactaacagtgtcattttcaaatgttgctggaagcacaatattggccataaattagtgaggttaaaatagaagaatctggcattttatagtataaggaaaagctacaaacctcaaggttgttttatttaaaccaaataatctgagcaagacatatatacattaaaaacaaatgaacacattaaaatttcactattttacaatctaaattctagcaacatatacaaatactgagtgactacagtacatgccgaggtaagataagtacattctgggagaatatcactgacgctcaaaccatttttatttccaatatgtatttcaatacatgtttgtttccacttttcccagtgccacacacacacacacacaaaaacaaaacaaaacaaaaaaaaacagtcacaagttggattacattagaattggtgccacagttaactttttaaaagcattttaataaccacccaactcttagattttgcagtttagggacttcaagttcagaaccaaaaagcagagaatcgtttcatgtgacatgatgtttctatagacctcttgctctctaggtgacaatgcagagccagggcaaaggtgtttaagctttgtcaccttccacagctttgtggccacattcatatttagataagctcggactctgctcccctcttctggagatggggagaggcaagtgtgtatgtgttgtcatacttactgcattaattcttcactcgaaccgtttacatcagcgaataaacccattgttcaatgcaaagtgcaaacagtgaaacatgaacttaaataaactggactagacccatcacatccaacaggatctatttagatttatagc

SEQ ID NO: 14549 - DNA, 1783 bp, Homo sapiens
  misc_feature (1)...(1783): n = a,t,c or g
tttttttttggaggagcaaacgcggctcatttattagaatatgcaaaagagaggactttcctccacaaatacagattgctgcttctcagtttctatcaagagcaagacaacagttgaaaactgtattcctgagaagaagcaaaaaagttatcagtttacaaacaaggataacaggtgatttcaacaaaagataaaaaacttttttttccaaaaatcaaaatttcaagtattattccagatgacatggcaaagctagcacaggcggaagccaagggtgcccctcaggctctgtagggtcttggaggaagggcccgggcagcatgagggagcggcgcgtcctgggacctgcctccagccccgggcttggggccgtggtcactcacacaagggagcagcacgtcctgggacctgcgtccagccccaggctcggggccgtggtcactcacacaagggagcagcatgtcctgggacctgcgtccagccccaggctcggggccgcggtcactcaccggttagcaaggagcgactaacttggcggccacgtcgagggttagcagttttggacattggaaggtttctttttttaataaacagaagcatatgcttattctttcaaataccatactatacccaattttagtcaatttgtaaattataaattatattatttgtgctacagtttgtgacatttaaatcttattagaagataagcaccaaacctattaaaataaaaaatagataaaatgctgtggttttcccagcagcaggatattgtgtacgtcctgtaggctgtaaacttatgctcccttctcctgaaacaatgtttttgataaacttgcccttctcccttgaaacttttcctgaaaacagacttctgctttaactgtagtttcgggaaaatgtaaaaaagagcaaaacgtgcccctctcggcgggacggccgcatgttacagaaaggcttcgtctctgctgctgatgccaccacgagccctgcccagcgctcaccaggagggcggctgcggacccggggctctggggagggtctcactcagagggtaaaaagctccacagaagagtcaccccagagcacctgtcggagaccctgcgtcccttccctcagggggctgtgaaaacaccttgacgtgcttgtctctgtattttaaaaacacgctctcttcacctccagtgctgaaagctgctcagggcctctggatgcttagtttttgaaccttgtctgttcacagatatgattgaatttcatggcgtggtgagctttcacctgagtgcggcagttacggcccccagtagcagtcaggacgggatgttacggccactggcaactcggaagcaggaatgttctgccgatactgataggtcagctcacggaaantgcgcaggccacagcagtaacacagaacggtgtctcccgtgactctgtaatcagacagcagaaacactccccgctggagagccatgaggctctcggtcaacatgtttttccatgtcaaacctctggttgccaggtaattcttcaggatgtctgactcgtagctgttgttgttcagcacgccgtccagacacttgtcacccaggttgagctcacaaaacggggccaggcagccgtagcagccggtccgggtgcagccccagtacaggtggcagaaaggctgcaggcagaccgcacctgtcgtcaggctgacggacgtggagggtgcatcccccagggcctgtggggctcctggctcgccctcgggtgctgggcagtggggaggctgcgccgcctg

SEQ ID NO: 14550 - DNA, 787 bp, Homo sapiens
tttttttttgagaaatgaaaaatcttttattttttacaaaaattttcataaatgcattttatatttaatatgcatgctactataacaaagcaactgaaaatgtaattacagttaagatacttttatgcatatttaaaaagtaatattttaatcccctcgatttttaaaaattgaaagtggaataagcaattcttcaaaaaatatccattctcccccatgcaactgttgcaatgatttaacaaggaaaattagaataatcggtcaaatgaatgtttaaaagccactgtcacctcatgaaaccctttccatttggtaccaagtttagaaatgctcacatttcaaatatttatctactgcctctgtgttacaaccactaatgtgttctaactgaagagtttctcatttggggtattgaccttacttgaatgctaacccacttcttattgcagttaattgtaaattcatagaaagtattttctagcatacttgagaggaaattcagactactaggatccttttttcttttcatgtaaatgcttccttaaaattaaaaccggcaaggaaatacagccaatttatagtttaccaattttatatacggttattcattctttttttcctgagatattaagcacatttgtaagtagtctgttttcatgcaaaaatatattttcccattcttcacattcattttaaagtattttatattttaaataactatattgcatttgtgcttcatacatttggaaaataaaggatatttcattttctttactgcagaaaaagg

SEQ ID NO: 14551 - DNA, 785 bp, Homo sapiens
  misc_feature (1)...(785): n = a,t,c or g
cggacgcgtgggaaatcaagagatttatatgaagcagtgaaaaatatgttaaagcaattttctttgtcctttgtaaacatatgtgatatagctacagatgctgccctggcgatggtaggtaaaagagagggacttgtacaattaatagatgatgcagttgccacacaaaactcacatttgatgaagtattattgcataatacatcaagaaaatccatgtgcacaagctttaaaagtagataaccgtcatgcaaattgtcatcaaggctgtaaatttcacaagggcccaggaattgaatcatcgctagtttcaggaattccttaaaagtatggatgctgactctagcaagtcattcactttttagaagtaagatggttaagtcaaggcaaaatgtaaagattttatgctttgtgatgtgaaatcaagctgtttatggtatcaaacaaaattggtgccagaacttgacaatgaaaactggcttacagatttagcatttttagtgggtttgacggcccatttaagtgagttaaacctgtgtcttcaagttgaaaaccaacttaacaatacaatgtttcaaaccataacagcattccatatgaaactgaaattatggcaagctcaaattaaggcaaacaattttatgcatttcgacatgttggctaaacatggtcctgtgaacagccaaaaatacgcagccttgcttttcaatttgatccaggaatttgaaaacaggtattncaagattctgaaaaaacancaatattttggtatatttgcactccatt

SEQ ID NO: 14552 - DNA, 502 bp, Homo sapiens
  misc_feature (1)...(502): n = a,t,c or g
atcttgaatcccctgccnnnnnnnnnnnnnnnnnnnnnnnnnnnnnnnnnnnnnnnnnnnnnnnnnnnnnnnnnnnnnnnnggcacgaggtttagtctaccgattctcgttagcgtatctaattcagtgtcttaaacaaacatcatctcattcttacagggctcgtgcaatccgcttcagacaggatggtaacgaagccgtcggaggattcttctctcagattgggcagctgtacatggtgcaccatctttggggtatctgtttttcccttttcgagttactgggatttaagagttcattactaagttgtactgggaagtagagcacatcttgagtcagtaaccttaaccactacagcaaatccgacgtcacagagggacagtctgtacggggctgtctggaactagcgaggtcaacagtgaaagtccatagattgatggcattagtgagctgaaagtgagtagggatgatggggaaaggaataaggggtaaagcaagcagc

SEQ ID NO: 14553 - DNA, 1506 bp, Homo sapiens
  misc_feature (1)...(1506): n = a,t,c or g
gcaaaggccaaggccagccaggacaccccctgggatcacactgagcttgccacatccccaaggcggccgaaccctccgcaaccaccagcccaggttaatccccagaggctccatggagttccctggcctggggtccctggggacctcagagcccctcccccagtttgtggatcctgctctggtgtcctccacaccagaatcaggggttttcttcccctctgggcctgagggcttggatgcagcagcttcctccactgccccgagcacagccaccgctgcagctgcggcactggcctactacagggacgctgaggcctacagacactccccagtctttcaggtgtacccattgcttcaactgtatggaggggatcccagggggcttcaccatattgccggctggggctnacggcaagacggggctctaccctgcctcaactgtgtgttcccacccgcgaggactctcctccccagggccgtggaagatctggatggaaaaggcagcaccagcttcctgggagactttgaagacagagcggctgagcccagacctcctgaccctggggacctgcactgccttcatcactccctgtccccaatagtgcttatgggggccctgacttttccagtaccttcttttctcccaccgggagccccctcaattcagcagcctattcctctcccaagcttcgtggaactctccccctgcctccctgtgaggccagggagtgtgtgaactgcggagcaacagccactccactgtggcggagggacaggacaggccactacctatgcaacgcctgcggcctctatcacaagatgaatgggcagaacaggcccctcatccggcccaagaagcgcctgattgtcagtaaacgggcaggtactcagtgcaccaactgccagacgaccaccacgacactgtggcggagaaatgccagtggggatcccgtgtgcaatgcctgcggcctctactacaagctacaccaggtgaaccggccactgaccatgcggaaggatggtattcagactcgaaaccgcaaggcatctggaaaagggaaaaagaaacggggctccagtctgggaggcacaggagcagccgaaggaccagctggtggctttatggtggtggctgggggcagcggtagcgggaattgtggggaggtggcttcaggcctgacactgggccccccaggtactgcccatctctaccaaggcctgggccctgtggtgctgtcagggcctgttagccacctcatgcctttccctggacccctactgggctcacccacgggctccttccccacaggccccatgccccccaccaccagcactactgtggtggctccgctcagctcatgagggcacagagcatggcctccagaggaggggtggtgtccttctcctcttgtagccagaattctggacaacccaagtctctgggccccaggcaccccctggcttgaaccttcaaagcttttgtaaaataaaaccaccaaagtcctg

SEQ ID NO: 14554 - DNA, 543 bp, Homo sapiens
  misc_feature (1)...(543): n = a,t,c or g
tggattccaggcgtgacacctgtggccggccccatccatatttcttaaacatgttaaagcccgttcaaaatttttccatttcaaatggtatcaaagtccttgcaaatctcaattgagatacctcatcaatgattcaatgagtaccgggggttagaggtatatgaaaagatgagaagctcacactgggcttcttcagctacaaaaccccgtgggggatcacacccactcttcttcggtgccctctttatggtgacattggtttggggtgcagatctttaggtgctaaagggcaactagacttgccgatggaggggtttggggaaaattaagggcaacctgcactgagttttcaacnggctatntnacttccantagcaggttgtattgccccattttnaancccaacgcaccncttnggnggaggggnnntnncctncncaacctncccnggtgtcgatgnnnagncgggccnatttgggcttaagtgctgggtcccaanggaactttgattnacccagaaantctgnnaanncttnnnnnctt

SEQ ID NO: 14555 - DNA, 720 bp, Homo sapiens
gaactatttttaaaatattcaaacaaaactaaaacaaaaatccagtgtcacatgggcctgagattttattttagaaaaaggttgttacataaaacaccctggccagttcatttcagcatgctctttcaaccagaagttcttaatatttatgatggcactagaaagggatttggcattttatgtccttctgtgtccttcatgtatctgatcaatgaagacctgtaacactaagtacttgagagttacagtctgaataatgaagtcgtaccagctgaatagcccagcttgcagtatagttatgtttcagtctgcagtgtgtttagcattcccttgtcaaagtgcttgactgcatgctggaaactttgtatttttgaagcggcaaactctgttctctggaatgctctgaagttatggctgggacctatcccctcacatctaatgaatgaattataaaatgtatatgtctatgaagcttcggggtagtgcctgtaatcagaaaacaacttagaacccttttgtttgtttccaattgagtcattactgcctgccactaagaaacgtgcttgaatctaataagtatgtgtgtaccgtaaagaatatatcttatctggagctcagcctcaatcatgtcttaacaaaatgacaggtctcagaaatgggggagcttcaatagctcaaaagtgacaagtccttttcacagcaccgttcttcagaacacct

SEQ ID NO: 14556 - DNA, 1511 bp, Homo sapiens
  misc_feature (1)...(1511): n = a,t,c or g
ttttttttttcttcggattttttttttttttttgcaaaacattcttttattaaaagaacaagtgctgtttacgaactgcccttcgtacaaataacatccgttatacaaagatacaagatccgggttatgcacaattccaggcttggaggtggcaggggggcatcgcctttgggctgaggatatcaaggttttagaaagaatgaaaaaggagcccctgggtttgcaatctgtggcttcccctccctgctccctaggaagggtctgctacatggaaacaggttgggatagaaagggggcgggacgggagcaggggtgaggtctccagtcccaccacccaagtcccaagttgagctggagaaagtgaacaaaggggaatgaaggcacccctcagttcccaacttttcagtaggtcaagacaaagtggtcgggagctagacacactctcaatcctgatggacatggtgggagagagccaaggctacttgcccaccttccttggaattcccagttgaagttacctcaatccctctaggcacctctccccaggaaaataagttgagataaaggagaactgggtgcaagctgcctacccctaactggcccattgcacaccaaggaagatcctagaagctggcagggggagcctgtgcctttgaaaacctgtcttcatttccaatttgggagagagaagcgtggaggttaccctttctcggagctggcccctggcttgggctcctctcatttctctagacccttcctaagagtctggggtgagcacctccctagaactcagtatgggggaaacaggcaggggtcccctcatcagcctcaaggtcaggacaccttgaggcagcagcagacccaggagcctgagggggaaaataccccacaaataggaaaaacaaaccaagacaatccttaaagtgtcattgtccatggagaggatccaccagctctgagctaagacagtcagtgccacatagacaccctcccaccccgggcacagccctgcactcacaccgtgtgtcacacacacacagggacagccagccagccagccatgtggagaccatgttgtggggcaggggaaccaagggccaggaggccacagtcctgagggcttgtcctggccctgtcactgagccccttctaggcttggagctgtcatctgtgatgggaggagctggctgaaatgacccctaaagacaggtccctttggcgctggcatgcaccagttgtgaccccacagcaggcactgcctctatatgcacccccactcacacctcctcactgagggtgggaacacccaactccacatgctcacccactcacacctcctcactgagggtgggaacacacgaagctctgctctcatgcgtttccaaactctgcttccgctctgcaaaccacatccttccctcgtgccnnnnnnnnnnnnnnnnnnnnnnnnnnnnnnnnnnnnnnnnnnnnnnnnnnnnnnnnnnnnnnnnnnnnnnnntcaagnnttcaaa

SEQ ID NO: 14557 - DNA, 575 bp, Homo sapiens
cctcgaggccaagaattcggcacgagaggagagctgcaaaagttgcagcagaaaggttgggagtcccgacaggttccgtagcccacagaaaagaagcaagggacggcaggactgtttcacacttttctgcttctggaaggtgctggacaaaaacatggaactaatttccccaacagtgattataatcctgggttgccttgctctgttcttactccttcagcggaagaatttgcgtagacccccgtgcatcaagggctggattccttggattggagttggatttgagtttgggaaagcccctctagaatttatagagaaagcaagaatcaaggtatgtggtcgtggcagacggggtctccagaggagacaatgctttcttttttaaactttctttcattgactcttaagtgcagggctagaacacggggaacatacctgcttgctcactaaaggatctagtcatttctgaattcctctactaacaattaacaacaatatcctgtgcaaaattttgcgaaagaaatgaaatacaattgcagcgtgcatcgacatttttggaagtagagattaacttt

SEQ ID NO: 14558 - DNA, 331 bp, Homo sapiens
gtgacttcttcattggtgctgtgattgaagtgtttggtcaccggttcatcatccttgatacagacgagtatgttttgaaatacatggagagcaacgctgcccagtattcaccagaagcactcgcgtcaattcagaaccatgtccgaaagcgagaagcgcctgctccagaagcagaaaggtgtgtgtttgattgctagggtttggcacactcaagatattcaggaagtaattcttgagaaaacaaatgagtaatcacattttagattttatgatttctctcaccaggtgggaattattagatataaacagaaggttccctgtgtcaatgtaa

SEQ ID NO: 14559 - DNA, 146 bp, Homo sapiens
ggctttctctttgtagagctctcaatatcatttaatcatgttttctcttaataaaaacatacttcatttggataccagaagggcacactttgtggtttttatttgacctcagtggctggttttttttttcccccccccggagtctt

SEQ ID NO: 14560 - DNA, 528 bp, Homo sapiens
attcggcacagggggtagtggccggtgagggcccaggctggtcagcgtcccgtcttgcacacccaggggcctccctttctgctggagtcccctgtgtcctcagccatcccaagaagggtttgctggtccctcctttccccccgtcccacgaggccacctgggccagccccttgtcctctgccttctgctggcagaggagcagctggactggggcctttggcacagcagccggtgtctcctgcgcccgcctcccccatggccccatgcagccccaggggcttcccccctgcccatgggagtagagcccgagatcctggccactatgccagttctgacctcgcatccccctaccccgagcccatgcagtctgggaacatgccgccttctctccagcctctgtgcctttgttccaggtggtctcaccctcctgtccctggctgggctaggtggtcctgtccaggctcctgcagcgcccccctcactttgacactggactaggatgcagcctcccttctgtgtccccttgag

SEQ ID NO: 14561 - DNA, 1368 bp, Homo sapiens
gatagcagctttttttattggttacaaaacctaagcccatatacaaaattaggaacacatttagatgcctcttttgaaagaacgttttagtctttttaaactgagtttaaaaaaaaataacaatgcaatttttaaacactgttttgaaaacttaaaagtgcagcaatatacttagtttcctttatctacgaaatggtgcaattccaattcaaaactggtaaggtcacaaattgaatcaaggaaatgcatacaagtgtctgcactacttgatgctaatgttcacttaaatgttaggtttgcactttaaaacatgagaggaaataggaatcatcacagtagaggcccaattttaatcataatgtgtgcaaattttaaaaggtaactgtcagttaagtaaggaaagtccagaagaaactaaactggaaggggtacggttcacaatatcaagaagatttggacttttaaagggtttcaccgaaggtttgtgaccttaattagcttttacgttgttattcctacttttagcgaacaccacacagtttcaaaaatttagactatagtgtccgaacaggatgcagttaccatatgaagctttaactcaaaatttggataaagaaaaaaaggcacaatgaacttcaactcaattttatgtgcacaagagttgaaaaatctgagccaccttaaagagaaattgattctaaaatttataaaacctataaataatcagaggccaaaccactatattaaaacagattctctagcaagtaaaaatcttgcagtttaaacatacgcttgtatccactttagatacaagacaaaactcactctttaaagtggctccaccttggcagatacatatatttgtaatgaatgcacacctgctatgtgttgtttatcagtgaaaacaccccagctgattcacaaagctctgatggcatctgtctcatcttcatcacagtaaatacaccccccaatggataactaaattagtttagattttctatcccttcacatcaatgcattgggaaattatacccagtaaacaagagcaacaataccatttctgtgacagcacaaattatttagtttaaaaatttttaaatccatattctttcattaataactgggtcagacaatttaccaaaagcaataacttgacatagtaataccggattttgcagaattacttagagatcactgcaaatcaggtttatgttaaataactgcaaattactcctctacacagatccctgtctgaatcttttaatatgtgaagatgctttttgagtaggatctgaattaacttcccaatactcaaagaatgaactcttatgacacttctaaatagttgctggtttgttgccaact

SEQ ID NO: 14562 - DNA, 867 bp, Homo sapiens
ctgcgccggaagtccctagccaggcctggcggtaaccttgggggcctcactgcagccgccgctgctgttggagtgggctttgcgagtctgaacgttggcggggctaggctcgttaactgccgagagcctccgggtttgcggtggaggacgctgaggcccgtggggggcaggcacccgggcgccgggcctcccagccgacatgtctctagtggcggaagccttcgtctcccagattgcagctgcagaaccttggcctgaaaatgctacattatatcagcaattgaaaggggagcaaattttactttctgacaatgcagcttctcttgcagtgcaggcctttttgcaaatgtgtaacttgcctatcaaagtagtttgtagggcaaatgcagaatatatgtctccatctggtaaagtaccttttattcatgtgggaaatcaagtagtatcagaacttggtccaatagtccaatttgttaaagccaagggccattctcttagtgatgggctggaggaagtccaaaaagcagaaatgaaagcttacatggaattagtcaacaatatgctgttgactgcagagctgtatcttcagtggtgtgatgaagctacagtaggggagatcactcatgctaggtatggatctccttacccttggcctctgaatcatattttggcctatcaaaaacagtgggaagtcaaacggtaagattgaaagctatttggatggggaaagaagactctggaccagggtcttagagggatgtagacccagtgctgtcaagctctctctcaaagactggggacacaaccgtatttctttcaataagcagcctactgaacttgacgcactggtatttggccatctataca

SEQ ID NO: 14563 - DNA, 462 bp, Homo sapiens
gccagcagacactgaagctctttctgctgtgacagtatttatggcactgaagaggataaagaagcttgagccctctttctgactcccactttatggggcagagagagctttttttctacatagcacattgcagtctcaccgctatcagaaaaatatcctgttcatggtttatactgaatttgcaaactactgatatgatttttcaataaccacttgtatcttccatcatccatgagaggtgggaagaggtacactgtatctctgcaataaaactttggccaggttctacctcctctgagcaaaggatacttttctatgtaggtgtagatggttctcctttactaatctgacatggtgcatctggagacaacatctgatgggatccaaagacaacttgaaacaaaggtggatgtcagctcttggtgtgttttcatttggttctctttttttaaatctcccttt

SEQ ID NO: 14564 - DNA, 1743 bp, Homo sapiens
  misc_feature (1)...(1743): n = a,t,c or g
atcagtgttcttgttataaccccctattttcagggggttaaaaatcagcttttaaaaaaatacataaaaatttcatcgttaaagcacgtttcattttataccaacggtgaaaagtgccatttttagaataactttaaagcttaacaggtttccttttaatatcctttttttgtgtgctctttacttacacaatggctttgttttgctttttcagccacaccccttatgtgaactagtgcctttgggtatcacgtaaaattttttccaaagggttactttaaaaatctgttaccacaattatgagatgatttttaagtgataaattaaacttcttcttgtataaattctgcccagatctctccacaagagctgagggtttcataactttatggcttaataaatgtatggacactggaaaaggatttgagtgtggaatctactggaaatcactataatgcacattgaagctatgcatggtatttgagtagtgaggttacttttgatcggagcaacataatgctcatagaatcttctagaagaagagaaacaaagggattgataaaatgctgagaactagtgattatatatttttctgtatttacctgacatttattttaatgttcaaaaagtaaacactttaagtttgatgtgttttactctctcattgttttaagtaattgccaactcagaatacatcattcttaggctgaaatttgtctttccattttttaaggtgaaatagtactaccttacgtgatagcatacaaagaagaaagctctagaaagagaaattatggagaatgattatttaaattacaattaaggaaatgagaatatgatcccctcttccgagttgcccacaaacttgcttctttgcttttgctccctgtaatagaactacttttcaacaaatctaattttgcacggcaccgttaaccatattttcactacagcaaacttagtgctatgggttttctttttctttgtttttttcttgatcacttgtatagggaaacaatattttccagtgttatttgcatatatattttgtccttccaatatatgcattacagatgaaaattaaatgttatacctgaattcttgggttggggccaaaatattaagctgaaaataattgctggtgtggatttgttttaaaaccaaagctttatttatgaacatgcatgtgaatctgggatattgcccccttatttttaagaaaatggttctgtgaaaagtgaatgatatgtatttttccaaatgcttcatggttaggagtcttcaagttccatgttccccagatttgagatatactaaagaaagaaattcaaaagtagctatttggggcccacaaaaataactattattttagccttagagccttacacttgtttcatgaagagaaaggacttgcataaccaaaataaacaaagcaagacaaattaaaaatatgtgggggagagatcagtgaaaagtggttttcttaatgcagccctgctggtccccattaacaattgcttgaaattcacatggatgtaaaattataattgtcaggatcttattcagatgatcttttaaggtttaactggttttgcttttgtttatctatatgtcaaaatacttgtaaattggggaacaaacttctctcagcttcttgaagttgttcaactatccttgccactgggaggccaaacaaggtttcactgcttttttctttttacctaatatggctggggnattatt

SEQ ID NO: 14565 - DNA, 1144 bp, Homo sapiens
tggtgtaaaaaacacaccctcccctcccaccccaaaaaacatcaaattccttccttttccccaaatccctggatcttggaatgaaagccacccttccccaatctgtcctcacctccttcagcccatccaagttatgcacaaaaaaacaaaaattagtgagaaatttggggatttgcacaacaaaaaattagataatgttttccaaaactaggtcttctatgctgtgtcaaaaaaagtttcctacagactgaggatattcacacgacaggagcctgggggttaaatgagcctttattagaatgttgtagcagttgtgtttgaaggcggtggccctacaaaaaaaaaattaaattaaagtccctaactgcatgggtaggaaaaccagggctggagctcaattggaaccggtggagcccagaactcatggagacatacgtatgtacgtgggcacgggacgccctcgcactggcatgaagccggcccagcctgcaagagacacggaacggcttctgcctttcctcacggaaccagtttttaaagagtgggacgggaaagaaacaaaaatgaaactaaaagcagacctgatccttttaaaaacatttttgtagactctaaagggaattacaaaaaaaaaaaaaagtctgaaagcaaatcctgacagcaacccctaggtttaaggacaggttctaaactagacccaaacggaaatcctgacatctgtgcgcagcggctcgccgcacacctggacggcacctcctgacctgcacacacctgtgcacgctcacctcccaggagcaaggccagggtggcttaagattgcgtccatcgaaatgaatagaaaaaaggaaaaaatttaataaaataaaccacaacagaaaaaccccgcgacagtcccccctccagctttctgctcagggctgctgccgaccggatcctctccttctcccttaatgggcagcttctggaatccctgcttctctggctgggtctgttcttcagtttgttcttctgctaagtctggaaggtgcgggggcgggggtctccagaacaagcagcaatggaggcgttcagctggagcgagggctgcctcggccatccctgcatctgtccgtcagtcacgggggcgggccggccgtccctgcca

SEQ ID NO: 14566 - DNA, 560 bp, Homo sapiens
ttttttttacaccaagacaacctctttatttaatgggctcagagagcaagggaaccacacaaaatttacagtctgagttttgcgcgcagagacccctctccacctttttcatgcctgtgtgtacacacacactgtccaagcctcagaagagaagccgtttattggtaaaaagacacatggaaatgtggctgccagggctcagagcatcctgcccttttcccaaacagctggcctctgctatccaccaggacttgggcttggcatccaggctggataccatgagagcaccttctgtctctggtctattctgccagtgtctccgtgtcagggtgggttggctccctccagggcacaaaggtctgggctctgtccaagagtgcccctccataggggtgggtaccaccatgccacacagcagtatttgccccatccggatgatcaagatacccctgcctcatcctgttaccttaaattccagaagccccatctctgcagctcagaaggtaaacaaaccctggttcaggcatttggtctccccagagcaaggttgggaggcatca

SEQ ID NO: 14567 - DNA, 437 bp, Homo sapiens
aatttataaataagtttaattgattcataattctacatggctcaggaggcctcaggacttacaatcatggcagaaggcaaaggagaagcaagcaccttcttcacaggtgtcaggagacggcacgtgcacaggggaaactgccacttttaaaccatcagatcttgtgagaactcacataccattatgagaacaggatgggagaaactgcccccatgatccagtcaccacccaccaggtccctccctccactcgtggggaattacagttcgagatgagatttgggtggggaatgcgagcccaaaccctatcagccatggaagttctggccctcccaccagtgatcctcactcttctcccagctgcagggtgaagaagccagtcagccatggtccttctctaatgatattatatagttagaacacaagttaaaataattt

SEQ ID NO: 14568 - DNA, 451 bp, Homo sapiens
  misc_feature (1)...(451): n = a,t,c or g
tttgannnnnnnnnnnnnnnnnnnnnnnnnnnnnnnnnnnnnnnnnnnnnnnnnnnnnnnnnnnnnnnnnnnnnnnnggcacgagannnnnnnnnnnnnnnnnnnnnnnnnnnnnnnnnnnnnnnnnnnnnnnnnnnnnnnnnnnnncctagcttttaaaaatgtcttgggaaaagggtgaaacagactagaagttgattgtattgtaagtgtaggaaagtaaggagaaagtttccgggtgtgaacattctaggtttgaacactgggaaggagggaaggcagccatgcattgtagtctcttaagtgaaagtttatccaatttaccaactgatattatagaccttaaaatattttgtaattgtataaagcaagttattataattgcctgttggtgtgatgtgtgtattttgtgactcataactcaatggcatttctttctaaattttaaaaa

SEQ ID NO: 14569 - DNA, 1207 bp, Homo sapiens
gggtttttttctcccctccccacccccagaaaaataattagaaaaatgtttaggagaaaggaaaagaattagatgcatcagaataccagctataagccaacactgtttccagaaactcaagaaaaagctcaaacagaagacagttcccctgagaggctggaggcgttggtgctgaaggcaattttcctagctaaggggcactgggccttgctgcaccttggggctgaccttttttgcaaaacacccacccctgccctcctggcatactcaacagcaacgccagctttctggacccttggaaagatgttagctcaaacacccactttttccagatcttcctcttgctcttcactgaggaatttgtaattctgaggctagcgatgccgactcggatattccgcaggcccaggtgtttagattagaatttgtccagcggtaatcctgatgctggaaaccaacaaacatttggcctcatattcacccatttaaaaactagagcccctggcaggtccccttagggccatgtgttcatggaatataagccaagtttgccttaggcttgttcatggaatataagccaagtttacctctccccattttctgccctggcccacttcccactcacctccacctcattgccaggaagggatcaaaatgcctccatgccagttgttaatggctacatatttgcccttcccaagggtatttgcattttatttaggaacatggccttatattcaaggaaaatctagcatcaagattacgaggcatcacctctcaatcaggtctgggaggtatcttggggcattgctcttctgaacacctgcagaggcttcctcaggtgagtgtgggagcccggaagggtggcctccctaaccactctgcctgcacatgaattctccaaagcagtgggcccccatctgtttcaattacacatgcctgtcagcaaaaacttcgtgagatgcactctctctgtgtgtttattaatttatttaaagcatatatccctttacttttgtactactatattaggcacattataaaaagtatacagcatagaaactttaaatgaataagacacaaaatattataaacagaggttctggcattttctctctgaactccctgagggggaccttgggcacctcctggtatgtgcacaccccactttgaacacccttgctttagtgcaaatcagcacgcctaa

SEQ ID NO: 14570 - DNA, 1195 bp, Homo sapiens
aacagtcagtacttacattgctgaaatataaattacaagtggttccttttggttaaaattatcttttttttttcttcaaaattcctttttagatgttctttgaagatcatattgatgatgccaaatattgtggtcatttgtatggccttggttctggttcatcctatgtacagaatggcacagggaatgcatatgaagaggaagccaacaagcagtcatgacatgaaatagtccttttatttttatttcgagctacacacatgcttgtatataggttttatctctggttgaatccctcgaacaatagacagtacctttcccccccctttcatggcccattttattgtctgcctttcagtactaagtatgaccgttcctatctcagatcttaataaaaagaaaaaaaaaaacgcattcaggttaaatttggccttaatttaatatacttgttagcaagcgtgtgtgacagagagtggggaaagctacatcattgaatattttgataaactttaccgacttgagtttggtttatttttcccttttcctaaattaactagcactgactgtaatttatttccctgtttcacgtctctcccttccattctgcaggagttttagctatttgagatcgtggaccatcagttttgcactttagagagtgtttctgactctaaacctgttttatcagaaaatttgttttttcttgatcttagctggaaaaatctgccaactttacacagtatttacttggttttgacccacagaatataggcacgttgtgcaaactgtcgattcagcgaaacttaaaaaagacaagaaactactgaggagcttagtaactgctgtttctgtacgtagtgtttaatcttccaagcacatctagtgtctgtcagtttctaattggcatgtgtaggctgctctgtgactgaagaattttcaaaccagctttacacccttcaggaaaaatccctcgtgattggatgtttactatctgccaggaaactggtactcaagatgttgaagctacagttattttatgatagcacacttcccttgatctgcttatttttattccatcaccatttacccttttttttttttaaattttgtagccattcttatgatgctcttgatttgttggttacacaaatcaattttattaaaaatccaaagataagtctttaggtatattttg

SEQ ID NO: 14571 - DNA, 1161 bp, Homo sapiens
tttttttcaaagtacataaaacttttaatgaattaactttacaaaagacaaatggcatcaaaacatcagacgagtttgatacaaaactggtcctaggctgtgaggactaattctggtgacggatggcgacgtgctgctggcatgagacacacggagcagagggacgagagccgtgggtcccaacgggggcccttggacaccactggcaatgagacaatgggtgagcacagagtccacgtgggggacagaatcaacttattcacgaatactgtgtgtttgaatatcagatgagcagatgcggttggcgagctaccatattttccagaaaagaacatgcaccagaagataatatacaccccctagttttattgccttaagaatgtgtgtgtgtttcacctttctcctctgttagttctcccagtgcttttcttctatcacgcgcgctccttttcccttttgcttaggagcaagcacagtgcaagtggcagaacgatctgggcacacatcagacaccaaacggtatgccactgggtcacgagaacgagtctgcagaggctccataggacagacagcacgcacatcaaaaacaagggacagaagttgcagtcagaaagtgtgtgataccttcctgaaaatacagtcttcttgccaaaatgaaggtgactcttcaggatgccacgttgctctgggaaagggaccttgacatttctgtgtttacaaagtacgtcttcaggtccccctttcctttcacgttgattattcctcgacaggtgcacgtgtatccgagggtctgcaggacgaggctcgtctcctcggtaacctgtattttgtccaggactccggtgctgtccatcctactggccacattgacagtgttgccccagatatcatattgtggcttctgagctccaatcacaccagctatcacaggtccatggttaatacccactcgcaatttgaagtcgttgaaggagtgcttgttgatggcatccagcttccctaccagggcaaaagcaaactccaccatggtgccaatgtgcatgtactgccgctcgggctcctgggagtgctcctggctgggcacagcgctcagacctgttgctgccatgtatgtgctgccaatggtcttaatcttttcaactccactgaattttggcttgg

SEQ ID NO: 14572 - DNA, 7922 bp, Homo sapiens
cggggcaggctgctcccggggtaggtgagggaagcgcggaggcggcgcgcgggggcagtggtcggcgagcagcgcggtcctcgctaggggcgcccacccgtcagtctctccggcgcgagccgccgccaccgcccgcgccggagtcaggcccctgggcccccaggctcaagcagcgaagcggcctccgggggacgccgctaggcgagaggaacgcgccggtgcccttgccttcgccgtgacccagcgtgcgggcggcgggatgagagggagccatcgggccgcgccggccctgcggccccgggggcggctctggcccgtgctggccgtgctggcggcggccgccgcggcgggctgtgcccaggcagccatggacgagtgcacggacgagggcgggcggccgcagcgctgcatgcccgagttcgtcaacgccgctttcaacgtgactgtggtggccaccaacacgtgtgggactccgcccgaggaatactgtgtgcagaccggggtgaccggggtcaccaagtcctgtcacctgtgcgacgccgggcagccccacctgcagcacggggcagccttcctgaccgactacaacaaccaggccgacaccacctggtggcaaagccagaccatgctggccggggtgcagtaccccagctccatcaacctcacgctgcacctgggaaaagcttttgacatcacctatgtgcgtctcaagtttccacaccagccgcccggagagctttgccatttacaagcgcacacgggaagacgggccctggattccttaccagtactacagtggttcctgcgagaacacctactccaaggcaaaccgcggcttcatcaggacaggaggggacgagcagcaggccttgtgtactgatgaattcagtgacatttctcccctcactgggggcaacgtggccttttctaccctggaaggaaggcccagcgcctataactttgacaatagccctgtgctgcaggaatgggtaactgccactgacatcagagtaactcttaatcgcctgaacacttttggagatgaagtgtttaacgatcccaaagttctcaagtcctattattatgccatctctgattttgctgtaggtggcagatgtaaatgtaatggacacgcaagcgagtgtatgaagaacgaatttgataagctggtgtgtaattgcaaacataacacatatggagtagactgtgaaaagtgtcttcctttcttcaatgaccggccgtggaggagggcaactgcggaaagtgccagtgaatgcctgccctgtgattgcaatggtcgatcccaggaatgctacttcgaccctgaactctatcgttccactggccatgggggccactgtaccaactgccaggataacacagatggcgcccactgtgagaggtgccgagagaacttcttccgccttggcaacaatgaagcctgctcttcatgccactgtagtcctgtgggctctctaagcacacagtgtgatagttacggcagatgcagctgtaagccaggagtgatgggggacaaatgtgaccgttgccagcctggattccattctctcactgaagcaggatgcaggccatgctcttgtgatccctctggcagcatagatgaatgtaatgttgaaacaggaagatgtgtttgcaaagacaatgtcgaaggcttcaattgtgaaagatgcaaacctggattttttaatctggaatcatctaatcctcggggttgcacaccctgcttctgctttgggcattcttctgtctgtacaaacgctgttggctacagtgtttattctatctcctctacctttcagattgatgaggatgggtggcgtgcggaacagagagatggctctgaagcatctctcgagtggtcctctgagaggcaagatatcgccgtgatctcagacagctactttcctcggtacttcattgctcctgcaaagttcttgggcaagcaggtgttgagttatggtcagaacctctccttctcctttcgagtggacaggcgagatactcgcctctctgccgaagaccttgtgcttgagggagctggcttaagagtatctgtacccttgatcgctcagggcaattcctatccaagtgagaccactgtgaagtatgtcttcaggctccatgaagcaacagattacccttggaggcctgctcttaccccttttgaatttcagaagctcctaaacaacttgacctctatcaagatacgtgggacatacagtgagagaagtgctggatatttggatgatgtcaccctggcaagtgctcgtcctgggcctggagtccctgcaacttgggtggagtcctgcacctgtcctgtgggatatggagggcagttttgtgagatgtgcctctcaggttacagaagagaaactcctaatcttggaccatacagtccatgtgtgctttgcgcctgcaatggacacagcgagacctgtgatcctgagacaggtgtttgtaactgcagagacaatacggctggcccgcactgtgagaagtgcagtgatgggtactatggagattcaactgcaggcacctcctccgattgccaaccctgtccgtgtcctggaggttcaagttgtgctgttgttcccaagacaaaggaggtggtgtgcaccaactgtcctactgccacaactgttagagatttgagcctctgtgatgatgcctactttggagaccccctgggtagaaccgcccctgtgagactttcccgcctgtgccagtgcagtgacaacatgaatcccaacgcagttggaaattccaatcgcttgacgggagaatccctgaagtgcatctataacactgctggcttctattgtgaccggtgcaaagacggattttttggaaatcccctggctcccaatccagcagacaaatgcaaagcctgcaattgcaatccgtatgggaccatgaagcagcagagcagctgtaaccccgtgacggggcagtgtgaatgtttgcctcacgtgactggccaggactgtggtgcttgtgaccctggattctacaatctgcagagtgggcaaggctgtgagaggtgtgactgccatgccttgggctccaccaatgggcagtgtgacatccgcaccggccagtgtgagtgccagcccggcatcactggtcagcactgtgagcgctgtgaggtcaaccactttgggtttggacctgaaggctgcaaaccctgtgactgtcatcctgagggatctctttcacttcagtgcaaagatgatggtcgctgtgaatgcagagaaggctttgtgggaaatcgctgtgaccagtgtgaagaaaactatttctacaatcggtcttggcctggctgccaggaatgtccagcttgttaccggctggtaaaggataaggttgctgatcatagagtgaagctccaggaattagagagtctcatagcaaaccttggaactggggatgagatggtgacagatcaagccttcgaggatagactaaaggaagcagagagggaagttatggacctccttcgtgaggcccaggatgtcaaagatgttgaccagaatttgatggatcgcctacagagagtgaataacactctgtccagccaaattagccgtttacagaatatccggaataccattgaagagactggaaacttggctgaacaagcgcgtgcccatgtagagaacacagagcggttgattgaaatcgcatccagagaacttgagaaagcaaaagtcgctgctgccaatgtgtcagtcactcagccagaatctacaggggacccaaacaacatgactcttttggcagaagaggctcgaaagcttgctgaacgtcataaacaggaagctgatgacattgttcgagtggcaaagacagccaatgatacgtcaactgaggcatacaacctgcttctgaggacactggcaggagaaaatcaaacagcatttgagattgaagagcttaataggaagtatgaacaagcgaagaacatctcacaggatctggaaaaacaagctgcccgagtacatgaggaggccaaaagggccggtgacaaagctgtggagatctatgccagcgtggctcagctgagccctttggactctgagacactggagaatgaagcaaataacataaagatggaagctgagaatctggaacaactgattgaccagaaattaaaagattatgaggacctcagagaagatatgagagggaaggaacttgaagtcaagaaccttctggagaaaggcaagactgaacagcagaccgcagaccaactcctagcccgagctgatgctgccaaggccctcgctgaagaagctgcaaagaagggacgggataccttacaagaagctaatgacattctcaacaacctgaaagattttgataggcgcgtgaacgataacaagacggccgcagaggaggcactaaggaagattcctgccatcaaccagaccatcactgaagccaatgaaaagaccagagaagcccagcaggccctgggcagtgctgcggcggatgccacagaggccaagaacaaggcccatgaggcggagaggatcgcaagcgctgtccaaaagaatgccaccagcaccaaggcagaagctgaaagaacttttgcagaagttacagatctggataatgaggtgaacaatatgttgaagcaactgcaggaagcagaaaaagagctaaagagaaaacaagatgacgctgaccaggacatgatgatggcagggatggcttcacaggctgctcaagaagccgagatcaatgccagaaaagccaaaaactctgttactagcctcctcagcattattaatgacctcttggagcagctggggcagctggatacagtggacctgaataagctaaacgagattgaaggcaccctaaacaaagccaaagatgaaatgaaggtcagcgatcttgataggaaagtgtctgacctggagaatgaagccaagaagcaggaggctgccatcatggactataaccgagatatcgaggagatcatgaaggacattcgcaatctggaggacatcaggaagaccttaccatctggctgcttcaacaccccgtccattgaaaagccctagtgtctttagggctggaaggcagcatccctctgacaggggggcagttgtgaggccacagagtgccttgacacaaagattacatttttcagacccccactcctctgctgctgtccatcactgtccttttgaaccaggaaaagtcacagagtttaaagagaagcaaattaaacatcctgaatcgggaacaaagggttttatctaataaagtgtctcttccattcacgttgctaccttacccacactttcccttctgatttgcgtgaggacgtggcatcctacgttactgtacagtgggcataagcacatcgtgtgagcccatgtatgctggggtagagcaagtagccctcccctgtctcatcgataccagcagaacctcctcagtctcagtactcttgtttctatgaaggaaaagtttggctactaacagtagcattgtgatggccagtatatccagtccatggataaagaaaatgcatctgcatctcctacccctcttccttctaagcaaaaggaaataaacatcctgtgccaaaggtattggtcatttagaatgtcggtagccatccatcagtgcttttagctattatgagtgtaggacactgagccatccgtgggtcaggatgcaattatttataaaagtccccaggtgaacatggctgaagatttttctagtatattaataattgactaggaagatgaactttttttcagatctttggggcagctgataatttaaatctgggatgggcagcttgcactcaccaatagaccaaaagacatctttttgatattcttattaaatgggaactttacacaggaaggaaatagggatatgataaccactaaaattttgttttcaaaatcaaactaattcttacagcttttttattagttagtcttggaactagtgttaagtatctggcagagaacagttaatccctaaggtcttgacaaaacagaagaaaaacaagcctcctcgtcctagtcttttctagcaaagggataaaacttagatggcagcttgtactgtcagaatccccgtgtatccatttgttcttctgttggagagatgagacatttgacccttagctccagttttcttctgatgtttccatcttccagaatccctcaaaaaacattgtttgccaaatcctggtggcaaatacttgcactcagtatttcacacagctgccaacgctatcgagttcctgcactttgtgatttaaatccactctaaaccttccctctaagtgtagagggaagacccttacgtggagtttcctagtgggcttctcaacttttgatcctcagctctgtggttttaagaccacagtgtgacagttccctgccacacacccccttcctcctaccaacccacctttgagattcatatatagcctttaacactatgcaactttgtactttgcgtagcaggggcggggtggggggaaagaaactattatctgacacactggtgctattaattatttcaaatttatatttttgtgtgaatgttttgtgttttgtttatcatgattatagaataaggaatttatgtaaatatacttagtcctatttctagaatgacactctgttcactttgctcaatttttcctcttcactggcacaatgtatctgaatacctccttccctcccttctaggaattctttgggattgtactccaaagaattgtgccttgtgtttgcaggcatctccattctctaaaattaatataattgctttcctccacacccagccactgtaaagagggtaacttgggtcctcttccattgcagtcctgatgatcctaacctgcagcacggtggttttacaatgttccagagcaggaacgccaggttgacaagctatggtaggattaggaaagtttgctgaagaggatctttgacgccacagtgggactagccaggaatgaggggagaaatgccctttttggcaattgttggagctggataggtaagttttataagggagtacattttgactgagcacttagggcatcaggaacagtgctacttactggtgggtagactgggagaggtggtgtaacttagttcttgatgatcccacttcctgtttccatctgcttgggatataccagagtttaccacaagtgttttgacgatatactcctgagctttcactctgctgcttctcccaggcctcttctactatggcaggagatgtggtgtgctgttgcaaagttttcacgtcatcgtttcctggctagttcatttcattaagtggctacatcctaacatatgcatttggtcaaggttgcagaagaggactgaagattgactgccaagctagtttgggtgaagttcactccagcaagtctcaggccacaatggggtggtttggtttggtttccttttaactttctttttgttatttgcttttctcctccacctgtgtggtatattttttaagcagaattttattttttaaaataaaaggttctttacaagatgataccttaattacactcccgcaacacagccattattttattgtctagctccagttatctgtattttatgtaatgtaattgacaggatggctgctgcagaatgctggttgacacagggattattatactgctatttttccctgaatttttttcctttgaattccaactgtggaccttttatatgtgccttcactttagctgtttgccttaatctctacagccttgctctccagggtggttaataaaatgcaacacttggcatttttatgttttaagaaaaacagtattttatttataataaaatctgaatatttgtaaccctttaaaaaaaaaaaaaaaa

SEQ ID NO: 14573 - DNA, 1148 bp, Homo sapiens
  misc_feature (1)...(1148): n = a,t,c or g
ttcagctcttcgggattctgcctccaggttgccctcggagtggagtctgtggctttccaccggagcagcgcccaggaagtgttttcgtgtgatgaaagttatttttcagtgctgtacaagcgtcttgaattactctggtagcttttccagaaagacccatgacttcaccacatttctcgagttacgatgaaggtcctctggatgtcagcatggcagccacaaacctggagaaccagctgcacagcgcacagaagaacctcctgttccttcagcgggagcatgccagcacgctcaaggggctgcactccgagatcaggcggctgcagcagcactgcacagatttaacatatgagctgacagtcaaaagttcggaacagacaggagacgggacttctaaaagcagtgaattaaagaaaagatgtgaagagctggaagcccaactgaaagtgaaagagaacgaaaatgctgagttgttgaaagaactggagcagaaaaacgcgatgatcacagtgctggagaacaccatcaaggagcgagagaagaagtacctggaggagctgaaggccaagagtcacaagcttgaccctgctgtctagcgagctggagcagcgggccagcaccatcgcctacctgacctcccagctgcacgccgccaagaagaagctcatgagctccagccgggacctcagatgccagcccgtcagggagccccgtgctggccagctacaagccagcgccccccaaagacaagctacccgaaacgcctcgccgccgcatgaaaaagagcctctcagcccccttgcacccggaatttgaagaggtctacagattcggggcagagagcaggaaactccttttgcgggaaccagtggatgctatgcccgaccccaccccatttctgctggctagggagtccgccgaggtccacctcatcaaagagaggcccctcgtcatcccccccatcgcctccgaccgaagcggcgagcagcacagcccggcccgcgaaaagccgcacaaggcccacgtcggggtggcacatcggatccaccacgccaccccgccgcagncaagcccgaggtgaagaccctggcggtcgaccaggtgaacggaggcaaggtggttaggaaagcacttagggacggacagaa

SEQ ID NO: 14574 - DNA, 2903 bp, Homo sapiens
gtctaaagagtgtaaagacctaattacacggatgctacagagagatcccaagagaagggcttctttagaagagattgaaaatcatccttggcttcagggagtggacccttcaccagctacaaagtataacattccccttgtgtcatacaaaaatctctcggaagaggagcacaacagcatcattcagcgcatggtgcttggggacatagcggatcgagacgccattgtagaagccctggaaaccaacaggtataaccatatcacagccacatacttcctgctggctgaaaggatcctgagagaaaagcaagagaaagaaatacagaccagatctgcaagcccgagcaatatcaaggcccagtttaggcagtcatggccaaccaaaattgatgtaccccaggaccttgaggatgacctcacggccactcctttgtcccacgcgactgtccctcagtctcctgctcgggctgctgacagtgtcctcaatggccacaggagcaaaggcctgtgtgactcagctaagaaagatgacctccctgagttggctggaccagcactctctacggtgccacccgcaagcttaaaacccacagccagtgggcggaagtgtctgttcagggtggaagaagatgaagaggaagatgaggaggacaagaaacccatgtccctctcaacacaagtggttttgcgccggaagccatctgtaaccaaccgcctgacatccaggaagagtgcgcccgtcctcaaccagatctttgaggaaggggaatctgatgatgagtttgacatggatgagaatctgcctcccaagttgagcaggttaaagatgaatatagcttctccaggtacagttcacaaacgctaccaccggaggaaaagtcagggccggggctccagctgcagtagttcggagaccagtgatgatgattctgaaagccggcggcggctcgataaagatagcgggttcacctactcctggcaccgacgggatagcagcgaggggccccctggcagtgagggggatggcgggggccagagcaagccgagcaatgccagtggaggggtggacaaggccagccccagtgagaacaatgctggtgggggcagtccctccagcggctcgggtggcaaccccaccaatacatcgggtaccacacgccgctgtgccggccccagcaactccatgcagctggcctctcgcagtgctggggagctcgttgagagcctcaaactcatgagcctctgcctcggctcccagcttcatgggagcaccaagtacattattgatccacagaatggcttgtcattttccagtgtgaaagtccaagagaaatctacgtggaaaatgtgcattagctccacagggaatgcagggcaggtccctgcagtgggcggcataaagtttttctctgaccacatggcagataccaccactgaattggaacggataaagagcaagaacctgaaaaataacgtgctgcagctacctctgtgcgaaaagaccatctctgtgaacatccagcggaaccctaaggaggggctgctgtgcgcatccagcccagccagctgttgccatgtcatctgactgtggccccatctggccgctagcacgcttcctgctcagagcagtgaagaccggctcacttcactgttccatttggttttactattttaaagtgggcgttaggagcaattatttattacctttccatttgttcgcctgatgatgtgacaatgcatggtctttgtgcatgctgctagacacttttctttcccagccgaaaagcctattatgtaatttttacattcataattttaatgtggatgatcaggattaaatcaagatatatatctggaacctcttataaatggagcacttagaaatttgttgttctgcacttaacctagagagagaaaaaatgctttttctttgtgaaaaatctgaattcctgtcctgaccttctgtgatgtggaaaccctaggctctgagacacactctctggtgtctgagacagaaccaaagcaataacgttgtgatgcccacaggcctggagccagctagcgaccttgtgccgcccagctgtccatggcccgtgcagagcagaggacagtgagtgtctgcactgagaaccttaaaccacagttgaacatacccacacctgtttgtcttaagctatagtgtaaaaacaaagtttgggctctgaaaatttaactgaaaaagatttccttgtttttgtaataggtgagataaagtacttagatttataaggcagcttcccctgtagtgataaattacaagcagacaatcttattttgtaatgtgatgaagtgatgatgtcttaactctacttagagagtgtatgtctgtctaacagaacaaaaagatgctctgtgtaaattccttcctgtagggcacactgcaggatttccatgtagatagaagaactatagggcctagtacagaaggtgcacagcaaatgttggcaaagtcaaaaccccatgaattaaaacctactggaatttggtttttaggagtttggtaattagattatctcttttgttattttcattcagttatatcctttgggctcagctagctttgaaattggctgatgaaaaaatatacataaaagggtaaaattcacacatacagcaaacaaaaatgcacaaagcctgcttcgtaacttttttttctggaattgtttttcactttgcctttttctgccaaaacaataatcaaagaactcttgctttaacctattcctgtacaaagactgtttttgaccagataatcatctgttgtggcattctatcttgtaggacactgtatattgcaaattgctgattatggaaggggccagttgctgttttttcatgcagtgccctgggagtcttaaaagcag

SEQ ID NO: 14575 - DNA, 613 bp, Homo sapiens
gaaacttttagggaattatactttggtggctcaatagtagattctacaaattatttttaaattgatttcctttccttagagctgcaggagaatatctggcaaggtgcatttaatatttggaaaaaagatatgaccagtaacctactttaggaagaaaataagcatcacctggcatcaggtaggcatcgtaaggttgagctgtcctatctgaaaaaatatgcgatataatttattacagaagttactttatactaatgcttaacatttatgtttttagttacacaccccttccattttaatctgctgatagggtaggacatctaaagagagttttaggaatgacatctatttgatgaggtcagattttcaacagcaaaatgacttaaaactgagtacaactctccagaaatgaacacaggctgaagtattctgaagccagtgatattgtcactgatgatttgctgctttttgtgtatgtgtgagctcatcaaatcctatatgattgaactgatcattgttaagagataacatgagcagtgatttgggtattattcactgttgcatctttggggtacaaacttgcctttccaatggggatagggttaatttctgc

SEQ ID NO: 14576 - DNA, 105 bp, Homo sapiens
gcaagaagattctgcttaaatagatttggcaatgcagttaaaggggacctcttactaccatttaaagggttacattttggcatctccaaaggctgttcaactgta

SEQ ID NO: 14577 - DNA, 550 bp, Homo sapiens
ggaaagatacactcaccggagaaaagaagtttctgaagaaaaccacaaccatgccaatgaacgaatgctatttcatgggtctccttttgtgaatgcaattatccacaaaggctttgatgaaaggcatgcgtacataggtggtatgtttggagctggcatttattttgctgaaaactcttccaaaagcaatcaatatgtatatggaattggaggaggtactgggtgtccagtttcacaaagacagatcttgttacatttgccacaggcagctgctcttttgccgggtaacccttgggaaagtctttcctgcagttcagtgcaatgaaaatggcacattctcctccaggtcatcactcagtcactggtaggcccagtgtaaatggcctagcattagctgaatatgttatttacagaggagaacaggcttatcctgagtatttaattacttaccagattatgaggcctgaaggtatggtcgatggataaatagttattttaagaaactaattccactgaacctaaaatcatcaaagcagcagtggcctctacg

SEQ ID NO: 14578 - DNA, 464 bp, Homo sapiens
gaccgggaggcgctgccgcttctgggcagacggttccgggagccgcacggtcccctctccttccccatcctctcccctcccctctccgggttcccccacccacaggagccttgggccgaccactcccccgatggcctcagccacggaggaccccgttctggagcgttatttcaaaggccacaaagctgcgatcacctccttggacctcagccccaacggcaagcaacttgctactgcttcttgggatacctttctcatgctatggaatttcaagccacatgctagagcttacagatatgtgggtcacaaggatgttgtaaccagcgtgcagttttctccacatgggaaacttattgggcgtctttcttcacgagacagaaccgtgagatctgggatttctgataaggagagggaaaattttgagattttaaaggtcatacagctccagtttggaagtttagatt

SEQ ID NO: 14579 - DNA, 521 bp, Homo sapiens
tctgattccgggctgtcatggcgacccccaacaatctgacccccaccaactgcagctggtggcccatctccgcgctggagagcgatgcggccaagccagcggaggcccccgacgctcccgaggcggccagccccgcccattggcccagggagagcctggttctgtaccactggacccagtccttcagctcgcagaaggtgcggctggtgatcgccgagaagggcctggtgtgcgaggagcgggacgtgagcctgccacagagcgagcacaaggagccctggttcatgcggctcaacctgggcgaggaggtgcccgtgcatcatccaccgcgacaacatcattcagtgactatgaccagatcattgactatgtggagcgcaccttcacaggagagcacgtggtggccctgatgcccgaggtgggcagcctgcagcacgcacgggtgctgcagtaccgggagctgctggacgcactgcccatggatgcctacacgcatggctgcatcctgcatcccgagctca

SEQ ID NO: 14580 - DNA, 396 bp, Homo sapiens
gctgcatagggctcggcgtgggctggctttggcccgagaatcatagtttgccgacccctagcctggatgcaacggctttcacactttttgacactgacccacatctgcttctttgcatttctcccaaacaaaagtttccagaagccacatttaaaatgcattctgctttttctctcctcttccatttccttggttttccaatgcaaaagaaaaagatcaataattggacttcatatcccactagtggctataccccacagtctgaaaaatagcacaccagatccaccacagtataatggtatgtatagagatggggtctgagtatcagccaccccaggttctaactctgcctgcagcacacacttgttttgggggggggggggggggggggaattc

SEQ ID NO: 14581 - DNA, 6886 bp, Homo sapiens
  misc_feature (1)...(6886): n = a,t,c or g
cgtcgactttttttttttttcttttttgcatttctcatttttatttgacagaaaaagttgctcttgctgtacagattttaaaaaaccaaaatgcctttaagaaacatgaaaagttggggggaggggttcacaacctcatgggggacagtagggaccaactaattccaactcctgccccttccttccaagaacaccttatacaacctccagtcccaaccaccatcacaatcacccctgggaacttctggatacaagtggggccatgcctccctggccctgactccaggctggggtatcctgaactgtatcctcccctcccccaactcccatctgcattccctcccaccccaaaccccccagaacacatgaaccaggaagaactcacggagattaacatttcacaggaacaaagaaaaaaaaaaggggagggaaagggagccctccatccaagggctgccaaggttcaaaggagagcagacaaggaccctcccacggctctgctggggaagaagggacactccttgtggctccagagcattgggtgtggtggaatcccccaaagacaatttatggagacctggaggagcggtgtctcatgggccgagggctaggtgtctccctcctgcgcttgtggctgggggagcggctgtccccacgctggcctctccgggaaccccgctcactgctgctgctctgctggtcccgtggtgagggctggggcgagggacggcgacgctccacaggcgagtagctgagggaccgagagtccctgagggagtctattggcttccgggggctgcgggacctggggaacacagtaggacccaatagcaccacaccctttcaagcacacgggccagcactcaggaccacccgcccaggtcctgaccaccaaacctcacaccacacagggccagcctcagacccacctttgtccgctcactcacccatccgcccgcacaccatccaccgagtgcccagtgggccagncacagggtgcagcgggggatgcaaagataaagacagtccctgcccttgaaggagctcagtggtgaagaaaggcacgcacggcccccgtgtgtgggaagcagggctggatgtgcgtggctctggggaccccaagggagggggacatggggcaaggcagggaaggggcagggcagtcttctcgaaggtgctgttttgagcggagtcttgcagaacgaggagttcaccaggcggacaaggaaattccaggcagaaggaacagcatgtccaaaggcatgggctctccttagactgcaaggcgctgggtgtggctggagcacagggcatgtgtgggggcgggcaggaggagaacagcagggcgggcaaggcccgttggtgaagagcctcacacgccactcccgcagaggtggggctttgtcctgcaggccacagggcgtcccgaaggatttgtggagtggagggaagtagccagatgtgcgttttagaaaggtccctctggctacatgtggaagagaatggcgtggagacggggagacagggaggaggctccgctcgccagggggtggcttcttggggcttgcaggtttgggcaaggcctgagggccaggcttagcaggggaaggggaggaagacgacgaggaggaggaagatgaggaggaagaagaagaagaggaagaggaggaggaagaagaggaggaggaggaggaggaggaagatgaagaggaggagctggaactggaactgctagagcgcctcttccgtttggctggggttggctccggaggacgtccctctcgaacagcctcctttggggctggggtggggctggggaccctcttcagtgccacctcaggttgcacaggaaggctagagccctctgagtcactagaactggagccagaggaggaggaggacgacgacgacgatgatgaagaggaggaggagctagaggacgacgacgacgaggaggaactccgccgctcctttgctggctgcagggcggctaatgcagaaggctgctgggccccagtagaggcaggtggctcccccacatcagagtggggcaccccaggggcagggacagagagcatgccattgtgatcaccagcagaggacgtggtcgttgccactgccccagaggaaagggactgagaccctgctacaggggtggtctgggcaatcaaacaacgggattggtctgaaaaagcagaaggcacaggagacctcggctgatcctgtgctggagggagaagagactgtgaaggagcctggcccattctagaggaaggggagggagcccgttcagaggtcatcctagattggcttggggcagacggtggtgttctggacctagctcggtcaaggagcggtggtgaggttctgccactgacacgctcgtaggcagaaaggggcaccctggggctggtgaggtttgcaccagacaatgctggagccatcctagcactggtgaggctcgcgggggccaaggctgcggcggttctggagccggcaatattcacaggagctgtggcatgtgcagaccgaggacccaccaggtttgcagaggctggagcctgtggtgttctggagctggagggatagtttgcagcagttggtggtgtgccagagcctgtgagactcagagctgccaaggcagctggggttctggcccctgctaggttcacagctggggctgtgggagtgcgagggtcagccaggttcacagccgaaggtgccaccgctgttctggggctggccaagttcatggccgctgctgcagctggcgttcgagagtcagccaggttcactgctgttggaatggcaggtgtcctggcgctggctaggttcatggctgccgcagaggctgcaggaatcctgctggcaaggttggctgctggtgcggttctgagactcatgagaggcaccggggctggaacctgggacattcttgcagcaaggccagcagcagacatggacggaggaggccgagcggtgccaagactgatagctgttcagggcaagtgcaatcctggactgagcatgattttctggcacagatgttctctggtggtcaggtattcggggacctggaccatccatcatggagccgccggcttgctgcaggacagacatgggtgttctagagctgccaaggggttcaagcattccaggtgatctgcagcgatcaagaggtgttggggacatgctaggacgactgaagcagctcattctggaactgttgagtgctactggaggtgtccgtgaaccagaatgatttcttgttgctggaggagtagcagatcgtgaacgatcagaactacttccagatgcagaacgcctgcggatggctggaggagatcttgttaaggaccgtttaccccgagctgttcgtggagtacgggatctggagcggcggcggatagcaagtggtgagcgacttcgagaacgtttgcgtggtaacagtggcgttcgagatctagagcggcgccgaatagctggaggtgtccgggacctagagcggcggcgtgtcactggtgaggttcgagagcgggaccttcttcgagttactggagatgtgcgagatcgagatctccttcgggtgaccggagatgttctggatcttgatcttctgcgagtgataggcgaagttctgcttcgagatcgcctcctggttactggtggagtcctggatctggaccttctgcgagtcactggtggagttctagaacgggagcggcggcgtgttgttggcgttctagaccttgaacgacggcgggttactggtggcgttctggatctggatcgccttctgctcactggggatgctcttgaccgggatcttcgtcgagtcactgaagtcctggaccttgaccgtctccggctgactggtgaagttcgagatctggacctacgtcggcttatcaggggggttctggacctggatcgccggtgagtggctggagaggctcgagatctagagcgtttccacggggctggtgatgtgcgtgagcgagaacgcttccgactggttgggggtgtccgagagcggcctcttcggcgtcgagaggaggtccgggaactttcctgccgggcaggtgaccttgagtgataaccagagcctcccctccgccgccgagtaacccgcgaccttgaccggctccgctgtcttcgccgagaggttgactgagaagatccagacctatctcgacgtcgggttgttcttgttttctctctccttgagcgggaacgggacctctggagtccacgaggctttggcgaaggagagcggcctctccttgaggttgtcttagtgcgtggagatgaagctgagcgccgtcggcgtgaagacctcgatttttcggctggctccggggaagacactgagggacttctccggtgccttgggggagttctagagcgagtttctggtgaggatgaggcagagcggcttctacgggacagtctggccttccttgttagctccggagatgatcgagagctgcgacgtcgaggtggtgtacgagacttggtcttgggctctggtgatgacctggaacctctgcgagcagttctggatttgggcggatgttcaggagaggactcggtactgctgcttccttcaggagaagggcctctgcctttgcttgatgaacctgatctgcttcgtctgggaaaggcccgaagggctggagctttaggttcaggagaggaatcagaaccactctgtgccctgggtgctgctcttggcttatctttcacttcaggggaggaaccagacctactgcgccgaggggatagtcgagatttgctgtcaacctctggagatgatccagaccgactcctctgccgaagtggggttcgtgtcttggctttagaatctggagaagagtctgactcacttctttcctgaggggatgcactgggtttcacatcaagttcttgagaggatcccgaacgacttctctgccccaggggagtccgagccacagttttctgatcaactgatgattctgacccgcttctttctctctggggggtaagacacttgttgttgagctctggggatgatggagaacgactcctcggcctaggagtctgaggcaaagctttcggttctggggaagaatcacattcgcttctccctctagatggcgttctaggtatatctttcattccaggagaggacccagacaggctgtgcctcgagggagtcccagacccatctctaagtcctggagaagacccagacctgcttctccttgatggagttctgggtaaaccatctttcatttcaggagaagatgcagaactacttctttctctcgagggtgttctgggtacagcatcaagcacaggtgaagagatgctctgatttgaagacatccctgccttttccactgcatctggggataactcagaactgctgtgtccagaggatcttgtcgattgttctttcatgtctagagatggatctgtttccagctgattaagaaacggtccattcaaatcttctttaacctcagaagaaaatccagtattcatttctgtaccaagtgggcctgagtttctaaattctaaaggtgatccaaagctgttctccctgagtggggagttagacagttctttatgttctggagaaaaatgtggcccaccccaagatgaggccattgaagggacttctactgcttccaaagaagcctgtgactggctctgatcaagagtcaaagacacagcaggcctttcttctacttcaggagatgattcaaagttacttgtggacatttctttaagttctgaagacaaatgagacaggatttggcctgcgggttcttcagacttctctaccacctccattaactcttcatcttggcttgacgtaggcaatgcactattttgctcttttgtttctggagatgacccagcaccacttctttctcttggcggggttctaagtgtgtctttgaataccagtgaagactcaggcctatcctgtactggaaagggactaaatttgtctttctgtctaggaggtgatgcagtagcatcctcctgagggggtaaggccattttctcttttgattcagcagtctccaatctactctgccccaagagagaattcgagtccactgtaggatatgaagaagagtcagactggaacctgctctgctcaggagacattccagatttcaacataggactcgctgagaactcacctctatcttgtcttattggagatctggatgccagctcagtgactggagatgaagacctggaccgacctcccttaggtgatgtttgagatttgctctgcagagatggtgattctgaatgactctgtctcacttctggacttgaagtatcagatctgtggtctggtgaagtttgagattgtcctttcagttgcagagatgagacaccaaaatagctctcgcctggtggtgtgctagattttactcctgcacagagagagagggatccagggcaactttgaactagtgagtctttagacttctcttggggacatggtgactttgatccagaaagacttggccccggtggagtttgggcctttactttggggtatggtgaaatagaccctgagtgactttgtcttggcggtgtttcaggtttcactttggtatctggtgaggaggacccagaatgactgtatcttggcaacaatctggattccacattggagcagggagatactgatctgcttcgccgtggagttgttctcgacgtcaccctactaggacttggagaagaggagccagaatggcttctttgtcttggtgatattattgccttcactttgggttgtggagatgatgacctagatgggctctgtctgggaggtgtgctagatttcactctaggaggagaggaccctggtcga

SEQ ID NO: 14582 - DNA, 564 bp, Homo sapiens
gtggggagatgctgtttgtttatttttaatcaaatgtgtgtgaacaaagcagtcgcccatctacttcccgttggaaggaatgctgggcagtaataaattagacggccccaccctcccagggcacagggggactttggtttctgcttctctagaggtacatggggaacaagcgtggcttctgccagacttgtttagctgtgacctgcagggcagacccctggggtgcaatattggttcaccagatggaaggtcagcatggctgttgcacgcttgtctgagagggtcctggcagtgggtacgcagggtgtatggcagggcctcttttccagtgcttgctctaggccagtcctcggcagggaccctgctctggggagagaggcagggtgtgcccaggctttggtccgatgccgagagcactgctcaggccttgttcttgcgtctttgaagccagggggccttggggagctgttggctttgagcggcttccgcgcttcaaagaattcgcaacattttttcccaggggccccagattagttgttggcattgcattaaggttcccggggt

SEQ ID NO: 14583 - DNA, 577 bp, Homo sapiens
ggagacaatttaatattgtcctctattagttcttaaattccaggaaagtatttgtgactttgcaaaggatctagtcaagcttgcaactaaccccaaaggaagtaggacatccaacttatattttgctaaattttccttttagagaggtggagatgctttctgaccccgtcgaggtcatccctgtactgggccttacataatttctgctgtcggaaaaaatccactacacctaagaaaattactcccaatgttactttttgtgatgaaaatgcaaaggagcccgaaaatgcacttgacaagctcttctcttcagaacagcaggcttccatcttgcatgtgttgaatacagcatctactaaagaacttgaagctttccgattgcttcgtggaagaaggtccatcaatatcgtagagcacagagaaaactttgggccatttcagaatttaagagagtttaatgaatgtgcccttgtttaagtataaaagtacagttcaagtttgtaactccatactttgtccaaagactggacggggaaaaaagaaagtcaccggaaaaccggttcctgagaaagctcct

SEQ ID NO: 14584 - DNA, 528 bp, Homo sapiens
tttgtaaaaccatgccttagaattggactaaggaagaagctgctgacactccactgccacacagggcactggaagaaagtgctgctgcctccctgccccacctttgccacttctgcagcaggaataggtagaagaatgcccccacccgcaccggaacagcaacaaaaggattctgcatgagatgcctccctaaattgctgaattcaaaaaagaagttgcatacaaagacatctgattgaaaaagggtatgttatatgcccctttcataggctgctagggagttttcctggttctactttcaggtggtgggatcaataagaccagaatttctcatatgttgtgagaggattcaaatgttacagggttgccagccaaactatcaatcatgtataaatccaacaaacactttgtaacatacaagaactcaggaaatgtgaaccattgttggagaatctactaaaatacggttcccgcaaacgaagatgaatggaaaatgtaaataaaaagaactggcagtgtaaaaaaaaa

SEQ ID NO: 14585 - DNA, 374 bp, Homo sapiens
tgtatagtccgccaatgtattttcttcccactattcccattaacataccaaacactgtttctaggtccaaagtctatttctaggagtggccaatatttgtattgttgaatctcctagggaatgctaaatgtttcactttaaaatacctatttataccaagtagcatgagattagtactagagtgagatttggaatattagtccacatatcacaaactgcttgcctacatgtatagattttttttttcacccaccttcctaaccaggaatttgtttccttaaatttgttgttgttgttgttgttgtttgttgttatttttttgagaagagtcttgccctgtcgccaaggtgggggaatgcattgacgtgatctca

SEQ ID NO: 14586 - DNA, 470 bp, Homo sapiens
  misc_feature (1)...(470): n = a,t,c or g
ccatgacttcaataccctgtactatcacgagactgtgaattttttggcaatcctctagaataaacaaacgataccaatatttatctggaatagcaacagattctgtccttaacaaatgtaacagtattatttgattacaacaaagcaaaacaacaataaaacaccaggcagagatagcgcacgtctaaaaccattatagcagtgatggttggctcattgatgaggtcagcatgaaaggccactttataagaccctatatgctgtttataaaacaaacttttatattttattttattttagacaaagtctcgctttttctctcccagactgggagtgcagtggcacaatctcgggctcactggcaacctccgcctcccggggtttcagggcgattctcctggcctcagncttcccaagtaggctgggggtttacaggtgttttgccaccatgncccggttaatttttgtat

SEQ ID NO: 14587 - DNA, 451 bp, Homo sapiens
  misc_feature (1)...(451): n = a,t,c or g
tgganatccgntatgccatgattacgaatttaatannnnnnnnnnnnnnnnnnnnnnnnnnnnnnnnnnnnnnnnnnggcacgagcaaagtgctggggttaccgtcccacagcaaacttaatacattttcaaaacttagcttgnnnnnnnnnnnnnnnnnnnnnnnnnnnnnnnnnnnnnnnnnnnnnnnnnnnnnnnnnnnnnnnnnnnnnnnnnnnnctccacgacaagatcctgactcaaacccaaaccaaaaccaaacaaaacttaacttggacgtcacctcctttgtgaagtttttctttccttccttaggtaattaattgttccctacaatgttctgttcattaaagttttgtttacatgtttttattttctactaacatttgaggtgtgctttgggaagacagggactattttattcatctttgcctcatgacatatactaagt

SEQ ID NO: 14588 - DNA, 2081 bp, Homo sapiens
ggaaaaagaaatttttttttaattagaaaccaagtttacatacggttaaatggttactaaaagctcagttgtaaccactcctaacaccactagcagaacctcaagggagccaagagctcttcccttttcccctgttaatttccagtataattgtagcagcacaattatttcatgtcacatttaagaagaacaagaaccaatttatataaagtacaattgtatatccttaaacattccacataaacacactgtcaaaactcactggatatgctggaattggaggacttaaatttctacatattatttattgcaccccagagtactgggttaaaatgcactttctgtgaagatcaaatgcaataacgtatgagggtatttttaacactgtgaagtacacacataatattataaaatgccatttaattggaaggagttttctatcattgcaagtcataaatgtaacttttaaaagaatactagcagcttttacctaggctcctaaatgcttgtaaatctgagactgactggacccaccccagccccagggcaaagatacatgtacccatatccatttttataaagaattttttttttgtcgtccagtttggcctttcctactgcagcccaggtgagagcttaagatgtcagtccccaatatcttcacagagtgcctttatgaccagtttggagaattacgatggtaaggggaagaggcagatatgaagaggaatggttaggggaattgtcattcataactctgtgctatattacttgaggggctaagaaaaatgtatggtcagtgaaacacagtagtgtacccttaaatgccttataaaagaccatccatccagtctgcgcttttgactgtgtgcaagtatcagtaataatgcttttgggggctcagatgaacagcgaacaccaatcagcccaggactctgggaaggaaagctccaaaaatgagaagtccttcaacaccattttccattactgttctcaccaaatcaatgactataaaacagttttgattatttatctccatcaaagtgatttgatttgagataatcacacaatctcaggctcggtatgtaaaaatgtcagaaagtggctgaagtaaaagcagcagctttgtgctgaagacacccatttccctctgactccagagctccaccatctggtctcaagatttttccctctgaggaaacagctgtagagaggtagcccagttcaactttgctgagacagtgaactttgcaaccatactaacacctactgacttgcagagaacgctgagaaagacagtgtgctttgcaatggttaagtccacagctcctgagattgcctcgcaagtcatcttgggcatgaagcagagcggtgcatcagaaaaacatgacgattctgctgagaggtggctttaggaacaaaatagatggctctcctcccttaaagtcttttctccccaccctcaacatttcacgagaacatcagttcataaatactaccatctgtttctatcaccaccctcctggagaaagaaagttaaggttttacaaccacatgtgctcaagagtaaatatcatcaggaaagctctgtactaacaggcaggttattaagactcccaagaaatcctcataagcttttcaatctgaggaaaatcctgagaagggtaattagtaagcacccaccctagcgatgtgggtgcctggttttggttaagttgtccagtttttcccccttcctttgttttctcacccctcttaacttccactgagaaattaaagtggaaataagttcaaagaatcctaagcctgatagagcctaggtgtctcttcattttatatttcatatggatgaagctattctagttgataatttggtataattaaaataactgaaaaggtaggtataaggaaaatttctcagcctttaaaaatccattacattttgataaataaaacttgcatactcattctgtagtttgtataataaaaaatgtattgcattttccaatttttttttaacatatagcctggttaagaatcatgcatatccttgtctctccgaaggataaactgagctggcc

SEQ ID NO: 14589 - DNA, 301 bp, Homo sapiens
gtgaaccaccactcctggcccaaaaacatttttaaagactgatttaatgaaaattctgtggttagtatagccaataaaaagactgacttggctttgacttccagctctactaccaaaacccacgagagtgtgacaacctcaccaagccttaagttcttcatccataaaatggggataaaagttacacctaccacatatgattgttatgaaaagaaagaggtagcaagtagcatatttagcacagtcctggcatacaataaatgctcaagaaacacttcataaatcggagacattctgaaca

SEQ ID NO: 14590 - DNA, 428 bp, Homo sapiens
gccaagattatgaccaagacttttccatgtcactttgtggtcccaaaagggtcaccagcaattccccaggcaactgtggtgagtttccctaaaacaagactaacctctgagccccaggtgatattcctgccctggtggacatctgttgctcctcttctgagagacgaacaaggcctacctgacaaggatgacagcgggatcctactgggggtcaaggttagaaatgagaagagctgtagcttgcttctcatcttctctgtctcggtcatttctgcaagttgccaccgtctcatcctctctacttccccgaagcaccctggaagatacgtgtacagagaagcactaagcctgctcagctgtgggcagtctgaagcctcacttccacagcaccatgcatgcacctgcctcttcagactgtgagctccaca

SEQ ID NO: 14591 - DNA, 318 bp, Homo sapiens
ccccccggaagaatgtccctccccacaaaacccgtccccggtgcccaaaaaggttggggaccgccgcattaccataattcctttgtacctcttatgacacattttagttatttgttatagttttttctgcccatattagattatgaatacttctagggcagtgtaggtgactttcattatttgtttttaggaacctaataaatatttgttgaagaaataaaaggaaagatggatgagtggtaggtacatttaacatcatcctgtagtttccttgtgtatgaaaggaagggagatgaattttattttaaagaatctgag

SEQ ID NO: 14592 - DNA, 680 bp, Homo sapiens
gtctaggtcagcctttctctattgttgaacagccaatgaatggaacctcattctgggcctgtctatgtgatcaaaacacctggaacagttagactctgggcaaatcatctaaactctgtgggtttctgtagcccctaaaggagaaatatgcagagattgcagcagggagatgctaaagccctggtcagctcccagatcctgctactgaggtattttctccagattccttttcctgcagcatgtccttccgggggctgcagagtctgcttgctgacaggcgtctttgaaggagaaaggaaaggctgcttgaatacagaacaggcagggagggcatctcaggtccatgaaaatggaacgaacagaacttgctgagattctctgtgccagagagcagggccactggtttactaaagcaaagtatcctgagaaggaggggaagaaataattaaaagagtaacagtggcaaagactgtagtgacttaaatgtcaggagggcctaatttgccccttaggagattgagccttgagaagcccctgacttctgctgatgtctaggaccactgccctctgcaggccagaagtggaaaggcaggctgctacctagccggctagggctgcacctcagtccgtttgtgagtacagggtctgtgttctcttcttaaaatggacaacttccttcg

SEQ ID NO: 14593 - DNA, 1075 bp, Homo sapiens
gaatttacaatgcaatccacagtgcccacaaccccatgtttctggaaaatcaggagtattgggtacaatggaataaaatgcaagaaggcaaataagagatcaggcttttaggacctaggaaacaaataaagaggaatttgttgctgaaagtaatgtgtagctgacactctcattacctgacacaatgggagacattatgtctgggaataagacatctatttccatagcactgtagtcctgcaaaggagttggaagttatgaatttttaaagattttagaacattatatctttagtctctcataagccaattatttatatctccacatagcccattattaccattgaaaaggcatgcaattcttctatttgaagcttgttccctttttacaaaagtactagtaaaaatctgagtcatacaaaagagcaggtcaggtgtcactaataacagtttacctcagcttcatctccatgaaggttttacttctaatcccagagtctcatgtttatgtattacaagagtgtatgaaagctgggcgtggtggcacacaccaggtagtcccagctactcggtcgggggttgaggtgagaggatcgcttgaactcagggagtttgaatccagcctgggtcaatgtaggcgagatcctattctctttaaaaaaaaaaaggggggggaaacagtgttatggatcctatcatttggggtttgtgtgtgatcgaatacatggtatatagttcatggaaaatttaagctcagccaaggaaagaaaatggcccagcttcctgtcttaggaagacaatttactttttggcatctgtttggttgaaagtttgcctttgatccagattctttcggatgtcagggatattcacattgacatgtctttttagtgttccaggagattttagtttgaatagtacaattttttcttcttacaacaaaacttagaacggcttctaacttatttcttcatggccaagaaactaccctaacttatctcgataaatatttagttctgtcttatttctaatgtgtaaaacaggttttaaaaataatatatagattttgcatttat

SEQ ID NO: 14594 - DNA, 1419 bp, Homo sapiens
tggtaagcatctaactgtccataaattcatggctacagtagagattcacggcgcaacgactttcatactggttatttttttttttaattctgtcagtgagcagcatttcccagttttacactcccctaatggcagctccattaggcgagactgcaggctgcatctgtgattaggtccatgcagctcgaagatcagttcggcacgcgggagggtcccgaaagctgggtctgtccagtgtcttgcagcagcggttgcagggggtctaccagctcgccctgacagcttcgatatcgctaaccaaattctgggccaggcatatcccaaatatctgcagcaatgcaatgcctatgaaaataccagcaacgatggttaaattgtcctgcaaccacttctcaaactggggcacacagcctttcgtgtagattacaatctgctggtcaacttctggtttttgcctggcatcatagccacactgagtgttgatgacatcttctgcgggatctttagtgcagcaggagaatggaacgccacatcgctctcgacttgcattggaatctgtgcaattgaagtaaatatttaggttccaatcatcagctccaaaagccccacagcactgccaatattcctgggtgaagtctatgaggttttgcaaatcaatgtcatcccgatatgctctgatgttgttgtttataaagaaatacagctggtctttgatccagtctttgaaaacaaatgctagaactccggcagtgagctccaggaagaaaataattcccaggaacacagaaaaaaacttgagaaggaaagtgttttcccgtagcgctccaatgcaccctgcaaatcccaaaatgaacatcactcctcccaccacaaggaagagccaaactgggtcaaagccgccgagatcggtgatggaagagatgttggacagaactcctttttcattccatgcccacagtccaattccaagaaatgttattcccaaaaaccaaaatatgacattgaagccaaatatgaagtatttgatgcaacaactgacttcaggacccttgtagtgcttcccggacatcctctgggttcatgaagacacttgccccggcagcccgagtttggagctccgaagcaccgttgctcggagcagcccggcggggagcaggagctcagggacaccgcacgtgggccgcggcgctggcggcctgggctcagccgcgcggggaccgaccggcggagagcgcgtcccgcacctccagcccctcgcgcgccgaggccgccggagccggggtggccgcgagaaagcagggaagccgcgcgctgcaagctcaagcctcgccgacgctagccccgaacacaaagcgaggcccgcgtccgtgcgccaggcggtcggtccgtcggttcgtccccgggcttcgggcaaaggcg

SEQ ID NO: 14595 - DNA, 439 bp, Homo sapiens
ggccaacgaagctgcgaccatggcaacctacaaccaggctctcctatgcccacaaggccaagtaccacctgtgctcagcaggctggctggagaccgggcgggttgcctaccccacagccttcgcctcccagaactgtggctctggtgtggttgggatagtggactatggacctagacccaacaagagtgaaatgtgggatgtcttctgctatcggatgaaagatgtgaactgcacctgcaaggtgggctatgtgggagatggcttctcatgcagtggggaacctgctgcaggtcctgatgtccttcccctcactcacaaacttcctgacggaagtgctggcctattccaacagctcagctcgaggccgtgcatttcttaggaacacctgattgacctgttccatccgcgggcaccctctttgtgcccaagaacagtggc

SEQ ID NO: 14596 - DNA, 1435 bp, Homo sapiens
tttttacatatcatataaatatatttgttcaaactacaaagggatggatatcagggggaagcttttattgctgtggggggacctggagagggaggggggccttggaaatggggatacctgggaccacttgttccccccattcctcacagaaggcacaaatacattatttctttccatgtgaggagatgcgaggagaggatacagaatacaggaatcctcaaaaatacaaaaaacccctccaaactgaatacctaaggttatggaaaaggctagggtggggcacagaagtcaatgggggaacagaaagaggaaccaatgaaactgagaaccaaaagggacctgagaggccatgatgtccatgctgctgcctctgtgcagaccccagagaaaactcaggtaaaccaacggaaactccaaataagagagggtagggtgccccaggaattggctttggggcatcagacaagggagtgtgagtgtgagtgtgtgtgtgcagtggctgtgtatcagaagcaaccagggctaggagtggacgattctattcccacaggggaaggcctcctccatcccggttcctccaaaaccactttcaggggataaattcagccactgcttccgaacaggacccctccctgggacaaaagagcccaggtaggagaggatgaagtgagaaatcttgggatgaaaacagggcacacagaagcagttcttagggaacagaatatcatggagcccagtgtgatagaaaatgggcatgaaacctaagtgtatgcatgtgtgtgagtgtgtgtgtgcatgagtgtgtatttgtgcatgtacgagggagtaagatcactcaaaggtgaaggggtcctgggtgctgaaaaagaagtgtccatccatgtggtcctccagggcatccttgtcactctcagcaggaaagcgctccttacagataggacactccttccatgtgggggtggcagggcccccagtgctggtttctgacagggtacccactgtaaagccactaagagagacagaggggaaagggagagggtcggcgtgctctgttcccttcttgacttgcagacttcggagagcaggacccatgtgcctgggttcccaggttatcctgtgcctaatgcagcatcctggcctctcccacagcgtctttctccccacaatcctggaaggcttatttttccagttccccatgtcctctcttctttagtccctgctggtctctgcagtgcagagcccatcccccagcctcctgctctcctccctccatctccgtctgctgcctaatgaggctgaaaatgagtctgacatcgtccttcatcttcctgctccagccgagaaggatgacagcatcaccccctccctgccctgagcccatctcacatccagggcaaaaccgggactagatggatcaaatctctcttccctgtgg

SEQ ID NO: 14597 - DNA, 513 bp, Homo sapiens
  misc_feature (1)...(513): n = a,t,c or g
tgggatagcaataaccttgtgaaaatgctcccccggctaatttgtatcaatgattatgaacaacatgctaaatcagtacttccaaagtctatatatgactattacaggtctggggcaaatgatgaagaaactttggctgataatattgcagcattttccagatggaagctgtatccaaggatgctccggaatgttgctgaaacagatctgtcgacttctgttttaggacagagggtcagcatgccaatatgtgtgggggctacggccatgcagcgcatggctcatgtggacggcgagcttgccactgtgaggagcctgtcagtccctggggaacgggcatgatgttgagttcctggggccacctcctcaattgaaggaagtggcggaagctggtcctgaggcacttcgttggctgcaactgtatatctacaagggaccgaggagttcaccaagnagctagtgcgggcaggncggaggnagatggggcttacaagggccatntttgtggacagt

SEQ ID NO: 14598 - DNA, 1124 bp, Homo sapiens
ttttttttcacgttcaattaaagtaatttattgtattcttccagatcagacataaagagcatcttgggaattgataccacaacacaatgttatacaccattttcacaaccaggcttgcattgaattcttttttaaagaacatagtaattttaaaaaatctaaatatttacatattaataaaacatatatacaggaagattgaggacattatccataggatatgggattttttttttgctaagaaagcctataaaaaggtttctgaataaagactgaacagtagtcacagtaagtaaacacaattttaatttacaaaatatgattttgctgttgcagttttgatacgtatttccagtgtgtagatccgttcatcgcacacatctttgggttgaacaagctccacccgtcctcaagtgctgaacaccccaagctgtggccccgccttggaaggcagtgcttctgaaggttcccagcagatctcttaacagaccacagttggaagttagcgtttctgccttgaccagcaacatactcatcctattttaacacggcgaaaggtcaccaattaatcttctcccttcccttgggtagtagctccttgtgggaggcagaggacggattttaaaacccatggtgcaaaaaacacaagagctgtggtttgcagtccttcatcagaccacttgagaaaacaaagggactgttgtcaggaacgggattacttactggccagaaatggaaaaaggctaacaaaaaggtatgatggaaataatttctccaaaccttccttgtagcccccgaaaagaagaaaaagaagccacacatatatgagatgtaacttgtctagtagttagattgattctacaagcccacgccctaaagccagctttttgttacagtacagggatgccttctctcatctttgatgactggctggtctttggtggaacagggatttatcccagagggcctctcctatctctaggtttagcgtttcagtgtgatgtgacatgaataccttggacagggtagtcaggaaattcgggttctaggcagggccccagcccacggaggggttaacgggctctgggcaaccgccttaccctcattcatcctcagtttcccgc

SEQ ID NO: 14599 - DNA, 1398 bp, Homo sapiens
gcggccgccctccgcggcccctcgtggtgcgcgccgtccgctcgcgctcctggcctgccagcccccgaggcccgcagcctccgcggatccgggcccgctcggcccctcccatggaaggtgctcgggtcttcggggcactgggtcccatcggtccctcctcacctgggctcaccctcgggggtctggccgtgagcgagcaccggctcagcaacaagctgctggcttggagcggcgtcctcgagtggcaggagaagcgcagaccctactctgactccactgcaaagctgaagcggaccctgccctgccaagcctacgtgaaccaaggcgagaacctggagaccgaccagtggccgcagaagctgatcatgcagctgatccctcagcagctgctgaccaccctgggccccctgttccggaactcccagttggcacagttccacttcaccaacagagactgcgactcgctcaagggggctctgccgcatcatggggcaacggcttcgcgggctgcatgctgttcccccacatctccccctgtgaggtgcgcgtgctcatgctcctgtactcgtccaagaagaagatcttcatgggcctcatcccctacgaccagagcggcttcgtcagtgccatccggcaggtcatcaccacccgcaagcaggcagtgggacctggtggtgtcaactcaggcccagtccagatcgtcaacaacaagtttctggcatggagtggtgtcatggagtggcaggagcccaggcctgagcccaacagtcggtccaagaggtggctgccatcccacgtctacgtgaaaccagggggagatcctgaggaccgagcagtggccaaggaagctgtacatgcagctcatcccgcagcagctgctgaccaccctagtgccgctgttccggaactcgcgcctggtccagttccacttcaccaaggacctggagacactgaagagcctgtgccggatcatggacaatggcttcgccggctgcgtgcacttttcctacaaagcatcgtgtgagatccgcgtgcttatgctcctgtactcttcagagaagaaaatcttcattggcctcatcccccatgaccagggcaactttgtcaacggcatccggcgtgtcattgccaaccagcagcaggtcctgcagcggaacctggagcaggagcaacagcaacgagggatgggggggtagtggttaccccgggctgggcccctccaggagtcacagatgaggcccccgcagagactggtgacacgcttctgagcaggggcccctggggacttcaactgcccagcaacatggaggatggtgtcctgaggcctccaaggacggtccccacccctctacgtttccccaataaagccttttaaaaacctgaaaaaaaaaaaaaaaa

SEQ ID NO: 14600 - DNA, 340 bp, Homo sapiens
ccctgtaaagaaaactggttccattggctctgcagtagaccaggggaatgaatccatagttgcaaaaactacagtgactgttcccaatgatggcgggcccatcgaagctgtgtccactattgagactgtgccatattggaccaggagccgaaggaaaacaggtactttacaaccttggaacagtgactccaccctgaacagcaggcagctggagccaagaactgagacagacagtgtgggcacgccacagagtaatggagggatgcgcctgcatgactttgtttctaagacggttattaaacctgaatcctgtgttccatgtggaaagcggataaaattt

SEQ ID NO: 14601 - DNA, 358 bp, Homo sapiens
gaagaacaccacaaaagagagattgtcttcttgcatcttatcaggtgtcacacagttttgatttgtccagttgctggctggggctttggtcaattgattaggtattatcacgaggcttctccacttttatggttattctttttgccccttgtagttaataagtatcttgtagagagatcatcccaactttcactcactagttttagcatcccattgaagatgttcacctgaatcaatcagtaccacaatgattgcccaaatacagattttctaattccatcattccttttacatttgttggttggcattaccctaaaaggtagagctttcccttctctccaatttattcattgattta

SEQ ID NO: 14602 - DNA, 419 bp, Homo sapiens
gtttcattgacattttaagtagcttagcctgacctttttagagtagcatgttccccctttgaacttctttcccttcagtagtaccgtgtagctaggacaatagtcttagtgtttagtgggcttctagttcgctctgtttgggggagctttgtctctgctttcttccctcctctgctccctgcccttgacggtgcatgtcttcctctcgtcctgtagaaattccttgtttaaaaggctcagtagctaaagttgagcagccctgttgggggctgtttattgagtttgcggctggcttctggcacatcatttaaaaccacagtgattggaaatgggtcttggggtcaggcctccaagcatctgcctggatggcagaggatgtttgtctttatatgtatgggagtgtatctgtgtatgtccca

SEQ ID NO: 14603 - DNA, 571 bp, Homo sapiens
cctctgaaatggctttatttccccagtgtgaggaatctgtgagtggtgaggggtctgtggtccctgttaccccaaggaccctgcagcctccagatggataacggcccgggatccaggccttgatcctcccaggctgggactggttctgggaggagccgggcatgctgtggtttgtaaggatgacactcccaaaggtggtcctgacagtggcccagatggacatggggctcacctcaaggacaaggccaccaggtgcgggggccgaggcccagatgagccttactctaggagcaaaatcccctgtgggggcttctccttgaagtccgccagcagggctcagtctttggacccaggcaggtcagggggtggcggcccacctgggggcagcaaggcagagcggctcagggcctcggccacccaccccaggacgcggctacactgctggacctcccgctccagcactttcaggcgctgttcgtactcgcggatgtgtcccagctgtttcagtgccaagtccaccttctgggacgtgcgcttcagacgctcggagtcgctctcccgcttgtcccta

SEQ ID NO: 14604 - DNA, 465 bp, Homo sapiens
gtcacatcctctgacaagagcctgaaggtgctactcaatgccgaggacaaggtgtttaatgagattcggaacgagcacttctccaatgtctttggcttcttgagccagaaggcccggaacttgcaggcccagtatgatcgccggagaggcatggacattaagcagatgaagaatttcgtgtcccaggagctcaagggcctgaaacaggagcaccgcctgctgagtctccatattggggcctgtgaatccatcatgaagaagaaaaccaagcaggatttccaggagcctaatcaagactgagcatgcactgctagaggggttcaacatccgggagagcaccagctacattgaggaacacatagaccggcaggtgtcgcctatagaaagcctgcgcctcatgtgccttttgtccatcactgagaatggtttgatccccaaggattaccgatctctgaaaacacagta

SEQ ID NO: 14605 - DNA, 874 bp, Homo sapiens
ggaatatgaaggtgatgttctttttataaattttaaaggtagcatatattatacaaattactcaagagtttacaaacagaaaaaaaggagaaaaaataaaattcacgcgcaccctatattaacatgtaattcgtagtgaaatgtgtgaaatataaacacatgactttcacttattcattttcactttacgctttttaattgaaattaaattagtcacttaacatacataatgcagtgtttgttttccagtctagtagcttttcagcattcagttttgaggctcatgggaaatgttacttagcatcaagatgtggtttgatgagtgaacaatgtcagtatcaactgtacttaacagaagacagaggggctggggttaatctgcagctaacaacatataaaaataaaaacaaacacagacccacaataacatcaacatgcattattaggcaaagatccaaaattaacccaacccacacagatttcttctaagctgagattacacatggaaacagatactttatcaagatccatagccatagtagtaaggttcatcagggcggaatccatatgctgtggcagggcggtccaagaatgccaactggttggccaaagccatccattccaaggctgccaggaaatgaatgctgcccaacaacatctccattttgaaggtggtaatcattgaagaaatcgggacttatggctccttcagagggcaattaatcccatctggagttggtagaaaaggtcaggtcctttcggaggaatatctcccttccatggaatgtatggctcaattcggattcatcacccatacaagtactgctcactctcatccgatctgacgactctctaccatctccagccactgaga

SEQ ID NO: 14606 - DNA, 651 bp, Homo sapiens
tcatgcagaaaagtcagtactgagcctggaggatccttgagctcttcatcttaaccttctccttgaagtgccaaaattgctggccagcccctcagagcaggagcagccatccttgtcctgacagtccacccagggcagcagtgagcctccctgtgtgggatgggaccaaggcttctgtctgattcccaaccctatccagccccctctctccagcccttcccacctgtttgcctctacccgcgtcagagttctgacagtctaactctctcccacactactgctctgggaccttgacgcagcaaagcagtcacagtcgtcaacccactggaggacacatagcctgggagcccaggtgaggcttgccagactcagtagcttgggaggttatcagatggcccatccctgcattactgcaaggcccctgcccagaggctgagtgaaggccatcaggctgacccgagccacagctctgaaagaatgccgcagctcagtggctcccagctttgccgcacctcacaatcaccctggggagctttgaaaatgtcccagtgcctgggctgcacaccctaccagtgaaatcagaatatctcagggtgggagtcaggcagcagtcgttttggttttgttttttcttttaaagaacccaggtga

SEQ ID NO: 14607 - DNA, 564 bp, Homo sapiens
  misc_feature (1)...(564): n = a,t,c or g
cacaattgctgagggcaattaatacctaaaagaaagtttgattcctcttctaagatatcctaggtagtgtcatttctaaagaagacttggtgatcactgcttgtattagtccattttcacagtgctatgaagatactacctgatactgggtaatttattaaaaaaaagaagtttaattgactcacagttccatatggctgtgctgggggaggtcaagtaaacttacagtcatggcagaagggcgaagggaaagcaagcaccttcttcacaaggcagcgggaaagataaaacgaagggagaagagcctcttataaaaatctccagatctcgtgagaactcactcactatcatgagaacagcctgggggaaatcacccttatgatctaatcacctcttacctagtccctgccgtgacaagtgtggattacagtcagagnnnnnnnnnnnnnnnnnnnnnnnnnnnnnnnnnnnctgcttgtatatttataagaattcatcaatttcttctatattatccaatttttggcacataattgtaaataaaagtcccttatgatctttaaa

SEQ ID NO: 14608 - DNA, 621 bp, Homo sapiens
tttttgaggattttgtgtggctaatgtgttctagaagcagagactccagggagaaccagaatttatgaagcctcgtgcaacatggtgctttctcaccgaggtcatatgcctggctgctgctgttccactcagctccatgagccacgtttgttattttatgtttcttctgtgcttttgctcatttccacccatgtgtttatagaccttttttcagccctttttctttgttcctttccctcatctttttgcctcaggtagaatccatcagttttcctccccctccaaatgactgtgtacctccagctgctcaggactttggaggtgggggggcgggccctggggatctacccttctaaaaaactctccaagtaattctgataccaataaagtgggagacctccatttttgaggcctatttgcaagcatgtctccctccctttccatggctttttcgtttctcgcatgttccactgctttgcactgtctagacaggaaacctaggaagatgttggtgctaaactgaaaagatttcttacagcaaaacctgcctcggccagggctacagaattccaactttcaacttgattcctagccgtgaacagactgtcctctgctcagact

SEQ ID NO: 14609 - DNA, 543 bp, Homo sapiens
cacacgggggtcagatgcctccaaccaaagaaggcaaggcatagatatctcttaacatctgagtcacatggccaatatgttaccggtggcaaataaccgagtctcatggtacctaatatgttaagggtaacaagtgtccgagttaccattggtgaatctgtatgggtctgcagcaacctcaattcttgcctcctcagaagaaagaacttgactgaggggcataaggcagagggagagactgaggcaagttttagagcaggagtgaaagtttattaaaaagttttagagcaggaatgaaaggaagtaaagtacacttggaagagggccaagcaggtaacgtgaaagattcaagtgtacagtttgacctttgactcggggctttatacactggcatgcttccagtgggtaacatctcttctcccagttcttcctttggggtgggctgtctgcattcgcactggcctgccagcacttgggaggagccgcatgtgcagtgtgtttactgaagctgtgcacatgctcacttgaggcgtttttccctta

SEQ ID NO: 14610 - DNA, 424 bp, Homo sapiens
  misc_feature (1)...(424): n = a,t,c or g
gttgccagtggatatgggagtgaggcatctagaagatgtctggaattagtaatccctgacatgtacacaggggcatactcagaggatttcagtatcttctctgctgtggttcagtagcaggtgcttgcaccatctaaatcttaccaaagaacgtcatcttgcctcatgaaagttttaggattcctgtcaaccttgagtattctaagttaggggaaagttactttgatacaaaagtgttgggagggaaaagtttagagagggattcagaggaaagagacatgttctaaactatttttgcaaccagtcaaaagcagagaaatgaaacccttccaaaggaaaatcagacatatcacagattctacctgacctcacaccttctactggagttaacataataaagtgttggtgccatggcccncgaaaa

SEQ ID NO: 14611 - DNA, 2399 bp, Homo sapiens
  misc_feature (1)...(2399): n = a,t,c or g
gaattcggcacgaggcgggctcaacttcgcagacctcatggctaggcaggggctgtacgaccgtctcccgcctctgcctgtcactccgggcatggagggcgcgggtgttgtgatcgcagtgggcgagggagtcagcgaccgcaaggcaggagaccgggtgatggtgttgaaccggtcagggatgtggcaggaagaggtgactgtgccctcggtccagaccttcctgattcctgaggccatgacctttgaggaagctgctgccttgctcgtcaattacattacagcctacatggtcctctttgacttcggcaacctacagcctggccacagcgtcttggtacacatggctgcagggggtgtgggtatggctgccgtgcagntgntgccgtacagtggagaatgtgacagtgttcggaacggcctcggccagcaagcacgaggcactgaaggagaatggggtcacacatcccatcgactatcacacgactgactacgtggatgagatcaagaagatttcccctaaaggagtggacattgtcatggaccctctgggtgggtcagatactgccaagggctacaacctcctgaaacccatgggcaaagtcgtcacctatggaatggccaacctgctgacgggccccaaacggaacctgatggccctggcccggacatggtggaatcagttcagcgtgacagctctgcagctgctgcaggccaaccgggctgtgtgtggcttccacctgggctacctggatggtgaggtggagctggtcagtggtgtggtggccccgcctcctggctctgtacaaccagggccacatcaagccccacattgactcagtctggcccttcgagaaggtggctgatgccatgaaacagatgcaggagaagaagaatgtgggcaaggtcctcctggttccagggccagagaaggagaactagggcaagtggctgtgagaccctagagaccagcgaagggagaagttgggaagctacgttctgttggccaccagacttgcatttcagcctctgtcataatgctctgccctccctcccccgaagttctctgtggtgatgaccgctctcccctgcccctccccgcttcctgacctctgaagaggttgggaagtgaccatttggatgtctgggccctgccaaggcgacagggagggtcagagggaggccggctgcttcctgcccccaccctttccccgggcctgctgtgctgcttttgtgccaaggttagccagtcccccctgttgtgttccatgtgctttcacctctgcctcatctttcctcccgtccctgccccgccacctccccaaagaattgaaacgtcagctcaggatatggggccaatctctgtgagtccagcatgtacctgtcactccctagtgtcccttcagcctgggctgagccagtgcccgcctctgggcttgaccagttcccaatctcgtcctctgtccccaacttcttaagcacaattgggcttcttccatctccaggttttctgccattcttaaccaaggctgcctcttccaacagggcgggaatcagacctactcccctaggtcacaactctgggaaggatacagagcccccacccttcactgagttctctggatttgttctcagtgccttagcaacgaaaacctgtgcttgtgtgtgtgtggcggcggggagggaggatcctgtttcccacctccttctcctcccctgtactccccagtgccttccttgttctggtggagctggggtttctctcctccccagtcccacaacactgccaaaaatctgtgtatgtgccattgggtggggcagccccaagcctcctggggaggcagggcaaaaacaggtgccctcatcgtggtctgtgccatgtcccgtctctatggtggttgaggagaaaggcggggaagcttcctcagccttgcagatatgtgtggcatttactagccagagctctgaaaggcagtgctgtctgtttcttgtactgggaccaaagtaaaaatccaagcacattccccttgcagttaggggaggcccctactgccttctcaaagcagagaggcagcttatcaaactcagcccaaaactctgtttacatgggtggggagatggagcagggaagtacagagtgggatggtcaggacctgggccattgcaaccaaaatggggacttcctgggtagggaggtcactccctctactcactgagctaggattagggagggttattgccccaaccattgcaatgggaggtggagggacaggctcagcctcctcattgtctaaatgaggcctaaatgtgtgaagtgcgatttctgcttttgtgtaccccaccaccccattaccacagctgcctttgtgtgtttgtgtcaataaaaagccaaaccctga

SEQ ID NO: 14612 - DNA, 2646 bp, Homo sapiens
ccagtgggaagttgggaccaagcacaaactccatgtctggtggggtacagactccaagggaagactgggctccaaagccacatgcctttgttggcagcgtcaagaatgagaagacttttgtggggggtcctcttaaggcaaatgccgagaacaggaaagctactgggcatagtcccctggaactggtgggtcacttggaagggatgccctttgtcatggacttgcccttctggaaattaccccgagagccagggaaggggctcagtgagcctctggagccttcttctctcccctcccaactcagcatcaagcaggcattttatgggaagctttctaaactccaactgagttccaccagctttaattattcctctagctctcccacctttcccaaaggccttgctggaagtgtggtgcagctgagccacaaagcaaactttggtgcgagccacagtgcatcactttccttgcaaatgttcactgacagcagcacggtggaaagcatctcgctccagtgtgcgtgcagcctgaaagccatgatcatgtgccaaggctgcggtgcgttctgtcacgatgactgtattggaccctcaaagctctgtgtattgtgccttgtggtgagataataaattatggccatgggaaacattgtatatttagtgtgtgtattttgataatgattgatcttaaatctgtatacagaatatcattgatataatactctttaggcaggagcactcttgccttcccccaaaatttacactgctaaagccctctgtcacttggcgacccttctggtcttgctggaggggtttcctgggtataacccattgggctgcccaaggccagccagcctgagctctcctgcaagacagagcctgatgtggcacggagtggggttgcggggggtggggggactgcctgactcccagagggacttgaaactgaagcaagaaggttgcattctccaccaagggagttaacctacctgaactaagtagaaatgccagtcttccactaccccctccctgccatcttttcttctgctactttggggagttgatggccaggaaagaagccagcacagggttaaagtaactcctgggcattgcccaccagggggctggtgcacctgctgacctcagggtcacagttgagtcatttgccagttgacggagcaagtttgaccttggttctgttgctgaagcaaatttggaacttttctgtctcagtgtgatccactaacccacaggatcatttggaaccttgaatagctctgcttggacaatggggttggggaatagggttgtctttcctatgaaaatgccatctgtagaccttgtgagtcagccgtccagatgtttgcaggtgaattcctctgcttgacatcctccctgtcactttggaccctatgggagtgggcatctccacgcacctgtgtatgtgaaagtcattttacatttcaaagcagtgtgtgtttcttatttttatatttttaactctttattcttggatgtataaagtgaactttttggcttctgtaagtatgctctatgcacctctaatgttttatcatgtatttatatgttgtacacagtactggctgattctgtaaatggatgtattgtacagagaacatgaacgtctcttcctaattttacatcttcagcatcattgcattaaagtggtgtaatctccttctctacatctgttgtcagagccactgagtgctgtgctgctcgacgtgagggtgaaatgattgacttgtgacctgccaggttgcccgatgccctgttgggtcaccggctggacctgctgcagcctgcagagccacagtcagcctgcccacatgccaccgagcaaacgcatcttgcttttcacatctctcctcctacagccttaatggctgctttgcttgccattatgttgacaaatcaccaccaccagtgtttaagtgcttcttgggatttcatggggttgagtttccctggggcagcccccaggaaggcctttccagatctggctccaggggtcacccacctgttcacagcaattacctggggaccatggttttcctggggactgtgaggctccttttgaacgtacttttgaacatcaggcaggtttgggaagaaacaaagccatgcctgctcctgcctctctcccaacatgtttccagcaagtagatgcccctgtgtgtgttttcccttgccttgtttcctgccttatatcttgtatttcgacttattacagagttgagggttcttgcttaatttagatcaagtataaaatttgtatgacttcaagtctcattttatctgaaaggtttttttctcatttaatctgatgtggcattttcgtcatctgaagcatgagtgacaagttgggaatgatgtggtgatttagaatgcagtattggccaagtccaagttgtcaacttaagcgtctgtttaccaaagaccgggaacaggggcccaaacatgtccagtcctcttcttccctctgctggaacctttggggacactcaagggtacagtttgacactgatctggtccatgaggctgcccagagaaagcactgcttctgtatgtctcttgtggtattggaacaataaacccgtacaacctgcaaaaaaaaaaaaaaaaa

SEQ ID NO: 14613 - DNA, 1127 bp, Homo sapiens
  misc_feature (1)...(1127): n = a,t,c or g
tttttttttttttgtaccaatctttatgtatttattcacacatttgataaaaatgtcacagttaggagtgaaatcattacaatgacatgagtaactgtacagacagaccccaagtgcagaatcaaattgccctaagtcagaacatggagcaaccgcaactccttcgcacttgtgcatgtgtgtgcgctcgcaggacgcacacacagcagcacacatattctctctctctcttatgcacacatcccatcccacatcccaacaattgcaggtgcctaagtttggacataaccccccgggactcttccctgacttctgtcaggtcctggaaagaagaagtaataaatgaaaagcagctggggactgctcgatgcatctctcctcttccaacaatgacgcggagaaggcaagacatacactggggcagctacttccttggcacaaaaatgaacaggcaacaagaaggtcaaggaagtgtttaagttagtctcaggtttaaaccacttttcaacaccacaaaacagtagcaagcaggaaaaaaaaaacaaaaacaaaaacaaaaactctggccctcaagactccagaaaaaagggaaggaggaggatttaaaacttgatccctattattctaacaaattgcagcatgaccataagcaaaaccagctcggtcaaactgacagcatcagattgtgaccttatctgaacagtgtagttcacttttattttggctctgaagagaggaagaaaaactttttagaggaacttaatggtaacataaaccaaatctccactgtattagtatttgagacaagattacatctatgcattcacacagcttgtctgtagatctgagagctccaagggagtggcccagcccccattcctctgactttagccttctgaaaagaacaagtcaaacctgaaatatgaaaaataatacctgaatcaaaatggtgttttctatacaatcggactagggtagaatcctgctcaattcctcaactcctatttgacacaaaagttaaaaaatttttaaactaaatttaaatgtgatgttttgagcatcaaaaagctactatctaaaaggattagtctcccagtgttcttggtacantggggaaggttaggaag

SEQ ID NO: 14614 - DNA, 2508 bp, Homo sapiens
ccggccgcggcgcctcagcgccggcccgaagggaccaggccgccgtccccagcgagaggcatgcagcgctgaggagcggcgacccagcacggcggcgccatgaacctcctgccgtgtaaccctcacggcaacgggctgctctacgccggcttcaaccaggaccacggatgctttgcgtgtgggatggaaaatggattccgagtctataacactgatccactaaaagaaaaagagaaacaagaatttctagaaggaggagttggccatgttgaaatgttatttcgctgcaactatttagctttagttggtggtggaaaaaagccgaaataccctcccaacaaagtaatgatctgggatgacctgaagaagaagactgttattgaaatagaattttctacagaagtcaaggcagtcaagctgcggcgaggatagaattgtggtggttttggactccatgattaaggtgttcacattcacacacaatccccatcagttgcacgtcttcgaaacctgctataaccccaaaggcctctgtgtcctttgtcccaatagtaacaactccctcctggcctttccgggcacgcacacgggccatgtgcagcttgtggacctggccagcacggagaagccacccgtggacattcctgcacacgagggtgtcctgagctgcattgcactcaacctgcagggaacaagaattgcaactgcatccgagaaagggacgcttataagaatatttgatacttcatcagggcatttaatccaggaactgcgaagaggatctcaagcagccaatatttactgcatcaacttcaatcaggatgcgtccctcatctgcgtatccagcgaccacggcacagtgcatatttttgcagctgaagatccaaaaaggaataaacagtccagtttggcctcagccagtttccttccaaaatacttcagttccaagtggagtttctccaagtttcaggttccctcaggctctccgtgcatttgtgcctttggaacagagccaaacgccgtcattgcaatttgtgcagacggcagctactacaaattcctgttcaaccccaagggggagtgcatccgagatgtctacgcgcagtttctagagatgaccgatgacaagctgtgactccagctgggggcgccacagcacccaccacctgccgccttcagactctcggggctggtgccaggtgccccaggggcctcctgggccacgggctggaggggctgcccagggaccctggtctcgaagccatacgtggttgtctgctttcctaaggactcccatttccagtattaaagagagaatcatcatcaaggcaccgtaggtaactcagtggctgtgaccagctcgactggcggccactggctgttcccatgagttcagctgtgacgttagcttcagtggctccgccgcatcctcacactgacgggggctccatacggacctggggactgggctgagagggtggacgagttcaggtttgttttttgcagcagattccgtcgttcttactgagtctgcagcgggggagtgaacaagtgtgcagatgtaagttcttacatgataagcagattgaatacaacaccagcagcttgccttagaaaaggagaaaggaattccttttcccgcccgaacatgaagaaaaatgacctgaccctgtagagagaacacagtgtgaatgtttcccctcgtgtgagcccagcctgtggtcttctccgtacccgcaacgtggtcatctgtgcccgtgacgtcacctgtgcccgtgcgtggcgtccccgtctccgttggggccattagaatgaggcagacaccaggccactctagaagccgagccgtcacacctcaggcgtgtgcggggcggggacggggggtctcctggttacattttggattaaacctgtttcccggttatgtgtagggaacagcagagtgatgcacgaactttgaacattcgttatggggaaaacatcctttaacttcggggtcgtctgccagagcagggtctgggagggtccatgcagttcccgctggtgtggagggaaatgccctggtctggcctccgagcccccaggtccaccgtctcccctcccctcatttgtaagaatagctacacactaacattttgggaaggagaggcacataactttttttaacatttggtaactaggttatgggctctacattgtcagctacttgggatatatatttaattttcttaaattcccgttaaactctattttatggttttgatttcagattgcaaacatgtaaaacctgcatagcagcgagtcctcggttttgccggtttctttagttctttactgtcactgtcatgtaatcagctaattctctgtggatgttgctgtaaagtatgcatgttcctttcatgtgtatttaatcatgatgtttaattttgcacacttatttgtaatgtttcttttaaataaaagtgactaattttgttgtagtctggacctgtaaaaaaaaaaaaaaaa

SEQ ID NO: 14615 - DNA, 938 bp, Homo sapiens
gaaagtaagaagccggtggtgactttccaagcccatgatgggcccgtctatagcatggtttccaccgatcgacatctgcttagtgctggggatggggaggtgaaggcctggctttgggcggagatgctcaagaagggctgtaaggagcctgtggcgtccgtcagcctccatacaggaccagcctggaagtgcctgagatcaacgctttgctgctggtccccaaggagaattccctcatcctggctgggggagactgtcagttgcacactatggaccttgaaactgggactttcacgagggtcctccggggccacacagactacatccactgcctggcactgcgggaaaggagcccagaggtgctgtcaggtggcgaggatggagctgttcgactttgggaccgtgcgcacagcccaaggaggtccagacgatcgaggtctataagcacgaggagtgctcgaggccccacaatgggcgctggattggatgtttggcaactgattccgactggatggtctgtggagggggcccagccctcaccctctggcacctccgatcctccacacccaccaccatcttccccatccgggcgccacagaagcacgtcaccttctaccaggacctgattctgttcagctggccagggcccgctgcgtcaaccagtggcagctgagcggggagctgaaggcccaggtgcctggctcctccccagggctgctcagcctcagcctcaaccagcagcctgccgcgcctgagtgcaaggtcctgacagctgcaggcaacagctgccgggtggatgtcttcaccaacctgggttaccgagccttctccctgtccttctgatctctgacgacacccccagccagctcagggttttagagtgtttttcattttctttttttttttttttttacaataaagtttcaggcttttttacc

SEQ ID NO: 14616 - DNA, 714 bp, Homo sapiens
  misc_feature (1)...(714): n = a,t,c or g
gtacaggaataaacaaatactgaaaatgggtcattgggtgagcacttagccagtaaaaatctgtgctttgtataaaaagaactttggactgaggttatatgagtcttcctgcaggctggagacctctgttacctttacttctctacttttgttgtcttgagaccagcttttttatttttggtgaggagaacagcaggcagttcaaatgtcagggaaagacaagttcagcttgctttttccttatttctgtcttgttacctgctatcctgccaggttagaaagatggaatcactcccttttgccctatcatcaagacttcagtgttccctggagcactctaaatttgccatcagacttggatcatcctctaataccaagctcctgggtccttcctgaaggctgcctccttgtcttgctgagaagaattaaggttgcttccctgggaggaattcagcagcacctcttgtaagtcatcaggtgtgctgtaaggatggggcaggcaacatttctttgtactgtgggaaggcctaaatcagtgtttctcaaggtgtgatccttgcaccaccaatcttaagaaatgttctttggagccgggcacagcgcgtcacgcatataacccnnnnnnnnnnnnnnnnnnnnnnnnnnnnnnnnnnnnnnnnnnnnnnnnnnnnnnnnnnnnnnnnnnnnnnnnnttccctgtctctactaatataa

SEQ ID NO: 14617 - DNA, 970 bp, Homo sapiens
gtcctcgtgtagatccatatgtctagatgcataataactggagtgcctgctggtggaagtcagaatgctcctgggaggctgcagagggggtggaggactctcccctgcctctggggagggggccatctgctgcgcccggccccactgacagatctgaagagcacagtaggaagggaggcggctcctctttgcttccttccctctctctcctcccacccccataggatcagtgtgtaccaggtacacattgttcctgttaacagcagcttcttgaaacatttgcatagaattcactggacgaattaagcctgcactcatatggcatagaattgtgagagaatgttttgaaaggccagagggtggcctttttccccaaacagtttggttccttttatgtttgagccagtgaagggaactacgctttgggggcttcagcctagagccctgccaggcagcccctggctccaggttccctgcctcctagcgctctcctcgccttcagctcttgctcccttcctcgttcatcaccctcagtcagtgcccaagagtggccaaaccgcttcacatctgcagtgcttccccagggttgacaaggggccgtcctttccacacaggccagaagaggtcttcaggcgaaccgaccttcccccttctggcatttcagattccccttgctctggttaaaaggtctttccctcgtggcctttgcacttgcggcagcaacgtgtactacactgcagaagggttcagtatgcaccttgtgttgagagagaggcaaccctgggggccagttcaggtggtccccaaccataagctaggtctgaaagttacacagccaagtttgagctcttaaaagttgatgaacagcctcatttccccagcttccctgatttcttccagatgggacgttttatttgtgtgctctcccttgactgtcagattgaagtaagagcagttctctccgttgcct

SEQ ID NO: 14618 - DNA, 1098 bp, Homo sapiens
gggaaatgagcacagcaagagctgcccaagcggcttggtatctgctacatcaccagcacatttgccagctgtagccttgaagacattgtcattgcagctcccgaagcctccgatggttccaactctatgtgcatccagacctgcagctgaacaaacagttgatccagagggtagaatccctaggtttcaaagctttggtaataactttggatacacctgtatgtggcaacaggcgacatgacattccgaaaccagttgaggaggaacttaacactaacagatcttcaatcacctaaaaagggaaatgcaataccttatttccagatgactcctatcagcacttctctctgctggaatgatctctcctggtttcagagcataactcgattgcccatcatcctgaaagggattttgacaaaagaggattgcagagttagctgtgaagcacaatgtccagggtatcattgtttccaaccatggtgggaggcaccttgatgaggttcttgcttcaattgatgctttgacacaagtggtggctgctgtaaaggggaaaattgaagtctacctggatggcggggtccgaactggcaatgatgtgctgaaggctctggcccttggagctaagtgcatttttcttgggagaccaatcctatggggccttgcctgcaagggtgaacatggtgttaaggaagttttgaacattttaacaaatgagttccacacttccatggcccttacaggctgccggtcggtcgctgagatcaatcgaaacttggtccagttttccaggctgtaagaaaaaagggccaataaccagactgctgaggttgcccacaggaggatcacaaactcacagcacagtgtgtgatgctgtccttcctggaccccattctgtccggaggctcatggcccatatttcccacatttctaataccaccacccctgtgcttcaggccctccaaacccctgtgttccccaaatgttccatgcccttctttgtatcactgactattatatgttgctctcttgcctaaatcttcctctgaagtaaaagatctcaaaaggacagatcattaatgactggaaaaaaaaaaaaaa

SEQ ID NO: 14619 - DNA, 394 bp, Homo sapiens
gatcaatggccaccccacatccaatgctgcgctcttcttcatcgagcgtagacctcaccactggccagccatgaagtttcgcagccaccctgaccattccacctatgcggaggtggagccctcgggccatgagaaggagggcttcatggaggctgagcagtgctgagaacaccaagtctcccctttgaagactttgaggccacagaaaagacagttaaagcaaagaagagaagtgacttttcctggcctctcccagcatgccctgggctgagatgagatggtggtttatggctccagagctgctgctcgcttcgtcagcacaccccgaatattgaagagggggccaaaaaacaaccacatggattttttataggaacaacaacctaatctcatc

SEQ ID NO: 14620 - DNA, 561 bp, Homo sapiens
ttttcaaatttaacaactttattgaatttgcagaagcattctacagtaatacatttttaaaaatcacatagcactcagtaggtacatgtatacatgtacatttcagaagacaacaaataaaattactctcagaaagctgcaaagatggacacatataatctaagaatgtggtaatggccagagggagtacccaagagaccatattttattatgcttaaggctactactttccacaatacctctgcagttaagactcttaacttacaatcacagaaatgaaaacatgataatacactgctttatacagacatacagatactgggatatagtataatttcttatggcttaaaaaaatttaatttgcttttagagtctatattgctaaacttaactttccacaaaatacaatatatcatgaaagcaaagtattattttttaaaaggccccattatctgacaaaatagatggtgaacatgcactatcccaggatatctattattatccaaagaagtgtttctcaaagtgtggtccatggtactggtccatgaattggttgctacc

SEQ ID NO: 14621 - DNA, 1086 bp, Homo sapiens
  misc_feature (1)...(1086): n = a,t,c or g
acggaacagaagtccaaaagcaaacagcaccgagtgtcaaggagagcacagcagagagcagaatctcctgaatctagtgcaattgaatccacacagtccacaccacagaaaggacgaggaagaccatcaaaaacgccatcaccatcacaaccaaaaaaaaatgtccgtgtaggacgctccaaacaagcagctactaaggaaaatgattcaagtgaagaagtagatgtgtttcagggtagctctcctgtcgatgatattccacaggaagaaacagaggaggaggaagtttctacagtaaatgtacggcggcgaagtgctaaaagggaacggcgatgaacaaatgtaattaataactttctctgtgaaagctttggaaaaatcttttttttttttttttttttgggncaagcttgaggctgattaaagcctttgatgcacaaaatgggactgctgaagagtggacagttggaccttactttggtgaccccatacgtttgtggtcacatgctttagcccttacacatgggtaacattgactatgggagtcttgtgaaagtgtaaatgtgcgatgggctatgtaggacataaaaggaggaaacttgtaaaatatcttttttcttttttttaatgtttctgatttctgaagtgcttgtatagcttttatctgcggctttaaactgacagtaccccgactgtttattggatctattgatttgaaaacgaatttgttaaggatagatcttaagcagtaatctgtcagtgtttgtatttgtattcccctgcaattttactgtgaaaaaaaattttgtttttcaacaattgggtgtcatttttcnttgatgtcactatttggttgggagagttaaatgggtctcctcccctttggtggaaccttacctagtggtttactccctggggcaccccttaaatcctccagagggtggccaaaaattggtcnggccattacacccagaaaggatgccccctgaataggaaggacaaccatgccaantggtgaaatagtccccgaagttcctgggataccntacaccnccaggaattgaattggncccagaatttcngggc

SEQ ID NO: 14622 - DNA, 743 bp, Homo sapiens
ggtggccgcgaatcaccagccagcctctgggtctgtagcaaccgcccagcgttgaggcgcggctcatgcccccagtatcccggtccagctattccgaggacatcgtgggctctcggagaaggcgacgcagctcctcggggagcccaccatccccgcagagcagatgttcctcttgggatggctgttcccgctctcactcccgcggccgtgagggcctcaggcctccttggagtgagttggacgtgggcgctctttacccctttagtcgctctgggtcgcgagggcggctcccaagattccgcaactacgccttcgcgtcctcctggtcgacctcgtatagtggatatcgctgccatcgtcactgctatgcagaagaacggcagtcagcggaagactacgagaaggaagagagccatcggcagaggaggctgaaggagagagagaggattggggaattgggagcgcctgaagtgtgggggccgtctccaaagttccctcagctagattctgacgaacataccccagttgaggatgaagaagaggtaacgcatcagaaaagcagcagttcagattccaactcggaagaacataggaaaaagaagaccagtcgttcaagaaacaagaaaaaaagaaagaataagtcgtctaaaagaaagcataggaaatattctgatagtgacagtaactcagagtctgacacaaattctgactctgatgatgataaaaagagagttaaagccaaa

SEQ ID NO: 14623 - DNA, 493 bp, Homo sapiens
  misc_feature (1)...(493): n = a,t,c or g
tggcacgagggactgtacttagcaatttgggttataattacaaaaaagaaaaaatagtagaaaggntctttaccagacagtaaggtcatggtacaaatcaggtgagtgaatgttggtcagaggtagcctgacactctgatgaggacttcaagatgagaatgagaaaaatgtctattaaaatcactacatttgataatatctcagatttagaatctcttttgggattcagatagtctgattattccaattcaagtgttcagttaagttttagttactattcctataatacccaattcactaatatcatatctcctgtggaatattcattggtgcgatggcctcatccccttttttactttttattgacatggtggttataaaatgaagagacttactctattggaattttcatctacgtagtatttgggctgtcaagactaaataggcaaaagggtagaatattagatcattctcttaataagacctgatttat

SEQ ID NO: 14624 - DNA, 1218 bp, Homo sapiens
ttttttttttttttttttggggagtggataaagtgcatttattttcttctatgtttgtttttgtaaaaaggagaaaggaagcaaaagactccttcctttcagacccagtgtccactgagcttggagggggtggagccgggaccagccccctaggaaaaggtgtaggaatagaaggcaatggcattggcgctatagtccatggggaggaggtgcccgatgtgcctggcccctaggctggccccacccagagcggaggagtgcctcagcttcatcagggtgaagctggagaagaagttctgagcctggatctctctgccctgggtcagcgccaaaagaaaaccttccttcagcagctcccagctcttccacacagagcccacgcacaggatggggagtccaatcttgccctggaacaagaccgggtcaatctcgggcaacactgctacgatgtgtctgcccagcatctccccagccttcctgaagatatagcgggaaagggggtctccctgctgagcaccttctgcaattttccggcaaaacccagcaaacctgcatttatcaaagtccctatacaggtgagtgagtatccctagccgatctggcacctggaaatagtggaaacatggcctgtttgacgtagccgatatcatgaggagccgcctctaggttgtcaatggagtcaaacactattttcactgcttggtgtgcgatccagtaggctgaaccctcatcacccatcatatggccccagccgccgcagccactctcggagccatcagggttgatgagcctgcagttggagcctgttccagatatgagcacaactccaccatccggtgtagctgtggcgatggagccggcggcatcggtggtgattaagtagctttcactcaggtagggaaatcggtccctcagctcctcgatcaggatcctccccgcgtcctcctggtccccaccgctcagagataggcccaagcttcgcagcggtaccagaggatccacccctgctttccgtttggccctgttcaccatctcattgatcctctccacacacttgtctgtcccgatcagccagtggtttgtgctcagtccatctgcttctgccaggatcttcccatcctctgagactaaaaggacctcggatcgtgtgcctcccccctctacacccccatagatcgcggccatgctgctgctaccgtcgctgcctcgtgccgaatt

SEQ ID NO: 14625 - DNA, 691 bp, Homo sapiens
atagcgaggcccgggctgcccgccgtcccccttcatctccccacggactgtaccaggcagctgggccccgcaggacaggccgcagcgggtggccggttctgtcccgtcttggggttcttggtgtccacgtcttgtgggccgtgggcttctacctgcccttggctgcagtgctttgctggagaagggactccctggtccccagggtggacggagccgctgtcaccgcccagagctgggccggggaagcacggtgtgttctgcttttcttttcagattgttgaaatttcattgtcatgatttaatatatggatttttttatttaagaaaaagacgagggactctttgtcacgtgggtttgttttctgtctccgtgcctccggcttcccaaagagatccaggtctttgcgtttccagggcgtggggaccccggccccctatgccgccacgccgccacaccgcctcaccctggcttctgtgctacttggcagttccatttcattatttattttttgtgctgctttttatcatgatataaattattgaaaacagatcacatgtgggcccgtgtctggccgccgccgccctgccccgtccctgcggccaccacctaatttattgccgtgcgtcctgctgctgtgactgcttttgtacctttgcaataaagaattttctggtttcagaaaaaaaacaa

SEQ ID NO: 14626 - DNA, 3804 bp, Homo sapiens
gaattcttagttgttttctttagaagaacatttctagggaataatacaagaagatttaggaatcattgaagttataaatctttggaatgagcaaactcagaatggtgctacttgaagactctggatctgctgacttcagaagacattttgtcaacctgagtcccttcaccattactgtggtcttacttctcagtgcctgttttgtcaccagttctcttggaggaacagacaaggagctgaggctagtggatggtgaaaacaagtgtagcgggagagtggaagtgaaagtccaggaggagtggggaacggtgtgtaataatggctggagcatggaagcggtctctgtgatttgtaaccagctgggatgtccaactgctatcaaagcccctggatgggctaattccagtgcaggttctggacgcatttggatggatcatgtttcttgtcgtgggaatgagtcagctctttgggattgcaaacatgatggatggggaaagcatagtaactgtactcaccaacaagatgctggagtgacctgctcagatggatccaatttggaaatgaggctgacgcgtggagggaatatgtgttctggaagaatagagatcaaattccaaggacggtggggaacagtgtgtgatgataacttcaacatagatcatgcatctgtcatttgtagacaacttgaatgtggaagtgctgtcagtttctctggttcatctaattttggagaaggctctggaccaatctggtttgatgatcttatatgcaacggaaatgagtcagctctctggaactgcaaacatcaaggatggggaaagcataactgtgatcatgctgaggatgctggagtgatttgctcaaagggagcagatctgagcctgagactggtagatggagtcactgaatgttcaggaagattagaagtgagattccaaggagaatgggggacaatatgtgatgacggctgggacagttacgatgctgctgtggcatgcaagcaactgggatgtccaactgccgtcacagccattggtcgagttaacgccagtaagggatttggacacatctggcttgacagcgtttcttgccagggacatgaacctgctgtctggcaatgtaaacaccatgaatggggaaagcattattgcaatcacaatgaagatgctggcgtgacatgttctgatggatcagatctggagctaagacttagaggtggaggcagccgctgtgctgggacagttgaggtggagattcagagactgttagggaaggtgtgtgacagaggctggggactgaaagaagctgatgtggtttgcaggcagctgggatgtggatctgcactcaaaacatcttatcaagtgtactccaaaatccaggcaacaaacacatggctgtttctaagtagctgtaacggaaatgaaacttctctttgggactgcaagaactggcaatggggtggacttacctgtgatcactatgaagaagccaaaattacctgctcagcccacagggaacccagactggttggaggggacattccctgttctggacgtgttgaagtgaagcatggtgacacgtggggctccatctgtgattcggacttctctctggaagctgccagcgttctatgcagggaattacagtgtggcacagttgtctctatcctggggggagctcactttggagagggaaatggacagatctgggctgaagaattccagtgtgagggacatgagtcccatctttcactctgcccagtagcaccccgcccagaaggaacttgtagccacagcagggatgttggagtagtctgctcaagtaagacccagaaaacatctttaattggttcttatactgtgaaagggacagggttagggagtcatagctgtctttttctaaagccctgtctccttccaggatacacagaaattcgcttggtgaatggcaagaccccgtgtgagggcagagtggagctcaaaacgcttggtgcctggggatccctctgtaactctcactgggacatagaagatgcccatgttctttgccagcagcttaaatgtggagttgccctttctaccccaggaggagcacgttttggaaaaggaaatggtcagatctggaggcatatgtttcactgcactgggactgagcagcacatgggagattgtcctgtaactgctctaggtgcttcattatgtccttcagagcaagtggcctctgtaatctgctcaggaaaccagtcccaaacactgtcctcgtgcaattcatcgtctttgggcccaacaaggcctaccattccagaagaaagtgctgtggcctgcatagagagtggtcaacttcgcctggtaaatggaggaggtcgctgtgctgggagagtagagatctatcatgagggctcctggggcaccatctgtgatgacagctgggacctgagtgatgcccacgtggtttgcagacagctgggctgtggagaggccattaatgccactggttctgctcattttggggaaggaacagggcccatctggctggatgagatgaaatgcaatggaaaagaatcccgcatttggcagtgccattcacacggctgggggcagcaaaattgcaggcacaaggaggatgcgggagttatctgctcagaattcatgtctctgagactgaccagtgaagccagcagagaggcctgtgcagggcgtctggaagttttttacaatggagcttggggcactgttggcaagagtagcatgtctgaaaccactgtgggtgtggtgtgcaggcagctgggctgtgcagacaaagggaaaatcaaccctgcatctttagacaaggccatgtccattcccatgtgggtggacaatgttcagtgtccaaaaggacctgacacgctgtggcagtgcccatcatctccatgggagaagagactggccagcccctcgggaggagacctggatcacatgtgacaacaagataagacttcaggaaggacccacttcctgttctggacgtgtggagatctggcatggaggttcctgggggacagtgtgtgatgactcttgggacttggacgatgctcaggtggtgtgtcaacaacttggctgtggtccagctttgaaagcattcaaagaagcagagtttggtcaggggactggaccgatatggctcaatgaagtgaagtgcaaagggaatgagtcttccttgtgggattgtcctgccagacgctggggccatagtgagtgtgggcacaaggaagacgctgcagtgaattgcacagatatttcagtgcagaaaaccccacaaaaagccacaacaggtcgctcatcccgtcagtcatcctttattgcagtcgggatccttggggttgttctgttggccattttcgtcgcattattcttcttgactaaaaagcgaagacagagacagcggcttgcagtttcctcaagaggagagaacttagtccaccaaattcaataccgggagatgaattcttgcctgaatgcagatgatctggacctaatgaattcctcaggaggccattctgagccacactgaaaaggaaaatgggaatttataacccagtgagttcagcctttaagataccttgatgaagacctggactattgaatggagcagaaattcacctctctcactgactattacagttgcatttttatggagttcttcttctcctaggattcctaagactgctgctgaatttataaaaattaagtttgtgaatgtgactacttagtggtgtatatgagactttcaagggaattaaataaataaataagaatgttattg

SEQ ID NO: 14627 - DNA, 299 bp, Homo sapiens
cttaggcactgagttcccacctctggcattgtggccctaccacctttggtactcctggagtagagcctttgccctctagggctctgtccacggcgttgacacatatctggatgcttaacgggtgctcaaatgaataagtgaaacctgctggctttcatttggacagtacagacgtgtccattggatggcggatggctttgtaaccaggggcggtggcatatcaaaaatgaagactttgtaaaatgtatgggaactttctgcctataaagctggcttttacactgtgccttcttttttga

SEQ ID NO: 14628 - DNA, 1859 bp, Homo sapiens
tttttttttttttttaaaatttcagatgttttttattcaaaggttctcaaaagaaataaaacagaaaagctaacaatctgatcaaatgtacagttcaaaaatgtcttttggcgtttaacaacaagtcctaggaaagaaaactacagagttatcttgaaccggacaaataagttaccactggcaagtctgtggcactagtaaaacaaaaataaaaaattaactctcttgatcatatagatatctctatgaaaatctttttttttcaatctgtacaaaaggtctttcttcataaattaatttttttataatttaatggctgtctactatgtgatgtttaactgatttttttttttttatgtacagaggttatgtttcccaaatcttacccagacgagtatggcacttagttcagacatttctagcagcagatttcccctcccctctaaccgagctatcaaatttctgtcttaactaatgcaaaaatatcaagtagtgagagacccaggtttataactgtactaggtacacagagggtgctgcgttcagtctggactttcacaaagcaggtaatattcccagggagcatagaaccaataataccacaacttttaaaaaaatgaaacaaaaacaaaaacaaaaacacatttctcttatgactatgtaattttcactagaatctacacttctcagagcagcaaggacttttgaaactatgaaatgtcactgacatctatcatcaaatacaagcataaaatttaagaactaaaaaatacttgaaagaaataactgcttagccctagctcctgagctaggaggatttggtctgtggaaacagggagggccagcaacctgtcccagcacaaaagaaaatagactctgaggtagataactgatcatacacagctgaccagacaagtacacagttttggaagacaacttaatttaccattgcttttaaaacatatgcaattgccttaataaaagagctttaataacagtgaattatcttatatgtactaaagtagaaataactgtgtatttatgaatcaggaatttcatagtttcaaaattggttttctttacacttgaacacttgtagtgatgatgtaaagtgtggcactgccttggatcccaaatcttccttcatgcttttttgtttgtgtgtgtccatacatcaattaaaattataaaacctaaatgcaaaggtacaaaaaaggcacattctcctaaccgcaaactggtccggcaaaaataaagagcacagaagatgtgatgctgagacaagttggagctactggttactggctcttcggtctttggtgaagttacctttaaaagtgccaagtcatttttatttttcaaatttacctaatagagagagagagagagagctagtagccaatcgttttgcttctattcgttatctcagcttatgtttgaagataaatccttacttttagcttttgccactttgttgcaatagcaacatttttcggtttgccagatttcaggcataattctcattctaaagcactatcattagtataaaggaaggacaaaacattcagtgactcccctccccaaccaacatccccaaccccaacactacctacactaaatctagtacatcaagttagcttttttttttttcctgaaaaaaggcaaaaaagactttacattgcatcatacagcagatatcctaaatcagtcaaactatcagaggaaactgttggcgtacagctttacaaacaatttaccctaataaaagttccccagtcagaaaatgtcgtttcacacaaaacatttttcccttcttgcatttcactaccttacacattatgtgaaaaatcattaaaaac

SEQ ID NO: 14629 - DNA, 292 bp, Homo sapiens
taatgtggaaactgccattcatcacaaattgaacacacatcagaatgtatggcaattacgtttaaaaaaaaagttttactttggacatggtttaacagtgtaactggaaggaaacagaaagcaatatgtttttctactacatctgatgccatgcaatctctctgggatccaggttcactctaagttaggagcaatggttctctgaggacatttgaatacagaactagtaaacctgatacatttctccactgagtgaaggtaataacacagaagccatcaccacacacacagg

SEQ ID NO: 14630 - DNA, 497 bp, Homo sapiens
tttctgtgcagataattgtattctgttaggcctgatagaaggtgatgctgaatgcaaggtgtcctgtcagtctcacactgcacacacagcaacccgagatggcacttggtcagccgtctctgtttttctttgttattgcatcattgtcttttaaaactctgttgtatgtcggcttttctctgcagacaaaataacttttcttatatacctctgccatttcaaacactagccctctctatacttagagcatagtgtctgtaggattcacaatgcccagttcacccatgggaggttagagaaagctttttagtattgagatgaggtacagatgtgtgcccctccccctcttcaactttacttctgtccatcccagctgagatgacgaacctattcagagtttatcctcatgtcccatctgggctcagtatgaaacactggtgtttgcctttagttaccactaaatccaaagagttaaataaagatcttggcatcttttc

SEQ ID NO: 14631 - DNA, 390 bp, Homo sapiens
tagaaaagaataaaatcatgccttctgcagcaatatggatataacggaaggccattatcttaagtgaaacaagtcagacacagacaaatggcgcatattcttgcttgtaagtgggagctaaaaataatgtctactcatggacatagagtgtgaaatgacatacaatagagactcaaaaaggtgaatgggtgggagtggggtgaatgataggagattacttaatgggtacagtgtacattgttgggtgatactctcagatacctgattcaccattgtatagtcttacgcatgtaacaaaactgcatttgtacccctaaatttacatgcacacacaaaagaataaaaataaacttaaaaactttgaaatgataaaaaaaaaaaaaaaaaaaa

SEQ ID NO: 14632 - DNA, 1919 bp, Homo sapiens
atgaagacaaaccagatacttcttctagcaaaaataaagacccaataacgattgttgatgttcctgcacacctccagaacagctgggagagttattatctagaaattttgatggtgactggtctgcttgcttatatcatgaattacatcattgggaagaataaaaacagtcgccttgcacaggcctggtttaacactcatagggagcttttggagagcaactttactttagtgggggatgatggaactaacaaagaagccacaagcacaggaaagttgaaccaggagaatgagcacatctataacctgtggtgttctggtcgagtgtgctgtgagggcatgcttatccagctgaggttcctcaagagacaagacttactgaatgtcctggcccggatgatgaggccagtgagtgatcaagtgcaaataaaagtaaccatgaatgatgaagacatggatacctacgtatttgctgttggcacacggaaagccttggtgcgactacagaaagagatgcaggtttggagtgagttttgtagtgataaacctaagtctggagcaaagtatggactgccggactctttggccatcctgtcagagatgggagaagtcacagacggaatgatggatacaaagatggttcactttcttacacacctatgctgacaagattgaatctgttcatttttcagaccagttctctggtccaaaaattatgcaagaggaaggtcagcctttaaagctacctgacactaagaggacactgttgtttacatttaatgtgcctggctcaggtaacacttacccaaaggatatggaggcactgctacccctgatgaacatggtgatttattctattgataaagccaaaaagttccgactcaacagagaaggcaaacaaaaagcagataagaaccgtgcccgagtagaagagaacttcttgaaactgacacatgtgcaaagacaggaagcagcacagtctcggcgggaggagaaaaaaagagcagagaaggagcgaatcatgaatgaggaagatcctgagaaacagcgcaggctggaggaggctgcattgaggcgtgacgaaaaagaagttggaaaagaagcaaatgaaaatgaaacaaatcaaagtgaaagccatgtaaagccatcccagagatttgagttctgatgccacctgtaagctctgaattcacaggaaacatgaaaaacgccagtccatttctcaaccttaaatttcagacagtcttgggcaactgagaaatccttatttcatcatctactctgtttggggtttggggttttacagagattgaagatacctggaaagggctctgtttcaagaatttttttttccagataatcaaattattttgattattttataaaaggaatgatctatgaaatctgtgtaggttttaaatattttaaaaattataatacaaatcatcagtgcttttagtacttcagtgtttaaagaaataccatgaaatttataggtagataaccagattgttgctttttgtttaaaccaagcagttgaaatggctataaagactgactctaaaccaagattctgcaaataatgattggaattgcacaataaacattgcttgatgttttcttgtatgtctacattaaacttgagaaaaagtaaaaattagaacactgtatgtagtaatgaaatttcagggacccagaacataatgtagtatatgtttttaggtgggagatgctgataacaaaattaataggaagtctgtaggcattaggatactgacatgtacatggaaaattctagggacaggagcatcattttttccttacctgataccacgaaccagtgacaacgtgaatgctgtattttaagtggttgtatgtttattttcttgagtaacaaatgcatgaaaaattaatgcttca

SEQ ID NO: 14633 - DNA, 454 bp, Homo sapiens
ggcttcattgaaggttattttaaaggaagaagctttttatcccacatggtttcaggcaataccttattgaagatgacttagaccttggattctggggttggaacaggcttgtgtccactgcctaaacagggccagcacagcttcgtggggggcctctggaggaaggggccccaggaaggagtcaggtctttctgctcactggctgtcaggctgcctgggggtctcggagggtccagagcaactgatggctggtgtggaggagagcgtgtgacagccagtcccaaggccaggctatgagagactatgctaaattagtgaagtcccctggtagggccaggtcactcggccaccaggtaaaaagtaccaggttatttctgccttggcagaaggagaaggtgcatgaatattactcattaatacacctcaaggaaccactaggttagacaacaaaata

SEQ ID NO: 14634 - DNA, 1373 bp, Homo sapiens
tttttttttttttttatgacatattagtttattacatgcataaaactataaatgataaaaatgaagaatgtaatgaacagtttatgtttttttaaaacaaagtcagattttaaaagttgtacacagagagcaaaaatcactttacgtactcatgattggctttaatatttctttacactatacatactgaaaatgtttacatttactaataaggaatgccaagcgtatccatcaccatttgaatagcttgcaggggatttgtgatttcttccatgttatctcttctcaaaacccaatctggcttaagtcttgaaactattctggtccttacaggtgtttctgggataaaaggaatgcttatagaagaattcttcttttgcttgtaaagtattctttcagtattcattttatgtttatgagctgtaagtttgtagagactgtaaatacggtcaacaactttggacctacttcgtacatcagaggctctatttgttgtcttcagtaaaatagccaacaaacaacaagtttttgtaaaaatgcttccgcctttgtctgcaactttattaccaggcttttctcggtatatctgcaaaagctccaatagtatatctatacaattttctacatcataaactgctgaagtagttttctcatacttagatacattaagcaagacttgcacaggcatatctgatgacttccatacaaggaatactgcgattacaacttcggatcaaaacaaatattttagaaattgctccactctgggccatgttctcacaacaaagtggagacaatctagtaactacctctaggtgttttaaggcctcaagaatggcagaaaggtgcttatatgtcaaaaggtaatgaagtgcaagtgcagttcttttgtagagtttgttttcttctcgaatctccctattaacaacttgaagacttagtcgtatagctttaatttttgtacaatcatttttcttcctccaagaatagcctctccataatgcctgaattttaatgattccactagtgaatttttcctgctttttacggaggagaaaatggcgcactgctttctgtattactgatgcagccctatttcgctggctcagacattcttgaccttcatgctcaatctttttgatgctatgatatttctgaataaatctcttttcttgtaatcttgctcgaaaccatctctgaatacagatgactgaattaacctgcttgttagcattcttcacagccaggtaaagtttataggctctttgaattctaacagcattcaggtgataatatgcagctgcagtgaagtgaagaagtcgaattttggctctctgttctaaaaatctttttcgtactagccaaccacgcac

SEQ ID NO: 14635 - DNA, 1256 bp, Homo sapiens
gaattcggctgagattttattggttgaggatcagtacagacatttcaatttgtacacaaatcttaacatacgtaacgaaattctaaaaagccatgtattgtaattcttttttaaagttattccagtgactttccagcttaaaatttggaagcaaattttccttaagaggctatcaagtaccagtatcttcacgttggtcagctgttacatacggcccaccagttcacaactcaatagcacgtacactacatgttcaaatctgtaatctttcacagcacagtaacaaagttattaggaaaacaggactaccacaaccaaagatgttacagagtgcacacaattctggcagagagagccatgatcaaagagtggttttctttaggaaacaattctactaaaaaacaacatggtaatagaagtaatttaaaatgttcaagacattaaatgcaggactgactccatattgccatttaatatgctttgtattataggatataaaaactaaccccccatctgtgggaatgttaagctgacacccgagacagtcagagcctcccataattcaatatcccacactattttctggttgtaccaaaaaataaacaaccagcaaatgatttcacctcttaaaaaaaaggcatttacacttaaaaaatgggatggaggtgggattccctccttcttaaaaatgtttctagagctactaaaaaacttgcatttacaaaatagttgataaaaatattcctctggattgtacaagaagggagacagggaccactgataagacatggtatatggttattaatcagacttggcttctttctctcctgcttcatcagaggctggactctcctcagtcttcgtttccccgttttccgcaggtaagtcttctttagtttcttggttagccacttcggcctgttttccctttgctccccttttcccttttgtttgcacttttttgtctgaagatttatccttcgctgctgcctttttcggcttcgcttccacttttgcaggagcaggtttagctgacaaccgcgccgatctcctcttgggctcttccttggtggccccttcggcggagctgaccttcctcttgggcatcgtggcggcggggaaggcgcgtgccgggtgcctgcggggaaggcgcgtgccgggtgcctgcgggccgcgcgcgccgacagccttcgcgaaactgggctgccttgccgctgccactcctcccgccgcccgagctgctgagacccgaattc

SEQ ID NO: 14636 - DNA, 715 bp, Homo sapiens
ttttttttttttacaaaaatcacctcttggttttatttctttttatattagtttgatacgtgaatgttagtccaacttaatttttgaaggagaaacaaaatgaaaaatgttttttaaaaaacaaacagtggtatctcttgtcatgagttggatgcctgtgactgacatcaggtattgccaagtaataaacattttgccattcaactctaaatcccttattaggcattagttttaaaggaaatgttacagcttttatattatttgatttggtatttaataacagttataagtacaatggtagacactgaaaaagaaaacccttaatagaaaagaaaaagacaatttaaaattagattttgttgaagggtgttataagtgcaactttatccatatgcattccttttaaggcattttcattgtccaaatatctcaacatgtacatcaaggtttatattataaaatgggctccttttgtattcattcaagacttaaagaaaaaatacatctcaggactaagtgtagcacttggcccacatgtcatgtagtgggtaatagaattaggagctttgttgctccctagacctgctttttgaatttctgctttcttgtactttgtccacattagatgctgcagtggtgttgctgtcagcagcagctggttggtgaatcaactgatataggcagtctactgtccttggtcaaaaaatcatggatg

SEQ ID NO: 14637 - DNA, 564 bp, Homo sapiens
ggaaagtggatgtgcagttgatcccacaggacctgtgcagcgaggcctatcgctatcaggtgacgccacgcatgctgtgtgccggctaccgcaagggcaagaaggatgcctgtcagggtgactcaggtggtccgctggtgtgcaaggcactcagtggccgctggttcctggcggggctggtcagctggggcctgggctgtggccggcctaactacttcggcgtctacacccgcatcacaggtgtgatcagctggatccagcaagtggtgacctgaggaactgcccccctgcaaagcagggcccacctcctggactcagagagcccagggcaactgccaagcagggggacaagtattctggcggggggtgggggagagagcaggccctgtggtggcaggaggtggcatcttgtctcgtccctgatgtctgctccagtgatggcaggaggatggagaagtgccagcagctgggggtcaagacgtcccctgaggacccaggcccacacccagcccttctgcctcccaattctctctcctccgtccccttcctccactgctgcctaat

SEQ ID NO: 14638 - DNA, 978 bp, Homo sapiens
ggcctagagaacgatgacttgtcggcaccaggaagagagccagggcacttcaatccagaaagcagagaagataccagaggagggaatgagaagggcaaaagcaaagaagactgtaccatgtcctaagctgaggcaggcggcaggcgcggtgcacaggaagtctcagtgtgaaggggtcttttctctccactgccaatgtaagtagaatgttctaaattcatagagaggcactgtatgacaattaccaggtgctctactgctttaagttatagactgttacttgtagatttccatgtaatcattgaggttatcacccagattagaaagacatatttgttatcagtgtacgttctaattgagagcattccagtagtatcaaacaataatgtctactgtttatagtccacttaataaaaatagaggcatttactatttgccttaggctgataggaatgtgggttttcttgaccaaatatatcagcatctaattgaaatgaccaaatagcattcttagacttctgtattatgaatataattgatatttaaattaatgtcttgttcacatatgtgtactttcatatttgattttaaaatgtacattataacctgtatggtattttatttaaaggagttaaccagcccaataggcaaataggtcactgaatgataagatttgcaccttagaacaataatcattttaaggataacaagtaaatgtctgaaagcatgaggggctttatttgcctttacctcatatgagtctttgatcttgaaccgatacttttggatctcattgttgatatacctgaatttactttgtaagagattttaacttcacttcatgctgatgatgtatcaaattcattttatagaaagatttaaagtttttttctggaagtgatatatgtcaaattacatttcctactgcagtatttgagcagggacagtcattttttaaatgtttttggccgggcgtgg

SEQ ID NO: 14639 - DNA, 1212 bp, Homo sapiens
ggaactcagcgtctccttctagaacaggttctaggatccatcactgaaatgaggatgaggtgtttttaacatcattttatcactcttgatttagtttattaatcatacatgattattgattataattgttgctgggcatcctgaggcctcagaagttcaccctttgccctgaccccatgggggccctgcccccgccttccgggaaggacaaacacgggaagaggtcagtgcccgagccaccccaccgccctcccttggggcctcattgctgcagacgctcaccccagacactcactgcaccggagtgagcgcgaccatcatgtccatgctcgtggtctttctcttgctgtggggtgaggcctcctggggtctgggtccctggggcgggagggggcgggaacaggagccttacgggggcgtgtctccgcaagtgtcacctggggcccagtgacagaagcagccacattttatgagacgcagcccagcctgtgggcagagtccgaatcactgctgaaacccttggccaatgtgacgctgacgtgccaggcccgcctggagactccagacttccagctgttcaagaatggggtggcccaggagcctgtgcaccttgactcacctgccatcaagcaccagttcctgctgacgggtgacacccagggccgctaccgctgccgctcgggcttgtccacaggatggacccagctgagcaagctcctggagctgacagggccaaagtccttgcctgctccctggctctcgatggcgccagtgtcctggatcacccccggcctgaaaacaacagcagtgtgccgaggtgtgctgcggggtgtgacttttctgctgaggcgggagggcgaccatgagtttctggaggtgcctgaggcccaggaggatgtggaggccacctttccagtccatcagcctggcaactacagctgcagctaccggaccgatggggaaggcgccctctctgagcccagcgctactgtgaccattgaggagctcgctgcaccaccaccgcctgtgctgatgcaccatggagagtcctcccaggtcctgcaccctggcaacaaggtgaccctcacctgcgtggctcccctgagtggagtggacttccagctacggcgcggggagaaagagctgctggtacccaggagcagcaccagcccagatcgcatcttctttcacctgaacgcggtggccctgggg

SEQ ID NO: 14640 - DNA, 662 bp, Homo sapiens
gcacctgttcaacctgtgagtaatccaattactgttctgtctttgaggccaagagcctcagtccaagccagccatgttcatgctgtgtctgccccaagtgaggaggctaaggctggtgcatagcccgctctagggtggggtaaagcgggcagcagtaactttgcctctcataggctggggttggtcctggtcaattctttattttgtgtgaatcgcaaacatagttcaggtatacgtaacggaagtgcccctccctatgcattctccagctgtagggtaccagtcatcctccggggcattatagtaaatctcattagttcagacctgattaatgttgaactcacgactgttgagatgtaggtagtgcagtatacagaaaagaacaagagctctggaatgaggcatgtcagggctggaatcctggctccatcatagactagctgcatggccttgggtaaaagatttatcctttctaagtctctgtttagtctgtgtaaaatgggctgccagtatctcatgaggggattctaaatattgagagggcatatgatagacattcagtaaatgcctcttgccttccctgtgccaactttgtttatcctccactccatctaatttataatattcaaacagtgccaagaatgacaagatattaaaaaaaa

SEQ ID NO: 14641 - DNA, 1212 bp, Homo sapiens
ttttttttttgccaaagttaaaagcgcatcaaacacgcctagcttttattattttaatcacaaacctatagacccctcagtataccctccatggggcctggccccagcaatccaaagctgacaaccttgggtgtaggtatgaggggtgggaatggaggggggagtgtctcttgataactctgaaatggggtgattcctccaaatgaagaactgggtggggaacagaggttggggtggcctagattctcagtatgcggagcaataaaaaaatcagataaacaaatgagggggtacaatatgcttttacaaccctcctccaagcttctgccttgctgggggaaggcttccagtttttcctgggctggggaggtcccaggatagccccttccttcatcctcttgccctacatgttgaaaaagaatactgaggtactggttctggtaacctgaactcagtcccccactaatacccatcaccttcccaaactgcccctcaaggaagaaggcaggactctgcccaagggtggggggcctctcactccagatataggtctggaaaattcatccatgaaatttcataatctgtccccttccccaagagcaaggttggctcagagccctcctaggttaggtcaggttggtcccaggttaaggcaggggagcttaagtaccactcctccctgcagtgtggaatgcttagatgggatgttgctgagggacaagggtggggctgtgatctccacaagcactagcggtggccctggtcctactgattctttcacacctgaaatacctgtgctgggctgttcctatagggaaggggtggggccctggctcctccattcctagaaggccaggagagttcccaggggaaggggctgggtctcatcctcacttctgttccttgcctgggcagagcagggcagggttcatggggaaggggcagagcttaaacccccagggctgggacctccattacttgactcctcttctgtgccaggacggactagactggtggttccaagacaaaggatggagcaacatcctgacatctccctttcccaggagacctggctaggacagtccctaggggacagggtcgagacctcatcctgtctccttccctcacctgggcaaggatgactaccacaggggcaggggtgaggctgcagttcccaggcggcaggccctgatctcatgtccttctccagcc

SEQ ID NO: 14642 - DNA, 1167 bp, Homo sapiens
  misc_feature (1)...(1167): n = a,t,c or g
aataaatcactggaactgagcattctgtaatattctagggtcactccccttagatacaaacaatgtggctatttgttttagaggcaagtttagcaccagtcatctataaactcaaccacattttaatgttgaaccaaaaaaagataataaaataaaaaagtatatgttaggaggttataaatcttgtggagtgtgaattaagtatgtggagtgtctagaagtccttggatatttgatatttacctgaccaccacagacaaagattgggatcctgggctaatccttagataaatggtttaaatagaggaaaaaatcataattaaaaggtgctttcttaggaaaaaaaaatacgggacctgcaagggaatctgctgctggatattgtgtcttctgcaaggatttttatgaatgcaaatggttttttccccttcaccaataaggatcccgccacaaatgataaagcaatacttggtctgctgtacattataactttttggagttttgagaggcctcctagattatacagtacggtgaccacacattgtacataattgttggccccactcactagagactgaatagcatctttaaatattgtgtcgagccttaaaatattcacatgttcgtaatccattccaggggtngggcttgccaattcagtggtgggaggagagaaatcccattcaaacatgcttgttttctagaagcaggattcctcgttccctcctcttcatcttcttccacaaggacacaaagataaactgtatcacacagtggactacataagagacagatggttttattgctagcgcgtgaatttatttgtttaatcctcgaaataaatattttattgatgtccattaatgcttttatttattaaggtcggtaatctatagattaaggggatatatgggaaaaaactaaattatatccattaataatcctttagattgttttatataaatatatatacaatgaatgtttaatacatgtacattttgatgagatgagtatggcaggcaatattatcgaaaggagagctaatagtctctttagagtaagaaagtgttattgtaactggagatggcaggaacagcatcttcccagagaaactcctgtattgtttcctactttgtgaaatatatttttataaatacaaaaaaaaaa

SEQ ID NO: 14643 - DNA, 1243 bp, Homo sapiens
gtttttgttgtagagatcctttttattcaggatttatataggcaatttaccagacacagaaaaccagtctagcagctccaaagtaactgtaaaaacggtggtgctgacggtggtgtgccccacacagggcaggtgacctcggacgtggagcagcatctcccgtggggatactatttcagacgtgcactagtgagtgtatactgagaagggattataaaccttccctggcacaacagatacaaaaagagatagaaccaatgatattttgtctaggtacaatatctagatttacagtatctagtttactggcttcacttcgtataggcaatgcacaatagaaaacggatttctttcttcaagggtattcaagaatatagtaaatatgttactatattgatggctatgaaaacagacagagacaaatgagtgaggaggcacgttctctcacagagacaggacttcattctatttcacataaatcattaagggtccattcaaatataagacctctcacaaagtttcagtcatgtatgagggcgcttacctttaagaccccatttcaaaaccattttgaaatagtgaaggggggaaaaagtcacactcaaatgtgctactcttaaaagcagtgtttctaagcacagcttgcctttttcaaagagtgaaggtggcctttctgtttagtggttaggtaattgggtgcaataatcaaatcttaaggcaatggcaaggctgatggtggggatttggcacaataaggggaaggaatgatgctgtccagttgtaccttaaatcctaaaggattactaatgacatgggagggatagctacctgccccacacacaggggctcctggaacaataccgtggctttagaaacaaaccctaggttcctgagggaatgacactgcaaagtcttacagaaatcccttttatgagatagccagtccagaataaagcctttgcggtacttgtcaacaagcaagaagccttctgaagaggtagatgaaagcagtatttcacagcaggtgtgctgcccgacgtgacgaaagacatgcatgcgcctctcagcacagaccagaagatcaactgttgttgaaaacagtccatggtggtgagaagagatgtcggccacattactaggtgcattatttcaattttattgtattaagaacaggaatgactgccatttctttaaataaccaactaaacaaataaaaaggagcagaaatcctcgtgccaagctt

SEQ ID NO: 14644 - DNA, 690 bp, Homo sapiens
gtacttatgggacccatatccatgagaaacgtgaagagcgagaagcaagattctgtaacactgtccacgatattgtaaacagaggaggcaggggtctcattcctgtctttgctcttggaagggctcaggagctgctcttgattctagatgagtactggcagaatcacccagaactacatgacattccaatatactatgcatcatctttggccaagaagtgtatggcagtgtaccagacatatgtaaatgccatgaatgacaaaatccgcaaacagatcaacatcaataatccctttgttttcaaacacattagtaacctcaagagcatggatcattttgatgacattggtcccagtgttgtaatggcctccccaggcatgatgcaaagtggcttatccagagaattatttgaaagctggtgtactgataagaggaatggtgtcattatagcgggatactgtgtagaagggacacttgccaagcacatcatgtctgaacctgaagaaatcactactatgtctggacagaagttaccactgaaaatgtctgttgattacatttctttctcagctcacacggattaccagcaaaccagtgaatttattcgtgctttgaaaccgcctcatgtgattttagtccacggagaacagaatgaaatggccagattgaaagcagcactgattcgagaat

SEQ ID NO: 14645 - DNA, 1068 bp, Homo sapiens
ctagaatgggatattcttgaagttaagcgcctccttgatcaccaggataatattctctcattgattaatgtcaatgatttgagttttgtcaccggctcccacgtcggagagctgatcatctgggatgccctggactggaccatgcaggcctatgaacgcaacttctgggacccatctccacaactggacacccaacaagaaataaaactctgtcaaaaatcaaatgacatttctattcatcatttcacatgtgatgaagagaatgtatttgctgcagttggaaggggtttatacgtgtatagccttcaaatgaagcgtgtgattgcctgccagaaaactgcacatgactccaatgtcctgcacgttgccagacttccaaacaggcagttaatctcatgctcagaagatggcagtgtacgcatttgggagttaagagaaaaacagcagcttgcagctgagcctgtaccaacaggtttttttaacatgtggggatttggaagagtcagcaaacaagccagccaacctgttaaaaagcagcaagaaaatgctacttcatgttcactggagcttattggagatttgattggacactcatcatctgtggagatgtttctatactttgaagatcatggactagtgacgtgctccgctgatcatctcattattttgtggaaaaatggagagcgagaatctggattgcgcagtttaagattatttcaaaaattagaggagaatggtgacttataccttgctgtctagtttaaggaattaaaaatacacatgcatgaaccttgaacatcaaatatcgggtactactctgaaaaccattaatatattgatcacttaaattggtaattttttttgtcagtccataaaattctacatgtttaaattttttgtggacctaccaaccaggaacatgttgcttctcaggtcctagtatatcctccaaagaatataccacaagtttttccatttgactttgagctgctgttgaagtggtgagtgctgtgcttttgagcttattttgaacctagatccttgtgaaaggtacaaataaaaaaaaaa

SEQ ID NO: 14646 - DNA, 839 bp, Homo sapiens
gcgtcacgccatgaccctgcaggcattggcagaccgctgcatgttcctagtagccctgaggatgctggccaagaagaagagggaggaggaggagagggacagacgcctcggcccctagaggataccacgagggaggctcaggagctggaggcccagctgtccctggtcagggaggggcctgtgtctgagccagagcctgggacccaggaggttctctgccagctcaagcgagaccagcccagcccgtgtctgagtagcgctgaggattctggggtggatgagggacaggggagcccttcggagatggtccattcctcggagttcagagtagacaacaatcacctgctcctgctcatgatccacgtgttccgagaaaacgaagagcagctgttcaaaatgatccggatgagcaccgggcacatggagggcaacctgcagctgctgtacgtgctgctcacagactgctatgtctacctgctccggaaaggggccacagagaagccatacctggtggaagaggccgtttcttacaatgaacttgactatgtgtcggttggccttgaccagcagacggtgaagctggtgtgcaccaaccgcaggaagcagtttctgctggacacggctgatgtggcgctggctgagttctttttggcttctttgaagtcagccatgatcaaaggctgtcgagaacctccctaccccagcatcctgacggatgccaccatggagaagctggcactggccaaatttgtggcccaagaatcgaagtgtgaggcatctgctgtcaccgtgcgcttctacggccttgtgcactgggaggaccccacagacgagtccct

SEQ ID NO: 14647 - DNA, 436 bp, Homo sapiens
ggtgatgagtgttggtaagtgatggcagatcactgtttccacagtgctttggggtagcaggagcacacagaacattccctcccaggcccatgtgtgtttatggtctcttagagtaaaacctgttttatcctcatctggcacttcctatggtgtctgggtgtttcctgccctcccccactggactgtaagtggcagaaacacaaactgtgtcttcttttctgttccatcccaagtatccagcatggtgcctgggaacatagaaatgttcaatgaatattaacacaatgatcaaataaagtaatgaatgcagttttgtgtatttcagatgtagaaaaagaaatcagggatcaagtaagtgacaaatcacacccttgggagaggcaccatgcatgctgtaccaatctagaaatggaaaatggctttcattgggcttgaa

SEQ ID NO: 14648 - DNA, 330 bp, Homo sapiens
ggttgcctttaaaaaaaacagaccattcacaagtaagttgtttcactaattgttaagaaacatttttcttttatggaattcctacaaattaaaacatctgctcactaaggatttccggtgaaattcctttatatgatcatatatagtcattgtattccagcatgcctttttgccttggtatttattcgtgtcctttcgtcttctctccaattattagaatttaaaaatgttgaaagcaagaattgttaggtttccacagtgcctagcccacagagttagtgcttagtaattaagtacgttgatttaattagattttattactgtcttcta

SEQ ID NO: 14649 - DNA, 897 bp, Homo sapiens
acggtccgctgggagttcggcacctgccagccgctgtcagacgagaaggacctgacccagctcttcatgttcgcccggaatgccttcaccgtgctggccatgatggactacccctaccccactgacttcctgggtcccctccctgccaaccccgtcaaggtgggctgtgatcggctgctgagtgaggcccagaggatcacggggctgcgagcactggcagggctggtctacaacgcctcgggctccgagcactgctacgacatctaccggctctaccacagctgtgctgaccccactggctgcggcaccggccccgacgccagggcctgggactaccaggcctgcaccgagatcaacctgaccttcgccagcaacaatgtgaccgatatgttccccgacctgcccttcactgacgagctccgccagcggtactgcctggacacctggggcgtgtggccccggcccgactggctgctgaccagcttctgggggggtgatcttagagccgccagcaacatcatcttctccaacgggaacctggacccctgggcagggggcgggattcggaggaacctgagtgcctcagtcatcgccgtcaccatccaggggggagcgcaccacctcgacctcagagcctcccacccagaagatcctgcttccgtggttgaggcgcggaagctggaggccaccatcatcggcgagtgggtaaaggcagccaggcgtgagcagcagccagctctgcgtgcggggggcccagactcagcctctgagcacaggactggaggggtctcaaggctcctcatggagtgggggcttcactcaagcagctggcggcagagggaaggggctgaataaacccctggaggcctggccaaaaaaaaaaaaaaaaaaaaaaaa

SEQ ID NO: 14650 - DNA, 428 bp, Homo sapiens
gtggccccagaaaagtcagtgtgtaggcctctgcattactggtccggcgtacattctccctggacaccatcctcagctcctaccttctgggccagtgcacgagatgctgatggggccttcacctgctgcaccatcgacaaggccacccagacgcccctgtcctggcaagagctagaaggtgagcgtgccagttcctgtgcacacaagcgctcagcatcctggggcagcacagaccaccgaaaagagatttccaagttgaagcaacaactgcagaggacgaagctgagccgcagtgggaaagagaaggagcgaggttcaccactcctaggggaccacgcagtgcggggagcacttgagggcgtcccctcccagcttcccctcagggtcccctgtcttgcgactcagcccctgcttgcacaggagcctgg

SEQ ID NO: 14651 - DNA, 765 bp, Homo sapiens
ttttttttttttttcagcatttaattttattatagtcccatctccctcaacaaacaagatcagcagccagtgtgggatggtgctcaatggggctccacttcccactagagtgtaagctgcttccacgcatgctactgcgtgctccgagccatcgcagcggagtctcttctcacccagctttgatggtggggcgactcccgtgtctgcagctgtggtccaaagggtgtctgtgctggatacagaagttgccgtgacattgggcacataccatctgcagcatctctttcttcttgcagccctcttttgagcaacggtatgtaaaaatcttctctttcttcttcccagggtgagagtcacagtctctgtcaatgtgatcaccaaccaccacgtctggtatctggcccttttttactgggatgggggtattacagagtgggcatactgggacgtgcacatccttctggaatgcaaacggacacttatgtgcagcgtatggaaaatgatctttacagaaatcttgtttacatgcatcacattttactggaagaaaatctagctgcttgcaagtcttttttgaacaatgcttccccaaatcaggaaactccattatgagaacagtgctcaaaacgcagatggcggagttaagtgtcacctggctctcgtcggggacccaggcagctgaggcgagcagcagatggaagagacgtaaactcaggtgtcctcctccgtagtcggctccgggtagctaagcagaaagaacctcgc

SEQ ID NO: 14652 - DNA, 1334 bp, Homo sapiens
ggggcagccgccgagcaagcgctgggaccgggtcaaaattgtttgcagccagccctacagcaaggtctccccctttggcttgagttttgtacggtttcatagccccccagacaaagatgaggcagaggccccgtcccagaaggtgacagtgaccaagcttggccagttccgtgtgaaggaggaggatgagagcgccaactctctgaggccgggggctctcttcttcagccggatcaacaagacatccccagtcacagccagcgacccggcaggacctagctatgcagctgctaccctccaggcttctagtgctgcctcctcagcctctccagtctccagggccataggagcacctccaagccccagggagtctcccaaaggaagaggaagttggatttgaaccaagaagaaaagaagacccccagcaaaccaccagcccagctgtcgccatctgttcccaagagacctaaattgccagctccaactcgtaccccagccacagccccagtccctgcccgagcacagggggcagtgacaggcaaaccccgaggagaaggcaccgagcccagacgaccccgagctggcccagaggagctggggaagatccttcagggtgtggtagtggtgctgagtggcttccagaaccccttccgctccgagctgcgagataaggccctagagcttggggccaagtatcggccagactggacccgggacagcacgcacctcatctgtgcctttgccaacacccccaagtacagccaggtcctaggcctgggaggccgcatcgtgcgtaaggagtgggtgctggactgtcaccgcatgcgtcggcggctgccctcccggaggtacctcatggcagggccaggttccagcagtgaggaggatgaggcctctcacagcggtggccagcggagatgaagcccccaagcttcctcagaagcaaccccagaccaaaaccaagcccactcaggcagctggacccagctcaccccagaagcccccaacccctgaagagaccaaagcagcctcaccagtgctccaggaagatatagacattgagggggtacagtcagaaggacaggacaatggggcggaagattctggggacacagaggatgagctgaggagggtggcagagcagaaggaacacagactgccccctggccaggaggagaatggggaagacccgtatgcaggctccacggatgagaacacggacagtgaggaacaccaggagcctcctgatctgccagtccctgagctcccagatttcttccagggcaagcacttctttctttacggggagttccctggggacgagcggcggaaac

SEQ ID NO: 14653 - DNA, 938 bp, Homo sapiens
ggtagtgagaacccttccggtgggctaggtactgagcgcgcgaggtgaggagttgtgcagggtttggggaaaggaaggctggcttggcgagagggcaggtttgcgggctttcgcccccttttccaaagaccaacaaagagtccttccccaactcccaactcaaccccttttggaactatgtgtggtggttgggaccctgtggcgcatccttgtcgctcgtgtccttctcatgcccggcgacgcgtctttgtggtaacgccctgctgccatctcttttcttctctatgcgaggatttggactggcagtgagaataagagacaacgattcacgtctactttctaggatgacttccatgtgctccatctcgcgcgtccctgagcatgttgaatttccaaatcctaaataaggccgcgcggtgtagtttgtattatgttgcgtttctctttctgctttcctcgccctttctccatcatcctttaggctctacagagtgaaggtttaaatccaaggtcatggcaaaacatctgaagttcatcgccaggactgtgatggtacaggaagggaacgtggaaagcgcatacaggaccctaaacagaatcctcactatggatgggctcattgaggacattaagcatcggcggtattatgagaagccatgccgccggcgacagagggaaagctatgaaaggtgccggcggatctacaacatggaaatggctcgcaagatcaacttcttgatgcgaaagaatcgggcagatccgtgggcagggctgctgaggcctgtgggtgggacacccagtgcgaaacccctcatccagttttctctccatctcttttctttgtacaatcccatttcctattaccattctctgcaataaactcaaatcacatgtctgcaagaaggcctccaaatatacaaacaatcccattagtcagc

SEQ ID NO: 14654 - DNA, 439 bp, Homo sapiens
gattaagagtcccgccccctccatacgggaggaaacgtgtggccctggggccctcagccaagcctccactatctttttggcccagacggatttcccaggtcacaagtggctggagacttcctcttgaaaaacatttgccgtcgtttttccctggcagagcccctttgaccctggctaacaaggacagcctgacttggatcccactatgcaggaaggaaggcgactcttccccgcacctcttgctacgattaggacttgcgacttggtgaaaacaggaatcaaaacttgggcctatttctcctgaggtctgcttgcctagaacaattcgtaacgatgaatcttattaaaaagagaaagtcctccccgactttatctttttccgcccagaatccgataaggaagacttgttctggccccctcagctctctgacctcatcta

SEQ ID NO: 14655 - DNA, 255 bp, Homo sapiens
gctggggaaatgggaataatggcagatgttcatctataaggctacactgccactccatgccacagactccaagaacagaattacagccaggcttcagattggaactgggcttggaaatgcatgcctctcaacgtgaatgtggccccaaaactcatgggggtcatacacagcttcccaatgatggcagggctgtacctatcattcagtaggcttttatgctttgatagctgattgttataacttagtgctctaatc

SEQ ID NO: 14656 - DNA, 989 bp, Homo sapiens
  misc_feature (1)...(989): n = a,t,c or g
ttttttttttcaagagcacgccccctggcgcttgtattcaccaggaccttctggaaccctccatggccccacaccaagcacggccccggcgcccaagctcggccacctgcagtctcctggggtggggctgtcggatttatggcatgctttctgggttctcattgctgagccaatcccaaagtaggggaaggggcttggattcatcacccgcccctcgggctttcgagctcaagacaaggccgtcgctggggaggcgtctgtgctctcccngggctcctgcagctccagagggttcgggctctgaagcaggtgagggtgttgctaggctgctgtttcctactggcttgccgccccgctcctgcttgtacagtctctgctcccggatggcttgttccaacaagggcaggttcatcccctccacacaggtcagcacgcgcgccttcaccacggagcctctgtcctgctgatgctggagctccccgaggacgatgtacagggagcccacctgggcgtggaagggctccaccaacttggtacagacaagaacctggtgctgatcggatccgtgctgagccatcagtgttactctggactgaatcatgtcatagaggcacaacctgccaaatgttctcagcgtgctcccatcaggaacttggcctgcactaacctcccaggggaggtaataggtcccaggtttgggcagcatcatgggctcctgttctaagcgtcgccggtcctcggatttcttctttccgcctcgcgtggtcacgtgacgggggaggggcgggatacaaaaagtgctttattttcccactccccggacgcccagcagggcagtttcttgaccttcggagcccctttcccgaggatccgctcgggagcctcccctggccaggagcaggggattagtctgccccgcgaccggccccagccacgacgcggacatcgccccctctgtctgggccgctgttactcacgcgccaaagggc

SEQ ID NO: 14657 - DNA, 556 bp, Homo sapiens
ccactattcctcaagaaatcttagaaccagcttgtgaggaaaaacattttttaatgtaataaaaatatgccattattctttgaaatgccaaatgatataaatattttgcctaatacatatttattgtagatgaaatgcactcttctcgatgaggcctcgatttgaatcaatggggtgggccacaggaaatgtcagaggaaccagaactcagaactcttcctcctggacctttcttcccttcccttggaggtatccctttgaatcaggcctctctcttctcatcagtctgtagcttccccccttgtataacctgctttcctttttacatttattaaaagtggattttgtaaaagcatttcattgacacgcgacctatcacagacaatggaattcgtcagtggtggtaagactgaaatcctgatgcttttcacacttcttgtctcttgctatgtatttctgcctctagccttgccatgttttgccttttttttttctttttggccaattcctttttatatgtgcccacaacagaggtggggagacacggagcaccctg

SEQ ID NO: 14658 - DNA, 889 bp, Homo sapiens
ttgctctgtggcccccagttcgggagaagagagtcagaatctacctgagcaagggtcccaatgtgaaaaactggaatgcatggaccgcactggaaacgtatttacagctccaggaagcctttggttgggagccattcatccgtctcttcaccgagtacaggaaccagaccaacttgcccacagaaaatgttgacaaaatgaatctgtgggtcaagatgttctcccaccaagtgcagaagaacctggctccgttctttgaggcctgggcctggcccatccagaaggaagtggctaccagcctggcctatctgcctgaatggaaggaaaatattatgaaattgtacctcctcacacagatgtaaggagtgcccatcgaggtggcaggccccactgaaattgaagtcaagaaatgcaaaaaggaactgacacatctcagcaaagaaaactgaagggatttggttataagtggagaggatctcagcatatttctggaagatagaaagtggatgaagcatgataatgaaagagtgaagaacctttcagataaaatgtaagctgatctgaacaacataaccccaaagagacttgcgcacctgaaaagcttgtctactgaagaattactccagttgtaagattgagccctctcctactctcccccaactcttatgcacagaacacaggcagtctccactattgataccagttaaaaatttcttgttattgttgctgttgttgtttgtataaaggaattgaacaggctgcttgcagagagataagagttggtgctccagaaaaaaatttctcttctagtggaaataagtgcccctacccccagccggtcagctaattctctactgacagctgagacctcctactcaagtgcctgttg

SEQ ID NO: 14659 - DNA, 264 bp, Homo sapiens
ccgcggccaaggcccctaggaccgccgccccagctcacgctgccgacggcagctatagacattctgcgtcaggtccgggctcctggacttcgcctttcccgagccctggaggtggggagaaaagtggaagaactggccagagagtctggaagtttgggttctggtcctggctgtgccactgactcactgtgaccttgggatcttgtgctgtgaagacatttcccaagtgcttcatgttagccagcaaatctgacccacaaggcc

SEQ ID NO: 14660 - DNA, 904 bp, Homo sapiens
  misc_feature (1)...(904): n = a,t,c or g
ctgcttccttgtgagtcaggtgggtcctgggcccaggaaccggcccggagccgtggacgccctacagctgagaaggggacccaaggggtcggccgcggccaaggcccctaggaccgccgccccagctcacgctgccgacggcagctatagacattctgcgtcaggtccgggctcctggacttcgcctttcccgagccctggaggtggggagaaaaggttcaccaatttttaaaatccaaatatatctcatggtacagtggaagaactggccagagagtctggaagtttgggttctggtcctggctgtgccactgactcactgtgaccttgggatcttgtgctgtgaagacatttcccaagtgcttcatgttagccagcaaatctgacccacaaggcctggaaagaggtgattgttaggttgcgcagaggtggtcttatccagctcagcttcccctgggacccaccgtgggacctgaggcagaactggggtggacttggcctcctccatggcacaccggctgcagatacgactgctgacgtgggatgtgaaggacacgctgctcaggctccgccaccccttaggggaggcctatgccaccaaggcccgggcccatgggctggaggtggagccctcagccctggaacaaggcttcaggcaggcatacaagggctcagagccacagcttccccaactacggcctgagccacggccttaacctcccgccaagtggtggctggatgtggtcctgcagaccttccacctggcgggtgtccaggatgctcaggctgtagcccccatcgctgaacagcttttataaagacttcagccaaccctgcaaccttggcaggtgttggattggggctnaagacaaccctgaaggaagttnccgcaaaacgggggtct

SEQ ID NO: 14661 - DNA, 344 bp, Homo sapiens
  misc_feature (1)...(344): n = a,t,c or g
gcctcaaacgattatacccaacaagcaacccaaagctatggggcctaccccacccagcccgggcagggctattcccagcagtcctcctaccctggctatggccagcagccagctcccagcagcacctcgggaagttacggtagcagttctcagagcagcagctatgggcagccccagagtgggagctacagccagcagcctagctatggtggacagcagcaaagctatggacagcagcaaagctataatccccctcagggctatggacagcagaaccagtacaacagcagcagtggtggtggaggtggaggtggaggnnganngnnncttgccannancnagct

SEQ ID NO: 14662 - DNA, 301 bp, Homo sapiens
ggttatgtcctttcctggttttggtattagggtgatattggcttcatagaatgatttagggagggttccctctttctcaatcttttggaatagtgtcaataggattggtaccaattcttctttgaatgcctgatagaattcagctgtgaatccatctggtcctggacttttttttgttggtaatgtttttattaccatttcaatcttgttgcttgttattggtctgttcagagtatctaattcttcctgatttaagctaggagggttgtatctttccaggaatttatccatctcttctagg

SEQ ID NO: 14663 - DNA, 841 bp, Homo sapiens
tttcattcatcagacattttaatgagacccaatctgatatgaccccttcttgggggtagctcatcatccaaggagaaacaaacagttacaatgttacaatgcaacttgctaaatattgaacagaggtaattacataaagctgtgttcccccagctgctcccctgcttgtgctgagatcaggagagctgtaggaaggagccacaggggtaaaggatgacccactccagctgttggaatatgagatgagtcacatctggaaattctaatttggtgcagctgcccaaggcaaagtggtaggccttgttcacatttaactcggtaaagctttatgaagcacctacccagtgggtgccatggaggtggatcagattgagccacgctgctgccacctctgtggagggaggctggcatggatacaacttgatgactatagactcttcctctctggattcagttccctctttctagcctccttgaatggcctcagctcattttgtgaaaaaatgctgactgaggcctcatggaagttctgtgccgattcttaggtgcctgtgattcatctgtgcctgatgagaatcagggtcaagtacggcccaattctccaggcttttcccaggcactggctgcctgaagccaatccaggtctgccaggtagagcacaagccagtcccatttgcacttcctgctgctaaaccacaggtccctgcttctccttaagagcaaccttctcccagagctgactacacttatgtctcatacccagcttgaaccaattttccaaatacaagatgaagacttagttttatagctttttttttttttttaagtttagggcatttat

SEQ ID NO: 14664 - DNA, 254 bp, Homo sapiens
aagaagatgaagaaaagcttttcaacagcctttctatatcatcgtgtgataattgttcaccaatgaatgagtccttagccctgtgtcagtttaccctcgatgcccttatttgtgagttaaagagaaaatatcataaatggtatactcttaagtatagaggttttgtatctagaggatctcagttcaactcctgtctctccatataccagcagtgtaactgtgaataacatacttaaatggctgtgcttatttcc

SEQ ID NO: 14665 - DNA, 425 bp, Homo sapiens
gtttgggtctggttttttatctattgaccccatcacatttttgggtcgcatgctatctcttctcattcagaagctgttctatttccgccttaatgctctgctcgaaggagtcgttgctgctcgctctgaccgggaaggcagaaccctagtcctcactggatctcacctggctgccagggccaccacctgagccaggtacaagttttggggggacacacggaagtcggggcactgccgtgagatagttctggcttacatctactgccactgcctgcagccctggaaggctgggctgcgcctggctggcccctgccagccccgggctgtgcggctccactctttgcctttaggtactcccggatggcttcgcaatgtcccggtccacggaatcatcattgaatctagcaccaacgggccaaagtctg

SEQ ID NO: 14666 - DNA, 381 bp, Homo sapiens
ggaaggaagagggccaagccccgcctggagcaggacagctccctcaagagttacctgtcaggcgaggaggttgaagatgacctggacctggttggtgccccggagtacgaatgctatgccccggacacagaggagttggaggcagagagaggaggtggcagaacagaggatggccacagctgcggagcaagcagggagtagatggagaggctctgcccatcccacatttgcagggaaaagcattggcacgcaacgcagcatgtggcttcattgaggcagttgatggagttaaaccatctgctcttctgctacttcaacattttctagcttttccgtgtatctaaacacaatttgctacacaagtcactgtttttttttcct

SEQ ID NO: 14667 - DNA, 1664 bp, Homo sapiens
gcaggggggaacgctggacgacctagaggagcaagcaagggagctgtacaggagactaagggaaaaacctccgagaccagcgaacttgagggtgacagtcaggaaatggtacggcttgctgcttcaggcaattcagagcttcgagaagaaagttgcgagtgatctatacgcagctcagtaaaactgtggttttgcaagcagaaggcgctggaactgttgcccaaggtggaagaggtggtgagcttaatgaatgaggatgagaagactgttgtccggctgcaggagaagcggcagaaggagctctggaatctcctgaagattgcttgtagcaaggtccgtggtcctgtcagtggaagcccggatagcatgaatgcctctcgacttagccagcctgggcagctgatgtctcagccctccacggcctccaacagcttacctgagccagccaagaagagtgaagaactggtggctgaagcacataacctctgcaccctgctagaaaatgccatacaggacactgtgagggaacaagaccagagtttcacggccctagactggagctggttacagacggaagaagaagagcacagctggcctgggaagcaggcctcatgatgttggggggacttcgaccccctgacatggggcagcccatagcaggccttgtgcggtggggggactcgaccccctgacatggggctgcctggagcaggccgcgtgacgtggggctgcctggccgcggctctcacatggtggttcctgctgcactgatggcccaggggtctctggtatccagatggagctctcgcttcctcagcagctgtgactttcacccaggacccaggacgcagccctccgtgggcactgccggcgccttgtctgcacactggaggtcctccattacagaggcccagcgcacatcgctggccccacaaacgttcaggggtacagccatggcagctccttcctctgccgtgagaaaagtgcttggagtacggtttgccacacacgtgactggacagtgtccaattcaaatctttcagggcagagtccgagcagcgcttggtgacagcctgtcctctcctgctctccaaaggccctgctccctgtcctctctcactttacagcttgtgtttcttctggattcagcttctcctaaacagacagtttaattatagttgcggcctggccccatcctcacttcctctttttatttcactgctgctaaaattgtgtttttacctactactttggtggttgtcctcttttcggcaaagttggagcgagtgccaagctctccatctgtggtcctttctgccaagagcgactcatagtaaccaggatgggagagcagctgccttattctgaatcccaaaaattacttgggggtgattgtcacagaggagggacagaaagggtatctgctgaccaccagcctgcctacccatgcccatgtctccattcctgctcaagcgtgtgtgctgggccggggagtccctgtctctcacagcatctagcagtattattaaatggattcattttaaaaatagctcctatattttgtaacatgtctcaaacactcatactgggttccacaatccactgttagaatacctatggttagggcttctgaactaaaataatggaaaattttaacaatttga

SEQ ID NO: 14668 - DNA, 815 bp, Homo sapiens
  misc_feature (1)...(815): n = a,t,c or g
gatcctcctcccaaaaagcagaactcatagctctcaaccagggccctaaatctttccaaaggcaaacgagtcaacatttatacagactcccaaatatgcctatcacattcctcgttcccacgctgctatctggcaaaagagaggactccttactgccaaaggaacccctatcactaatggccaccttatttactaactccttcaggccacacacctcccagctaaagcaggagttatacactgttgaggaccatcgaacaggttcagatgaaatctcgaggcaacagaaaggccgatgaggcagcaaaagaagcctccctttcttctgcctctgcccctctccttcctgttatcccagcaatcctacccaagaactctcccaccgagaaagctttgctatacagcaaggagcctcctttcaaggggactggatagtcaaaaatcaaaagctcgtcctcccctaagagcagaccaaagaaattctgacatctcttcaccaatccttccatatcagtgtgcgcccccatacctactccttcaccctatttctcctccccccatctattcacctcactaagagacataacctcaaactgtcctatatgctctgttacttcctcccttaaagacagcataaaaggnaagaatgcacagattaagaaaaggacggggatattttcaaggggcttcatttttaataacctnacttttaaagatcctggtaaaattcttaacaaccagggggtgtcccaactgttcatngccctcggctccaccactcacagcatttatagtncacaatattttagggcttt

SEQ ID NO: 14669 - DNA, 379 bp, Homo sapiens
  misc_feature (1)...(379): n = a,t,c or g
ctgagcctgtctctcacgggaccgggaagctggagagagccccaaccctgcccgctggggccgagctccctgctcctgcagcagtcccgtgccccacactctgagtctgccctatccacagctgctgggcctctctgtggccaccatggtgactcttacctacttcggggcccactttgctgtcatccgccgatcgtccctggagaagaacccgtaccaggctgtgcaccaatgggccttctctgcggggttgagcctggtgggcctcctgactctgggagccgtgctgagcgctgcagccaccgtgaggtaggcccagggctcatnggcagggggcttcctgtgcttctccctgggcgtttttgcgcacaggtncagg

SEQ ID NO: 14670 - DNA, 534 bp, Homo sapiens
tttttttttttttcacttatagccaatatttaataatcccatattaactgatgtgtaaaaaatgtctttatgatctgttaccacccaaaagaatgcatcataactttcaagaatatgttctttgacttctaacctctgctcttctttagaattacctttgctgcggccagtacatgctccttgttaatgactctacatttactcgcacaagcgtttgtcctggactcttctgctaatcgatgaacaaacagtaaacagttcagatggaccaataagtcaccacttttctccagacgaagttgaggcttctttcgcttgaagactcgctttagaaagccacggggagccttccgctttatctgcttcctctgggagactatggtcgacagcgccatcctctctgtcaagtaccagctgcctcagcttccgaggtgctctctgtatcgcacacaagctccggggacactgggccagcgaaaacaatccggtccgtatgacgcttcttcaggcagaaaaacctcagtccgaacgttc

SEQ ID NO: 14671 - DNA, 1393 bp, Homo sapiens
ttttttttttttttttactatgcttgaactttaggcatttattgaaaacttatacatgccatataaacaaactaaactcttttagctgctataccaagtttccataaaactgtctgctggttggggaggctacagcctgaccacattctttgccattgcctacaaggggtaagaaatggcacatggaaacatggcaggccgactcacgaacacaggcctgggccagcgctttcttcttcctcttttattcccatcagtcctagaccagagagtgaaccatgagtgctcttggttcctggcagcaggatgaggcagagagtgcccgggcacaagctgttgtagagctttccaatcttccggctccagcgccaggctgctatcttcgggtggtccagtttcagagtctgcaaggcctcctgttcaaaggggggaggtacaacacgaagccctgggagccttgttgattcaggtggtaagcctctgagccaggcatggaggtgcctgggggttagggcatgcctgcctttcagcttccagtccttgcctgtgagaatgttgagggcctgctgggcactgccaaaacttttgaatttcaggaaacagtattttttctgctttccacttttaagatctttaggcaagatcacagcttccaggccaagaaagaggcggggctcctgcaatagctgttctttgaaggtttcactcactccagacagatatatagagccttggttttcagaatctccttccagctcattcacgagggtgtcacaatcaagcgtgagctctgtcacaggcctctgcaccttgatgcagataccatctaccagaataccatccaaggactctatggccagctgggcagcttctaggacttcatactgtatacagagatgaggctgacgggtttcaagaacaaaagtcattgactggactgggccaaagcttttaaacagcctcttcagagccctgagattgcaatttttgctaaatggcccagcatagacagttgatatctctgtccacttgatcctcatccttttgttccatcctccctcagtgaaggacaggtgaaaaaggccttaaaaagagaactgaaacaatgctgaaagggaaacagggggatttcccactctggcctgcctcaagaacctctttatttgaaagacacttaatagtttgacaatttctggaagatggaagttcaccagcatctgtctcccgggtcaaaaaaagaagcttctgacccactgaatccaagcattctaaaacacttgtgtttgggtgctgaagtacttctgctgtgtttttaggctcttggcctgctgcttgtatttcttggtgattagctagtgcttctagatttagttctgcaatcttttttgggccc

SEQ ID NO: 14672 - DNA, 612 bp, Homo sapiens
ttttttttttttttttgctattttactgctttatttataatgctaaatgaacactggaaattagagcagtacaaaaaataagaaaaaatcacctcaaatcccaatacccagagcccaactgttagcgtggtgaacattttcccaatactttatatacacatctatacttgctgttttataatctccttttaaacttttattgagcaatatgtcatggatgtctttcctggtcagtaaatacaggtttgtattatcgttttttaaatgagtctctagcagttcatcatatgaagactcctactttagtctgtcctctgttgatgaatttccaggttttctcttggtggtgggggtgaggagagttggaataaacaagagtgaagggaacacatctgtacatacattttgtactcatttggttttttctcatgataaatttctataagaggaactgttgaaatcagaaaagagaggtgggtggatggtggatccgtttggtttgattctgtgcaatacagacgggaccccaggagcctttgctgagctgtggttgaagggcatcaaacagtctccttttctaatgacactcccttttatagattggcccggatc

SEQ ID NO: 14673 - DNA, 827 bp, Homo sapiens
ttttttttgaagtttgcaaatcttttatatttccagctgttgagacagtatttttgagggctgatgttacctctagcggcgaaaccagagccagctattaagcagccagaaagctacagtaattgaatacatgaccatttctcttttagcacgttctttgttctcctcttccagaagttgcagacgtctatttagtttgattatctgtcgtcttagtgaagctgcatctacaacagtcaggtcatctgacgttccttcaatggttgtatctatatttgaaatgccatacctgacgttgtcatgatgaggattagaagtggcggcagcagacccaccacgcaacacaggtctgcgattttcatccagcacatccaagatctgctggtatgccctacgagtagaagactggataagcgacaaaatgccacgagcagaggaaagattagctccatcttcaggtaacatatggggaggacagacccgagcctgttgtggcgatggtgtcacagtgtactccggtgcagaaatcggtgcctggaaccttgaaattttatttcttggggcagaatctgatctgtgccacagagaatcatttctgaccagctgtccattttggcgaacagcattttcactcatagaccgctctctttttagtctgccaactgctcggatttcttcattttgaggggttgtaggaggtctttctaaatccagaaaatctagtggtctttcactcagcgtaagtacacgaggtggtgttttcagtgccaggggtttaaagggagttgactgaataaggtcaagatctgctggtcttgaaaatgaaa

SEQ ID NO: 14674 - DNA, 531 bp, Homo sapiens
gcacattctcccctccaactttgttaatgctacttgtctctggaacatttttttttcctacctcagagataaatgagatctccatttcccacttaacacagtgattatccttttttccccccccaaaatagtgacatttggtccaattataatctattttcctattgaactttcagcaataactgagctgtggcactagcagagctagtagccattatcagtgaaagaaaaagtccacatttctactctctgttgcaggtgaacaggagaggatggtacactgttactagaactcctctccttattgattatttttggacacacccagaaacttctttatggaggcttttgggttgatagtttaaaaggctgatttttctttttggttatgatttctcccttaagtggtctccgactttgtagcatttttatttaagctaaaacagagcacatgtatatgtacataagacacattaaatctataaatactatttattcattttatataaactaatgtaatggaaaacaaaa

SEQ ID NO: 14675 - DNA, 1241 bp, Homo sapiens
cccacatggctgaagatgtgggtcctggatccttcccccttctcaccataaccccctctcagtgtttccccaacttctcccttttagcagggtccctttagagcccaactccaggtcaaatctggagctcaaatcccagtgctccctccccaggagtggggccccaactcttccaagataccagcattcctcaagtcctcccaaaacttcctacccacaccctcttcccaaggccctcaggggcagaaaacatctccttcaacccgtccccactccttcctctgcatgaccttggggcaaacccttgccctttcaagccatcagctcctgcctctctgccatgagggctttggatcagattcctcttctcgccaggatgaggacacgcactgccctccatagacacagatgaaggggtgggggtcattcagctcgaatgggtcccagatgctcacttggcctttccctgcaggatgagtgaagacgtttgcctctcacagtgtgtcttctacctgcattttggcatcagagccccccagcccacccaccacaggcaattactagccctagttgataggtgaggtgggtgaagaaggctggaggtgacatgtccgaggtcacacaacaaagcagcatgcaggaactagaaacacatcttcagcctcctcctgggccagctcttgtgctacaggtggggcggagccagcccctcaccttcctggttccctgagggtcctcagggtggaggacaggtttggcccagaaagactagccagaggcctgatggtcccaggtggctctggatatactttggatatggatttaaatggtctctaagagccgggggtagggggcaggaaaagtgggttgtctttgcccctcaaagtccacctacctagaaaccaagcccacggtcttggccgtgaccctgataataaatgggctctctcagaggcgccagcccctccctccccagccggaggcgtcatctctcttctgtaccactagagggagctctgatgcagctggagagcagcgctcaaggtctcgcccctcccctccctaacccttaccttcagtctccaccagcctgaagggcctcctaggggatcctcaggcggcccccaccagggcacaccctactgtccttgtgcctcacgccccctcctcatcctgcaccccttccatcccaccttccctttcaataaacagctgggatggatactgaaaaaaaaaaaaaa

SEQ ID NO: 14676 - DNA, 569 bp, Homo sapiens
  misc_feature (1)...(569): n = a,t,c or g
caattcaacccttcaacattatgttcaagtttcaaagacactgcagggaaagagtttagaccttgtggagaactaatgtgcaatcttcgctttccttgaaccgagtcgacatcacggcgttgtctttggcacgtacagtctttgaataatagttgacgatcttgccgtccagtttatactgatggggaatgctctcgtagggcttgaggtcaaggtccagcacagacacggaaaaggcaaacctggacctcgatgaagggacnacaggcctttgatcagagctggcatcctgcagacagggagacagtgcaatcatgatggagcagtccttggcagtcatggccgacgcggtactgctgcacctgcaggggcgggaaagatcagctccacggtcacacaaggaagcctctgcccccccacacaaccttccttcccagtagccaagtgtgggaactgcttcctgcctcagaacctgagggtgggattaggagcgagggccacggtgagcacgggcgttaagaagtcgcctgtganacaccttggccagcctttaatgccccggggtttgt

SEQ ID NO: 14677 - DNA, 11478 bp, Homo sapiens
gctgccccgagcctttctggggaagaactccaggcgtgcggacgcaacagccgagaacattaggtgttgtggacaggagctgggaccaagatcttcggccagccccgcatcctcccgcatcttccagcaccgtcccgcaccctccgcatccttccccgggccaccacgcttcctatgtgacccgcctgggcaacgccgaacccagtcgcgcagcgctgcagtgaattttccccccaaactgcaataagccgccttccaaggccaagatgttcataaatataaagagcatcttatggatgtgttcaaccttaatagtaacccatgcgctacataaagtcaaagtgggaaaaagcccaccggtgaggggctccctctctggaaaagtcagcctaccttgtcatttttcaacgatgcctactttgccacccagttacaacaccagtgaatttctccgcatcaaatggtctaagattgaagtggacaaaaatggaaaagatttgaaagagactactgtccttgtggcccaaaatggaaatatcaagattggtcaggactacaaagggagagtgtctgtgcccacacatcccgaggctgtgggcgatgcctccctcactgtggtcaagctgctggcaagtgatgcgggtctttaccgctgtgacgtcatgtacgggattgaagacacacaagacacggtgtcactgactgtggatggggttgtgtttcactacagggcggcaaccagcaggtacacactgaattttgaggctgctcagaaggcttgtttggacgttggggcagtcatagcaactccagagcagctctttgctgcctatgaagatggatttgagcagtgtgacgcaggctggctggctgatcagactgtcagatatcccatccgggctcccagagtaggctgttatggagataagatgggaaaggcaggagtcaggacttatggattccgttctccccaggaaacttacgatgtgtattgttatgtggatcatctggatggtgatgtgttccacctcactgtccccagtaaattcaccttcgaggaggctgcaaaagagtgtgaaaaccaggatgccaggctggcaacagtgggggaactccaggcggcatggaggaacggctttgaccagtgcgattacgggtggctgtcggatgccagcgtgcgccaccctgtgactgtggccagggcccagtgtggaggtggtctacttggggtgagaaccctgtatcgttttgagaaccagacaggcttccctccccctgatagcagatttgatgcctactgctttaaacctaaagaggctacaaccatcgatttgagtatcctcgcagaaactgcatcacccagtttatccaaagaaccacaaatggtttctgatagaactacaccaatcatccctttagttgatgaattacctgtcattccaacagagttccctcccgtgggaaatattgtcagttttgaacagaaagccacagtccaacctcaggctatcacagatagtttagccaccaaattacccacacctactggcagtaccaagaagccctgggatatggatgactactcaccttctgcttcaggacctcttggaaagctagacatatcagaaattaaggaagaagtgctccagagtacaactggcgtctctcattatgctacggattcatgggatggtgtcgtggaagataaacaaacacaagaatcggttacacagattgaacaaatagaagtgggtcctttggtaacatctatggaaatcttaaagcacattccttccaaggaattccctgtaactgaaacaccattggtaactgcaagaatgatcctggaatccaaaactgaaaagaaaatggtaagcactgtttctgaattggtaaccacaggtcactatggattcaccttgggagaagaggatgatgaagacagaacacttacagttggatctgatgagagcaccttgatctttgaccaaattcctgaagtcattacggtgtcaaagacttcagaagacaccatccacactcatttagaagacttggagtcagtctcagcatccacaactgtttcccctttaattatgcctgataataatggatcatccatggatgactgggaagagagacaaactagtggtaggataacggaagagtttcttggcaaatatctgtctactacaccttttccatcacagcatcgtacagaaatagaattgtttccttattctggtgataaaatattagtagagggaatttccacagttatttatccttctctacaaacagaaatgacacatagaagagaaagaacagaaacactaataccagagatgagaacagatacttatacagatgaaatacaagaagagatcactaaaagtccatttatgggaaaaacagaagaagaagtcttctctgggatgaaactctctacatctctctcagagccaattcatgttacagagtcttctgtggaaatgaccaagtcttttgatttcccaacattgataacaaagttaagtgcagagccaacagaagtaagagatatggaggaagactttacagcaactccaggtactacaaaatatgatgaaaatattacaacagtgcttttggcccatggtactttaagtgttgaagcagccactgtatcaaaatggtcatgggatgaagataatacaacatccaagcctttagagtctacagaaccttcagcctcttcaaaattgccccctgccttactcacaactgtggggatgaatggaaaggataaagacatcccaagtttcactgaagatggagcagatgaatttactcttattccagatagtactcaaaagcagttagaggaggttactgatgaagacatagcagcccatggaaaattcacaattagatttcagccaactacatcaactggtattgcagaaaagtcaactttgagagattctacaactgaagaaaaagttccacctatcacaagcactgaaggccaagtttatgcaaccatggaaggaagtgctttgggtgaagtagaagatgtggacctctctaagccagtatctactgttccccaatttgcacacacttcagaggtggaaggattagcatttgttagttatagtagcacccaagagcctactacttatgtagactcttcccataccattcctctttctgtaattcccaagacagactggggagtgttagtaccttctgttccatcagaagatgaagttctaggtgaaccctctcaagacatacttgtcattgatcagactcgccttgaagcgactatttctccagaaactatgagaacaacaaaaatcacagagggaacaactcaggaagaattcccttggaaagaacagactgcagagaaaccagttcctgctctcagttctacagcttggactcccaaggaggcagtaacaccactggatgaacaagagggcgatggatcagcatatacagtctctgaagatgaattgttgacaggttctgagagggtcccagttttagaaacaactccagttggaaaaattgatcacagtgtgtcttatccaccaggtgctgtaactgagcacaaagtgaaaacagatgaagtggtaacactaacaccacgcattgggccaaaagtatctttaagtccagggcctgaacaaaaatatgaaacagaaggtagtagtacaacaggatttacatcatctttgagtccttttagtacccacattacccagcttatggaagaaaccactactgagaaaacatccctagaggatattgatttaggctcaggattatttgaaaagcccaaagccacagaactcatagaattttcaacaatcaaagtcacagttccaagtgatattaccactgccttcagttcagtagacagacttcacacaacttcagcattcaagccatcttccgcgatcactaagaaaccacctctcatcgacagggaacctggtgaagaaacaaccagtgacatggtaatcattggagaatcaacatctcatgttcctcccactacccttgaagatattgtagccaaggaaacagaaaccgatattgatagagagtatttcacgacttcaagtcctcctgctacacagccaacaagaccacccactgtggaagacaaagaggcctttggacctcaggcgctttctacgccacagcccccagcaagcacaaaatttcaccctgacattaatgtttatattattgaggtcagagaaaataagacaggtcgaatgagtgatttgagtgtaattggtcatccaatagattcagaatctaaagaagatgaaccttgtagtgaagaaacagatccagtgcatgatctaatggctgaaattttacctgaattccctgacataattgaaatagacctataccacagtgaagaaaatgaagaagaagaagaagagtgtgcaaatgctactgatgtgacaaccaccccatctgtgcagtacataaatgggaagcatctcgttaccactgtgcccaaggacccagaagctgcagaagctaggcgtggccagtttgaaagtgttgcaccttctcagaatttctcggacagctctgaaagtgatactcatccatttgtaatagccaaaacggaattgtctactgctgtgcaacctaatgaatctacagaaacaactgagtctcttgaagttacatggaagcctgagacttaccctgaaacatcagaacatttttcaggtggtgagcctgatgttttccccacagtcccattccatgaggaatttgaaagtggaacagccaaaaaaggggcagaatcagtcacagagagagatactgaagttggtcatcaggcacatgaacatactgaacctgtatctctgtttcctgaagagtcttcaggagagattgccattgaccaagaatctcagaaaatagcctttgcaagggctacagaagtaacatttggtgaagaggtagaaaaaagtacttctgtcacatacactcccactatagttccaagttctgcatcagcatatgtttcagaggaagaagcagttaccctaataggaaatccttggccagatgacctgttgtctaccaaagaaagctgggtagaagcaactcctagacaagttgtagagctctcagggagttcttcgattccaattacagaaggctctggagaagcagaagaagatgaagatacaatgttcaccatggtaactgatttatcacagagaaatactactgatacactcattactttagacactagcaggataatcacagaaagcttttttgaggttcctgcaaccaccatttatccagtttctgaacaaccttctgcaaaagtggtgcctaccaagtttgtaagtgaaacagacacttctgagtggatttccagtaccactgttgaggaaaagaaaaggaaggaggaggagggaactacaggtacggcttctacatttgaggtatattcatctacacagagatcggatcaattaattttaccctttgaattagaaagtccaaatgtagctacatctagtgattcaggtaccaggaaaagttttatgtccttgacaacaccaacacagtctgaaagggaaatgacagattctactcctgtctttacagaaacaaatacattagaaaatttgggggcacagaccactgagcacagcagtatccatcaacctggggttcaggaagggctgaccactctcccacgtagtcctgcctctgtctttatggagcagggctctggagaagctgctgccgacccagaaaccaccactgtttcttcattttcattaaacgtagagtatgcaattcaagccgaaaaggaagtagctggcactttgtctccgcatgtggaaactacattctccactgagccaacaggactggttttgagtacagtaatggacagagtagttgctgaaaatataacccaaacatccagggaaatagtgatttcagagcgattaggagaaccaaattatggggcagaaataaggggcttttccacaggttttcctttggaggaagatttcagtggtgactttagagaatactcaacagtgtctcatcccatagcaaaagaagaaacggtaatgatggaaggctctggagatgcagcatttagggacacccagacttcaccatctacagtacctacttcagttcacatcagtcacatatctgactcagaaggacccagtagcaccatggtcagcacttcagccttcccctgggaagagtttacatcctcagctgagggctcaggtgagcaactggtcacagtcagcagctctgttgttccagtgcttcccagtgctgtgcaaaagttttctggtacagcttcctccattatcgacgaaggattgggagaagtgggtactgtcaatgaaattgatagaagatccaccattttaccaacagcagaagtggaaggtacgaaagctccagtagagaaggaggaagtaaaggtcagtggcacagtttcaacaaactttccccaaactatagagccagccaaattatggtctaggcaagaagtcaaccctgtaagacaagaaattgaaagtgaaacaacatcagaggaacaaattcaagaagaaaagtcatttgaatcccctcaaaactctcctgcaacagaacaaacaatctttgattcacagacatttactgaaactgaactcaaaaccacagattattctgtactaacaacaaagaaaacttacagtgatgataaagaaatgaaggaggaagacacttctttagttaacatgtctactccagatccagatgcaaatggcttggaatcttacacaactctccctgaagctactgaaaagtcacattttttcttagctactgcattagtaactgaatctataccagctgaacatgtagtcacagattcaccaatcaaaaaggaagaaagtacaaaacattttccgaaaggcatgagaccaacaattcaagagtcagatactgagctcttattctctggactgggatcaggagaagaagttttacctactctaccaacagagtcagtgaattttactgaagtggaacaaatcaataacacattatatccccacacttctcaagtggaaagtacctcaagtgacaaaattgaagactttaacagaatggaaaatgtggcaaaagaagttggaccactcgtatctcaaacagacatctttgaaggtagtgggtcagtaaccagcacaacattaatagaaattttaagtgacactggagcagaaggacccacggtggcacctctccctttctccacggacatcggacatcctcaaaatcagactgtcaggtgggcagaagaaatccagactagtagaccacaaaccataactgaacaagactctaacaagaattcttcaacagcagaaattaacgaaacaacaacctcatctactgattttctggctagagcttatggttttgaaatggccaaagaatttgttacatcagcaccaaaaccatctgacttgtattatgaaccttctggagaaggatctggagaagtggatattgttgattcatttcacacttctgcaactactcaggcaaccagacaagaaagcagcaccacatttgtttctgatgggtccctggaaaaacatcctgaggtgccaagcgctaaagctgttactgctgatggattcccaacagtttcagtgatgctgcctcttcattcagagcagaacaaaagctcccctgatccaactagcacactgtcaaatacagtgtcatatgagaggtccacagacggtagtttccaagaccgtttcagggaattcgaggattccaccttaaaacctaacagaaaaaaacccactgaaaatattatcatagacctggacaaagaggacaaggatttaatattgacaattacagagagtaccatccttgaaattctacctgagctgacatcggataaaaatactatcatagatattgatcatactaaacctgtgtatgaagacattcttggaatgcaaacagatatagatacagaggtaccatcagaaccacatgacagtaatgatgaaagtaatgatgacagcactcaagttcaagagatctatgaggcagctgtcaacctttctttaactgaggaaacatttgagggctctgctgatgttctggctagctacactcaggcaacacatgatgaatcaatgacttatgaagatagaagccaactagatcacatgggctttcacttcacaactgggatccctgctcctagcacagaaacagaattagacgttttacttcccacggcaacatccctgccaattcctcgtaagtctgccacagttattccagagattgaaggaataaaagctgaagcaaaagccctggatgacatgtttgaatcaagcactttgtctgatggtcaagctattgcagaccaaagtgaaataataccaacattgggccaatttgaaaggactcaggaggagtatgaagacaaaaaacatgctggtccttcttttcagccagaattctcttcaggagctgaggaggcattagtagaccatactccctatctaagtattgctactacccaccttatggatcagagtgtaacagaggtgcctgatgtgatggaaggatccaatcccccatattacactgatacaacattagcagtttcaacatttgcgaagttgtcttctcagacaccatcatctcccctcactatctactcaggcagtgaagcctctggacacacagagatcccccagcccagtgctctgccaggaatagacgtcggctcatctgtaatgtccccacaggattcttttaaggaaattcatgtaaatattgaagcaactttcaaaccatcaagtgaggaataccttcacataactgagcctccctctttatctcctgacacaaaattagaaccttcagaagatgatggtaaacctgagttattagaagaaatggaagcttctcccacagaacttattgctgtggaaggaactgagattctccaagatttccaaaacaaaaccgatggtcaagtttctggagaagcaatcaagatgtttcccaccattaaaacacctgaggctggaactgttattacaactgccgatgaaattgaattagaaggtgctacacagtggccacactctacttctgcttctgccacctatggggtcgaggcaggtgtggtgccttggctaagtccacagacttctgagaggcccacgctttcttcttctccagaaataaaccctgaaactcaagcagctttaatcagagggcaggattccacgatagcagcatcagaacagcaagtggcagcgagaattcttgattccaatgatcaggcaacagtaaaccctgtggaatttaatactgaggttgcaacaccaccattttcccttctggagacttctaatgaaacagatttcctgattggcattaatgaagagtcagtggaaggcacggcaatctatttaccaggacctgatcgctgcaaaatgaacccgtgccttaacggaggcacctgttatcctactgaaacttcctacgtatgcacctgtgtgccaggatacagcggagaccagtgtgaaacttgattttgatgaatgtcactctaatccctgtcgtaatggagccacttgtgttgatggttttaacacattcaggtgcctctgccttccaagttatgttggtgcactttgtgagcaagataccgagacatgtgactatggctgggcacaaattccaaggggcagtgctacaaatactttgcccatcgacgcacatgggatgcagctgaacgggaatgccgtctgcagggtgcccatctcacaagcatcctgtctcacgaagaacaaatgtttgttaatcgtgtgggccatgattatcagtggataggcctcaatgacaagatgtttgagcatgacttccgttggactgatgggcagcacactgcaatacgagaattggagacccaaccagccagacagcttcttttctgctggagaagactgtgttgtaatcatttggcatgagaatggccagtggaatgatgttccctgcaattaccatctcacctatacgtgcaagaaaggaacagttgcttgcggccagccccctgttgtagaaaatgccaagacctttggaaagatgaaacctcgttatgaaatcaactccctgattagataccactgcaaagatggtttcattcaacgtcaccttccaactatccggtgcttaggaaatggaagatgggctatacctaaaattacctgcatgaacccatctgcataccaaaggacttattctatgaaatactttaaaaattcctcatcagcaaaggacaattcaataaatacatccaaacatgatcatcgttggagccggaggtggcaggagtcgaggcgctgatccctaaaatggcgaacatgtgttttcatcatttcagccaaagtcctaacttcctgtgcctttcctatcacctcgagaagtaattatcagttggtttggatttttggaccaccgttcagtcattttgggttgccgtgctcccaaaacattttaaatgaaagtattggcattcaaaaagacagcagacaaaatgaaagaaaatgagagcagaaagtaagcatttccagcctatctaatttctttagttttctatttgcctccagtgcagtccatttcctaatgtataccagcctactgtactatttaaaatgctcaatttcagcccccgagggccatgtaaataagatgatttaatgttgattttaatcctgtatataaaataaaaagtcacaatgagtttgggcatatttaatgatgattatggagccttagaggtctttaatcattggttcggctgcttttatgtagtttaggctggaaatggtttcacttgctctttgactgtcagcaagactgaagatggcttttcctggacagctagaaaacacaaaatcttgtaggtcattgcacctatctcagccataggtgcagtttgcttctacatgatgctaaaggctgcgaatgggatcctgatggaactaaggactccaatgtcgaactcttctttgctgcattcctttttcttcacttacaagaaaggcctgaatggaggacttttctgtaaccaggaacattttttaggggtcaaagtgctaataattaactcaaccaggtctactttttaatggctttcataacactaactcataaggttaccgatcaatgcatttcatacggatatagacctagggctctggagggtgggggattgttaaaacacatgcaaaaaaaaaaaaaaaaagaaattttgtatatataaccattttaatcttttataaagttttgaatgttcatgtatgaatgctgcagctgtgaagcatacataaataaatgaagtaagccatactgatttaaaaa

SEQ ID NO: 14678 - DNA, 613 bp, Homo sapiens
  misc_feature (1)...(613): n = a,t,c or g
ggccctcgaggccaagaattcggcacgagcaatatttgccatctggattgaaaatacagccatcatcttttgaatgaccagtttgtgtaaaccatttgttgacagtgtctttccagtggtaaagcagaatttctctttgtctgtctgcctttcttgagagctatgatgaggatttctaaggcttgatgtatagaatcctttccttaagtgccttgtccatttggtgctgtgtaaggaatacttgagactgggtaatttataaagaacagaaatttatttcctcatgcttgtggaggctgagaatttcaagatcaaggggctgagaggcttcttgctgcgccctcacatggcagaagacggaagggcaagagagagtgaacctactcccacaaacccattaatccattcacctacttcttccccaaaagccccacctcccaatactgttgaattgagacttgagttttcaacacaaattatcagggacaccttagagcataggcaactagtaactctaaataaatagttaactatataaaacaaaaataatgtattgngcagtttaaaatatttatagatacaagaccacaacagtatataatttgggaggggg

SEQ ID NO: 14679 - DNA, 736 bp, Homo sapiens
  misc_feature (1)...(736): n = a,t,c or g
ggtattttccaaacttacgtcaccacttaccatccacctgcatactttacacgtcttggaatcaaccttacagggaacacttggtcgaaaaacagtgttttctaaatttatattacagttcccactccccccgcccccacttgtatcactttgtatgacagtcttcttgggaacatccattgggaaactcttcccttgcaggtgtctgttacaagtcctggttcacacagtgttgcgaaagaatagttgtatgtcacaattttctttatatagtatttattgagaaacctattctgttaatagaatgactcaaaatcagccaaccccataaatactgctcaagcatttagaaagactttctctatagaggctttcagcgtcagaaaaaaacttaaagagtgactttcagatacagcaacctagtctatgttatagaacattctaaaaagagcagattttaatatctttcctcccacacttgctttgactccctcctttagtaattagataattatgtataataagcacattaattatgtgcaacagctgccgttgagtgtgtgcatgtacaactgcttgaaaacagcttgtgagttcactattaggtccatgaaatttttctccttgggcaggttttcactattaatttgcttgacaaaggatagatacattttccatgtgtgggagggtaaaagcagtgcagtgaggctaaaaagtttnggcaaaggtgangttg

SEQ ID NO: 14680 - DNA, 899 bp, Homo sapiens
tttcattataaaagtcagtttattttccctttctgtgtttcgtattttccctttttgtcagtaaatgagcaatacactgattggaaatctgcatgattaaataacattaacaagttcataaacacaccccatatcagagtataaagcaagaggttgaaaaatatcccctaaccgaatgcaaattaggtatccctcaaaattgcacattctcctcctagtttgcttgcataatttaaaatatgtatatacagaatgatcttaaaatattgataactagtatggaattcacagccctgaagatatatatactctacatttttctaaagaacggacacccctcaggccctagtaatccattcatgtgattcaatgtcatgtacagacagtcctcagcttctgatttttggactttacaatggtgtgaaatggttgcaatttcaacataatgtacaatattcaataaattacatgatatattcaacactcgattataaaatagagtttgtgttagatgattctgcccaactgtgggcaattctaagtgttctgagtacatttagggtggacgaggctaagctgtggtgtccagtcaggggtattaaatgcatttgacttccaatgggtttactgggacataaccccatcataagtcaaagagcatctgtacttgacacttactagaagaaaaggtctttcccttttctctaattctagtcttctgctgaggtaactccaggaagctggttgtgccagagatcaatcctctaaaaatagactaagcagattagcttcctagaggatcctaaagttcccagacaacaaatctgggatggagtgcttcggctgtgagttacacgtcggaatgttcaagataaatgatgtaccttatggtcctttac

SEQ ID NO: 14681 - DNA, 1208 bp, Homo sapiens
ttttttttttttttttttactgatatgaccataaatatttttattaaatgtgaaaatacacgggcataaaaatagtacccatatttgtagacatgtctgagacccatttcaaatattaggttccttttttattaaaacactacattgagatggattaagttacttagtcttttctcattcaaaacaaactaaaacctcacagcaagagtaatattttcacaaacatctccaatgtttacctcctccttggctcggctttccactgcaggtaagtgtttcagccacagacaagtgcaacaaaaccggttactatacacaaaggccacgcagtggctaattttactcttaaatcaatcattcagcaaatgagatcatctgtaaacaaacaaaaaaaacccccaaataatcccacctcttaacgtcatttgaaattacaggataaactgccactaacaaaaaaggaatgatctgatttagaaaaaggatattcgttgttggcaaattaacatttgccttcttccttcctttataaatttggaaaagtcaactacattcaacaaagttgcgtgaacttctctaggtgataccattgctgtgtgctcagtgaaaactttgcaacgcccatcaccagggccgtgtctgtaacctcaccagggagccattttatgtagttttttcatggtaaatgtcaaagacaacttctgacccatttaaaggtgaaatttttcatcatccattgtgagtagaaaatggtatcaatttcaaattgtggttttattggctaccttttttaccaagttatgttttctcttaaactgtgggtagttttaaaattccattatcagggcaacaaaaatttgttttcataccaatactttaaaaaagatttttaatactgactaaagagaaaggcattgtagaattagtagtacgttacatctgattcacattagtaaactgtcaagatttttttcaagttttcatctattcatggtaagaaagcacaaactttcagaactgaggaatgaattaaattttgtctcccgttttggaaccttttcacaatgcttctagactgatgtgtctaatacttcctgctgggcaaaatatccacaaagtacagaccactgataactccacccatgaagctcaccaaaaaggaaagaagagcagaatacaacagctgtggctagggtacgcctctctga

SEQ ID NO: 14682 - DNA, 2067 bp, Homo sapiens
tttttttttttcacattttttttggatttatttaaagaacacacaaaaaagtgcatctaaatgatttttttttttaaaaaacaatgtctttaattcctcatatgctgacttggcaatccatatgcagcctaaaaggtggttgaaagatgtctgtggacttctacacaaattgtttaagattattgaatttgatacaagaatacgtgaagtgtcttcttgagtggtaatgggcaccctgtagttatttgctcagaaccactcacacacccttcccctccccacacacacttttgccagttccccctggtgaaccataatacacacgtgggagacagctggcatcatctggagtcttggaatagctttcttgtttgttatctgcaaaaagctaggtggcctttttagtatcaaatttcaatcttgggcctcactggaaccatgctctacagagctttcccaacagtttagcaagtaagcaaaatcagcttttgctcttcatatttcgtaggtgagactggggcttttaaaagaaatatttcataaaaaagacaaaagcataaatgagaaattagagggattttagttatcattaaaggaaaaaactcacaaattgatcccatttgttccatggggaagaaaagtattataaaaggaaataacttgatttttaggtttgaagggggtcccaatctaataataaaagtcttttgataaaaccatcataaaaataaaaactaatttaaaatataactgccagtgttttttaggatttaaaaaggtgagatgttccaggtttaagcaaatggttccttgggttgccaaatgcattcccatgagtgtttcttaggctgagggaatagagagccatgctcaatctgtttaccccgtaaggactgaaattcaactacatgtacacatttaagacttgccctagttcaatggtcagctcaagtactggagatttaggctactggctgtgtaccggcatgggaagctgtcttcaactctttcacaactcacgccagaacagagaagcttgacagggcaggaaaagcgagcaactgcgtgtcaaacctgcaggtgaaacccctagtgtagaagagcaactatttatttgtcaacactacagattttgtttttaaaaattaagcttagtactaaaaagtcaaaatttttttgcatgatagaggagtgtaaataaagttccataaaccagtatacatatgcttatgagccaataatcttaaaaagacaaaaaaagctgcatggatcctaaatgactatgtaaatagatccactccaggtcaaaaatattgtaagcacaagtcttaaattcttaatagcaaggattagaatgaaagaagaagctgagcagtagcaatgcctgggaggaagtactgtgtattgaatattattccctaaaaggaatagaggaggggagaaaaagcacaattctgattgctcttttcacatttcagtatctcagaacttcatcgaaaataggaaaagctaatccagaaactctcatctgctcattatcattgctgaagggtgttttaggaatgacagaattactcccccagggacaggctgtgtgtggtagaaagccactctcacaaggaggctggctgaggagggggactttgggaggaggctaagtcagcaagcaagtggcctctgaggttctggctttcacgtctgtgacactgctgtggaactggggagacatgagacccctctactgtgggttctgttggttaaaaatgcaacagactacatttatagcacttcagtcatttaaaaaacaaaagcttatcctccttcccctaccctacccaactgtaggaaaggagaaattcatgaagcattttttttttaaaggtttctgcagtgctatgaaagttcaaaggtaaaacctaacagccccacattgttaggatgatctccagggaccctgaattggatacttgaaggttgatagaaactgaaatgagctggacttaagctgctggctcactccctccacaccacagtcatttctgtttgttccacctggagtggtcccgc

SEQ ID NO: 14683 - DNA, 719 bp, Homo sapiens
gggcctgcttctggcctcatctagccccgccccaggcgagggcgccgcacccacaccgcgctgcgcagttttgttctgctccagctgttcgaaggtgatccagacgcaagatggctgtcctctctaaggaatatggttttgtgcttctaactggtgctgccagctttataatggtggcccacctagccatcaatgtttccaaggcccgcaagaagtacaaagtggagtatccctatcatgtacagcacggaccctgaaaatgggcacatcttcaactgcattcaagcgagcccaccagaacacgttggaagtgtatcctcccttcttattttttctaagctgttggaaggtgtttaccaccccgcgtatagcttctgggcctgggcttggcctggattgttgggacgagttctttatgcttatggctattacacgggagaacccagcaagcgtagtcgagggagccctggggtccatcgccctcctgggcttggtgggcacaactgtgtgctctgctttcccagcatcttggttgggttaaaagtggcttgggcagtggacccaaatgctgccattaaagaattataggggtttaaaaactctcattcattttaaatgacttacctttatttccagttacattttttttctaaatataataaaaacttacctggcatcagcctcatacctaaaaaaaaaaaaaaaaaaatcgcggccgc

SEQ ID NO: 14684 - DNA, 606 bp, Homo sapiens
tttttttttttttaatggtaccatacatctattaaataatttgaaaaataggcaaacacctttccaacccaatatgcttttatgaagagctgccaagctactagcaacactgatcaacagtgacctcatttatgcatcaaaatcttaagccaagccatcagcacagacagtatgacaacaaattaaaacttaaagaatacagtatgtacagtaaaagatacaattctctgaattagtttaaatcctaatcacaatgttacaacaaaacctactttgagctcagttgaaggatggaagaacactagtctacaaaacacacaaagaaacactaaattaacagatgtactaaaaacccacagtaaagtaaagatatttgcagtaatctttaaattacagatataccttggggtgccttcagaatcacttgaatagcacctctctaaccgcattttcatgaacatgacacaaacagaccctttacttttcagtgcatttaatcaagaatgaataaataggtcaatttagatgcaaaacctgtcaaatataattaaaatatatatattttaatatagcagtgataaataggcgattcttcccatacgattt

SEQ ID NO: 14685 - DNA, 648 bp, Homo sapiens
  misc_feature (1)...(648): n = a,t,c or g
gtggcaaagctcatttacccagacctcgaactcccaactcaagctgttctactccctcaaggactagctctggattatttcctcggatacccttacaaccgcaagctccagtgtcttccattgggtctcctgttggtaccccaaaaggtccccagggagctctgcagacacccatagtcaccaaccacctggtgcagctagtcactgctgccagccggacaccccagcagcccacccatccctccacccgagccaaaactcgccgtttccctggcccagctgggatcctgcctcaccagagtgggagaagtctggaggacatcatggtttccgcgccccaaactccaacccatggtgctctggctaaattccagacagagattgttgctagttcccaggcatctgtggaggaggattttgggcgagggccatggctgaccatgaaatccacgctaggcctggatgagagagaccctagctgcttcctctgtacctacagcattgtcatggtgctgcgaaggcancctgaagcagcttcctaggaacaaggtccccaacatggcggtgatgatcaagtccctgactcggagcacaatggacgccagtgtgggttttcaaaggaccccacgggaagaagatgcagggggt

SEQ ID NO: 14686 - DNA, 530 bp, Homo sapiens
gctttcttattattattttattgcagcaaattccagatgtgtctccaacgggaaaatatacaaccctcttgcctttgatgattattcttatgatttcaggcattaaagaggttatatacatcataaatgacatggcagacaaaatagttaaggaacacaaaactgttatgacaagattcatgggacacgtttaagtggaaagaggtgaatgtgggtgacactgtgaaggcctcgaatggggagctccttcctgcagacacagtcccgatgtgttcatatagcaacatctaatccggatagagagacaaatgtaagacacggcaggctttgccagaaacagcttctgtatcagtgcagggacatccttcctccaggcagcaagccttcaagcttcaagcctcagggcccaaccctaaggctgggggctctccctgcaggcaggactgggcctggagggcctcctcatacttctggagctgagaccagaagcccgggttcggttctgctaccgggcgagcgctcttcaccat

SEQ ID NO: 14687 - DNA, 761 bp, Homo sapiens
gggaaatggagaccccaacagccagcatcagtggccctcatcacagccctccaggagatatcaaaggagacaacgccattattgacgagatcactcccaagcggattggagattgtcccaatacttagacctatagcaaggccttgggagaaatggtggtgcagcaggagagcaggaacctaaccattgccatcctaaggccctccattgtgcggagcaacgtcgcaccagcttttcctgggttgggttgataatctaaatggacctaatggaatcattattgcgactgggaaagggtttcttcgggccataaaagctactccaatggctgtggcagacgtaattccagttgatacagtcgtcaatctcatgctagctgtaggatggtatactgcagttcacagacctaagtcaacattagtctaccacattacatctggtaacatgaatccctgcaattggcacaaaatgggagtccaagtcttggcaacctttgaaaaaatcccatttgagagacctttcaggaggccaaatgctaattttaccagcaacagcttcacatcacagtactggaatgcggtcagccaccggggcccctgccattatctatgactgctatctgcggctcactgggaaggaagcccagggatgacaaagctcatgaatcggcttttaaggaactgtttccatgttgggagtatttcatccaaccggagttggggaatgggagcacgtacaattacaggaattgctggatgtct

SEQ ID NO: 14688 - DNA, 736 bp, Homo sapiens
ctcaaacttcatcgcattcatagaagctgcttgcaggggtcgccggggctaaccagggtgatcggcgaactttaccgtacagtacctcagtctagctgtcagatcaccccttttgctgtagcctctgttgaggtttttatatttgtgatcattggtaattcagtgtcctatgaagtggggcacagctccccacagagagcaagttgtcagcaggtctctgtgcactggtattggggcaggggcagtgccctgggggtaagctaggtggctcagggagtggcagaagggccatttttccctctgccaaaaagacttccttggatttgtagatgttgacccagagtcctctgtcccctcctgaagaggattttcttactggtttctactgaaggggaggtaggggaggaggaaaaaaggaccatgtgtgatgctgttagacaagacactgacgctgattatggagggtctcctgcaggcccttgtgggctccttggcaaggccccaggctgggaaggagctccccccactgcccatcctgcccgctttgtggcgggtagagtcagtgacagggaggcagccctccttttgtgtatatagagtgagctgatttgggctcaggaaaacctagtcgcttgttgctctcgtctgtgacatttttgtacactggtttgctactcatggcaagaaacagacaaagccccatgaaaaataaaacaaaacaaaagtcatttcaaac

SEQ ID NO: 14689 - DNA, 182 bp, Homo sapiens
aagttttagacagagcctcagtcctttaaccaattgcaaattaaagaatctctgaatccccgtaaaacctgtaagcccccacttcaagatatcccaacttttggggccgaagcaatgcataccttccatgtattgctttatgtcttttcctataacccctgcctccataaaatgtataaatc

SEQ ID NO: 14690 - DNA, 665 bp, Homo sapiens
  misc_feature (1)...(665): n = a,t,c or g
gggaaagtgagcaaacatcgctgagtttgttttcttgttcgggagaatggggccggggctggcctggcctcccctggatatactctatagtgcaccaaaaggataaagcatctgtacatgtatttttttattttttatcagaagtgcttagacaagaacagaataagcaggctgtttggatgctacttgtggttgaattgtgttcccccaaaatatatggtgaagtcttaacccccatccccgtnnnnnnnnnnnnnnnnnnnnnnnnnnnnnnnnnnnnnannnnnnnnnnnnnnnnnnnnnnnnnnnnnnnnnnnnnnnnnnnnnnngactggcatccttaggagaagagagagttttggtaatagacacaaatgcagtgggaagaagaccaggggacaagaggcaagttggagtgatgcagccggaagggaagggacaccaaggatctccggccaccagcagaagccagcagagaggcatgggacaggttccccacaagccttagaaggaagcatggccctgacttcagaattccagactccagaactggaagaataaatgtctgttgttttaagctgcttagttcatgctgagttcatgctgacttgttactatagccccagaaagctaatacagtcgtttatgtaattacataacctgac

SEQ ID NO: 14691 - DNA, 1706 bp, Homo sapiens
cgcggaccgggcgtacgtggcttgcggctcccggggccggctactcccgggagtacatggcccggggcgcggcccgcataggcaggcctcgccccgatacggtcgccatgcccaagagaggaaagcgactcaagttccgggcccacgacgcctgctccggccgagtgaccgtggcggattacgccaactcggatccggcggtcgtgaggtctggacgagtcaagaaagccgtagccaacgctgttcagcaggaagtaaaatctctttgtggcttggaagcctctcaggttcctgcagaggaagctctttctggggctggtgagccctgtgacatcatcgacagcagtgatgagatggatgcccaggaggaaagcatccatgagagaactgtctccagaaaaaagaaaagcaagagacacaaagaagaactggacggggctggaggagaagagtatcccatggatatttggctattgctggcctcctatatccgtcctgaggacattgtgaatttttccctgatttgtaagaatgcctggactgtcacttgcactgctgccttttggaccaggttgtaccgaaggcactacacgctgggatgcttccctgcctttgcgtctgcgaccagagtcaatggagaagctgcgctgtctccgggcttgtgtgatccgatctctgtaccatatgtatgagccatttgctgctcgaatctccaagaatccagccattccagaaagcacccccagcacattaaagaattccaaatgcttacttttctggtgcagaaagattgttgggaacagacaggaaccaatgtgggaattcaacttcaagttcaaaaaacagtcccctaggttaaagagcaagtgtacaggaggattgcagcctcccgttcagtacgaagatgttcataccaatccagaccaggactgctgcctactgcaggtcaccaccctcaatttcatctttattccgattgtcatgggaatgatatttactctgtttactatcaatgtgagcacggacatgcggcatcatcgagtgagactggtgttccaagattcccctgtccatggtggtcggaaactgcgcagtgaacagggtgtgcaagtcatcctggacccagtgcacagcgttcggctctttgactggtggcatcctcagtacccattctccctgagagcgtagttactgcttcccatcccttgggggcagcctcgagtgtagtccattagtaatcagattccagtttggacagggtggctggattgtatatctcgttagtaatgtacatgctcttcaggttctagggctcctgttaggggagggagaaatgttgaatcaagagggaaaacaactactatgatttataaacatattttaatgtaaaaatttgcatttaaaaggagtggccctgttttctgtgttaaaaccccatttggtgctattgagtttgttctttattcttttatcccagtgaaaattgttgatcttgctgtagggaaaaattaaactctttgaatctccaaacaaggaagtttcagcattcccttatggatcagaggaaccttagaggcctgaaattgttgcttccagtttagctgcccctcaaattcaagtgaatattttcccttctccctttacccttctccagaaataaagcaggtgacagggttttcagaatcttaaaaaaaaaaaaaaaaaaa

SEQ ID NO: 14692 - DNA, 977 bp, Homo sapiens
ctgcttaaaaaaacaaaaaaaaattttatttgacaaaagacaaaaaagttatttacagtagtttttgctcaaataattcaatgggacaactgtgcttctcctccaggtttatcttacaaccaaacccaagcagagtctgcccattgaattatttacagtagtttttgctcaaataattcaatgggacaactgtgcttctcctccaggtttatcttacaaccaaacccaagcagagtctgccctacccaacaccccattttacataatggggaaatgccaaccagaattcagcagcatggctccctcaccaccctccattgctcagtgcactgtggggagggaaaatcccacctcagcccaatacacttccagagttccctactacaggcatcctgcagcagttgcaccagacctgggctcactgacagggctgggatggaagaggctgggcaaatggcagcatcagttaacctggatgaagccatgttcattcttccccactgggcctcaggagggtgaggatccctgatacccctggggcacacggggagagggcacgggaggaagaagccagagggaggcaacacagagagcccaggaaacttgcccacctagagagagcaaagctccctctccttcagcgatccgttcacactcccacagcaacagatgggcgactcagaagttggggagcctctgtgatggcttcagggatcttcccagaaagtacagaacacatgttactgtctttctcctggctagacccacccaagttagtcagtatccaggaaccttttctccttgtgcctgacctggtgatttcaggaaaactaaaggctgtcgtcctgatctatcttttggcccagtgacactactcaggacaaaaatattttggctagcaataacctaggattagtgtttcttaggatatataaagatggggcatattgttgaacactgtcagcaatgaaacagca

SEQ ID NO: 14693 - DNA, 250 bp, Homo sapiens
gtcgactacaagaccaccaccatcctgctctacgccagcttgcaggggctccagaccagggtaggcggcagcttttcagggaccagcagcttcgcgccttctcagctgcaatcgttactgtaggcgtacggggactctgccgcgccgtcctgcaggctctccaggatctcgcccttgcccacagtcgtgtcgcccaccagcaggaacttgagcaggtagtcgtagctcttcaccggactgccctgcgagc

SEQ ID NO: 14694 - DNA, 428 bp, Homo sapiens
agcgagaatttcaagctagtggattttagcttgctgggctctgtaggggtgggatttgctgagctagaccacttggctccctggcttcagccccttttccaggagagtgaacggttctgtcttgctggcattccaggtgtcactgaggtatgaaaaaaaaaactgcagctagctcagtgtctgcccaaatggccacccagatttgtgcttgaaacccagggccctggtggtgtaggcacccaaaggaatctcctgatctgctggttgtgaagactgtgggaaaagcatagtatctgggccagagtgcactgttcctcatggtacagtccctcatggcttcccttggctaggggagggagttccctgaccctttccgcttccgggtgaggcaacgccacaccctgcttcggctcactctctgtggactg

SEQ ID NO: 14695 - DNA, 441 bp, Homo sapiens
  misc_feature (1)...(441): n = a,t,c or g
gcggcacgagnnnnnnnnnnnnnnnnnnnnnnnnnnnnnnnnnnnnnnnnnnnnnnnnnnnnnnnnnnnnnnnnnnnnnnnnnnnnnnnnnnnnnnnnnnnnnnnnnnnnnnnnnnnnnnnnnnnnnnnnnnnnnnnnnnnnnnnnnnnnnnnnnnnnnnnnnnnnnnnnnnnnnnnnnnnnnnnnnnnnnnnnnnnnnnnnnnnnnnnnnnnnnnnnnnnnnnnnnnnnnnnnnnnnnntgcagcagtgaaactgcctaacaccacatttctcagaatgtatacccatcattaagtaacacacgactacagttgctcaaccagcacccactgaggaactgtctgctgtgtgcaagctactttacagaaggagaagctgttccttcctttccagggagatcaccctgtgtcctcccaaatataatgaatggactcagccct

SEQ ID NO: 14696 - DNA, 7843 bp, Homo sapiens
ggatctgatactgcccaccatacagaagtccttactgaggagtccagagaatgttattgaaactatttctagtctgctggcatcagtgacgcttgacctcagccagtatgccatggacatcgtgaaaggactggctggtcacctgaaatccaacagtccccgcctgatggatgaagctgtgctggcactgcggaacctggcacgccagtgcagtgactcttcggccatggaatccctgaccaagcacctatttgctatcctcggaggctcggaaggaaaactaactgttgtagcccagaagatgagcgtcctctcagggattgggagcgtcagtcatcacgtggtgtctggaccttccagtcaggtcctgaatgggatcgtggctgagctgttcatcccgttccttcagcaggaagttcatgaagggaccttggtacacgctgtctcagtcctggctctctggtgtaaccgattcactatggaagtgcccaagaagctcactgaatggttcaaaaaagctttcagccttaaaacctccacatctgcggtgaggcatgcctacctgcagtgcatgttggcctcttaccggggtgacacgctgttgcaggccctggacttactgcccttgctcatccagacagtggagaaggcagcctcccaaagcactcaggttcccaccatcaccgaaggggttgccgcagccttgttgctcttaaagttgtcagtggctgactcacaggctgaggccaaactgagcagtttctggcagttgattgtggatgagaaaaagcaggttttcacttctgagaaattcctggtcatggcttcagaggatgccctgtgtactgtgttgcatctgacagagagacttttccttgaccacccgcatagactcactggcaacaaagttcagcagtaccaccgggctctggtggcggtgctcctgagccgcacctggcacgtccgcaggcaggctcagcagacagttcggaagctgctgtcctctcttgggggctttaagctggcgcacggactcttggaggagctgaagactgtcctcagttctcacaaggtgctgcccttagaggctttggtgactgatgctggagaggtgactgaggcaggcaaggcctacgtgcctccacgggtcctgcaggaggctctgtgtgtcatctccggtgtgccagggctcaagggtgatgtcaccgacactgaacaactggcccaggaaatgctgatcatctcccaccacccatccttagttgccgtgcagtctggactttggccagcacttcttgccaggatgaagatcgatcctgaagcctttatcaccaggcacctggatcagatcattcccaggatgaccacacagagtcccctaaaccagtcctccatgaatgccatgggctccctttccgtcctgtcgccggaccgggtcctcccacagctcatcagcaccatcactgcctccgtgcagaaccctgcactgcgcctggtgacgcgggaggagtttgccattatgcagacccctgctggggagctgtatgacaaatccatcattcagagtgcccagcaggacagcataaaaaaggccaacatgaagcgagagaacaaagcttattccttcaaagagcagatcatcgagctggagctgaaggaggagataaagaagaagaaaggcatcaaagaggaggtgcagctgaccagcaagcagaaggagatgctgcaggcccagctagacagggaggcgcaggtccggaggcggctgcaggagctggatggggagctggaggcggcgcttggactgctggacatcatcctggccaagaacccgtccggcctgacccagtacatccctgttttggtcgactcttttctgcccttgctgaagtctcccctggctgctcccaggatcaagaaccccttcttgtccttggctgcctgtgtcatgccctctaggctcaaggctttgggcactttggtgagccacgtgaccctgcgcctgctgaagccagagtgtgtcctggataagtcctggtgccaggaagagctgtcggtggctgtgaagagggcggtgatgctgctgcacacccacaccatcaccagcagggtgggcaagggggagccaggtgctgcgcccttgtccgcgccagccttctccttagtcttcccgtttctgaagatggtgctgacggagatgccccaccacagtgaggaggaggaggagtggatggcccagattcttcagatcctcactgtccaagcccagctgagggcctcccccaacaccccacccgggcgggtggacgagaatggcccggagttgctgcctcgcgtggccatgctgcgtcttctgacttgggtgatcgggacgggctcgcctcgcttacaggttctggcttcagacaccctgaccaccctgtgtgccagcagcagtggtgatgatggctgtgcctttgcagagcaggaggaggtggacgtgctgctctgtgccttgcagtccccgtgtgccagcgtgcgggaaaccgtgctccgggggctgatggaactccacatggtattgccagcacctgatactgatgagaagaatggcctgaaccttctgcggagactctgggtggtcaagtttgacaaggaggaggagatccggaagctggctgagaggctctggtcaatgatgggcctagacctgcagccagacctctgctccttgctgattgacgacgtgatctatcatgaggcggctgtaaggcaggcaggggccgaagccctctcccaagcagtggcacgttaccagcggcaggcggcggaggttatgggcaggctcatggagatttaccaggaaaagctctaccggccgcccccagtgctggatgctttgggacgagttatttcagaatctcctccagatcagtgggaagccaggtgtggcttggcgttggccctcaacaagctctcccagtatttggacagctctcaggtgaagccactctttcagttttttgtccctgatgccctcaatgaccgacacccagatgtccggaagtgcatgttggatgcagccctcgcaacgctcaacactcatgggaaggagaacgtcaactcgctgttgccagtattcgaggagttcctgaagaacgcgcccaatgatgccagctacgatgctgtgcgacagagtgtggtggtcctgatgggctctctggccaagcacctggacaagagtgaccccaaagtgaagcccattgttgccaagctcatcgctgccctctccaccccctcccagcaggtccaggagtccgtagccagctgcttgccacccctcgtgccagccatcaaggaggatgctggagggatgatccagaggcttatgcagcagctgctggagtcagacaagtacgcagagcgcaaaggggccgcgtatggcctggcgggcctggtgaagggcctgggcatcctctcgctgaagcaacaggagatgatggcggcactgactgatgccatccaagataagaagaacttccgccggcgagagggagccctctttgccttcgagatgctctgcaccatgctggggaaactttttgagccgtatgtggttcacgtgctgccccatctgctcctgtgctttggggatggaaaccagtatgtgcgtgaggctgcagatgactgtgccaaggctgtgatgagcaacttgagtgctcacggggtgaagctggtgctcccctccttactggctgccctggaggaggaatcgtggcggaccaaagctgggtcagtggagcttcttggggcaatggcgtactgtgctcctaagcagctgtcatcctgtctacccaacattgtgcccaagcttacggaggtgctgaccgactcccatgtcaaagtccagaaggctggacagcaggcgctcaggcagatcggctccgttatcaggaacccggagatcctggccattgctccagtcctcctggatgccctgacggatccctccaggaagacccagaagtgcttgcagaccctgctggacaccaagtttgtccacttcattgatgccccatccctggccctcatcatgcccattgtccagagagccttccaggaccgttccacggacacgcggaagatggcagcccagattattggcaacatgtactccctgacagaccagaaggacttggctccgtacctgcccagcgtgacgcctggcctgaaagcatcgcttttggaccctgtgcctgaggtgcggaccgtatctgcaaaggcccttggggccatggtgaagggcatgggggagtcgtgctttgaggacttgctgccgtggctgatggagacactgacctatgagcagagctctgtggatcgctcaggcgctgcacaggggttggctgaggtcatggccggtttgggggtggagaagttggagaagttgatgccagaaatcgtggctacagccagcaaagtggacattgcaccccatgtccgagatggctacattatgatgtttaactacctgcccatcacctttggagacaagtttactccttatgtggggcccatcatcccctgtatcctcaaagctcttgctgatgagaatgagtttgtgcgtgacaccgccctgcgcgcgggccagcgggttatctccatgtacgctgagacagccatcgccctgctgctgccccagctagagcaaggcctctttgatgacctttggagaatcaggttcagctctgttcagctccttggggatctcctgtttcacatctcaggagtcactgggaagatgaccacagaaactgcctctgaggatgataactttggaactgcccagtccaacaaggcgatcatcactgccctgggggtagagcggcggaaccgggtgttggcagggctgtacatgggccgctcagacacccagctggtggtgcggcaggcgtccctgcatgtctggaagattgttgtctccaataccccccgcaccttgcgtgagatcctacccactctctttgggctcctgctgggtttcctggccagcacgtgtgcagataagagaacgattgcagcgagaacattgggagatcttgtgcggaagttaggggagaaaatcctccccgagatcatccccatccttgaggaaggcctgaggtctcagaagagcgatgagaggcagggtgtgtgcattggcctaagtgagatcatgaagtccaccagccgggatgccgtgctgtatttctctgaatccctcgtgcccacggcaaggaaggctttgtgtgacccactggaggaggtcagagaggcggcagccaagactttcgagcagctgcattccaccatcggccaccaggctctggaggacattctcccatttttactaaagcagctggatgacgaggaggtgtcagagtttgccttggatggtctgaagcaagtcatggctattaagagtcgtgtggtgctgccctaccttgtgcccaagctgacaacgccacctgtcaacacccgggtgctggctttcctttcgtcagtggctggtgatgccctcacccgtcatcttggcgtgatcctcccagcggtcatgctggccctgaaggaaaagcttgggaccccagatgagcagctggagatggccaattgtcaggctgtgatcctctccgtagaggatgacacagggcaccggatcatcatcgaggatctgctggaggccacccgcagccctgaggtgggcatgaggcaagctgctgccatcatcctcaacatctactgttcccgctcaaaggctgactacaccagccacctgcggagcctggtctcgggcctgatccgcctcttcaatgactccagccctgtggttctggaggagagctgggatgccctaaatgccatcactaagaagctggatgctggcaaccagttggcactcattgaagagctgcacaaggaaatccggctcatagggaacgagagcaaaggcgagcatgtgccaggattctgcctcccgaagaagggagtgacctccatccttccagtgttgcgggaaggagtcctgactggcagccctgagcagaaggaggaggcagccaaagccttaggcttggtaatccgcctgacctcggctgacgccctgaggccctccgtggtcagcatcactggccctctgatccgcatcctgggggacaggttcagctggaatgtgaaggcggctctgctcgagacactcagcctcttgttggctaaggttgggattgccctgaagcccttcctgccccagctgcagaccactttcaccaaagccctgcaggactccaaccggggggtgcgcctgaaggccgcagatgctctggggaagctcatttccatccacattaaggtgggaccccctcttcacagagctgctcaatgggcatccgcgccatggaggacccagggtgtcagggacaccatgctgcaggccctgaggtttgtgattcagggagcaggggccaaagtgggatgccgtcatccggaaaaacatcgtctcactcctgctgagcatgctgggacacgatgaggacaacactcgcatctcctcagccgggtgcctaggggaactgtgtgcctttttgactgaagaggagcttagtgccgttctacagcagtgcttggctgggcggacgtgtccggcattgactggatggttcggcacgggcggagcctggcactttccgtggctgtgaatgtggctcctggcagactttgtgccggcagatatagcagtgatgttcaggaaatgatcctgagcagtgccacggcggacaggatccccattgcggtgagcggggtccggggcatgggctttctcatgagacaccacatcgagacaggcggagggcagttgccggccaaactttccagcctgttcgttaagtgtctgcagaacccatccagcgacatcaggctggtggctgagaagatgatctggtgggcaaataaggacccactgcctcccctggacccccaggccatcaagcccatcctgaaggctcttcttgacaacaccaaggataagaacaccgtggtcagggcctacagcgaccaggcaattgtcaacctcctcaagatgcggcagggtgaagaggtgtttcagtccctctccaagatcctggatgtggccagtttggaggtgctgaacgaggttaaccgaaggtccctgaagaagctggccagccaggccgactccacggagcaggtggacgacaccatcctgacatgagaggcctgggccagcagcagcattgccgctccacatctttgctcaatgttttcatttttgaaaatacatttgttccaatggggagcttggaagatggcgttcccagaaagtattttaatatcaatagaccacagccaaagccttaaatcaaacccacacacaactgaaaattgcctcctccatctctcaccttttcctgtggagaagagaaggaaaagcacacgcatgcgcctcagcaaatggcagcccaggagctgtttgtccagtttagcatggctaggtctggaactataatagcagggtcagactgtgggttcctcttctcctgtgcttgagctctggtttgagagctggcgctaccaacctttttcctatatcccgagtggggcacagacggtggatctctgcccagtgtggtgtgtctggcttggcttttcaatattgtgaggtctgaatggatctgatccctgtcagatgaaaatgattcacagctctggcagttcccaagtctggggaggggtataggtttgaaaggctgtttgaaagaggaatgtttaataaaggctttgatttaatcttgaaaaaaaaaaaaaaaaa

SEQ ID NO: 14697 - DNA, 1777 bp, Homo sapiens
cgcacacatgcttctgtatttcactctttctccctattagggagttatgcaaaatttgtccccgattttacctttgtctttctgtgtacttttcaaagagtcctaaggagttaaatcttccaggtattttccacttagtattgcagccaaagaatatttaaataaacgtctttgctgcgcttgcatccatgcccagccaatatacaactgtaaagcaaatatagaaagtcggctgttgatacgattgtctgttatcgaacacattcagtgataaagctgggttactgctgcttttggtgctctcaccttatctggaagatctgcaaacattacctaaataggctggcaagataaacactttctggaacccgagacttggccataaagataatgctgcatttttctgtcagaatcacatatgatgtgtgttctgtagaggttatttctgcatggaaactcaacttcttggattagccgtcccagtgaaaatcctcattgttggagtgtaaaccaaatacgaagccctcttgcaaagtagcctctttcatcccatactcaaaatacccagtttagcaagcaactgagatttaagtctctctggccctaagaggtttttcctctttgctccctccaatcttgagattgggttttgctttagagtgcaagtatcataattccgtatgatagatggggcctggacacccatctcaacagggtcacttggtaattaacaatagccatataaatgcggatacaggttactaccctcaccctttaccttcctcaggtaacagtcgtagataccagctttttttttttttttttttaaattgggctttggccagtagctaaagtgcaagactgaattaatgagaagatatattaaatgtagtcataggggactgaggagcaagggtggccttgaagaggccaaaggaatgtccatttgctgagtttcccttccttatgtctccagtctggtgccaggtagtggagtaaaaaaggagacagtttatttttttattctatgtgcacacttacagtatacatatatatttatatccacaatttacgaaaccaaaaagttgagtttccaatggaacccttgttttttaataatcgactttttaaatgtgatcaggactataatattgtacagttattatagggcttttggggaaggggaggatagcgagaagatgctctgggggttttgtttttgcttttccttcagggttttatttttgactgttttgttttcttgttggccatttctgtattgctggcatctgtgctaagctttacagtggcaaaaataatgacatgtagcaaagattttcaaacaaaatattttttccttttgtaaaatttcttgtgttgtgtgatcttgattgcggctttatcattcctttccagttcataaacaacaggcacccacaaccagaggaatctatagtttaagctcccagacatacaaacataaggcacattgtgtctttaatttcaggaatcagaaatcatagggttctgatcacattgcacgcctcccccctcacttgtcctcctgatcctgacacattctgagtaacatcagcaggaatgctctgaccatgaggtgggggttttggggtgggcgttgcctgggttcttgggagagaggggaagagtcgggacttgaaaaccactagggcacatctggatgccttcccccagtatgtccttttctggattaaaatgagtgaaatttaaaaaaaaaaaaaaaaaaaaattctcggcc

SEQ ID NO: 14698 - DNA, 668 bp, Homo sapiens
ggtgtgagggcacaaaaccttgacccacatgggtctggtcaccttctcacagaggtcacctttacagccccccaactctttgaaggatgtgtcccaaggtgtctcaagtctgatgcaatgaaagctgccccccattgaccacaggactgagtccagaatgtcctgcgtgtttcccagagtgtctgtcctaacaccgcttaaagattagccactgctagacagtgatcctcaggtatatggtctcaggattggccccaagcacacggtgtgtgtgtgtgtataaatatatcttcacaaagcataggtacccattaaagccatattgctttgctgaatggttctaatagctacagatgatttctagcctgaaagaaaagcaccacgaattgtttgaagttgacttgtcagatgtggcatgcttggtctaagttttgacaggaagggtatgtgggtaggggtgtacggagcatctcatgagaccagttctcctcctgagaggtccgtgatgttggaactgttgccccagatggactttgcccttgtgagactttatacttttcaatgcagtttttccctctttaaaactcgccagcttttatgtagtgttttataaaattacaggaataaaaagaatatcttttatgctttttaaaaaaaaaaaaaaaaaa

SEQ ID NO: 14699 - DNA, 573 bp, Homo sapiens
gcgagaagtggaccaagtgaaacgtctcacaggcccaggacttagcgaggggccagagccaagcatcagcgtgatggtcacagggggcccctggcctaccaggtgatgcccggggcttggggataggatgaagctcctggagccttggtttgccccactgtgggctgggcagcatctgaggctcctgctgggctcccctaggctctccaggacatgtttgcactacttgggggagtttggagaagaccagatctatgaagcccaccaacaaggccgaggggctctggaggcattgctatgtgggggaccccagggggcctgctcagagaaggtgtcagccacaagagaagagctctagtcctggactctaccctcctctgaaagaagctggggcttgctctgacggtctccactcccgtctgcaggcagccaggagggcaggaagcccttgctctgtgctgccatcctgcctccctcctccagcctcagggcactcgggcctgggtgggagtcaacgccttcccctctggactcaaataaaacccagtgacctcaaaaaaaaaaaaaaaaaaa

SEQ ID NO: 14700 - DNA, 826 bp, Homo sapiens
acactggtgaataacagtcattttatttcatcttctcaaaaccagtggaggtacagacaataaattaaacaaacaattacaaattgtgtcctaacactaaagaaagcattgaataggggacagtggttaaaaaaaaataaaaataaaacaaaaaactaattaaaacctaattaggggacaggaaaggctgctattctgaggaggcaacaccgaacccagaggataaggagccggccttgggatgcatataccagagagtgagaatgagctgaaaacccttgaagcagaagaaactagcctatttaacaacaaaagcagctagtgtggctataacagaggtagtgtgatacacgggtaagaggccattatcatgcaggtggccttgctggcctggttgaggagtttgggttttctttggatataacaggaagctgggaggttgatattaattgatttacattttgaaaagaagatcacagctgctgggtggaaatgtatcaggagaaagatggtaaaagaggaaatggggaaaccagtcaggaagctactgcaatagcctaggctagaaagaatggtaatctaggcagcaatggatcaagagtcggctaagggatattcttgtggatacaaatgataggtttatttagaaataagatattgaaagagaaggaaaatgactcactggtttctgacttaggcaacagggtaaatagtagtaccactttttactgataggacagggaaagaacaagcagagaaaaaaacaacagtcaatagttctgttttggacatttataatttagagatgtccatttagttaagcaag

SEQ ID NO: 14701 - DNA, 1033 bp, Homo sapiens
ttttttttctagaaacaaagaatcaggctttatttttgttattttgaatacaggtattgtattgtagacatctgttagtctcataattcagtatggccaacacacagaaattaaaagtagaaacaaaatgagggcacacttgctcctgtccttggcttggcccctccaacctccaaaagaactgtcctccccattgtcatatcctttccctgctacgaaagacaaaacaaaatgatgccccaaagaaaagtcccagaggctctctcccagcagtcagtgggatgaagcaagacactgttaccttgggtaggatggagaagccaccaggtccataccacagaggccacagtgggatggagaagccaccaggtccataccacggaggccacgtgtgccaccagtggagccaaaccctggccatggctggcaaaactcaccaccaggcgagaccagagcatattatctaccagtaatccccgaggtccaacgccattcaagtcaggcagccctgaggcaagcaggaggagccctgtcctctgggggtgctgcttccagaggaggcccaaggacagtctcttcagagaggggctcacccgggaaagggggttcctgaggaggcgtgcaaaggtcaagggaccccacccttgccacctgtcccagggcttactgctgactccactgtcctgggagtgctggaatctccacaccacttaaaatgaaaaaggaaatcagaaataataaggcattagacgtttgattcttttatttccatatgcaatgtaatgtttaggcacgctgcttgggatgctacttctaaaaaaattgttggccatttttcagaatatccttttggttttaaatactggtcaggaaaaacaaatgatgtaaaaatacgtgaataattttctattacagaaatgaaaaactgatttgcatctaaaagtgcaagaggtgaagtaatttaaccctttcaccagacgatatggcaatatacaatatattgcttgagctgtttgagaaggctgtgatgtat

SEQ ID NO: 14702 - DNA, 1581 bp, Homo sapiens
gcaccagaaccagtgctcgctattccctctggcacacagagtccgtataagaagaatgtggaatgatactgtgagaaaacaatcagaatcttcttttatctcaggtgacatcaatagcacttcaacacttaatcaaggacattcactgaacaatgccagggatacaagtgccatggatactctaccgctaaatggtaattttaacaacagctactcgctgcacaagggtgactataatgacagcgtgcaagttgtggactgtggactaagtctgaatgatactgcttttgagaaaatgatcatttcagaattagtgcacaacaacttacggggcagcagcaagactcacaacctcgagctcacgctaccagtcaaacctgtgattggaggtagcagcagtgaagatgatgctattgtggcagatgcttcatctttaatgcacagcgacaacccaggggctgggagctccatcacaaagaactcgaggcaccactttattcctcagcggactcactcccttctgtaccaaccccagaagaaagtgaagtccgagggaactgacagctatgtctcccaactgacagcagaggctgaagatcacctacagtcccccaacagagactctctttatacaagcatgcccaatcttaggagactctccctatccggagagcagccctgacatggaagaagacctctctccctccaggaggagtgagaatgaggacatttactataaaagcatgccaaatcttggagctggccatcagcttcagatgtgctaccagatcagcaggggcaatagtgatggttatataatccccattaacaaagaagggtgtattccagaaggagatgttagagaaggacaaatgcagctggttacaagtctttaatcatacagctaaggaattccaagggccacatgcgagtattaataaataaagacaccattggcctgacgcagctccctcaaactctgcttgaagagatgactcttgacctgtggttctctggtgtaaaaaagatgactgaaccttgcagttctgtgaatttttataaaacatacaaaaactttgtatatacacagagtatactaaagtgaattatttgttacaaagaaaagagatgccagccaggtattttaagattctgctgctgtttagagaaattgtgaaacaagcaaaacaaaactttccagccattttactgcagcagtctgtgaactaaatttgtaaatatggctgcaccatttttgtaggcctgcattgtattatatacaagacgtaggctttaaaatcctgtgggacaaatttactgtaccttactattcctgacaagacttggaaaagcaggagagatattctgcatcagtttgcagttcactgcaaatcttttacattaaggcaaagattgaaaacatgcttaaccactagcaatcaagccacaggccttatttcatatgtttcctcaactgtacaatgaactattctcatgaaaaatggctaaagaaattatattttgttctattgctagggtaaaataaatacatttgtgtccaactgaaaaaaaaaaaaaaaa

SEQ ID NO: 14703 - DNA, 1854 bp, Homo sapiens
tcgaagtctgtaggaggcagaaggtcactgaaagttctgagagaatatcaaggacttccttaatcgtctaatgctttagttgtagaactaggacttcaggaatcttcctgattcacctttcttcccttacttttctgcccttctccgggtgattctacaacattttcaaaataatgggtaaaatggtaatttgctaaaggaaattcagagaagagtttctaaagtgtataattgggactgtgggtctttgtaggaaatttcatatgcagagtcccttgggaaaggatgccttgagcttgtctcagggtccctaaacttaggaaagtcctattctttttcccaaattctgacatgtgctggatcagagtgttctcatttccaataggccagtctgccatccatccaggaagaactgcggcacatggctgatggtgctagagaggtaggaaatatgactggaaccactgagatcaactcagatcaaggcctagaaaaagacaactcagagttggggagtgaaactcggtacccactgctattgcctaagggtgtagtcctgaaactgaagccagttgccgaccgtttccccaagaaggcttggagacagaagcgttcatcagtcctgaaacccctccttatccaacccagcccctctctccagcccagcttcaaccctgggaaaacaccagcccaatcaactcattcagaagcccctccgagcaaaatggtgctccggattcctcacccaatacagccagccactgttttacagacagttccaggtgtccctccactgggggtcagtggaggtgagagttttgagtctcctgcagcactgcctgctatgccccctgaggccaggacaagcttccctctgtctgagtcccagactttgctctcttctgcccctgtgcccaaggtaatgatgccctcccctgcctcttccatgtttcgaaagccatatgtgagacggagaccctcaaaaagaaggggagccagggcctttcgctgtatcaaacctgcccctgttatccaccctgcatctgttatcttcactgttcctgctaccactgtgaagattgtgaggccttggcggtggctgtaacatgatccagcctgtcaatgcggctgtggcccagagtccccagactattcccatcgccaccctcttggttaaccctacttccttcccctgtccattgaaccagccccttgtggcctcctctgtctcacccttaattgtttctggcaattctgtgaatcttcctataccatccacccctgaagataaggccccacatgaatgtggacattgcttgtgctgtggctgatggggaaaatgcctttcagggcctagaacccaaattagagccccaggaactatctcctctctctgctactgttttccccaaagtggaacatagcccagggcctccaccagtcgataaacagtgccaagaaggattgtcagagaacagtgcctatcgctggaccgttgtgaaaacagaggagggaaggcaagctctggagccgctccctcagggcatccaggagtctctaaacaactcttcccctggggatttagaggaagttgtcaagatggaacctgaagatgctacagaggaaatcagtggatttctttgagctaggagaataagagtctggagactgggagccttcacttcggcctccgattggtggcgcatagggtgtaaccaataggaaacccctaaagggtacttaaaccccagattttgcaactggggctcttgagcagcttgctttagcctgcttccactctgtggaatatacttttgcttcaataaatctgtgcttttattgaaaaaaaaaaaa

SEQ ID NO: 14704 - DNA, 470 bp, Homo sapiens
aaggattttagctgatatgcaggcatctggatgttagcctggggttttggctggattccacctcgctcagtgatgatagtctgtttccctggaacattcctgtggttttagtagtaatgagatgtgtgcaccactccagtgggaactgaagctcttagtagttacattgtaattaaaaaagaattataaaacaagaaatcagcaagcctgcttacctccagagacacaccgttccacttacagtatctagcttcctcgactcctttgttaaaatcgtggagtatgaaccgtgaccagagaagtaaatatggagccgttttattgagcagtttcctccagggatgacggctgtcagtgtgtttcctgccagttttccagtccttactctctgcccttcattctgtactcttggcagagtcagtaaccaaccactaataaaatcaaagttgtagtaaagactttataacaaa

SEQ ID NO: 14705 - DNA, 582 bp, Homo sapiens
gcccgtgcaggagcagctgatgagccagatccgggagacgcagcagctctgccaccagaccctgttcatcttcgatgaagcggagaagctgcacccagggctgctggaggtccttgggccacacttagaacgccgggcccctgagggccacagggctgagtctccatggactatctttctgtttctcagtaatctcaggggcgatataatcaatgaggtggtcctaaagttgctcaaggctggatggtcccgggaagaaattacgatggaacacctggagccccacctccaggcggagattgtggagaccatagacaatggctttggccacaagccgtcttgtgaaggaaaacctgattgactacttcatccccttcctgcctttggagtaccgtcacgtgaggctgtgtgcacgggatgccttcctgagccaggagctcctgtataaagaagagacactggatgaaatagcccagatgatggtgtatgtccccaaggaggaacaactcttttcttcccagggctgcaagtctatttcccagaggattaaactacttcctgtcatgaaggctagaggaagac

SEQ ID NO: 14706 - DNA, 668 bp, Homo sapiens
ttttttttttttttgcaggatgagacacatttattctacatctggtcacagtaaatctcacccagaccacaggcaggatgccacgtggctacaggcagctggcggaaatggagatcatctgttctggtgctcatggccactctgggcagaaagcaaaggtgcctcatggcacctactcagaggcactgaggccacattcccatctccaggcaccagggatgtctctgaagggtgattccatttggagtttccaaaatccaggacttctgagagccaagccctagttccaagtcatcctgagtccaggctctgccagaatcttgagcacctggagctggtggcaaggcagcctgggggctgaaagggcctcagactggaccacagggcagcccaggggccctgggcctcagggtcgacgatcctttctgcggtttttgtgtcccacctggcgaacctcgccgggcagccttcaccaggcctttgaactgtccctgcagcttcatcttcttcctgcggttgagcttggcttctgttgagggggatgtaggcatagggatccggccggcctttcttcttcacatcaccttttgctttcttgggccttgtattcagccccaggatagctttctttgggccacagggcgatgaatgccagagcctccagcttg

SEQ ID NO: 14707 - DNA, 1084 bp, Homo sapiens
gaaatcatgagaaaggactttgaatgacgcccgggacctgcatggccaggcagagtcagcagctgcagtgtggaagggacacgttgatggaccgtagaaagaaggcacttgaccgactacaagaagctgcgggccttctttgtggaggaggaggagcatttcctgcaggaggctgagaaggaggaggggctccctgaggacgagctggctgaccccactgagcggttcaggtcactgctgcaggcggtctcggagctggagaagaagcatcgcaacctgggcctcagcatgctgctgcagtgatggcgccaacccgtggcagtcccagagctggaggcaggaggatggatcctcatctccatgggaagtgtcagcgtgtggctgccagggaagcgtggcaggcgcctggccttgggtccatctacatagttgcgtgtttcaacaatgtccatttatccttcaccccgaggcgtgttttgggggctgcaaacacctcccggtagaggctggacctgaggacccttcccacctgtgcccgtcccttcctgaagtcctagccacagcccatcctccatgagtcccggcagctctgggtcatgcccttccctggtcacccatctgcccctcacctcgtcatccagggacccagaccctgcaccttccatgtgggcccacagatccttggcaggtacctgaggtgcaccattgagtgtcggatttggggttagcatccagaaagaagaatgcgcatgacgctctgtgaaggctggaactcaggtcttcagggagagaaaggaagactggattgcaccttgatgcctcctgaggaggcggcccccctcttgaggtgggcgtgggcccggcccagccttatccaagtcgctctgtccacctcccccttcctggcccccaccccactcctgtgcctcccaggagccctccctgtgctccacctgcctccgcagaaggaagcctctttctctgtttccctgggtgagggggctggcaggtggctaaccccatttagcatcttcagggccctgccatggtgtctcatcttgctgttatctctagctctttccct

SEQ ID NO: 14708 - DNA, 1936 bp, Homo sapiens
agtcctagagacttgtcctgacagtgccgcacacctacttttgatctctcagagcaggtggctccatccccagactagcctggctgctctccgaggcccctccacctgctccccttattgccccattcttgtggcttgcgggccacttggatccacttcttgccggtgacagcgttccatcatctccccgctccccaagggccaactgcttctcactcaggctggtgtcatttcaggaggaccaaagcctgcgtgacgctttttattttcagtaaaatggtgcttttttccttacttcgagatactatatataaataataatgtaaatgacaccttttcgtacggagctgtttgagtattgctttacagagctcactaaatcagcttcaacaatcttgagctctgtggctcctcaccctgtctgcatggaagaccttgctggacgctctcgggagagcagacatagcaccagaagccactgggagaagtgttttcgatccgtgtctgggccacagtagtattcactgtttagtctttgagttccgtaagcagtctcttcatacatttcttacagtctggagtgtactgactaaatctgtgtaagcaaattgaaatactctttcttttaggtagcgtcacagtggttttttttttcctcaggataatttctatacaatttccttactgtcagaggggaccagatctttccctcactgtgggcagggggccgtgcaggtggataaaggaagagctggtttccggagagtgactgttaacagcgttgactcgaagctagagatggagggggtggccgtctcttagacattggacacctctcagagcctcctgaggggcttctttgtcttctagaatctctaccggtggtcctcctgcaggttctggctcacagacatcatcatgccttttttttccctccctgaggcgccttggcagaagagcgtgaccctgtgagccaggccccccttagctctgcttcagatcacagaacacagacagactcgcgagttgctggacctctttggtattaagtgtttgaatccatggtgggccttttgcaagtagcgttacgtctttttaaatgttgaactgagctaaggatgcactttcttgtggacatagaaggggcccacgtaaggccctgagtaggctccttagttgctgctttacctgatgagggccaaagagattaactctgcctcgttgccatgtctcagaaaagttgccatatttcacccagaaggggctcgttttcctcttactcttactttaaccatgtgcctggaggagccattctggggctcttgcacttgcccagcctttctttgccaggggcagagaagggaaagggggtagattgagtgtgccaagggccgtgcaagggcaggcttgctttccacccatctgctgagggagccctctcctctcgctccttgcctctgttcacacctgttgtcttggaagaggatggtccctttgtcttaaggctttgtgataaagtcatctccagttaggatctgcacctgtttccttcgtaatagtgcctggcggcctttctgaagttacaggtggttgggagccctctcgcatgcagaacatctggtagattgatctgccaggctgggtggttctactgctttctcaatttctaagaaccttttttttttcttaaagagttctgctgaattatttgacaatatttgtaagtaccatgtttccttgtggtgtatgctctgttctggtttctgttttcaaatcaaatgcctgtttgggaggagatgaacgtatttagtctattagatttgcactgctggatttttttttttaaagtgtaaccttgaatagctgtcttattgtttatcctgtaagattagtcaatcgattaaagtttgataattaattgcgaaaaaaaaaaaaa

SEQ ID NO: 14709 - DNA, 433 bp, Homo sapiens
gcggcacgaggcaagttgcatctttaaatgaaaagcgcaccttcttccacctaagtgccctcaaaggatatctgtatgcagttggtgggcgaaatgcagcaggtgaactgcccacagtagaatgttacaatccaagaacaaatgaatggacctatgttgccaaaatgagtgagccccactatggccatgctggaactgtgtatggaggagtgatgtatatttcaggaggaattactcatgatactttccaaaaggagctcatgtgctttgaccctgatactgacaaatggatccagaaggcgccaatgaccactgtcagaggtctgcattgcatgtgtacagtgggagaaaggctctatgtcattggtggcaatcacttcagaggaacaagtgattatgatgatgtcctaagctgtgaatactattcacctat

SEQ ID NO: 14710 - DNA, 1593 bp, Homo sapiens
ctcttggaattctgacatctcatcaaagtggctttttgaaaacatctacaagcaaaattacttcaactgcgtggaaaaataaagacattaccatgcagtccaccaagcagtatgcctgtttgcacgatttaactaacaagggcattggagaagaaatagataatgaacacccctggactaagcctgtttcttctgagaatttcacttctccttatgtgtggatgttagatgctgaagatttggctgatattgaagatactgtggaatggagacatagaaatgttgaaagtctttgtgtaatggaaacagcatccaactttagttgttccacctctggttgttttagtaaggacattgttggactaaggactagtgtctgttggcagcagcattgtgcttctccagcctttgcgtattgtggtcactcattttgttgtacaggaacagctttaagaactatgtcatcactcccagaatcttctgcaatgtgtagaaaagcagcaaggactagattgcctaggggaaaagacttaatttactttgggagtgaaaaatctgatcaagagactggacgtgtacttctgtttctcagtttatctggatgttatcagatcacagaccatggtctcagggttttgactctgggaggagggctgccttatttggagcaccttaatctctctggttgtcttactataactgggtgcaggcctgcaggatttggtttcagcatgtccttctctgaatgatgaatacttttactactgtgacaacattaacggtcctcatgctgataccgccagtggatgccagaatttgcagtgtggttttcgagcctgctgccgctctggcgaatgacccttgacttctgatctttgtctacttcatttagctgagcaggctttctttcatgcactttactcatagcacatttcttgtgttaaccatccctttttgagggtgacttgttttggccccatttcttacaacttcagaaatcttaatttaccagtgaattgtaatgttgtttctcttgcaaattatacttttggtttagaaagggattaggtcttttcaaaagggtgagaacagtcttacatttttcttttaaatgaaatgctttaaagaatgttggtaatgccatgtcatttaaagtatttcatagataattttgagttttaaagtccatggaggtgattggttctctttacacattaacactgtaccaagctttgcagatcttttccgacacacatgtctgaagacttattttcaaagacagcacatttttggaaactaatctcttttccgtaatatttcctttatttcaatgattctcagaaggccaattcaaacaaacccacatttaaggttctttaggattatagaataaattggcttctgagtgttagctcagtgagctaggaaagcaccaatcgatatttgtttcctttagggatactttgttctcaccactgtccctatgtcatcaaatttgggagagattttttaaaataccacaatcatttgaagaaatgtataaataaaatctactttgaggactttaccaagtaaaaaaaaaaaaaagtcgac

SEQ ID NO: 14711 - DNA, 822 bp, Homo sapiens
  misc_feature (1)...(822): n = a,t,c or g
ggctcttctggtgtttcagcttggggagagaggagtggccttcctcttgcagttgaggcgggcggctcagccggatctcgtggcggcgcatcttgctccctctcccaggcctttacccgctccctaggattcccgggccctgtagtgggagttgggagacgtgattctctttcattctgcgcctctcattggctctctgaccttgtgcggaagtcctttagctgacctcagctgcattttttagaagatggagattgtattcacagtgactgtcagctttttaacggcgggaactgacgtagtgttaaacactgtcgtgtatcgctggcacanacaaaggacattataggacagtactgcttttaaagagacagtgttagggatcttggaagcacagccaacatgtgtgacattgaagaagccactaaccaactcctagatgtgaaccttcatgagaaccagaagtctgtacaagtgacagaaagtgacctcggaagtgaatctgagcttctagtcactattggagccactgtacctactggctttgagcaaacagctgcagatgaagtcagagagaaacttgggtcatcatgcaaaatcagcagagaccgtggcaagatatattttgtcatttcagtggaaagtctggcacaggttcattgtctgagatcagttgataacttatttgtggtggttcaggagtttcaagattaccagttcaaacaaacaaaggaagaagttctaaaggattttgaagacttggctggaaaactcccatggtcaaaccccttaaaagtgtggaaaattaatgccagttttaaa

SEQ ID NO: 14712 - DNA, 478 bp, Homo sapiens
  misc_feature (1)...(478): n = a,t,c or g
ggactgcatagggctcggcgtnnnnnnnnnnnnnnnnnnnnnnnnnnnnnnnnnnnnnnnnnnnnnnnnnnnnnnnnnnnnnnnnnnnnnnnnnnnnnnnnnnnnnnnnnnnnnnnnnnnnnnnnnnnnnnnnnnnnnnnnnnnnnnnnnnnnnnnnnnnnnnnnnnnnnnnnngaatttgagagtttatgtattttataatgagaaaaattcctttaaaactaattaaattctgaagaaacaagtataagaaacattaaaagtacaaactggctttaaactactaacaatctaaaaaaagttcacataataagataacttgcaaaaaatgctgcttattttaggattttgaaattatgagtttttctaaattcctttttcaagattttctccagtgntattattatgctgattttctgttaacaataatttctagtagtctgggagtaaagaataaccccacggntttttatgcccc

SEQ ID NO: 14713 - DNA, 420 bp, Homo sapiens
gctggaagatgtaggagctttcagtcttggatgaggattcgaactgaagggcttaggcccagctgtcttggagcaaaacatctgttgtgggatgtggcggcagaggagggcaaggccgaaggagcagacagcaccgcttcttggggagttgtgaaggcatcatgcggagggccgagcttagcagccaagtggaggacagcaccctccatgcctggattcgttactcgctcgttctcgatgttgagctgctggcatattgcagcacaactagagatgtacggatgcccccatcttgatcttacagaatcagaggtgcagccgcaagaaagagtcaagaacagacactgagtcgcttgaggactcaggcaggtgtttgctgcattgacaacagactacaccttctcggttttttctgtctgg

SEQ ID NO: 14714 - DNA, 1169 bp, Homo sapiens
tttttttttttttaacaatgtgccaaatgttttatttctctcatatgcaagtaattacctctcaaagcatttttaaaaaacgcattattacactttaccaatgaattatttctgtccctggagattaaatcaaatcaaaatgttacaaatagtatcagtatgatataatttcttaaatatatgggacattgtcaacagctgtgattcatatgaaaaatataatcagatatctcaaattcctaattctgttttaaaaacacaaaacactagaacagttgctatgaaattactgataatgatccctttaataaactgcaattaaccactaatatagaaattcaatttaagcaagaagttttatatattatactttacagaaaaaaataattttgaaaaagtaatgacaaacagagatcaaacatttagggcattagttactgcattctctttttagaatatacattaagtaacactagtaaaatttaaagttttatgaccaggccttaaaaaacatgaatgatgatgacagaaccactatcacacataaacaaaaatagagcaaacccaagccgtgtcccacatctcccatgaattcagtgatttgaaataaatgttgttatgttaaacattatgagcaaatctaaaggttcaaccaaaaaacttacatatttttgagtattttttaaagttttaatagtttatctctgatcaaggatggagaaaggacaaaaaaaaatactgtcctgaattgattctcacagggcctgctccctcacagaacacagtgtcattatatatgccttatttataatataaaacaacccaaagaattttcattcttcttagtaagtatttaaaatacattctaggcgtgcattaggagtaaatgttaatttgtgatgcccttaaaagactttcaacctgtaagaaacaatttctgggaatataaaaatattgaattttacatatttcagagtcttgagaaacttaaagtgcagtattttcatgtatcagcaaataataattgtgtcatataagctcatcttgaaagaggatgtaaatacttccaaatttttatgaatgctacattacagagggcagagtgtagctattttaaggtttgattgtccagatttttttattagactgcaaggaggaacctcgtgccg

SEQ ID NO: 14715 - DNA, 1036 bp, Homo sapiens
gcaacaaagccataggaaaacacacaggagcttttccctccccttcaggtccccgccctctttccaagctggacaattttttattaagttgtttattccctgccttaaaactgaaacaggaaattttctggtagaaggagggtcatttagtcacgaacactgaagtgggtcaaaattctattctgggtcaaatccttgaattcaaacagatgtccataatcagtactgatggaatagagcaagtttttctatgtaagacaaataaatcaaacatcatgtgcatctcctcataagggtctgcaagggtctgatggtttaaagttcctaacagatctggttgcagcatctgccggagcttgcaccccatcatcggacggtcatcttcctgctgcagaagttaggtaacataagacttagatttcttcctgttctagcaatctgcaagaccaccaggcttaactttttagctgccagaagacaaacccccttttctgtttcggcaatttgtcctggcacgtgttttggacttcctccgatttacacgaaaagctctgatattcattggagtactttattttttttcctcagttttgtttcttttctcatgtaaaaacaaacaaaaaggtcaacaaaaaaaaattgaggtttttcttgtttctatctagttcatgctttctttgcggtgtttgaacagtagtctgttaacttagtaggtggtacctggaaaggtattttaagtatagtgactgtttaataaatacttaattggatgatggaggaggagaaattgttttcttcccaggattctctttgggggtcattttgtgtgacagatatattttagacatttggagaaacagtttcagatcctgccaggatatttttgtaaaaaaggaaaatgggaaggattcccaattaaactaggaaacagtacgtattctaaggatggctgacacaggaaggctaatgtggactttttcagcttatccaggagggtgggccattaaaacttaagggtgttggttaggtgtttttc

SEQ ID NO: 14716 - DNA, 2037 bp, Homo sapiens
atcactcaggggcagctgcttcagtttgtgctgacaatcatccagaccagctgcggggtcatctggccgtgcacattccctcttggttggttatttccagattggatacatgatttccctgattgctctcttcacaaacttctacattcagacctacaacaagaaaggggcctcccctaaggaaagaccacctggaaggaccaccagaatgggtccatgggctgctgtgaatgggacacaccaacagcttttcacccctggggaaacaatgtgaagccaaggaagctgcggaaggattgaagtcaaagaattgaaaccctccaaaccacgtcatctgattgtaagcacaatatgagttgtgccccaatgctcgttaacagctgctgtaactagtctggcctacaatagtgtgattcatgtaggacttctttcatcaattcaaaacccctagaaaacgtatacagattatataagtagggataagatttctaacatttctgggctctctgacccctgcgctagactgtggaaagggagtattattatagtatacaacactggctgttgccttattagttataacatgataggtgctgaattgtgattcacaatttaaaaacactgtaatccaaacttttttttttaactgtagatcatgcatgtgattgtaaatgtaaatttgtacaatgttgttatggtagagaaacacacatgccttaaaatttaaaaagcagggcccaaagcttattagtttaaattagggtatgtttcaagtttgtattaatttgtaatagctctgtttagaaaaaatcaaagaccatgatttatgaaactaatgtgacataatttccagtgacttgttgatgtgaaatcagacacggcaccttcagttttgtactattggctttgaatcaagcaggctcaaatctagtggaacagtcagtttaactttttaacagatcttatttttttattttgagtgccactattaatgtaaaaaggggggggctctacagcagtcgtgatgaaacttaaatatatattctttgtcctcgagattttaggaagggtgtagggtgagtaggccatttttaatttctgaagtgctaagtgtttttatacagcaaacaaaaagtcaattttgctttccaccagtgcgagagaggatgtatacttttcaagagagatgattgcctatttaccgtttgacagagtcccgtaggatgagcaatggggaactggttgccagggtctaaatttggattgatttatgcactgttatctgttttgacacagatttccttgtaaaatgtgcctagtttaccaaaattaacaaagggggggaaaggaccttagaactttttaaggtaaaatcaaatatagctacagcataagagaatcgagaaatttgatagaggtaacttgtttaatgtaaatctaatagtacttgtaatttctttctgcttagaatctaaagatgtgtttagaacctcttgtttaaaaataatagactgcttatcataaaatcacatctcacacatttgaggcagtggtcaaacaggtaaagcctatgatgtgtgtcattttaaagtgtcggaatttagcctctgaataccttctccattgggggaaagatattcttggaaccactcatgacatatcttagaaggtcattgacaatgtataaactaattgttggtttgatatttatgtaaatatcagtttaccatgctttaattttgcacattcgtactatagggagcctattggttctctattagtcttgtgggttttctgtttgaaaaggagtcatggcatctgtttacatttaccttatcaaacctagaatgtgtatatttataaatgtatgtcttcattgctaggtactaatttgcagatgtctttacatatttcaatacagaaactataacattcaatagtgtgctgtcaaagtgtgcttagctcacctggatatacctacattgttaaatgtctaaacagtaatcattaaaacatttttgattaaaaaaaaaaaaa

SEQ ID NO: 14717 - DNA, 456 bp, Homo sapiens
gcggagtgcaagtgagcttctcggctgccccgcgggccggggtgcggagccgacatgcgcccgcttctcggcctccttctggtcttcgccggctgcaccttcgccttgtacttgctgtcgacgcgactgccccgcgggcggagactgggctccaccgaggaggctggaggcaggtcgctgtggttcccctccgacctggcagagctgcgggagctctctgaggtccttcgagagtaccggaaggagcaccaggcctacgtgttcctgctcttctgcggcgcctacctctacaaacagggctttgccatccccggctccagcttcctgaatgttttagctggtgccttgtttgggccatggctggggcttctgctgtgctgtgtgttgacctcggtgggtgccacatgctgctacctgctctccagtatttttggcaaacagttggtggtgtcctac

SEQ ID NO: 14718 - DNA, 766 bp, Homo sapiens
  misc_feature (1)...(766): n = a,t,c or g
caacacatctgagacaggaagtacggcccctgttctgttggcagtggacctcttcagtcagtagccaaggtcacagccctgagccgatgatgctccatgctgctgcctggatggaaagcattcgaggggaccttttggccaccagcattatgctgacagtcccagctcagacagaaggccttcttgtggcctcttttctgaggtaggaaggaaggttccgggtcaggaagtacatggtttgttgtaggtctgatgtgaacagtttgttgtcactaaccagccctggctagcaagaattccagaagagggatttggcagggacccatgtggtattgcaacctgtcaatacatcttgacaagtttgtaaatcagtcttcctggcagccagcttcacatagtatctaacacagacaggatttgctcaccaaaaacagagatgagtttgtttttggaggcctctgctgttacttctggccatttacctcttgcataatgtaaggtagccttttctcatctttgccctccaatgcccatctggttctcagacaatccccaaaccccacaaaaatggctgtttagaagaggaaggataaacagttggcccttggtatctgcaggttccacattcatggagtcaacaaaccataaatcaaaaacatttttggggaaaaaaaaacagtgaaaattaacaatacaattagtnnnnnnnnnnnnnnnnnnnnnnnnnnnnnnnnnnnnnnnnnnnnnnnnnnnnnnnnnnnntttt

SEQ ID NO: 14719 - DNA, 1143 bp, Homo sapiens
ttttttttttttttgattggattaaaaaagtgtattggatttccaatactaaataaaaacatgaaatcgtttttaaaaagccatagagtttacagcatcaactacagaaaaggccaaacaagtgtgtacagacgccagtcccagcagccctctggggcccctcccacaggcagtgcggcgacagacacaggtgttccaaatccccccgaggaagctgctgagcggcacgtcaaccaggacactacaggacacacaatggtttagtttcgaaaatcacaggaaaatgtaagaaaatgtattaaattgtgaaaaggtgcaatacagaatagctttcctttttcttaattttttaaaaaacccccaactttgaacagttattttatttaaaaataggcccctcccccacccgccccaattctgtggcagtatccaggtaccaaggccctgaggtaacagaagcagtcagggtttgtgggaggaaatgccccaaatactgagcatgttctttgggcaaaaggtagtttctggggaatctggccctcctggtggccagagtgctgggacagctctcttcaggatcagtttaagtgcactggttttccagaatcccgcctggcacccccatgtgaccagcgagctcggcagcagcagttcctgcattgcacctttcattgccccccaaatcataaatacaaagagttcatcttgtaaaaaagcaagtatgtgacaagatcaaacatggcaaatccccaagttcaaaggcaggtggcctggggtacccactggtggtttcagcagctgatctcttcttggctatagaactgaagcccgatttactgtctacactgccttccacgctgtcttctggggatctgttggggagtaggggaagatgcctgagcgtcagtcgtgtgttttccattatatattcttaatattaaaaaaccacacacctcagctccttacctttttaggaaaaagaacccaagaactatgtgcaaaggcaatggcttccatgtgtggctgagcggctgggttcacctcagacaactcctgtggcttcattctcatcagggccttagctgagctgctgggatggggggggtgggcagctgtttccgctgtccctgcccttgttacttg

SEQ ID NO: 14720 - DNA, 332 bp, Homo sapiens
  misc_feature (1)...(332): n = a,t,c or g
gaaaaacagtttttattaatatcatccgtaatatttgtgttaacaaaaacaattccaattatatgtttggcaagtgggtcctccaatctagtaatagcatagtctcttttttttcttatatagcagggctcccctacccccaggctgaggactggtaccagtgtgtggcctgtaacagggaaccgggccacacagcaggttagcggtgggtnnnnnnnnnnnnnnnnnnnnnnnnnnnnnnnnnnnnnnnnnnnnnnnnnnnnnnnnnnnnnnnnnnnnnnnnntcttgtgaactgtgcatgcaccagatctaggttgcatgctccttataa

SEQ ID NO: 14721 - DNA, 1065 bp, Homo sapiens
cagagctgctgtcatggcggccgctctgtggggcttctttcccgtcctgctgctgctgctgctatcgggggatgtccagagctcggaggtgcccggggctgctgctgagggatcgggagggagtggggtcggcataggagatcgcttcaagattgaggggcgtgcagttgttccaggggtgaagcctcaggactggatctcggcggcccgagtgctggtagacggagaagagcacgtcggtttccttaagacagatgggagttttgtggttcatgatataccttctggatcttatgtaagtggaagttgtatctccagcttacagatttgatcccgttcgagtggatatcactttcgaaaggaaaaatgagagcaagatatgtgaattacatcaaaacatcagaggttgttcagactgccctatcctctccaaatgaaatcttcaggtccaccttcttactttattaaaagggaatcgtggggctggacagactttctaatgaacccaatggttatgatgatggttcttcctttattgatatttgtgcttctgcctaaagtggtcaacacaagtgatcctgacatgagacgggaaatggagcagtcaatgaatatgctgaattccaaccatgagttgcctgatgtttctgagttcatgacaagactcttctcttcaaaatcatctggcaaatctagcagcggcagcagtaaaacaggcaaaagtggggctggcaaaaggaggtagtcaggccgtccagagctggcatttgcacaaacacggcaacactgggtggcatccaagtcttggaaaaccgtgtgaagcaactactataaacttgagtcatccccgacgttgatctcttacaactgtgtatgttaactttttagcacatgttttgtacttggtacacgagaaaacccagctttcatcttttgtctgtatgaggtcaatattgatgtcactgaattaattacagtgtcctatagaaaatgccattaataaattatatgaactactatacattatgtatattaattaaaacatcttaatccagaaatcaaaaa

SEQ ID NO: 14722 - DNA, 1031 bp, Homo sapiens
gagttgggtagcattagcctaagctttggttacaaacaaggtttctttattgaatttttaattccctgctactcacatttcaccttgtttgtcttgtggctgatgctgctcagtggagtgatgctgaccacacggacttcatcgacacagctggtgccatgctgcagtatgctgtcagccttctgaagcccactaaggtctcggctcgccagctgcccccaagcgtagccagggtggatgccaaaagccgagttctgtttcctcttgggttgggacatgctgctgagtacgtcaggcctcgggtggcgctcattgggtaagacgataacagagcagggccactcccttctcactttgctgccagaggtcacacctgaactctgctttattcttagggatgcagcccacagagtccatccgcttgcaggacagggtgtcaacatgggctttggggatatctccagcttggcccatcacctcagtacggcagcctgtaagactgtgctgtctgcaaagccaaagccatcctttaacagggctgtgatgtagctgagatccatgcacaggaaaggactgcctgaggtgaagttttccaagttatcacacacttccctggcttttctttcaaaatcttcaacttttaaaataccccccttttcataatcaatcatgtctgtgtcaacagctcggtcataatagtaagagaaagcatagaaggaacctctctggacctcctctggctggtgaagttttcctcgtaccaccctcagcacttcggcatagcagggctcaaagcccacctcccctgccaggcaaaggtgcacaggggtaaggtgagaacgacgctgggggaaggggacactctctgaggcaggctgctggagacaatgagggaacagcaggaaggtcaaggaaagcaggagaaggctgaggcttgggacaagaggcgtcaaaacaaagatgagcaaacgtctgcagcctcaccagtctgtttctccatggccgtctcctgcctaatctgtattcaccag

SEQ ID NO: 14723 - DNA, 1030 bp, Homo sapiens
  misc_feature (1)...(1030): n = a,t,c or g
gccaagttgcttgactattctcagtctcagtttctgcacctgtcaaatagggtttatgttaacctaactttcagggctgtcaggattaaatgagcatgaaccacataaaatgtttggtgtatggtaagtgtacagtaaatacttccattatcagtccctgcaattctattttngttccttctctacacagcccctgtctggctttaaaatgtcctgccctgctttttatgagtggatacccccagccctatgtggnttagcaagttaagtaatgacactcagagacagttccatctttgtccataacttgctctgtgatccagtgtgcatcactcaaacagactatctcttttctcctacaaaacagacagctgcctctcagataatgttgggggcataggaggaatgggaagcccgctaagagaacagaagtcaaaaacagttgggttctagatgggaggaggtgtgcgtgcacatgtatgtttgtgtttcaggtcttggaatctcagcaggtcagtcacattgcagtgtgtcgcttcacctggctccctcttttaaagattttccttccctctttccaactccctgggtcctggatcctccaacagtgtcagggttagatgccttttatgggccacttgcattagtgtcctgatagaggcttaatcactgctcagaaactgccttctgcccactggcaaagggaggcaggggaaatacatgattctaattaatggtccaggcagagaggacactcagaatttcaggactgaagagtatacatgtgtgtgatggtaaatgggcaaaaatcatcccttggcttctcatgcataatgcatgggcacacagactcaaaccctctctcacacacatacacatatacattgttattccacacacaagggcataatcccagtgttccagtggcacatggcatacacgcacacattcccttcctagggccacttgtattggctttcctaggggcatcttcttattaggncaccagtcgtnttagggngcccacccc

SEQ ID NO: 14724 - DNA, 426 bp, Homo sapiens
tgggatgaaggtagcacttcatgggagaaattattctttacagctttttatataggacccttggagctttgtgtataccaccctatcacagccttactgctgacattgctatagtgacttcttgctctctgtgcttgaccattaaagatgcaaaacatttaggaaaacaaaataatttccctatgaacaagatgcaggaagctgtgctcctgctgcattgataacccagtggatgtgcttacagagcaccagagaccacaggaaagcataaagcacatcagtgtatttattaggaattatactttcagttcatactctggacatttttaaatcttagcctgttcactcaatccattgctctttcactgccttatttggagtatgcgcaggtacttgcaaactaattttaaaactaacctacctcaa

SEQ ID NO: 14725 - DNA, 404 bp, Homo sapiens
ccgtcacatcccccgccagcttgtagatgcctggattgagatgggcagccggctggatgctcgtcagctcattcctgccctggtgaactacagccagggtggtgaggtccagcaggtgagccaggccatccgctacatggagttctgcgtgaacgtgctgggggagactgagcaggccatccacaactacctgctgtcactgtatgcccgtggccggcccggactcactactggcctatctggagcaggctggggccagcccccaccgggtgcattacgacctcaagtatgcgctgcggctctggcgccgagcatgggccaccaccgcgcttgtgtccatgtctacaaggtcctagagctgtatgaggaggccgtggacctggccctgcaggtggatgtggacc

SEQ ID NO: 14726 - DNA, 764 bp, Homo sapiens
taggaaagctgcaaaacactgtggagtgctcccgtgtaaataaaaagaggaaaaaagtttctcaagtcgccgctgcacgacgtctggccggcgctggagcgggggtctgcgctctcccgagcggccgcgcgctggactttattgtgccgcaaccagccccagttcccattgtttgtgtttttttcaaaatatggcaaaggttcaggtgaacaatgtagtggtgctggataacccttctcctttctacaacccgttccagttcgagatcaccttcgagtgcatcgaggacctgtctgaagacttggaatggaaaattatctatgtgggctctgcagaaagtgaagaatacgatcaagttttagactctgttttagtgggtcctgttcccgcaggaaggcatatgtttgtatttcaggctgatgcacctaatccaggactcattccagatgcagatgcagtaggcgtaactgttgtgctaattacttgtacctatcgaggacaagaatttattagagttggctattatgtaaataatgaatatactgagacagaattaagggaaaatccaccagtaaaaccagacttttctaagcttcaaaggaatattttggcatctaatcccagggtcacaagattccacattaattgggaagataacacagaaaaactggaagatgcagagagcagtaatccaaatctacagtcacttctttcaacagatgcattaccttcagcatcaaagggatggtccacatcagaaaact

SEQ ID NO: 14727 - DNA, 866 bp, Homo sapiens
gttaaagataaaaattaattcaagagcacagatatgctatgcatactactaaaataaatacagtgatttataaatgagaaaaagttaacaatgaacagtgtttcagaagttgaaaaggtgacactaacagtgctaaatacacaggcttttatttgttttcttcagattgctttttcgtgaatataaagatgaggagtccattctgcaacctaaaaatatttacttattaaaactatattaatactttaataaactatacaaaaaggtaatgagacaaacatctgcatttatggaactgcatgtcagtcaggccagttccctgcagagggaattcccagcatgacctcattcatctgtgaggacacagagcagtccttgtttaagacatacacattcatctactgctcatcatggtcagccttccacttcttgatggtttccttctgctatgaatgcgcatgtccgggttgtctgcttcttagagcagacatttaccttcctcatccaccagccattggagggggactagggccacgcagatgattgattctacccattccttcggggagggtttcctggtggccctcttccatcatcatatctggaatcagatgagtttccatagcttcttctttttttcacatcttgctgaagcagagttttgaaactgaaaaacaaaaccacaaactcagctattccccagaagaaatctgttatcaaagataatctccatggagactgactccggctgtccaacacttgtccgttcgagatgtaaaccatcttgtcccacttccccgcttcggagccaccgggcgcctggcccctgtcggtttctgtatctccctctgctcccacttcagatt

SEQ ID NO: 14728 - DNA, 1162 bp, Homo sapiens
atagtggagggcgaggaaaggggggtgataccttgcagtaagtaagtcgaaatagcatgcctgaaaatttgaaacagaccattctaacacccaaggcttgtttataaaatacttgagaattacattaatgtggaatcaacagatgcagaagaatataacataacttttaaaagctttcataaataccagcagcaattgtaagcaaatctacaaaggttcttgaacctttctattatatacaaaactgaaaagtcattaaggagttcaactaatcaggaattaaatggtcatttatttcatgcagtatgatttaaggtatttcttgagattctggtcaaatgtcataatcagcaaacgggattaaaaaaaaaactccaaaatcactaaataattatctaaataatggtattggagaacttgtttcctgctatttggaagagattgttgcttcattgctagtttgtatttctaacttctacagttatagactccactgtgctttgtgtctgaatttctcagtatagacattttgtttactgtatgcttgcatatttattttcaactttgtttgtctttaaaattgcttgaggaaaaatggttgtaattaatttctgctacagaaaagccacctggtacgttttgtctcatcaggattgttttaaattctaaactataagtttgttcagaggggcttttgcaatgatagcagaaaactgtacaaatgtacagttagttatagaggttcttgttgaaatgaacttaccatctgatgatatgtatgtacagctgtgtacttgagtcttttttagtttacttagaaagactagcagtttgacctgttaaacaggactagttcaagtcaagaaactaaggttgttgtatacacctggaggcatctgttattcagcttatcctttgagtgggtatttggcacaatgaggataaacttatgtgacccacttgaatggctgatctaataatgttgacattatgcattccggactaggtgaaatgtcagatgaaaataactgatgaataatttttttgtattaaagggatgggaaaagaacacatgaatttgttaataaagcactatgatctgcaaacgatggaatgtttcataaagatctaaagaaataaagaaaaactttaaaacaaaaaa

SEQ ID NO: 14729 - DNA, 575 bp, Homo sapiens
tgtctttcctttttaaattgttcaaaactattttttaatggtcaagttactaacacttgaaaatcagatactgcaccaaatacagtgtttttccgtagtgtttttaatgagtgcacctattactactgtgcgagaattcatgttttaccagtcattgttatattacaaacagacttgcatgattaaccagttgttacacttactttttcaagttgggagtatatatgactcagtgcagactgggtctctcttatgtgaatgcacacatgcagaaatgcaggagtcaattttacatgcccataaagacatttgtaaagaattcagctcttatggtctgttgtataaatgtgtatctaggcactttattataactggaatttgacctcacagatgttacaacttgatcagtcatttgacctaatttgtgggtagctatctgtatgttttgcaatcttaatacaggacatgctttccaaaaaggttaatacagaaccatcctgccgttttggataagtctatccagctgtggaaagggcaacctgtggtttctctgtactggtgtttaatgggggaag

SEQ ID NO: 14730 - DNA, 1595 bp, Homo sapiens
tgatcgggattttagtgtggctgtaaacacagtcttcccgaaaggcttactgacgtttgaatgtgcaaatggtatgacgaaagatgtagggctctttcgttgaacttctctacggcgggcgggcggacacgtgttccaggtggacttgcctgccggccaggctttgagtctgaacttcctctaactgcagctgggctccctgcacacgcggtgccctggcatgatggtcctccctggccaggagcgagtcctaaggaaattcattccattgaccggactcctcccatgataggcccatggttctctgctggccttagttcttggcccttcagattccctggggatataaggcccaagcggatctccctgcagccagccagcagacagcccagggtttccgcccaaagtgccctcatgttgcagtccactttgtgcatggaagatattgaacacaatttccactgctcttcctgcagggcctccttttccagcagtcacttgctcagactgaggggtgcacctcccctgccattgacaggtcctgcgccttcaggatgggctatttcaagcccgttttaagtggctcttacacaggctcagcaacctctgtggcctgcaggatgggccttctgctgtctctttcctttcttaaaaccttaaggtctttctagagacctattcaattttctttttttttttttttttcactacaatgtcatgacaactgcagcaatttgtgttactttccaagatgacaatttgacattaattaagggaaaaaataaaaaggtgagctagatgacttaaaatgcatctcttttttgaaaaagctgtagctgggcaagtcaaagtttattttatgtgtgtaaattcccagttgagcatttttttcatttggattagcgtgagaggaaaaaatgtgaaatgtctcaaatcaaatgcttccttctaaagattagacattgcccaaccctgcccccgcccccaatcaatcagtgacagaagagaccgccatcagccaactagctttttttaaatggctgatatattcatctctaaaggccctcaaagcactgtaaaacttttaaaactttagcctttatgtcagattagagaaaccaaacaacgtgacggtacatgtgatgaaaagctctgggtttatttttctcccgcttatgaacatgtatttttatttgccgaatgaaaatcgtggtgtgttgctttgatgaatggaatttcaggctctccctgtgcacagccggtgggcaaaggtcaccttaaatgactttttctccctatctgtctgttaatccccagaccggttgcattttccagttgcttcctgggtgtctgtacatagtttgtctttgtataggagtgagtgtggtgaccgtcaatcccctaatctcccaggttctaatttaacagatgatggctgtatgaggaaaacgatgtaaatagagaatacaaattaaactggatctctgtggcctaggttttgtacatacagaaactgcatggtatttaaattattgtttgtctctgatgatgtatgcagtttctttaaaaaccaaccaaaaaaaaagtaaaaaaaa

SEQ ID NO: 14731 - DNA, 715 bp, Homo sapiens
  misc_feature (1)...(715): n = a,t,c or g
gcggccgcacgcgccaacacgcggacttcgagcggtaccgggagacccgcgcggcctcctcggagtggacagtgaagcagcagctgggctaggcagtggggctgggcctgccatgggggacccgtccacgtctccaggacatcagcctgagcctcttcgcagcctcgttttctgttgaccgagttctgcaaggggacgtagaggaaccacagcgttcttgcgcttgagaccgctgtgattttctgacattttggaggcagaaatgcctcggggaaaggcccacagatgcaactgtcatccctagtgccaaaagggaacggaaagcgattacccttgacctcaaattggaagtgttacgacgatttgaagcgggtgagaagctcagtcagatcgcaaaggccttagatcttgctatctctacagtgggcgaccattcgagatagtaaagaaaaaatcaaagcgagtttcacaaatagctactcctctgagagcctctcggttgactcgccatcgaagtgcagtgatggagagcatggagcagctgctgagcttgtggctggaagaccagagccagccaaatgcgaccttgagcgccgccatcgttcaggagaaggctgagtttgatgacttacagcgtgaacatggcgaaggttctcaaacggagaggtttcatgcaagtcaagggtggcttgtgagaatcaaggagtgccncttg

SEQ ID NO: 14732 - DNA, 2971 bp, Homo sapiens
tgaaagttcccaaacctgaacctataccagagcctaaagaaccttctccggaaaaaaattccaaaaaagaaaaggagaaggagaagacccgaccacgatctcggtcacgctccaaatcaagatcccggacgcggtcccgctctccttctcacactcgacctagacggcgccatagatcccgatcaagatcgtattcacctagaaggcgggccaagcccaagaaggcggccatctcctcgaagaagaactccgccaagaagaatgcctcctccaccaaggcatagaaggagtagatctccagtaagacgaagaagacgttcgtcagcatccttgtctgggagtagctcatcatcctcttcatctcgttcacggtcaccaccaaagaagcctcccaagaggacatccagcccccctcggaaaactcgtaggttatctccttcagcaagtcctccaaggcgaaggcacaggccatcacctcctgcaactccaccacccaaaactcggcattcccctacaccccagcagtcaaaccgtacaagaaaaagtcgtgtttctgtgtctccagggagaacttcaggtaaagtgacaaaacataaaggtactgagaaaagagaatccccttcaccagcaccgaagcctagaaaagtagagttatctgaatcggaagaagataaaggtggcaaaatggctgcagcagattctgtgcagcagagacgccaatacagacgacaaaaccagcagtcttcatctgactctggctcctcctcctcctcagaagatgaacgacccaagagatcccatgtgaagaatggtgaggttggcaggcggcggagacattccccttcccggagtgcttctccatcaccacgaaagcgccaaaaagagacttcccctcggatgcagatgggaaagcgatggcaatcgccagtgactaaaagtggtagacggaggagaagtccatccccaccacccaccagaaggcgacggtctccttctcccgcccctcctcctcgacggcgcaggactcccacaccaccaccacgacgaaggactccttctcctcccccacgtcggcgctcaccttctcctagaagatactctcctccaatacagaggagatactctccttctccacctccaaagagaagaacggcttcacctcctccccctcctaaacgaagagcatcaccatctccaccaccaaagcggcgggtctcccattctccacctcccaaacaaagaagctccccagtcaccaagagacgttcaccttcattatcatccaagcatagggaaagggtcttccccaagccgctctacccgggaggcccgatcaccacaaccaaacaaacggcattcgccctcaccacggcctcgagctcctcagacctcctcaagtcctccacccgttcgaagaggagcgtcgtcatcaccccaaagaaggcagtccccgtctccaagtactaggcccattaggagagtctccaggactccggaacctaaaaagataaaaaaggctgcttccccaagcccacagtctgtaagaagggtctcatcctcccgatctgtctccgggtctcctgagccagcagctaaaaagcccccagcacctccatcccccgtccagtctcagtcaccgtctacaaactggtcaccagctgtaccggtcaaaaaggccaaaagcccaacaccgagcccatcaccgccaagaaattcagatcaggaaggaggtggaaagaaaaagaagaaaaagaaggacaagaaacacaaaaaggataagaagcacaagaagcacaaaaaacacaagaaggaaaaggctgtggctgcagctgctgcagctgctgtgacccctgcagccattgcagctgccacaaccacattagcacaggaagagccagtggcagcgccagagccgaagaaggagactgaaagtgaagctgaagataaccttgatgatttagaaaagcacctgcgtgaaaaggccctgagatcaatgaggaaggcccaagtgtccccacagtcttagggggaaatgtttgttatgatgtaaatttatttggtttgtacgcagttcaatttcaaaattgctaaaatgtgtttgagctttagactataacatttgttgtaataattgctaggttgaagttcaacatgtaaaaaaagggggcatggatttacattgcaaaaggtgtccacagtgtattagtgacattctttcattgacagctgacataattcattgagtgaaatattttaagccaaaaaaaaattccctttttaaaaaagggggtttaaatactgttggcatttttatggttcctttaaatgccctagctattcccagaggggtttttttgtttgtttttttggttttgattttctttttgtttttctttcttcttcttatttttttcatttgagtcttagctcccatttaagttatgcttctgaccttgtatggtctgtaagcttgcccagaaataagaccactgttttgaactaccacaaaagtataaatgaatattttaatgccacaatctttcctgttgcctgtggagtctctgctgaaatgaatcaggattcgagctctaggatgagacagaaaatgaaagcatgttgtttgccaggacactgtggggtttatattgatgtgtaaccaagttgatttggaacactggactctcattctgttattctggttttgttttttttgttttgttttttttcttttgtaaaggcaatgagctagtcccagaaaggatccttcagttacatacaatttgtttaatgaaatgtcatggctctgttcatatttttgtcttgttcttccaattggtatatacaactttcagagcctcttgtatttggaaggctggaagggcccagactttggaatagtgtcttggtttcactgtttttgttttgattttttttttgttttgattttttttaaactaaagctatataaagc

SEQ ID NO: 14733 - DNA, 1137 bp, Homo sapiens
  misc_feature (1)...(1137): n = a,t,c or g
ggcggtacaacgagaaggagctgcaggctctgtcccggcagccggccgagatggcggccgagctgggcatgaggggccccaagaagggcagcgtgctgaagcggcggctggtgaagctggtggtgaatttcctcttctactttcggacagacgaggccgagcccgtcggagccctgctgctggagcgctgcagagtcgtccgggaagagcccggcaccttctccatcagcttcattgaggaccctgagaggaagtatcactttgagtgcagcagcgaggagcagtgtcaggagtggatggaggctctgcgtcgggccagctacgagttcatgcggagaagcctcatcttctacaggaacgaaatccggaaggtgacgggcaaggaccccctgggaacagttcggcatatccgaggaggccaggttccagctgagtggcttgcaggcgtgagcgcagggcacggtggtcagcgtgcagcgagacgggactggccctgcccagccatgaatcgcttggccatgcctggatctgnnnnnnnnnnnnnnnnnnnnnnnnnnnnnnnnnnnnnnnnnnnnnnnnnnnnnnnnnnnnnnnnnnnnnnnnnnnnnnnnnnnnnnnnnnnnnnnnnnnnnnnnnnnnnnnnnnnnnnnnnnnnnnnnnnnnnnnnnnnnnnnnnnnnnnnnnnnnnnnnnnnnnnnatcacacctggattttcagtgggaggtttttggtttggagacatccaaagcctgaagccaggtgggtgtgggcaggggctgcattttatgaaactgcccagcaagctgcgctccctggggccccaggatccacctaactggcctggcacctggtgccacggtgctgctgccgccaggatatgcgccttcccacaggtgccctgcctgagttgtgtgcatccacggggcctggtgagcccccaggctggtggcatggcccccctgccccgtgctgaatgaatgtacagagccagacaaagctgtgaatggcctaggggctgagtcccacaccagctgtgaattctcctgcagacaggagggccctggctgtgcacctggggaagtggttgccctggggccagggtgcttgttctgttcaaataaaggtacctcttttcac

SEQ ID NO: 14734 - DNA, 641 bp, Homo sapiens
  misc_feature (1)...(641): n = a,t,c or g
acctgcggccctnaaactgcgantggctgtgctggaccaacagatccacttggaaaaggtcctgatggctgaactcctccccctggtaagcgctgcacagccgcaggggccgccctggctggccctgtgcccgggctgtgcacagccctgctctgcgagggaggagcacgtgtccttacccatcctgcgggatgaacctgcagtctgagcctttcccatgctgccctcggcctgttcagatggggattgggggtgtcttccctggcactgtgctcggggacccagagatgcctgtgcttccctgggaaacctggtgaactggaccaggtggcctcactggctcttctcaggacaactaagcctgctggtcaggggctctttcagccttcctaaggctcctggactccagaggccagcggggagcctttcctggctccctctgttttctctcactgtagaccaaagagccgcttgtgtgatattaaagccactttagaaagnnnnnnnnnnnnnnnnnnnnnnnnnnnnnnnnnnnnnnnnngntctttactcggtgccgaattcgncancagtcgggttcaatttgccattggtttctgaaagtattcacatcatttgggataccagatagctcaaaactc

SEQ ID NO: 14735 - DNA, 1641 bp, Homo sapiens
aaaactgtcctcaatgccccatgtggggcgctgggaatgccttccctgtaacagaatgtcctcaatgcccttcaagttaacacataggtgttccctgtttaaaagttccctggaggtcagaagcacaggcacgagagaagcaggcccgttcttcccgtggcccacttcttcctttgaacaaaggctccttggacccagtggcgggaaactggccctcccacaccccctgcctgttctgggggcagcagtctttggaggagtaatgccaggcagcccctcactgagggccccagtctcccctgcatttcttccctgattgattgataggaggtggctgggctgccactgaatttgtcaacttagactcattgacaacacattaaggggctgtaattatatttattagattaacaaggcagatgtgaattttctcttctataatccagtaagtctgtgtattcgttgactcagacagacaagaagccacaaggaaacaaagaagtaatcatttgttgagagacgttattaactatgatcttccctgaagctaccgggatgggaaaggtcagtgtcttcctttgaaccctgagacaattaggggctcttgaggcctgctgtgcccctgctgccaaggcagcctcaagttcaaggagcagctaatcacccactcctgcattcagtctgtcttgcctgatgagggctacgcaggctgcctcccattggtgtgcactgtttcctttttcagctgctaaatgggctgaacaccatcggcctggggtatccctttttggggaatacgtctgtctgtctgaactcctttcccttcaaatggcactgtgataaaatctggtcataccatgctccagcactggaagtacatgaaagcacgcagtctgtgagtgcccatgaggactctcgtgctgggcccccgtggccctggctagctgtcgtaccagtcgaggaagagcaaggagaaggagcacatcacgaggaagaagaggatccacacgcggaagccagcgttgtttttaatggcctctcttatgtcttcgttgccttccttgatattttcagttgcccccacaactaactggtgaatgctgtcaatctcagcttcctgttgcaaaaccttttccgtgaatatctcttggagtctggaaatctcaaccactctcccttcgatttgcctcacttcatcaaacaagctgttcatttcaccaattagtcgctgattttcctgttcaaacatttgtatttcttctggggataactcatcttcgcctttgcccatctccccacgttccccaattccaggttgtgtttcagccaaaattttttctggacgttcttcagtggcagggttttcttcagagtcttttgaaggactctgtgaaactttctcagaagatgtggattctcttgtctttgtatttggttctggttccagcttagataatcttttcttatccaccactcttttaactcggatggctctctgttctgagtaaagtttacatactcttttcaagtaatcttcaatgaaatccaaaacagcggtcctgtgctccttcacttgctgggaatgtatctccttgtgagcttctgttcgtagttgctgaattgcttctgaacaggtcctca

SEQ ID NO: 14736 - DNA, 1104 bp, Homo sapiens
tttttttttttttttttttcctcctgcatatactttattcacacatgctaaatctcactaaacagatcacactgtcaaggaagatggctaaggagaagctagggttgtcaaggtaatccttgcttcggccctgttttgcaacaaggtaataaacagccagaacagactggagtgaagcaggttaagggtgaggagagaacacagtgcagtgcagggtgtggaaggcagctcacagtcagggaggcagcagttctagccaatcaacactttatttttcaagtcaacacctgcacagatgttagtgtccacttcctgaccctagtagggggtcccactacacttggatcacccagaggagcagtaaggaagctcctaatctcaagagagagcacatgctcaccaactccagtgctggcgccatgtactgcgggatccctgctctcctgcatcatgaaaggccgggctgaatggggcaaggatgcagtgaaggttacacagactacagtgacctaagagtgtaactactggcctgacccactgccccaggtttactctttacttcccagaccaggagcctccctaaagcttggccagtgcccacgggataggaggagctggcaaaggatggggttgagctgctaaggacaggacacagcagggaaataaagcagaaaggaacacaagacaagagaaaaattataaagtgcctcaactaaacaaccaagtgggaacatgagggccagagcagcacaggtccctgaggataggaggaaaaagaaagggccagaccaccagggcttggggcatagtggaatgagaatagagatgaggcagggaggcaagcgcaggctgtgggaaggacttccctagccctgttcacatccactaacccaaatggaaaattatttacaaatttaaaaccaatcctaggcacaggtactgcaccatgcccaggacagcaggcaggcaggcaggcagagggtggaatagctaccatccgacagccagcttccccacacactgccccaccccagagtggtaggcaaaggaggaaacagcaacactcctagccaggaagccctactgtgcctgcagctccttcct

SEQ ID NO: 14737 - DNA, 1163 bp, Homo sapiens
  misc_feature (1)...(1163): n = a,t,c or g
ttttttttttttttttacattgaaacccctttttatattaaaagttaaaatgaaagacaaatccagattgaacatagtgattgcaaaatataatgcaattttcaacaattaaaattatgaaaatatacaaaattgatgggcaacacaactaggcatttgtacattttccattatgtggagaacactacaagtttctctaccttttatctacatcaggataaatgatttaaaccaaatgtttgctttggagagtcttaacttaggatctcagtagtataaaaagcaataatttttcagtctgtaaacagtagtcgtgatttttctcctttccttttttaaatatcagtttaccacacaaaaacaaacaaaacaaaaaaacccatacaaatcaaaaacagcagcagcagcaatgggttatttgggaattctcttcaaataccaatggcatacgattgctgggagagggtgctttttactcatgtaagaatatatatatatatatatttttttaactgtacacaatttatagtacatgagggtttccaaaagaacagattgataagagatattggccatttctgcataatttcattctttttacaattatctcaaaatgtgaaagctggatctaattgaaatgctacatttagtaggaaaatcagcaaataacaaaggaagcataacctcaacataacattatttgtcattaaagccagtagaggtcccagatatctttaggcaagagactggttaggaagaccactagagtcacacactgtccctgaggaccaaggctagcccactgaacatacatatgctagattgatcatggtcagtcgatagactttttcaaagagcatttctacagtacagtacttttttgggatattcagagagacactcatttcaagaacacacgccatacacatggtaccccaccctccccngcagacacacacaaagttccatcttaaacaggccatagttttatgaaagaatatgttgtcattacatgaaattcagaattaaccacaattttccattcatcttgttcaagacagttcttccttttgggatagggtatatgaccagctgttgctactcatatcaaaaataaatttttgaaattagttgatggactaggatttccaacaagccttatt

SEQ ID NO: 14738 - DNA, 428 bp, Homo sapiens
cgatttcgaggttccaatctgggcgacacttcccagttggagagtcagcaaaagggagagggcaattccaagaagagggaaaagcttgtgcacagtgtacctcctttattcctgaagcccgggcagtgcttgacctggtcgaccagtgcccaaaacagatccagaaaggaaagttccaggttgttgccatcgaaggactggatgccacgggtaaaaccacggtgacccagtcagtggcagattcacttaaggctgtcctcttaaagtcaccaccctcttgcattggccagtggaggaagatctttgatgatgaaccaactatcattagaagagctttttactctttgggcaattatattgtggcctccgaaatagctaaagaatctgccaaatctcctgtgattgtagacaggtactggcacagcacc

SEQ ID NO: 14739 - DNA, 323 bp, Homo sapiens
ggagagttctgagaaggagaaagacacgtttgagagtaccgtacaggtgagcaagttgcaagacctcatccaccgcagcaagatggcccggtgcagaggacggtttgtctgcccagtaatcctgttcaagggcaagaagtggtgacacgcatctttttgataaggtcagaggctatgacatcaagctgcttcgatacctgtcagtcaaatacatctgtgacctgatggtggagaacaagaaggtgaagtttggcatgaatgtaacctcctctgagaaggtggacaaagcccagcgctatgccgacttcactctcctctccatc

SEQ ID NO: 14740 - DNA, 857 bp, Homo sapiens
tttttttttttttgaaggataaaataagtttttatttatagtcttatagtaaagggggaagccttaacttgcaagacaattcttcggcagtatgtacaacatactttttatttccatggaatggaatcaaacacgaactgagactacagagtatacactagaaatcagcaaatgccaggaacggagtaggaaaaagacaaagaaatgaggcctaaacacacaaaacccttcactgggatctgctgaccacagccagaaccagggctggatcacacaatggagacaggttccaggacagtaggaaaggaagtgggatgagggctgggaagggtcccgcactggggtgcgggtttagtaccaggtaaattgctcttggtatttacatacaaaatcagttggctctatttcttagaaatacacacgggaagaaagaaagatttcatcattactttatgaatctgtcgctttgcaagaccgacatcatcagaaataggtacaattcactcagattcaaatttaagtagcaggaaataaatatcaaaacatcatcactggccctcaatacaaaacctctatgccacccaaaacaccctccctgtcccaaccccaaatggccactccctggtggctgctgcttcactgctgccatctcccatacataccacgagagtgtcacacggccctccgtgagggctgggcgccgcaggcttaaacagctggctgagagaagcaggagtgaaacatgccagcgactctgtgctgcgaatctgtccccactttctttttataccacaaacttctttaaggatctggtctttcaataggagcgatacatagctttttagaaaaagggaaaa

SEQ ID NO: 14741 - DNA, 485 bp, Homo sapiens
cggaacgctggtcccggggactgagtaaggtgtctggatcggagggaggttcgggtgggcatcgggcggctggaagagctcgactcgtcccgctgggaaagcgcgagtctgagtggaaccctggacgacttgcagagcggctggcgcagtcatggcggactactggaagtcacagccaaagaaattctgtgattactgcaagtgctggatagcagacaataggcctagtgttgaatttcatgaaagaggaaagaatcataaggaaaatgtggcaaaaaggatcagtgagattaaacagaaaagcctggataaggcaaaggaagaagaaaaggcatcaaaggagtttgctgcaatggaggcagctgccctgaaagcataccaagaggatttgaaaagacttggcttagagtcagaaattttggagccaagcataacaccagtaaccagcactatcccacctacctcgacatcaaatcaacagaaag

SEQ ID NO: 14742 - DNA, 1057 bp, Homo sapiens
  misc_feature (1)...(1057): n = a,t,c or g
ctggcgtgaggtggacaccctgggccttcctggaagcctgcagttgggggcctgccctgagtctgctggggagtgggcattctctgccagggacccatgagcaggctgcatggtctagaggttgtgggcagcatggacagtcccccactcagaagtgcaaganttccaaagagcctctggcccaggcccctccccaccagggctttgcagatgtccttgaaagacccaccctagagccctttggagtgctggcccctcctgtgccctctgccctggtggaagcggcagccacaagtcctcctcagggagccccaagggggattttgtgggaccgctgcccacagatccaggtgttggaagggcagcgggtaaggttcccaagccagccccaacacccttcccacttggcacccagagggggctgtgggtggaggcctgactccaggcctctcctgcccacaccctctgggctgagttccttctttcccttggacgcccagtgctggccttggaggacggtcagctggaggatggcggtgggggaggctgtctttgtaccactgcagcatcccccacttctccacggaagccccatcccaaagctgctgcctggccccttgctgtaaagtgtgaagggggcggctgagttctcttaggacccagagccagggccctcaacttccatcctgcgggaggccttggccgggcactgccagtgtcttccagagccacacccagggaccacgggaggatcctgacccctgcagggctcaggggtcagcagggacccactgccccatctccctctccccaccaagacagccccagaaggagcagccagctgggatgggaacccaaggctgtccacatctggcttttgtgggactcagaaagggaagcagaactgagggctgggatattcctcatggtggcagcgctcatagcgaaagcctactgtaatatgcacccatctcatccacgtagtaaagtgaacttaaaaattcaatcaaatgaacaattaaataaacacctgtgtgtttaagaaaaaaaaaaaaaa

SEQ ID NO: 14743 - DNA, 523 bp, Homo sapiens
  misc_feature (1)...(523): n = a,t,c or g
gcctagacagtgtggatatggatgagacagagagggaagtggaatatttcaaaaggttctgcttggattctgctagacagacccgacaaagactgtctatcaactggtccaattttagcttgaaaaaagccacctttgctgcctgaaaccccagaccgagaagttgatgctcggattggaacagtagttcccgccaagtcctcccaccaccgcggcctcggaggcctgggccgtggccagataggagtttgcatcatccacgtggctccgttgcctctgcattgcgccctgtcctgtcatgtgtcctcaccggggtatcggccgtcactcaagctctcctgtgcccctgcgtctcaccctangcgggctgggcgnggcanggctcctttgttctccacaatctaatgtctcccgagtgtacacttgcgctgtttggtgtttatccccngactntnnccancttgtgtanganccctgnanancannaaatttaaancaagnccaaccaagtnncaaacaacca

SEQ ID NO: 14744 - DNA, 1264 bp, Homo sapiens
cctctgcgggcgctccgcggtgctgtccctgggcgcctccgtgctctcagccaaccgcctctgagagcgcccactcgagcgccccgggagccagagggcgagggtcctcgccgggacctcctgtgggcccagggggacaaaagtggctctcaatccagcacatgcacattgaagcaagttaaaggatttaatatgaagcacagaagcagatagtgccaaatagcaagcagtagttgttacacatttctggaaaagcagtgtccgtgttgttatgtacacctccaaaaaaagttcaaatgtgtaggggaattgttgtgtaaagtaaactgaactgcagggtagcagtattttaatagctattatagacctgtatttactgtatttaaatgagtaaaggaacaagcagtgacacatcactaggaagggtgagcagggcagcatttccttctcccactgctgctgagatggcagaaattagtcgaattcagtacgaaatggaatatactgaaggcattagtcagcgaatgagggtcccagaaaagttaaaagttagcaccgccaaacgctgacctggaacaaggattccaagaaggagttccaaatgctagtgtgataatgcaagttccggagaggattgttgtagcaggaaataatgaagatgtttcattttcaagaccagcagatcttgaccttattcagtcaactccctttaaacccctggcactgaaaacaccacctcgtgtacttacgctgagtgaaagaccactagattttctggatttagaaagacctcctacaacccctcaaaatgaagaaatccgagcagttggcagactaaaaagagagcggtctatgagtgaaaatgctgttcgccaaaatggacagctggtcagaaatgattctctacctgtgttgcgtggtgggtctgctgccgccacttctaatcctcatcatgacaacgtcaggtatggcatttcaaatatagatacaaccattgaaggaacgtcagatgacctgactgttgtagatgcagcttcactaagacgacagataatcaaactaaatagacgtctacaacttctggaagaggagaacaaagaacgtgctaaaagagaaatggtcatgtattcaattactgtagctttctggctgcttaatagctggctctggtttcgccgctagaggtaacatcagccctcaaaaatactgtctcaacagctggaaatataaaagatttgcaaacttcaaaaaaaaaaaaaaaaaa

SEQ ID NO: 14745 - DNA, 420 bp, Homo sapiens
  misc_feature (1)...(420): n = a,t,c or g
ggtgatgagcagggcaaggagagcaggaagagaggatgggagaagagcctagaagagggagagaggctccaaaagtttatgcatgtattaaaaacacacacacacacacacgacacacacacgagcgcgcgnnnnnnnnnnnnnnnnnnnnnnnnnnnnnnncgagaagtggaatgcataggagcaacaataggaacctggctaagaatctttttaagattttttttttcctttcttcttcccccccttctcttttctttcttattattttcccctttctctctctctctctatcttctctctctctctctctctataancaaacgcancagtgtataaattanctnggaaaagagcatcnccaaananngggggcnttagnggngggggacagcttagagtaaaggtttangtgaaaga

SEQ ID NO: 14746 - DNA, 523 bp, Homo sapiens
  misc_feature (1)...(523): n = a,t,c or g
gatacaaagtgcctaccacatgctaaccactgctgcaggcactttctatanaagaactaatttaatcatcaccataaccctatggggtagatgatatttttacaacctccattttacagatgaagaaactgaagcatagacctgcttatgtgagaagaaacgcagggagacagttcagtcactgcaatcttcatgcccatcagtttcttgtgagaagaaaacaagactggcaacgcctgcttcctcctctgagctgtcaagtaggaagtccgggctgctctgctanaaagagaagtcatgtgcaggagcactgaggcatcccagagcaaactgctatgcatccttcagctgcaagggattgaatgctatcaacanccatacaagtggagaagcagatgcttccctagctgagcctcanggttttgatgggattgctaaaacttgngnangcccggcccaaaaggnattncnnggaatngccaaaaannccccactacgggnaaaanangtntctaccccaggg

SEQ ID NO: 14747 - DNA, 677 bp, Homo sapiens
cagacataacagataacacatacaaagtgcctaccacatgctaaccactgctgcaggcactttctatagaagaactaatttaatcatcaccataaccctatggggtagatgatatttttacaacctccattttacagatgaagaaactgaagcatagacctgcttatgtgagaagaaacgcagggagacagttcagtcactgcaatcttcatgcccatcagtttcttgtgagaagaaaacaagaaaacaaggactgaaatccacacaggaaggtggcagtgaaactccacagacggacctgggacgcctcaacactcctgggccttacctcccttgctgaacgtctcaagtttctctgcgttcaggactgggcaacgcctgcttcctcctctgagctgtcaagtaggaagtccgggctgctctgctagaaagagaagtcatgtgcaggagcactgaggcatcccaggtgtgacactcttccacctagagcattccgtctctcatcctctgccatgtgacgctgggcttctttaacaaattaatcccaagtgcaagacatttatttcttctgtacctaatgacctgagcaatccttctctgctgaacctggtagtgtcatctttagaagtgaagacacaattaacacatggtcatttcttcattatatcgttgttact

SEQ ID NO: 14748 - DNA, 886 bp, Homo sapiens
  misc_feature (1)...(886): n = a,t,c or g
ggcttcagggcgcatccatgtggatataggaaaagcctctttccacagacttaggaagccccccgaccacgcggacgctcgctgggctgcactcagcaggctgcttgagtgggagctgactccaacatgccctgccctggctgggactaggcatgcttccagcccttcccgtgctctccctgctgtcaacacttgcgtacaaacctgcctagctgttgtaagttttcatcagtagcttaagtactagtagcaaaaacttaaattcattcagaaagttgccacttctgaatgagtagagcaggaaaagtaaactttactgaaacataatttgctgcaacagtcaacattgttatgctgaatgtgctctcaactgccctttgctgcatgcgccagatttattatccagtgtattcctaacagtcttttgttgtcgttgtttttaaaacaaaggtacggaccatgtgctatatataaatcgaatggcttaaactaatttgctatgatcctctaacaccgaaatttcccataaacttaagtgcctacacttaggacttttgaactttcagtcatctttttcgtggtgtctcactgaacgatgtgttaggaacatgtgttccatttggagttttggggcctgtgcacggtcaaccccaattaccaatttagttgaggctggattcgattgctcagttcacctgccacgttctctccaaggagtggggtctacgtgacctttagtcctctacctcagagccccgagtcatttctgaccaccccgttctgtgtcctcactcttgtccctgaatgggtccctgtgtggatctcagtgtgtgtgtggtttntccactcctccccgctcatgtcccacacctgccatattgaaccg

SEQ ID NO: 14749 - DNA, 989 bp, Homo sapiens
taattttgtgacctagtccttggttacagtagtgagggttcagaaacctgggagctttttgagtaaatacaaagcacaacataaaacttttatgtttgactctattcctgttcaaagctatttctgttaactaagcttatctgcgcattctagttgggaactattactacaatgttagactgctccatgtaaaactaataaatggcagtaaaaggtctcagaagcaccaagggttttgatcaggtcaggagttagaaacttaatgtcatttgtattcatttcttgaccaattgccaaagtttatatatttttaatttttctaacataccacattgtctgttgtattaataccagttcactttttgttttctgcagaaaaatccagaggaagacaactcagggagaacattgggttgggagccagggcacttgctgctcaccatctgcaccgtgcgcagtatggagcagctcctgccgttcttcaatgtgctcagtcaagtcttcaacagcaaagtcacaagccgatgtggaggacactcagggagtcctatcctctactcaaatgccttccctaataaggacatgaaactggagaaccacaaaccatgttccagcaaagccaggcaaaaaatagaagagatggtagaaaaagattttctggaagggatgataaaaacttgagcaccattgctggttccatttagcttacatgtaaatgtaattatttaaaacacacacactgctctgcgttgtatagtttttccttttttgtatgtaacagaacacatttcagattgtatttaatttaaatatttgtatataagagcaaatgtctgaatgtggcctgaatcaagtttaaatattgttggctcatactgattatggtgcctaagagagctatatatatacacatgtaaagtccattgtttttattgtcctgagttgtcttaaacctgcaaaatatacactacccattttttttttcaaaa

SEQ ID NO: 14750 - DNA, 1009 bp, Homo sapiens
ttttttttttttttttttggagttgcatacatttttttttaatccaaagaagtaagcctcctaagtattgcttagacaggtttatcagaattaagtaggcacaacactcatactttcagaaaagcatttccagccaggggagtaacgtggcactcaccagcatgatgtctgttttgccaacttgctgaagaacgagtaacctgaaatgaaggagcgagaatcccaccctcagccccccaacagcttcctcagcttctttttcttctgagtcacccctgaaacagtcgctgcatctaagaccagcctcgggctaaacccagctggcctgaaggctcaactcacatcaaacggagctgggagtcgcttttgcgtgtgtccgcagtttgaagtgtcctctccgaaggtgaagtgggggaagcaggtgcgctccgggatgaagtgcagggaggcaaactctggctgggttcctgtaaacatccatcgcagctgcaaataatcagaagccaaggccaggccatcgatttgacactgcaggcagatgaggtcttgggatgcctcttgcgttcccccttctgtgggagcaggtgccttcccaacctcagcactcagtcccaatctctcttccactctcctgggttcaaacaggaacctctctgttggcacgaagcttttgaggggagcaggtaggcctcggaggcaggggagggtctcctcctggggaaccatccccgtccagatggtgcccccaaccagctgcggcggcatgatctgggcggctggtccagggcatgggttgcggatcgtgtagggaagaggggaacagcagtcgagaccctactccaagtacgcatcaaagacgtcgagctccgagtcagcatcgtaaaggcccgagccggggtcggagagcacgccgaggtccacgagcgcctggtccatgtcctcgggcaggaagacgaggcccacgttgaggacgatgtactccatgaggaaggcgtagtacaggatcagc

SEQ ID NO: 14751 - DNA, 1527 bp, Homo sapiens
ttttttttttttcaggaatgaatcatttattcaaacaaaacaaaaagctatataattttgagaatttcattttttgagagtaaaaactacaaaattgaacagcgaggaggaaaaaattctgacaatgtgattcaacattaatcctttaaaagtcactgtaacaaatttaaacataagtgctttatttttctattcacaaaactaattataatacaccacaatgaattttgttacggttttatgtgtgtaatagagggtatacatctccatactactagctaatttgtctgtttgttcaaaagagttatttttctctttttttcttctttgagacagggtctcacggctcttggcccagggctatagcataagggcaccatcacagctcactgcaggccacaacctcctggggctcaaccgatcctcctgtctcagccttcaagtagcttggactacaggcacacatgcaccaccatacccggctaagtttttgatcttgtaagaagaacaggaccttaccctgttgcccaggctggtctcaaaactccctagcttcaagcaatcctccctaccttggcctccccaaagtgcctaagattataggcatgagccactgcacccagcccaaaaaagttattttagatcaccattagattgtagtggtctttcccatcaaacataacaggcttgtatccctgtggtgaacatagaaggcattgatttcagggaaattagcatacaataatgtaattcataccctttggcagctaaaaaaattaaagtgcttgaaagatggactctacattgatgtccagagagaggatttataacccatgtaagtaccaacaaaaatacttaaaaattagagtaagacttgcattgttaaagtttgtagatttggattgttgaggcttaaatactgcatagttctatattcactatgtcataatttgcattgctgctgcatcagaggagcttaaaaatatttctaccttctatggcagaataaatttagagagcatgattctactaatttctacatttaacaagttttcttaacttgttaaaggaatgttagcaagtcaacattccttcccatctcatattaccaactcactcccagcactcagtttaatgatatgttttggtaagtgcttaatagatgattcatctctaaagatgagtagagttcatcagctgtatcatatcatgaaaagcacaaaaagtcagctgaactagcttttccgcatcagtctcgggacaggatttccaggctgaacaggccacaacaaacctgtcatctctgatatggtagaaaaatccataaccattgtgtaccatgggaactaccactccctggactcgtaaatagccaaccagacttgttgagagaacaaaatttccacctcctccgcttttggaaaaaagtgggtccgtaaagagttctggaacaggaagaccttcctcttttgctatgagtaagagacctaaaaggtgacgatcaaatccttttccagctgaacaatc

SEQ ID NO: 14752 - DNA, 2092 bp, Homo sapiens
gctgtatgctgcagctgcaggcgtgttggccggcgtggagagccgccagggctctatcaaggggctggtgtactccagcaacttccagaacgtgaagcagctgtacgcgctggtgtgcgaaacgcagcgctactccgccgtgctggatgccgtgatctccagcgccggcctcctcagtgcgaagaagctgcagccgcacctggccaaggatggcctgatatgaaggagtcacgacctcccgcctcccggagctgcccagtggctgccttgtccttcaagtgcaggagctggttcaaatgtcaggaatggaagccactgtgaccatcccaatctggcaaaacaagccacatggggctgctcgaagtgtagtaagaagaattgggaccaacctacccttgaagccgtgtgcccgggcgtcctttgagaccctgcccaacatctctgacctgtgtttgagagatgtgcccccagtccctaccctggctgacatcgcctggattgctgcggatgaagaggagacatatgcccgggtcaggagtgatacgcgccccctgaggcacacctggaaacccagccctctgattgtcatgcagcgcaatgcctctgttcccaacctgcgtgggtccgaggagaggcttctggccctgaagaagccagctctgccagccctaagccgcactactgagctgcaggacgagctgagccacttgcgcagccagattgcaaagatagtggcagctgatgcagcttcggcttcattaacgccagatttcttatctccaggaagttcaaatgtctcttctcccttaccttgttttggatcctcattccactctacaacttcctttgtcattagtgacatcaccgaggagacagaggtggaggtccctgagcttccatcagtccccctgctttgttctgccagccctgaatgttgcaaaccagaacacaaagctgcctgcagttcgtctgaagaggatgactgcgtctctttgtccaaggccagcagctttgcagacatgatgggtatcctgaaggactttcaccgaatgaaacagagtcaagatctgaaccggagtttattgaaggaggaagaccctgctgtgcttatctctgaggtcctaaggaggaagtttgctctaaaggaagaagatatcagtagaaaaggaaattgacaaccctcagctctgcaaactcagtctcatgctcctggaataccttcaatagctgccttcctcaccgcagatgtttctgcctcttaaggatagatcttctgcaacagtcttgctgacaagctaggagcttggaactgaaagagaagagctggattattatatttcccagacttcaaaccctaggcagaagctaaggcttgtgatttgacctgagacatttgtttcaggtaatcgtgtagaatgaagtatcttagtttaaagggtaagagagaagttgtttctggtttttccttgcccctgtgtgaaaataggtcctaaatgactgacttcactgcattagaccctatagctggtctcacaagacactttgtgcccagctgtcactcactctcagcagcttccttgcagcagagcagggctgaggggaaggggctatgaatgtttgtatacgtgttcacagggcacggaaaatcttatgctgctccgtcataaacctacaccaatgcccagcaatcaccctcctcacttccttgtctagatgtagaggtcaggctgctgaaccagccaacacatgggctactgctgggaagcctgggctgttttttttcttaaacacattttatattactgaacaaccaaatctaccctccacggccctgaggccttatcagttccactgattaaaaactttctcttccacggactttaagcccggtaggaaagagagaggaggagggggaaagagcaaaccatctttcttccaggcccttgactgctcctttgggctgggccaaggtttgtatgtaccacaccatgcatgagctcagatgccctcaggtccctttctctatggtatgtatactgcttgtgtttgggttgaagcactacctgacattaaaggaaggacttggagagag

SEQ ID NO: 14753 - DNA, 1289 bp, Homo sapiens
ttagctttgatacatgcatatatttaataatgaaacaattcatcaacagcaaaaagaaagtagaaaaattcgtaagacctcagggctgtggaagagaatgggacatcaaggaaaaaagatatatatagcaaccaacccagaaggctgcatgatgagtgaagcaaaggccaagtttggctaagatagtattatatgctctgaaaagagaatggctggatagggtacccacttatgtgactgcttactagcaggcagccttactgtatgcctcatggaatggaggcaaaaagccagggaaaggtgggaggggagaaggaagagaactgtataaaacccagggtaaacaaatgagtggggcagaattacagagagaggactctaaagtccttttgtttccttggaaagtcctaaaataaaccttaagtttttaactatgtcagtcaaattcaatgaacacataatgagtagcactaggcactgtaaaggaatgatagggggaataatttataaaaataaaggcaatgcacatggatcctgctctcaaggagcttacaacttatacggaaagacaagattccacacaaaaacaactgcaaaccatatttacatagtaacatacataaaaataaatatacatataaatagacatatgaataaccaacatatgaaaactaaggaatattgtgttaataactgcttagcagtacctaagtctgttactaaagaaaaaatttttggacttttaagtataattagtggagagtagggcatgtgcaaaggtatggaactaggaataaatatgtcacattcagtaagtagattagcctgattggagtagaaagtctaggtctagttaagaagggagtttgatgaaacagtagaagtctatctggtgaaagacactacaatgttagatctggcccctaaaataaaatgaacagggaacaaatgttttctttaggtaataataagtggccacatgtccctgaccaacttcactgctcttaaaagttttgaagttacactaagagatagaagctaataataggatagtagagaagtactcagtgctcttgggcaagtagaggaaactgccttctacaagaattcttaggaagtggcaagcagacacccaaaggcaaggaagaaaaaaactcaatgaaattccgaggcagaggatctatcaaccaaaggccaactagatctaggtaattgcaagtgttcaaatagaatgtctttgaccctaattcttagtgggaagtggattgtatatgcttacgaaattattt

SEQ ID NO: 14754 - DNA, 746 bp, Homo sapiens
tgttaaaggtgtctacaaagaaaaggataatgaagagttgacaattagttgcccagtgcctgcagatgagcagacagaatgcacttctgcccagcaactcaatatgagtaccagttctccatgtgctgctgagcttactgcattaagcacaactcagcaagaaaaggatctaatagaagattcctctgttcagaaggatggtctcaatcagacaactataccagtttctcctccaagtactacaaagccatcgagggcaagtactgcttcaccatgtaataataacataaatgcagctacagctgtggctctacaggaaccccgaaagttaagttatgctgaagtgtgccagaagccccctaaagagccatcttcagttcttgtgcagccactacgggaacttcgctccaatgtggtgtctcccaccaaaaatgaagacaatggagctcctgagaactccgttgagaaaccacatgagaagccagaaggcaagggctagtaaggattattctggcttccgaggcaatataatccccaggggagcagcaggaaaaatcacggaacagagacgccagttttagccatagggctatacctcagggagtgactcgacgtaatggcaaagagcaatatgtgccacccagatcaccaaagttaaaaaacaacaaaacttatttcaaaaacttcactctcttcccatttaaacttggaactgtggctattattgaactgttttgggaggggag

SEQ ID NO: 14755 - DNA, 510 bp, Homo sapiens
cttactcgatccttcttgtgtgacactgagagagaaaagttttggaaaattggaaacaaggaaagagatggagaatatggagcttgtttctttcctggaagatgttctgggggccagcaacctctgatatattgtgctcgcccaggctctaggatgtgggaagtgaactttgatggagaagttataagtacacatcagttcaagaaactcctctcgttgccacctctccctgtgattactctaagatcagaacctcagtatgatcatacagctggatcctcccagtctttgtctttccccaaactcttacatcttagtgagcattgtgtgctgacttggacagaaagaggaatttatattttcattcctcagaatgttcaagttcttctttggagtgaagtcaaagatattcaggatgtggctgtctgtaggaatgaattgttctgtttgcacctaaatgggaaagtctcacatctctccctgatatctgtggagcgctgtgtggaacgc

SEQ ID NO: 14756 - DNA, 1462 bp, Homo sapiens
  misc_feature (1)...(1462): n = a,t,c or g
tttttttttgccttgaatgaaaaccatgaatttaatgtgacattgggggagcctcatccttccctttttaccacccacccatccagcctgttgtgagttgggtgagggctgcccccagtctccgtcctgcggctctgggtgccatcctgttcctttgagctcagtcagcctcctgggctcgtctctctgtgaatctccttcttgcgtattcatatagtgcttgcttgcgctcctgcaggctctcctgccgggcccaggaagacttggcaaatgttagggctgttggctgaggggtcaccgggccagagctgggaaacttggaggcagaggctgtgggtagggactgagttcccttggtgatgtcttcaggcatgaaaagctacggccccctcaagcagattagtgatagtcaagtctacacagccagtcttggccaggtctctctggatgacacccaatggcacatggggcaaaacttccttgactctctgagccagagttgccagttgcacatcaggagaaggaccaggggagggagggaaagaagactgggctgactgggggcgcaatctggggtgtctttgtcgcttcatgtgctctgctttgtcagctggagtgagccgtgtccctgtctggcccaattccttggccaccagctgttgtacacggagtgcaaactcctcattcgcttcccctagttggcgatgaacaggacgaagccaccttacttgatacaccgtgaaagggacgaaaagtgaccacagcagttctgagacccaggaggcatctgacaccgtcacagagaccaggggtctctgaacttgcagggtaagaggttgtaccacatcttggatagaaaatggccaggaactgaagcgcaggagcccctcccggccattggtggcctcttcctcagggaatagcagcagaggagtggggggaagcctcgtggaagcacagaatctcttgagtgactccaccaactccccccgcccattcatctccatgaagccccgagaccagcacacaaagctggggggactattgagtagaggggtgctacaggtggtaagcaaattgactatgttgtggtcgaaaggtgtcacatggttggaaatgaggaccctgacactgtgatcccggagtccggagtcctcctgccgggccacgagccctagcaccgcacacatggtccgcactacgaatctgcgaaggacgctgtctggcagcgcgcagctgaccaggaagacgtggatcccgagaaagaggcgcaggacgaggaggcagaacccgactggcgcgtagagcagcagcacgagcagtaggaagcagtcacccggaagccggtgcgagtcaaagaccgcttccgccccggccctgagggaagctccataactgctgcttcaggaaccgcncngccgtcgccgccgccgccattttcgcgcccaggcgcaggggctct

SEQ ID NO: 14757 - DNA, 3081 bp, Homo sapiens
ggtcgaccagaataaatcaaggaccatcaaccaaaatgggaggtccaggactcaggaggacttaccagtttcaccagaggagaagctagaacttggtgaggtttcactgggcccctgctagtaccttagctagggttttaggcaactccttcagggtcctgagtcttctctgtggccccacgtgtttgggcaccagattattgttgaagagtcaaacactgtaaaatatttgaagagatttattctgagccaaatatgagtgaccgtggcctgtgacagagacctcaggagatcctgagaacatgtgcccagggtgatctggcaagcagcttcgttttcagacatttttagggaggcattgggacatcattccaattactttggagaaatacattggtttgatccagaaagctgggacaatctgaagcgggtgcttccaggctgtaggtaaatttaaacattttctggttgacaattggttgagcttagctgaagacctgggatcaatggaaaggaatgttcaggttaagataaaggattgtggaggccaagttttattgtgcaggggaagctctcagcagacttcagagagagagagagcaggttgtaaactgtttcttatcgacttaaaaggggtgcctggctcttagttgatgatctcctggactggaaagaaaggaaggaaaacaaaggggaaaggggcttctttataggatgtggattctcctcacaagagactctgccagggcaagttcaaggtagggcaaagaaatatatttgggggttaaatatttttgcctcgtcttgtaatgttatgccagagtcagattaaaaataagtcatgatatacagggtcaaataaaacccatctgatgagaatttatggtttgtagggcatgactccctagaccccttaggtaggaatttgggcaagataaaaaaatcagagcttagtcctcgtgtggaggtgggtgccggccacagggtctcccacacgccagtcagaaccctgcccctgtgctttctggtcatctctgcttctgtcacatcctttttttctctataccaattttaaatgaaattccagggaaataaatggaaacagacactgggcttttgagccagatgtcagaaggcagtggcctccactttgtatcactgggatgcagtgaatagacctcagggtgtaggtgagagcggttgggtgttacataatggggaggcatcagggctgaggatattttattctccaggctgtggtgcagcttttgagggtgctttgcaaggcataaggatggccttattaggcgcacactccaggagaagcgatgaaggaagaggaggaggagaccctggttagtggagcagaccagactccaccccctcaccttggggatgtaaccctgtcccttgcatgtgaaaagcaaggcttcggagactcagctcccctcgcccctacctgtcgcctggtcagccccagaggcccccttccccagctcctgtatggctgctactagggccctgctgcccgagcctcgatagacatggtgagccgcagagaaccgcagctcgcctcaggtcccactcctgactagcattgtactgcagtcccagggagccctgccgaggagagagctggacgttcagccagcgacactgggcctggtcacaggcgagcaccacggtgccctcggggttgctgtaggtgcactggctccgggctgccctttcctgcacagccagatcccagctgccccctgccttgctttcgtccggccacgtgacctggaagcccaagtggtcccgggtgacggacaccagctgcttctcattcaaggcgtgcaccacctggcctttgaggtaggcagggcagcgcagtaggtctggatgttcaggagccgatcggtgtactgctgcagccagttgaagaggtaggccaggtgcagtcgcactgccaggggttaccgtgcagggccaggttgaacaggttgtagttggtgtcgaagatgcctccggaagtgtggtcagctggttcttggagaggctgagcagctccagcttggacaggttctggaagagggctgggtgcagcgccgtaaggttgttgctgcccaggtagagtttgaccaactcctccaggtctctgaagatgccagctgggaggtgggtaatggcattgtatgagagcatgagggaacgcaggttggacaggtgggcaaaggtgccctcagtgacagtctccagctggttatgggtcagagacaggccaaccaggcatggggtgtgggcaaagaggccggcaggcaggacccgaagcatgttccactgcaagctcaggaaggtcagattacccagggaggcaaagatggagagcggcaggtgcgtgatggcgttgcgttgcagccacagcctctctaggcagaagagctgggagaacacctgagggggcagctccgagatgttgttgctgtccaggaagagctcctgcaggctgcccagtttgccaaacacaccctgggggagaccagagagcgcgttgttgctcagcttcagggtctgcaggctggtgagtgggtggaacagctcctccgggagctgggccaggaggttctgggccaggttgagtgtcttcagatgggtcagaggctggaagagcctcctgggcagggcctggagctggttcccctgcaggtggagggactccagggcagccaggtgctggaaaagaccctcgggcagagcctccagcatgttgaagttgagggtgagcttgcccagcgaggtcaggttggagaagatgttggtgctgaggttcaagaagctactgcctgtgacctccaggtcctccagcctgggcagccccccaaaggcatccggcctaaactggcagagctgagtgtcgaggaagaccaccttggtcaagttggggttactgccaaaagctctggtttccaatgtggtgaacgaggtctccacaaagatgatgtttttcgtatatggcgggatgtccagcgggacggtggcaagctcctcatctgagcagaacacctcctggacgaagcagtcgcaccccatcggctg

SEQ ID NO: 14758 - DNA, 396 bp, Homo sapiens
gccctccgggagtcttgcagttcccctggcagtcctggtgctgttgctttggggtgctccctggacgcacgggcggcggagcaacgttcgcgtcatcacggacgagaactggagagaactgctggaaggagactggatgatagaattttatgccccgtggtgccctgcttgtcaaaatcttcaaccggaatgggaaagttttgctgaatggggagaagatcttgaggttaatattgcgaaagtagatgtcacagagcagccaggactgagtggacggtttatcataactgctcttcctactatttatcattgtaaagatggtgaatttaggcgctatcagggtccaaggactaagaaggacttcataaactttataagtgataaagagtggaagag

SEQ ID NO: 14759 - DNA, 1606 bp, Homo sapiens
ctttttttctcttttttttttcttcaaaaatttattatttattattaaaaatctcaaacaaacacagacatatggggataccagcattcccctcctggataccaggcagcttcagccctggcaggcacgatagaagaaaatacttgttacacatcctcatcaactctcagagggatcctgagccgtagatggaggaaacgcagacggagtaagcacaggtaaaagatctccccaggagctgacacgggcacaacgatacaaatccctgtggaaacagatgctggcgtgggctgcagcttcctgcccacatcccactgattttgggtcacaccccccatacctgccgtgccggcgggctgtgagcacagcatgctgcatgtgcccatctggacagcacaagtgacaatgcacatggcgaggccgtttaaggacaggctgagtgatacggggccagcgatgagcctcctctggagacccccgagcaaggatcaccatagagaacttttcttcctttggtttcttgttccagctgaaggggatgggatggtacgcctgtgagaagctacaggccaggttggtcaactggggacaagggagttcatgggcacactttgagcacataaaaaaaaatgaggtaagacaaaagacccatcaatcacaaaacttaaaaactgagaataatagagtcaaaaggggcccagggagaagggaggacaggagcagtgggtaggaagagcccaggggaatcattaggtaggaactggataggaacacaaagtagtggagagtggccttagctttaccatcttacatttgctcggcccacgccctaagttcagatccgtgtggtgggacaggcagaagtaatactcaccggggcaaagacaaaaccaggtcgagggtccaaaggtgacttctcttttcccttaaggaccagatccctggcatccatgagaagggctgtgcccagcttttgttccattctccaccagtacctgttcacaaaaggggaaaatatgcagaagacttgaattacacgaaagtataaatgtcagtagctgtgtaagagcaatcatagagggagaaggagtcctaaaaagaaataggcattacataatcaggatggagaccctcaaagagggataaagaaacccatgaaggagaaaaatggtgaagaataaagacaatgagaggagcaaaggcatgaaatccatgaagctgcttcaagacttaaggagaacaaggaattttaactcaccaggaaatgacctgtcttacgccataaggtttgaactacctcagtgcggtcagccttgctgggcagttcacttaaggaaaaagctgacactactacatcaaactgcaccttgggtgatacaggtagaaactgtctgaaaaagacacctggaatataaggctccccagattctgaaccacctttcagtagtttttctgccaaaaccaacatggcagctgatctgtccacacacatatattcacgtaggctctggccccaaatactgtgagcagccctaagatggcaaaattattataaatcaccaattcccatgaccaagagtcatctctacaagaggcccatttacac

SEQ ID NO: 14760 - DNA, 624 bp, Homo sapiens
  misc_feature (1)...(624): n = a,t,c or g
ggtgagtgagacctggagtacagacgtcttgggaagtgactttgaccctaatattgatgaagatcgcttgcaagaaattgcaggtgctgcagcagagaacatgttaggcagtttgctgtgcctcccaggttcagggtcagtgcttcttgacccctgcactggttctaccatatcagagacaacaagtgaagcttggagtgtagaggtattgccaagtgactcagaggccccagacctaaagcaggaggagcgtctgcaagaactggagagctgttctggactgggtagcacatctgatgatacggatgtcagggaggtcagttcccgccccagcacaccaggcctcagtgttgtgtccggcataagtgcaacctctgagggatattcccaataagattgaagacctgagatctgagtgcagctctgattttggggggtaaagattctgtcactagtccagacatggatgaaataactcacggtgcccaccagcttgacctctcctccttctcagtcagagtctcttgctggccattgttttgatccactgtntttcacatggaagggggnttctggttgtgggttaagggccaaaggttcattatggttagggcctggnattcc

SEQ ID NO: 14761 - DNA, 1385 bp, Homo sapiens
tcagacaagcactggacgtggcggccattttgttttggacaccgagcaggagctggcggccgctgcagacgaaaggcaggaaagggcaggccgggtgagcagacggatcggccgactagacagccaaccagcaacaacgaactgagctcgcatactaccgcttacgcatctaaccaaccgcccatctagctaacccgagcccctccaccgtcaactcaggttccggccggtccccggcccgcctggccggagccgtggtggcagccccgggaggagcactggcgtctgtttccttcgattctcgggattcgaagatggctgcacagtcagcgccgaaaggttgtgctaaaaagcaccaccaagatgtctctaaatgagcgctttactaatatgcttgaagaacaaacaggccgacgccagtgaatattcgggcttcgatgcagcaacaacagcagctagccagttgccaggaaacagaagactgggcccagcagatggagaatagacactctgtccaggcagcatttaaaacttaaggcagagcttaaagcagcgcctgggtaagagtaacatccaggcacggttaggccgacccataggggccctggccaggggagcaatcggaggacgaggcctacccataatccagagaggcttgcccagaggaggactacgtgggggacgtgccaccagaaccctacttaggggcgggatgtcactccgaggtcaaaacctgctccgaggtggacgagccgtagctccccgaatgggcttaagaagaggtggtgttcgaggtcgtggaggtcctgggagagggggcctagggcgtggagctatgggtcgtggcggaatcggtggtagaggtcggggtatgataggtcggggaagagggggctttggaggccgaggccgaggcccgtggaacgagggagaggtgcccttgctcgccctgtattgaccaaggagcagctggacaaccaattggatgcatatatgtcgaaaacaaaaggacacctggatgctgagttggatgcctacatggcgcagacagatcccgaaaccaatgattgaagcctgcccatcctcccatgagagactcttgttagtcaacacatctgtaaataaccttgagataacagatgagaagaaatctgattgatgctggatggacctatcacaataggctgtggacttacttgccaccagcttgtgcatttagtgtgttccttttactttttgatactgtgttgtatgaaacccttttgtcctttgatttggttttttgtttttgtttttttaggggggagggggggtttcccctcctttgcccagacttctctttgaacacaaatgcattagccttgtggctagaacaccctcttcct

SEQ ID NO: 14762 - DNA, 2312 bp, Homo sapiens
gtgaacaaatatatttagatatatttaaaagaattaaaaaaaacatttcacaaaacatttgttgccataggaattatttttagcaataaatgcccacatcaaaatttaaacatttttcaaagtatgattatctgtactaagtaatgcaacaaattatgtaaacagagtcagatacatttccctgtaggagtcacttccttcccgggattaaagctgtcccagacatctttccaggggaccaattaagaaactgctattttcagagcaacaaaaataaaagcttttatttgttcatttgaatataaaacaggcgttatcacagatgtacaaagcgtactggtggtttaacatacaagaaggttgctgtcctttgcacataaaaattttgtttgaaactgtggctggttgagtacatgagtttctctaaccagtcaccacactctgaaataacgctgctaacattcaactgataaaagggaccatctcccttgggtaaagtgtcaagcaggattaaatatatataataaacaagcaccatgaggaatctgctcctgtttgattaggtctgtgtttatatgttcactgtgtaccctctttttgtgcaagttgattacacggttttgtctgacttcaaaagcacaaggtcacaagacaaacattttttacaatctcatgaatgatttatctacagtacaattttgaatacagaatgacccttctttattgctgaaactggtggtactaagtgtctcctttcctttctcttgcacaaccaaatttcaatctcagtccaccaactcttttgagcctaaactctaactaatcagagttgacaggatgcagaagaggcggctgctaactgccctcacaactgcactgcagcgtccacactccttgaatgtagagttgatctggtgacagttgaaattatgtttgaagtgacatctacatttgttttgcttcctgacttcagctggacctcaaagctgtcctgcacactgcagctaatgtttcatagtcagtgcctgcctgaagccccaaacctacctccctttcaacaaggtgggtgggtgtaggaaaatgtcttttttccccccaatgtgtggtggttccccccttaggaagcagagacctaggaatgtgcatcctgaagcatgtggagaaatattcacacacagcaatgaggtcaaacaatatttcaagaatcaaatggtttgtggagatggaaggatgcaccacatatgccagacacatttttttaaaatgtgcccacttttttttttttttttttttaacaacaatcagccttggatctcagaagtcaaacaaaactcttttagcaaaaggcttactgctgactgcatatagcaaaggcagagaaagacgctgcccacaacataatgaaagatcatctacattttgcccagcatcaatcttagtcatgcatatctagcaccgagagccactgcgtggtcacactggggcagttacagaacacatctttctcggagtgcagatgctccttcttggttggacaccgtgggccaattcaatttagaagtgcacaggtgagctctgagaaggtgtggccaggagctgccagggcagaaactggggcgcactcgtccacaggcggcaaacgacgcagctggaggacttcttgcttcagccggagctctggcatgaacccccggggaactgtgctcactgagcgagggagccccagaggctcacacagagcgggctgggtcttaagacgaggggacgatcaccgatgtgagttccggacactttgtccactccacattggccatcagagggggaatcaatgcaacccagtgcgaatgaccacagaatcgcattccttttcgtagcaaggaccaaaaaaagatgacattaacaaaaatgatgaaaaacattgtgcaatgaattcttgcagctaagaaaacagtgctatttgccaacctaaagcccctcagtatcatcagcacacgctggcataaacacattcactgttgtcccacagcaaagaaaaaaatagtgcacattgagctttgaattcttttgccatccttgagatggcaataatttcacttgctggtctctggttctagaagaaacttttagacagggctcctgcggtctgcgactgctggcaacagcagagtgtatgtgagtacggggggcacaccatgcaagtgacaagttctgcatcttaaactttaaaatctcctttgttcattagtgaatttatatttcatatatatatatttgttgtgatactatccacgcaagataatacaacacttttt

SEQ ID NO: 14763 - DNA, 2273 bp, Homo sapiens
  misc_feature (1)...(2273): n = a,t,c or g
gaaacatggagaaagcccattgacatgttcaacaaagctattaacctggccaaatcggaaatggagatggcccatctgtattcactttgcgatgccgcccatgcccagacagaagttgcaaagaaatacggattaaaaccaccaacattataaaacagggggaaagcagactgaccctctttttaaaagtttaccccctcttcaactgaaccctaaagacactgtcatgaactgtgttgaatggtggaaatcagtatttctgtttgtggtgttgttatttgttacatctgtttcatgtctaggtgttgtgggtgtggctgttgaaggaagtttgcagtcttgcagcttttattccctgtgcaacaaaagattagaacatgttaaagggatttttaaataaagttgcaaagagtacaaatgataattggccatgcaaataaaaactgatttgttgattttttttttaaggggggttggcagttgattatgttctggatgattccgtctatatatgtgtgaataatgtaagtattttacagcttgttgatttttaaattaacgtagtaaatgctgtaaaatagatttatattcagttaaccgctttcagttgattttttgaaagaaacaaaggttaaatgggggattaaagtaaaattgagagaccctttaaaccattgtcagcatgcacaatgcctctgattctgcagttttagaaacttggtggcacttattaatcctcttggcccctttccactctaatggatagtgtacattcttcttaaagtccacaacagcagattttcttgcagtaaattatgcagatgcaaaatattctaattgatatatgtgttggaagactgagtattgatgggggagtggaccagacaaagaggtaagatgaaacagtagtgtgtttataattgtctgtgactattttctataataattagtactatttaatggtgagcttttaaaaatgtaggatagagggtacagtggcactgtatatactatttatagtctcagctactagggaggctgaggcaagaggcttgagaccaggagctcgaggctgtaatgtggccntggatggattgcacccgcgtatagcccactgcactnccagccngggcaatatagcaagaccccatcctttaaaaaattttagaacttttttaaaatcaaagtgcagattgcttgtatgtaaaacccaaataaaggtagagtaagtgtgatatatgggagtattaaaatagcttaaaatttctcgtgaaggacatgtggctaaagggtcaaaaaggatgtaagacttggagccagagcatagtatttcctgaaataacaagtttagtgctttaactatggctacatgtgcttaaggaattttaagccacttatttttgaagatgctgaggacatgtagagtgctttttgtagtgagctaaccttgatctctaaggactaactacccaggtccaggtcttcactaggggtactgacagtgtttaagctttactccacctccttacttagaaatcactttacgatttatttccattttccacttttatagaccatccttttgcttatatgctagatttttctggtgagggaagggttgtgttcttcaggggtcttttgttttgaaatactcaggatggggagaggtttatttaagaacgaattataattatggtttacactgttgggagtaaaaggagcatttttacaccccttaagggtgctttaattctgttgaaaccaaaaagatttgtctacaaatgctatcttttttagaaactattagaaatgactccctttcaaagtcaatctttggaaaatattgaggaggtcactaattagttggtgcagttaatataattcaagatgatttggatgatgggaagtttgagaccgctgcattttgtttttaaattatgcaccttctgataacccccaaatacagaaatgttctacatctctgaatgacctctgactttaaaaaagtttttatttgcatggctgtatttacattaacactgacattttcttctactcttctcccttctttcatcttggggttgggtagagaaacacaaaggaaactgaagcatgtgccattctatactgtcattccaaattctcatggactattgcctgttgtgaaaatgtttgaaactgcactgaaagctgcatctgtctgtatctttcttttgtaaatgacctcacatgtaaattcaccaaataaatattacattcaaaaaaaaaaaaaa

SEQ ID NO: 14764 - DNA, 641 bp, Homo sapiens
tttttttttttccacatagaatatgcttcttgaattttattatttaaagagcaaaataaaaggaagtaatgcacattcaccaaagtcaagttttccgttaaatagaagaaaaatctaatactttgtaataaagaccatccagctaaaaacagatcattaaaacaacaatagcgatttgactctgtattttatttcaatgagcacacttcgttcattgtctgcaggaaaactaggctaggtctcaatagacaacagtcacagttactgagcaagtaaatactccacacttgcatgccctcctttatttcttgatgtcttcagtctcatctggctctctctcttgatgctctctttcccacctcatttcttttaactcttgtctgtacttccgttcgatgaaccgcttctgatgggccatctggggaaaattatatttttcaagcgcatccattgctgctcccatttccgcttgctgaatacttggtcctttcccacagcctattctttctcccttgaaataaacagccacagtgtaggttcgggcatgggatgggcccactgtctgcagagtcttgtacagaggaatgtctggctcttttccttctgtcctaagtgtcaagcaacactgctgaagctgggat

SEQ ID NO: 14765 - DNA, 493 bp, Homo sapiens
gaatgaagtttgagaatattcatactaataataaacccggcttacttggagagcccccagctgtggtacttcagactgcactagggatagggtcagtgcttccattgaaaaaggagttgggacatcatcatggagaagcacataaaacatctagcctgattccaactcaaacaacgataacagctggaatgggcatgttaccattctttccaaatcagcacattgctggacaggctgggccagggcacagtaatactcaggagaaacagccagccacggtgggaatggcagaaggaaatttctcagggtcgcagccttatcttcagagctttccaaaccttgctgctggaagcttgctggtgggacacataagcagcagcaaagccagccaaaaggcacagagataagttcaggggctgcctcttaaggaatcaaacttcactcttgggagaaccaccaaaagaaattcggcttcagtaaaatccatacttga

SEQ ID NO: 14766 - DNA, 620 bp, Homo sapiens
ttttttttttttttttgaagtatgcagtgtttttattgaaaagatgtataacttttaacaaaatatgtaacactattacccagtcaagacaaccactttcattttattgaccttccagttcttgtacatattaaacagacaaatcactgttacataccataatgagcagcagctcaattacccattcccaaaccatgcaattccaccccagccgccccaaattttaaatccagaagacaaacctagaaaagcagcaagataaatatttacaaacattgtagaaaaacagcagtatttcaagttttgttaaattctttccttcagacataatgtagacatagaggaggaacagctgagagtctctgcatcacagaaagagaaacctgagcaaaaacaaaaccatgctttctaaactttccagtgacaccaaaagggagacactagcaactaagtgtacttcagaagtctcaaattctcattagttgactttcagttatcaatgtcagcaccatgctgcagtttataatcactaacgcaaacactgctctctttgatattcttgcaatgttttcatttgaaaaaacctacagaaagaactctgcttacaccaaagcaaagta

SEQ ID NO: 14767 - DNA, 514 bp, Homo sapiens
  misc_feature (1)...(514): n = a,t,c or g
gggaaaagaatgatttggcttattttaagctttaagcataacatactgacagagcttatgaatatatatacaataaaatttatataataatataaatatataactagcttacacatcttaaaatttagatccagcacacaaaataacattttaaagctaaatactttggattttatgcatgagggaactacaaactgcacactttccacaagggagggaataaatacttttttctgtgtccttggagtgtgggtgggattcgtggatacatttctctggttcactatttcaatgatatgaaggagcctcatgttgcagcacagaagatttttcatcgttggaagttaaggttagttcaccttcattgattcctccctacactggactaaagcatttaatctaggaaacacttaggtctctatatagcttgtccataatctctatggcataggaaagggggcttttctaggaacctgttcagcatattgtgnaaatatctcctattatgcaactg

SEQ ID NO: 14768 - DNA, 468 bp, Homo sapiens
  misc_feature (1)...(468): n = a,t,c or g
gagtttttgaattccaaaccttatactgaataactactgaatccctttactgttaaatttttttccaaactttcaagatatatttagttgtgtttaactgctacttggagctcagaagccactttatcagttttcctcactggttggatagcctatcagtttatggaaggatataacttccgtaagttacatccttatggaagctactgaataaaagaagggggtatgcaccccctagtttgccaagattgagaaatagcctcttcactggtatgcaaacagatttgattttgcatcctatcatttaaaaagaaattatgtctgcaccccaacataggcatacttaagtaatatacatactcctggctaacatgtatactagaaaacaaaaagatgttagaaaaataaaagtataaagacnaatcatactgtcccatatccagngcttttccctttggaaatgatggt

SEQ ID NO: 14769 - DNA, 1512 bp, Homo sapiens
  misc_feature (1)...(1512): n = a,t,c or g
gccaaagtactttgttccccccgacaagggctagaatgtgttcacagaagaaaaagaaccacgtggactacactaaactctacagggccttgtgatttttccattccgtagacctcctgggcattggagcagagcaagactttctataagccagattggtttgacatcgtggagtctgaagtcaagtgctgtaaggaagctgtgtgtgtcattgacatgtcctctttcacagagtttgagataacaaccactggggatcaggcattagaagttctacagtacctcttctccaatgacctggatgtgcctgtgggccacattgtgcatactggcatgctcaacgagggtggagggtatgaaaatgactgcagcatagcacgactgaacaagcgcagtttcttcatgatctctccaaccgaccagcaggtccactgttgggcctggcttaagaaacacatgccgaaagacagcaacctgctcctggaggacgtcacctggaagtacacagccctcaatctgattggccctcgagctgtggatgtgcttgtcttgagttgtcctatgcccctatgactccagaccacttcccaagcctcttttgcaaggagatgagcgtgggctatncaaatgggatccgggtgatgagcatgacgcacacaggaganccaggattcatgctctacatccccatagagtacgcccctgcatgtatacaatgaagtgatgagtgttggccagaaatacggaatccggaatgctgggtattacgctcttcgcagtctccgaattgagaagttttttgccttctggggtcaggatataaataacctcaccacgcccctggaatgtggacgagagtctcgggtgaaattagagaagggcatggatttcattggtcgcgatgccctcctgcagcagaagcagaatggagtgtataaacgcctcaccatgttcatcctggacgaccatgattcagacctagacctttggccttggtggggagagcccatttaccggaatgggcagtatgttggcaagaccaccagcatgtgcctacagctacagcctggagcgccacgtttgcctggggctttgtgcacaatttttctgaggacacgggggaagagcaagtggtgacagcagatttcatcaaccggggagagtatgagattgacatcgcgggataccgcttccaggccaaggccaagctctaccctgtcgcctccctcttcacccagaagcgccgaaaggatgacatggagctgagtgacttacatgggaagtgatgccaccagggcagcctcacctcctccccatcatcttgtcctagagtgggcgtcaccttggagcttctcttccttccgcctctgttcctcttctggagcctttgcctcccatctcttatctccttgatataattttgaacttgacctactttaaacttttttgctctgcagccttccttgccttccacctcctcctcctaatattcactctgggctcttcttccct

SEQ ID NO: 14770 - DNA, 483 bp, Homo sapiens
ttttttttttgctaaatagaaaacttttaatgaaggggtacccagtttagagataaaaatataatatgccatctccagaaagaacaattcaaagtataaataatcagaattacatgaacttgcaatttgtcatatttggttctaactagtttaattaattaaactaattcctatactttgccgtcactctggttaaggtttggccagttttgcatatacttgcatggcaaaatgcatgacaatagatatttaagtatttttctcatttttttttttaaatatggggttggaaaatactaacattttaatttatactgtttttcccttctgctcactgaaaagaattaatgaaaatcattcaggaatatattccacagaaaaggtttgcaaaaacttgagatatattttagtagaatttgagtttgtccacattctttggctgttcaatttagtgtgtaacatatttgaatattcaattattat

SEQ ID NO: 14771 - DNA, 986 bp, Homo sapiens
ttttttttttcattataagaatcatctgcttatttattttacagagtaatgatttaaattgagtacatttgggcacagtagatatttgacacgaaaaatagttgtatcagaatgagcatcagaaaaatagcaactcatcttacacataataactagaaaatattattctgtctgatcatttaagtgttacaaatcctgagaatgttatacattgaacaaattaggtactaccttataattaaatctcgcttggaaagaatcctttaaaaaatgctctgaggtacaaatcacctatgtattaaacatgagtctctgacattatacaaagagtttaaacaaatatatcaaacaattacaggccagtggctcttaaaacagctatcagtcaggttcaaggacacactgttccacaatttcccgtaagttggggttttccattggcagctgccactcgctctttgtcatttatctgcttattgatgtcttcttctgttgagtgggttccttcagaaatgtagatttccaacttatgtttaaatggtaaacatcgctgaagttttactcttaagcacagcccaataagagtcgccaaagagcaatgaggtactgttggcgtgaacctgataataaccagatattcttcttcatttatctcctgaacttccacacaactttccgagaccacttccagttcttctaaagtattgggcttttctgggtcccggatagttctaatcaaatcataaacctctagcgctttctcttccatgatccggggctgccgggcagctcccggctcagagaggccggagagccacaggactctgctcagcgtccaggagagcagcccggacacccgctgcatcttcacgctcagccatccctggcgactgtcccaatcgcgccaccgtctctcagcagcctcgggattgatcaacttcctggtcttcaaatgggccgagacaagcctaaaggttcaggagagc

SEQ ID NO: 14772 - DNA, 556 bp, Homo sapiens
gctgcaaatttccatccttaatatgttagactgttcatatagatacattgtgtttacaacaaggaaaaaatgccaccatgtgctcagaacttttttgacaggtattttgagaagagttgtggaacattctggtaatttgtagagatctgttggcatctctgcttcacaaactggaaaaaatcattatgtaagtcttgctaattacttttcttggagaagaaaaaaaatgctacagttgcaaacaaatgtatagttttcaaaaagaagcaacttttttgctccccagtttattcttagtttccagcccacgccttgcgatagcgactaggcatagtgatggcctcaattctttctctcttgcatccataccttttgcatgtgatagcagtgatggcctcagttctttccctctcttgcatccgtaccttttgctgtgtgactttgcagctcctctcattaaagaggcagagcccctctcccatcgcataggagcaggttttgagagtaacagaatgaagtgaaaatgacactgtgccagttctaagaccagccctca

SEQ ID NO: 14773 - DNA, 276 bp, Homo sapiens
cagatgggcagagcgctggggccaaaaatccacaggtttctctctccatccctgctggtttctagtcccccctccccctcttccctcccaggcttaatcatattttggaacgggtgaggtcttttgttgggtgggcaccccctgattgcttgtctgtttattttttaatgtgcaactaatttgatttgaatttccttcagtttccaggccttcctagggaaagctaagggagagggaatatgctttttaaaaatcgtttttctttctttcttttct

SEQ ID NO: 14774 - DNA, 1392 bp, Homo sapiens
  misc_feature (1)...(1392): n = a,t,c or g
ttttttttttttttttaggttttttactattttattatggcacacaggatagaggatggtacagttttcttacttcaaccaagtaattctcaaagcatccagctatttccatttggctaaagttactttttgcacatagcttgcatctgtttgagacttaccatgtacatcaacccaggtctagtaagcagaaatgtgaaaagttttgtttctgagggagacgcctcatctttacagaagccaatacactgagagccttcatagttccaatccattaccatcatggcaaggaagcactttacctatttgcatagcaacatatatttaactagaaataggtggtacaaagggattaagtaactttaaatggagaccactttggtttcaggttaaattaataacttatagagatcgtctaaaaaacaaatattgaatgaaattagctgacaaagcaattgtttcagaacaaaggcagaatagcagatagtaatatcatctatatttattccacatcaaatgcaagagcgttcttaactttacgacagaaaggatacatggggcgtgtatttgatgcaatgtccaaccagtcaagctatcattgaaatccaaatatttcccagtagagacatgcagagcaatgtcaatgtaacatacaagcatattacctccccccttaagtgactcataatttcattacttgtgtctgtagcttttaaaggtttaaaaatgtgtagcattaagtggtatttacttgaggcaacagaattacgcttaacaacacactaaatcatgagctcaggattgcagggcaacatgtttgcagtggagtggcaaataacctttggtagttttaatcccttctcctgaaattatatatagataaaaaattattccttcttattgtaccatgttctcaggttttaacctcctcccatgatatttagactatattttaaaatgcagttatagggatgaatgtatgggattcatattctatccatattgcattgtgacatatcagtttgaaatgacctatttatccatnnnnnnnnnnnnnnnnnnnnnnnnnnnnnnnnnnnnnnatgacctgtttaccataaagagtgtatctgtcaagtaatttcagaattgctccctagaaagccatcccaaaacctaacacaacacgtgttatgaggcaaagtctattgttatttatagactttctcatttactcatgtttattatcagtaaaatttttgtggggagagatttcacaagtaatcatgacataactgtatccctcagaatttccaattgaaggaagaaaaaaaagtattggtaattgttaaaatttcaactttttaaaaaattggaggtcaatagtccactggtatatactttatattggtg

SEQ ID NO: 14775 - DNA, 904 bp, Homo sapiens
ttcagaactgctgctataaagaaattctctaattggttgaatttttttttaagtaaatagtactttaggccaaaatttatatgaatatttgatcttcttgagattttcatactatcatttaaccaccaggaagctgaagtgtgtgaagtacaaagctgacagcactttattttattgctctccattatttggtattcattatattccttcagtcagaaaattattactctctatggcactgttttttatcacaaatatgtatatgtgatattgatatataactatatatattgccatcacacacgaacaataaaataaagtgttctattaacctgatctctttgcccttttgctatgtgaggagtgaatgagtggccttctgatgctctgactcttctctgtatgtcaaactcatccctggcacaagaaattccagtcatgtgaagcaaactgccctttgtcctcaaagaaattgttgaaaaagaaaactttttaaagagattttttgcatattctctgccttgttcttatcaacttgaaatgttggcattttctaaccttgttttgttggctacaataattcagtattcatgtcaaaattgagaagtgccctaattgaatgtgtttgaatgttatccttgcacaattctttaaattgaaagataaaatgttttacctcactgttgggacatacattccaggctttttcaactctaggagaaaaagaaaatcatgttttcctgtattgtaaattttaggactatttccatatacattgtattaaaactgccatatcaattttaatgtatagattttgcaaatattatgctatatgtaatacctaactgtatctgtagtgtatatgtaatatatttatgcccaataaatgttttaattctttctg

SEQ ID NO: 14776 - DNA, 629 bp, Homo sapiens
ggcacacctgcacgtttacccatcacacagttgagaaattttatctactttcacctttttttttggttagcatttttattcccagcttttttgtggtataatgcgcagaaggtaatgaacacattctacctgcaagcttcttcctgtgcctttggaatctgctcctgccagtctgcagggaaccacggatctgctttccgtcacgtaggaggcattctcgacaccctctgtacacagcatgcgctttatttggcttctcttacgcagcgtagtgactttcagatttattcaagctgctgcgtgcgccaacagtccactccttcctagtgctgaggcccccatcacatgagcacaactgtttcttgtgtgtgatgtgttgttctctggctgtgcaaaaagctgattctgtcatcaccgcatcttgtctcatcagtaggagtgaatggctggggggacggtggcacagtcagcctcgttcaaagttttgtcgattatgggtctatatttcacagtgaacctccacgtgctgaagtccaataggacagggtgtgcttcccccagtgccccccaaagggcttctttctgtgcccacggaagggcatagagtgatcgaactcatgaatcggaac

SEQ ID NO: 14777 - DNA, 1173 bp, Homo sapiens
tgggggggaactgagaaacactttcctggagctgctggcttttgcacttttttgatggcagaagtgtgacctgagagtcccaccttctcttcaggaacgtagatgtcggggtgtcttgccctgggggcgttggaacctctgaaggtggggagcggaacacctggcatccttccccagcacttgcattaccgtccctgctcttcccaggtggggacagtggcccaagcaaggcctcactcgcagccacttcttcaagagctgcctgcacactgtcttggagcatctgccttgtgcctggcactctgccggtgccttgggaaggtcggaagagtggactttgtcctggccttcccttcatggcgtctatgacactttttgtggtgatggaaagcatgggacctgtcgtctcagcctgttggtttctcctcattgcctcaaaccctggggtaggtgggacggggggtctcgtgcccagatgaaaccatttggaaactcggcagcagagtttgtccaaatgacccttttcaggatgtctcaaagcttgtgccaaaggtcacttttctttcctgccttctgctgtgagccctgagatcctcctcccagctcaagggacaggtcctgggtgagggtgggagatttagacacctgaaactgggcgtggagagaagagccgttgctgtttgttttttgggaagagcttttaaagaatgcatgtttttttcctggttggaattgagtaggaactgaggctgtgcttcaggtatggtacaatcaagtgggggattttcatgctgaaccattcaagccctccccgcccgttgcacccactttggctggcgtctgctggagaggatgtctctgtccgcattcccgtgcagctccaggctcgcgcagttttctctctccccctggatgttgagtctcatcagaatatgtgggtagggggtggacgtgcacgggtgcatgattgtgcttaacttggttgtatttttcgatttgacatggaaggcctgttgctttgctcttgagaatagtttctcgtgtccccctcgcaggcctcattctttgaacatcaactctgaagtttgatacagataggggcttgatagctgtggtccccctcttccccctctgactacctaaaaatccaatacccaaaatacagaagccttg

SEQ ID NO: 14778 - DNA, 1544 bp, Homo sapiens
tctgaagtgtgcggttccctgtagactgtaaaagtcggcaaaagcgctttgccatgaaagctgggatagtcctccatctcccagcttcctcttttgcaggggacccttcttcgttgctgcttcttctcttctaccagctcatcatcttcactagaaatctcctcacttcccgcattgggctttgtcccatctactaggatatctagtgtctgggtactggaaaagcaactcttcctgaagacctaccaatgacctcaacaatgctttaagtgccttgtgactatttttcagggcactggaaaattctgggccacctttgtccgtgaagaaccagatagcactgtgggaccagctcttggaaggaaggatcaaactacaaaaagctctgttgaccaccaaccagcttcctcaaccagatgttttcccattgttcaaggacaaaggtggcccagaattttccagtgccctgaaaaatagtcacaaggcacttaaagcattgttgaggtcattggtaggtcttcaggaagagttgcttttccagtacccagacactagatatctagtagatgggacaaagcccaatgcgggaagtgaggagatttctagtgaagatgatgagctggtagaagagaagaagcagcaacgaagaagggtccctgcaaagaggaagctggagatggaggactatcccagcttcatggcaaagcgctttgccgactttacagtctacaggaaccgcacacttcagaaatggcacgataagaccaaactggcttctggaaaactggggaagggttttggtgcctttgaacgctcaatcttgactcagatcgaccatattctgatggacaaagagagattacttcgaaggacacagaccaagcgctctgtctatcgagttcttggcaaacctgagccagcagctcagcctgtcccagagagtttgccaggggaaccggagatccttcctcaagcccctgctaatgctcatctgaaggacttggatgaagaaatctttgatgatgatgacttttaccaccagctccttcgagaactcatagaacggaagaccagctccttggatcccaacgatcaggtggccatgggaaggcagtggcttgcaatccagaagttacgaagcaaaatccacaaaaaagtagataggaaagccagcaaaggcaggaaacttcggtttcatgtccttagcaagctactgagtttcatggcacctattgaccatactacaatgaatgatgatgccaggacagaactgtaccgctctctttttggccagctccaccctcccgacgaaggccacggggattgacatcgcccacctccgacacccagtgggcgccttggctggtgcggctgctggtccagatggaggaaaccagtgactttatggggctgagctagtcgggaagcccctggaaagatgctgcgttccgaacctgtgcctaatacacgcaagggcgctgtcccacccaaccccgcctttaaacgccacaaataaagagcattgttaccaccaaaaaaaaaaa

SEQ ID NO: 14779 - DNA, 607 bp, Homo sapiens
ggcggagggccaagcagaaagccagccagcagcggcagcagcagcaggaggcatggctgagcagcgcctcgctgcagacggccttccaggccaaccacagcaccaaactcggccccggggagggcagcaaggccaagaggcgggcactgatgctgcactcagaccccagcatcctggggtactccctgcacggatcttctggtgagatcgagagcgtggatgactactgaccagcccggacccccagcccctgggctgtaggccagggcagccacagcggcgtggaccgagggtcccagcctgcaggctccccgcagagagcacaggaagaggcaggggcggggtccccagcacttgttacaaacacacgatgcaccttaactcacccaccacgaggcactttacagactgggggagggggtttttctttttattttttttttaattttaaacgactgaagaaaacattaggagaggcaaaaatattgttaaaaactagactctaaacaccccttcctgctgtgaggatagtgggtgtgacaatggaaggtccacagaggtttttgttttttggttttttttttttttttttaagaaaaaaagatga

SEQ ID NO: 14780 - DNA, 465 bp, Homo sapiens
gaaaaagaagacgacagacacttcctaaacagaacatttaaactcaatgaatattacttttctgttttgcaaaggggtattttcaatcgattcccaaatgtatttctgaaactccttgtaccgactaagaaacactaacatgagcaatcatagtattttagagctcgtaatggcctccaggagcctctgtcctagtagttctcaatgttagctgaataatcaactggggagctttttaaatgccaattcctgagtcctaccctttaagagattctttctgtaattggtccagggtatgacttgggcatctgaatttttgaaaaatgtcccaaagtgggttctaatatggaaccaagttctgaaaaatgctggtctagcccggtggctcttcaaactatggcactttcagaccagcagccttccgtgtcactggtacttgataggaaatgcaggttcatgtccttc

SEQ ID NO: 14781 - DNA, 1444 bp, Homo sapiens
  misc_feature (1)...(1444): n = a,t,c or g
gtattataaactgacttttaataataataaaaaatctatcaagaatttaacgagaagaatctgtacattttaaagtaaaccagtgcacaatgcgctggccctgggccatcccccatttcccgcagcagggctaaagcgggtcctcctttgtctctgatgcaagatacagtgacaaggccactgcctggccctcgtgtatgctgcggcaagagagggaagcgcaccctggagggcgggaggctcggatgccagatgccgggagggcttcaagctcccaggcctgggggcagcagggagcccccacctgaactcaccacctgccaggggtggacaggcgtccncccccgnttcctccccagctgtgacctttccctgaaggcataccgaagctgggggacaaactgccgaggggcttgtgtgggtccctcctcccccaagcaggccagggtggcttcctgtgctctggctggtgatgtcccaaatcgccctggctctgagaagttaccatcaagaaaataaatcacagaagccaccgcccggtgtttcccagtgaccctctaaccccgtgtgacacggcacctcaggtggggctccatcccctccagctccaaccctggctggccacctctcaggcccttgtagccagtcactcaaagagagcgagttctaacaccggccaaccgctggagaatggagggtgggggaaggaatcacagtcgatacctcaaaacgacaccttacaaccctaatattaacaaacaggaaacaatgacattttttaatttttcaataatttagtttttcttttgtgctcttttttttttagtagaagcaggaacagttgtcaatactaccttctgttggtcccctgttagacaacatacctttctttgaaatgtaaaatgtcaaatatataatcacacaactttagaaaaaacaaactttgacaacaccaacaacaaaaaatcccaaaataaaccagagatttcatgccatataaataaagtcagagcaaatctcgtgcccagggctggtggccccagttccagggggcgggtgatgtccagagctggtgtggctctcggggatcctctggtaacaggcgtgatggaggccccgtctctcctttcccgacagagccaagtcttttccaagtccaccaagcaggttagtacagggttagggtgaacctggaagctaagatgaggaggaggagacacgtgtggtcacctggaatgtggacgttgaaggaaaccggggtttcaaaagtgcaggcggagccatcccgagggagccgggtgccccatgtggcctccatgacgttcccttgggttctggggacgcaggancgaaggccaggcaccagctgctcccatcagctctatgggtctccagcacccctccagcttctggcaggcgtgtgaagaatgggnccgcccagggc

SEQ ID NO: 14782 - DNA, 848 bp, Homo sapiens
atttcggcacgagcactcctggccaccagcagtgctcaataaagatttattacattaaaaattccattgccaaaccctgaggcactcagggctctgaccggtgcagccatgacctctgaacccagaacacatggaagcagcagcagctgagttgccaactcaagtcttggcctgcctggctttgctggcgaactcctgcacacccttcaaggccctgttcaaatgtctctgtcttaggctgacgcagctgctgcccttctgtggccatacagtgctccttttcacagatgatggctcctgcagggagtgcccccagtgcccagcacagggccaggcacacagtggtgcacgggaacgtctgctgatgcccaccctaaggccaatcaaggagccacggggctgggtcctggtcctcacatcctcttccgcatcttgcccttcttggagcgggcaccccggccgaaggcgccctgctgcagctcctggacgcggcggcggttgcgggcagagagctgcttgaggccaccacgctgcaggaagtgcagcttctgggcccggcgccgctgcttcaggatctgctgcttggtcttgagttccgggcggactcggcctgcaggggtgcctggggcgtggggccgggatgcaccttggccacggtctcgcttcccacctcttcgctctgggcctcgccggtcagatgccccttcttcgtccgagtcacgatcatcaattttctgtttctgtttccacttctgatagaggtctcgcttgtaggagctgctgatgtagcggccgctctctgtcttaatcttcttcttgtcttcctgtcctgactgtcccacaaaccg

SEQ ID NO: 14783 - DNA, 816 bp, Homo sapiens
  misc_feature (1)...(816): n = a,t,c or g
tagtttataatttttaaagtttgtaaaagtagaatcaaacatcaagcattccataacaatatttttggttcaatattaggtttcatacccatgttgattggccatagctattcattcatttgcatggtactcccatgtggcaaatgggaatgtgccacagtttacttatcctgactcctgtcaacaatcactgggaggttgtatannnnnnnnnnnnnnnnnnnnnnnnnnnnnnnnnnnnnnnnnnnnnnnnnnnnnnnnnnnnnnnnnnnnnnnnnnnnnnnnnnnnnnnnnnnnnnnggcctcaggaaacttacaatcatggcagagggagaaacaagcaccttcttcacaaggcagcaggagagagacagtgacagcaggggaaactgctgtctttaaaaccatcagatcttgtgagaactccctctctattatgataacagcatggggaaactgcccccatgattcaattatctccacctggtccctcccttgacacannnnnnnnnnnnnnnnnnnnnnnnnnnnnnnnnnnnnnnnnnnnnnnnnnnnnnnngatggtgaaaatgttatactaaaaatgcacagtctctacaaactccctggtttcttttctgtcagtgaagtcaaatatctacacaacggccctggacaatgctacagggaggacacattaccttaatcatctttctgtcccacttctcagccacaaaggcccgagaggggcatgaacttggctggtgagctctgcacctcaacattctcttcccaggcttgtctaatcaaagataactgttccaattacattttgaa

SEQ ID NO: 14784 - DNA, 1111 bp, Homo sapiens
cgagggtggaagatggaggccgcgttccctcgcccgcccggcaggcgtcaccttgatggcctgcaacccctccctgcctcattcttagttcaagatcgtctttagtctcgctgcgtccctttcccttgcacctgttaacatctttaaggcaggagctgatgaagagagagcagagacagctcgtctgacttcttttattggtgccatcgccattggagacttggtaaagagcaccttgggacccaaaggcatggacaaaattcttctaagcagtggacgagatgcctctcttatggtaaccaatgatggtgccactattctaaaaaacattggtgttgacaatccagcagctaaagttttagttgatatgtcaagggttcaagatgatgaagttggtgatggcactacctctgttaccgttttagcagcagaattattaagggaagcagaatctttaattgcaaaaaagattcatccacagaccatcatagcgggttggagagaagccacgaaggctgcaagagaggcgctgttgagttctgcagttgatcatggttccgatgaagttaaattccgtcaagatttaatgaatattgcgggcacaacattatcctcaaaacttcttactcatcacaaagaccactttacaaagttagctgtagaagcagttctcagactgaaaggctctggcaacctggaggcaattcatattatcaagaagctaggaggaagtttggcagattcctatttagatgaaggcttcctgttggataaaaaaattggagtaaatcaaccaaaacgaattgaaaatgctaaaattcttattgcaaatactggtatggatacagacaaaataaagatatttggttcccgggtaagagttgactctacagcaaaggttgcagaaatagaacatgcggaaaaggaaaaaatgaaggagaaagttgaacgtattcttaagcatggaataaattgctttattaacaggcaattaatttataattatcctgaacagctctttggtgctgctggtgtcatggctattgagcatgcagattttgcaggtgtggaacgccctagctcttgtcacaggtggtgaaattgcctctac

SEQ ID NO: 14785 - DNA, 576 bp, Homo sapiens
gtctcctctatgtattttcaaacagtctgtcttcaagctcattaattctttcttctgcttgaacaattttgctgttaagagactctgatgcattcttcactatgtcacttggatttttcaactctagaatttctgctggattctttttaattatttgtcaaatttatctaataagattctgaatcccttctctgtgttaccttgaatttctctgactttcctcaacacagttattttgaattctttgtctgaaaggtcacacatctgcttctctgggattagtctctggtgccttatttaattcatttggtgaggtcgtagtttgctggctgtttttgatgtttgtggacgttcatcaatgtctgggcattgaagagttaggtgtttattgtagtcttcacagtctgggcttgtttgtacccatccttcttgggaaggcttttcaggtattcaaaagcacttgggtattgtgatctaagccgtatttgcattaaagcacatcttaagcccagtaatactgtagttgttgttgactcgtagaggtactacttggtgatcttggaaaatatctacaag

SEQ ID NO: 14786 - DNA, 747 bp, Homo sapiens
gaagtggtgattgcaagatttgccccccaccccagatgacccggaagatttcccctgcgctgtcttgaaagagccctgtttcccagcaccccggagctgcactgcacacctgtggggagacttttccagctgggccaagggagtcagactctaagaacaatagatgttgcttttcccgtgtcatgtaaatttgttgcacttttttgggctgagctgttagaggggcttctccagaggctcgagagcaggccatttcccaagaagatgaagaatggtgactgtgtttttattgaaggaatttcaaatgaagaataatgtttaaaatgtgtatatagagatagtatagactcctccgcggaagcatggagggaaaggaggttgtaaaatagactccatggagactcttaggaagcagtagattcccgggggctgtgcctttagcgttagaggaaacacatagagctggaactgttaatggaaagcagtcacagctgagttttcggagaccaagaaattaaaatacaattgcacttactgtttacttgtaaatgttatcttctctcctggaatattttgagttctggttttcacttaaccaatcatttaaaaatcgctattgtgtagccactggccaccactctgtgacacagaatcagagaaagcgttgatttttaatggtgatttaaactacctcgtggtttctgtgtgtgcacacacacatctagtgtttgggtggtttttaggaag

SEQ ID NO: 14787 - DNA, 411 bp, Homo sapiens
ggaatcttctaggcttctctagcatcccctaaagactgtggctatttcacgtctctctccctgcctgccttccttttcccttcctttcccctcctcatgttttctggttgtgcccatctgtaccagctcctttccatccaccttcgtatgcacccagatttttctgttcccatctgtcctatttgttattcatcccgctgctcaacttctccagtatgttgcttcccttaagttgccattcattctcttcatgactttactaactcacttcggtctctgtctgtcaactaaacttttctaaaggttaccagttatccaatcaccaaatccatggctttttctcaaagcttagtcttgtccttgacagaactggacactattgaccatccaaatggaaattcccctttcttg

SEQ ID NO: 14788 - DNA, 998 bp, Homo sapiens
gcctccccgccggctagggtagcgctaaccttggtagcttctctgcaggggctgggactcccccatcgtatcctttcctctctggttcactgtctcctccggcgcaggaagctccgggttggtgtggaaccaggtatcctctctgaatttctctttccacttttctcgccctcgcctttcctctgtccagaacgaaatcttgaaaagcacagtgagcagcaacgacaagaaaaccaaaggccggacgggctggccgcagcacgtctgggccctggagctcaagcagtgaggaggaggagaaggaggaggaggagagcgcgagtgagcaggggccaaggcgccagatgcagacccaggactccggaaaagccgtccgcgctccgctctgaggactccttgcatttggaatcatccggtttatttatgtgcaatttccttcccctctctttgaccccctttgaggcatctgctccccggtctccccctccaaaaaaaaagtggatatttgaagaaaagcattccatattttaatacgaagaggaacactcccgtgtggtaagggatcccgtcgtctcatagattctgtgtgcgtgaatgttccctcttggctgtgtagacaccagcgttgccccccgccaacctactcaaccccttccagataaagacagtgggcactagtgcgtttgtgaagtgtatctttaatacttggcctttggatataaatattcctgggtattataaagttttatttcaaagcagaaaacagggccgctaacatttccgttggggtcggtatctagtgctatccattcatctgtggtcgttccctctttgaagatgtttccaacagccacttgttttgtgcacttccgtcctctaaaactaaatggaatttaattaatattgaaggtgtaaacgttgtaagtattcaataaaccactgtgttttttttttacaaaaaccttaatcttttaatggctgatacctcaaaagagttt

SEQ ID NO: 14789 - DNA, 566 bp, Homo sapiens
  misc_feature (1)...(566): n = a,t,c or g
aatagtttaatctcaattttacttaattagtaaagattttccataggataacagacatgtatgcagttaaaagccagaacctatataaactgttagtgcacctgaatgcaattatgagttaaattatactgtggatcctgtagaaaaaatatggtttcatttctatgaaatgaaattgttttaccttaggcatttcttaaggctttacaaagagaaagctttttcagctttcggttcaatagttgctatcacactaatgaagttttggtatctatcttatgttgaattcattgtgatttagatacagattttagacagtgttttgtcatttatttggacttcagagatagagtcttgctgtgtcattcaggctgaagtgcagatgctgggagtttcaactgggtgccagagggttgggggataggaggcaggttgctgctcagtataacaccacctttgcaagactggtcctgacagaagagtttgcctttgtgcaaagtatatctgngttgccctggcaggaagtaaaatatgactacatccttcttaaagttgagtctctggga

SEQ ID NO: 14790 - DNA, 408 bp, Homo sapiens
actgaggatggaaccactcagtccctgagtgtaggcgtaccctgtggtgatgcagtcaaagcccaggacagtcatataaaggaaagcaagacccatgccagccagaaacacaggctggttgtagtaggagacccatccatctcggaaggtacggaagggctcagccatctgggaggcacaagtaggctcttgctcatgttcaaggctcatggatgttagagtctttcacacccattagatgagttccctccaggggttttggctcagtatctttgtgtaaattcagctgtttcaattcagtttcctcttctttaagaccagctttcacaggctagagctgggggttttctggtaaaccttccagagcagaacgtactccacgcacatggataccaagttccatcccga

SEQ ID NO: 14791 - DNA, 312 bp, Homo sapiens
tccggtgcaagcgaggacacgacacatgcagtggcttctggactgcgcgatgactggacgcaagtaacttctaggtctgcagacaagaggaagagaagatgaaggaagactgtctgccgagttctcacgtgcccatcagtgacagcaagtccattcagaagtcggagctcttaggcctgctgaaaacctacaactgctaccatgagggcaagagcttccagctgagacaccgtgaggaagaagggactctgatcatcgaggggctcctcaacattgcctgggggctgaggcggcccattccggcttgcagat

SEQ ID NO: 14792 - DNA, 622 bp, Homo sapiens
gaaacgtgcacttgcaagctgcccgcaatacgttatggcgaccaaacgccttttcggggctacccggacgtgggccggctggggggcctgggagctcctaaaccccgccacttccggaagactcctggcccgggattatgccaagaaaccagttatgaagggggccaaatcgggaaaaggtgcagtgaccagcgaggccctcaaggaccccgacgtatgcacagatcctgtccagctcaccacatatgccatgggcgtcaacatctacaaggaagggcaggatgtacccctgaaaccggatgctgagtaccctgaatggctgtttgagatgaacttgggtcccccaaagaccctggaggagctggaccccgagagccgggagtactggcggcggctgcggaaacagaacatctggcgccacaaccggctgagcaagaacaagaggttgtagcatggagggcccggcatcgctgacccccacgccgagggcttgccgttttcccggaggacgtggacttttgtgagacaagaggcggctccccagcctgggtttccatgtgaccccacagtggggctggaccagggccctggaggccaataaagagctttctgggtagaccct

SEQ ID NO: 14793 - DNA, 1723 bp, Homo sapiens
tttacaacatactgtaggtttatttttattcaaaaagttactgtctcaagacataaatacaaatcagaaaacagtacaattaggacaatagaatgtggaggacaacaggttagagtaatatataaaacatttttagctggttgaaaacaaagctgtaagaactgctttcacaaagaagtactcctttcaagagtgagaaaaaaaatcaacttaggtttaaaatcatatatacagtcctctcagcagttctagttaatgcagtggtgtgtaaaacaacataggcaatacttttgcacataacaatatttgttgatggaaaatctgttagacaagtctggattcatttgttattaaccatgacttaataaaataattgtatcatgatctttttagctaacctatggtttttggctaccacagcccaatgcttgatttctgactaaaaactgaaagccttttggtattcacccatctgaagatattcttgtattgcaagcatattaaggcatggaatgattaaaataatatacctcaagaactgagagacgactgacaatagatagatacacatgtaatataagttaatattttgttttaaacgatgtctagctgcctaagcctcgcaaaatgagttgatgtcaaaatggcaagtagccactttctgttttaaactaatttatttgtgaaaggacataaaatgaagtttaaagcttagctttcaaagaatattatgggttatgaattctattatcccatctaatttacatacagaggaaatgtactgtaacctgttagaagtatctttaacctgaagactgcttgcaaagacagatagataaaacaatataaaatacaaatttaaaaatcattttaaagcatgaacactcatgcttttctatttttaaacattgttaaactttcaatatatttctgaaacctcataattttaagttggaatttaaaagtaagaaaaaactaaacaaactgcgcaattataaaatcagcaccaatttatatatatatataattttatttaaaatttagatccctattcccacactctaataagctgtataatttttgtttagaatttttctgcaaacatactacaataagcttcttttatttggagacaaaatacagtggcattactggaaggaatatcacaacattacatttttatcttaaaggacaagcaaactttcagggttgataatgggataagcatgtttgagactggttaccttctggcagttcactgcatctggatatttctgaaaagtatagagaagctcttggattttaaaaatatcttaaaatacttttagatgaaaaaattgtaaaagttctgcttataagtttacttttctccacaattacaatatttaaaacaaagttttgttgattgacgttttaagcatttaaatttagaatgctaaaaacaattctatcctacactttcttcagggtaggggaataaatacatccttaacattgttttctggatgtaaacagaaatccagcagaggtcatcattatttagtacaaccagtaaataaatgtaagagaattcatatctgtaccaaatgcctcttcagattgttattttgttttttttttttttaaaaaaaagcatgaaataatcgattcaaaagccaactaacagcgcataaataaaatatttactttctaagaaaaactgtagcttatcatcaaattgttt

SEQ ID NO: 14794 - DNA, 272 bp, Homo sapiens
gctcccttttgtcatataaggtaaccatggcagtcagatcataatattcacaggttctgcccacaatcaaaggggtggaacctgtgagtattacgggttagcgaagtcgagcgtctttgggatcatcttaatattccactcactgggactggggaaggtcttgggtgctgataataacaatagcaatagtgatattggtacttcttttcctttgcttggaactttgtggattacagactgattatacatctgtaatcctgcaggagactgtg

SEQ ID NO: 14795 - DNA, 1193 bp, Homo sapiens
tttttttttttagtagcacgattattttattatatgctttataaaaaaacaaacacccaaagacatacaacacaccgccctcaccccccagcggccattagggagggggcttatacttttcctaatgtagatctggccatcttataaagcagaccacattatttgtttccatatatacctgtagatatttctctcccctcaaatatttatatctcgactaaaaaaaaggaggtgcaaagagtatataaagataaatgagattttcttgctgttgttatagtacaaacaccagatgactaccagtggagtaacagggcaaaacaaaaacacaaaccccaccttcagtgaggaatggaaggtctgttaccgacctcaagtagctgaatcacctgctgtaactggcacctccctgacaatcatgggtttgtagggacatgggccaggtgatggcttctacttgtttccagaaggctaatgtgtcctacaccctttcttagtaactaaagacgaactacgggagaacccagtatttggattctgcccagaggtattaaatgcacaaggaaaaattagttatgtccaagtagcaagcaataatatttttaaaccaacatggttaaatgttaagatttgtagaaatcaaaatatttattcacataattttaaactaaagttgaagctaatatatcttccgtggtaatgatttaagtgcaagtgatgcttggctttctttcacattcatttcttttcttctgagtgaaggcatatcagttattcttgaacaagtcaatacagctctgcaaaagggagacattgttcctggcatgttttatttccagttcagacatttcaattagattctttctaaatgctgccactctcttccgtttgaaatttatcagttctacaggaagaaaaaatgtttatgaaaccaagaaaaactaaacaattttcatgttcactttaactaccaaatggcattcttacaaatggtctccaatgctttcaggcaccagcattatttcctcacatttgtattatctctgtgactgggagcacatcagacatctattaactgtggtgatacagcttatcactgtctttaagtggaaaacatcactgaatcaccaagcatcgtgagtgggagagcagcagcttatgacttggagaacacgttgatgagcagcctcact

SEQ ID NO: 14796 - DNA, 1117 bp, Homo sapiens
tttttttttttttttttttgtggcatcattctgctaactttattctttatacacagtttgggtaaagtaagaaccaaacactgcttccactccccctatcctcactccactttggggactttaaaaagtgactaatagttggtactcgtaaggattcccaagactgcagaatttagttgtacagcataactgtgcatttgatctctgaaagaaaataagagaccctctaagaggtggtgaccttagaagaatgaggaggggtcagggggtcttttaccccagttcagcctcacaccagcctgggagattttcccacctgcaacgcaaagcagcctgtaaattacatatagccacaatacacttaaattgagtcaatcaccgtggaaaatgggaactaaatacatcatcaggtcttcattgaaagaacttgagtggtcacctgtgattagctcttctcctaaactaaggctgctgtgacccttaagctggcttttaaaaatgtattcaacatacctcttagaaaacttaggctgaaatattttttaaatgactgatgcaaacaatttcacaaatacgcatacaaatgtttgaataatgtcactaagtaacatggtatataaatatgtattcagagtaacatttacatattggccataatagcaagcataccattaacaacaacaacaaaaaaaatcatgaagagacttcacctgttcatgtcagaatcccaaggcaaggaggcacacctaggcaagagggccaactcaacttgcaacgtctaacctgtgaggccataacttccatcaaagcaggaatcaatggaatcactaccgcagcccttccctttcactggtgcccggcacttcagctgcatcaagatcaatggagggctcatgaaaacactgctaggccccaaccaagtttctgattcagtaaccctggggtatggcccaagaatttttatttctagcagattcctaaggtgatgctgctggtctcagggacacactttgagagccactggtgtgtttggggctgtctcagtaaagatgtccactctcctgaggcctctctctgcctacggaggggggggaatctaacccctctgccctggctt

SEQ ID NO: 14797 - DNA, 436 bp, Homo sapiens
  misc_feature (1)...(436): n = a,t,c or g
gctgggaagaacagaaagcagagtcttgagagatgtcnnnnnnnnnnnnnnnnnnnnnnnnnnnnnnnnnnnnnnnnnnnnnnnnnnnnnnnnnntgcccagtgatgaaagaatgggtaagaaaaatgtggcctatctatacattcaaatattactcagctttaaaaaaaaagttaattcttaaattctgatacatgctaccacagggatgaaccctgaagacnnnnnnnnnnnnnnnnnnnnnnnnnnnnnnnnnnnnnnaaggattccatttatgtgacctagctagagcagtcaaattcatagacagtggaatggtggctgccaggggctcagtgagaggaaaatgaaggttgctgttaataagtcagagtttcagtttaagaagatgaacttttgggaggcggaagcgggcaaattgcctcactnaagagtt

SEQ ID NO: 14798 - DNA, 972 bp, Homo sapiens
ccactgaaaaagagctccaaattccaccctcaccccagaccctggtaaccactatttcactttctttctgaatttcccttcatatgagtgggatcaaacaagagttgtccttttgtgtttagcattcttacttagcaagccatcaactgctcgaacagtcactggggcaactacttttcgcccagtgtcctccagaaaagaaaggtctggagggtcaggccactctttttcttcaaaataatgggggtgcaggaagggtaggggatggaacctcttcctcctttgccactttaggctttagctcaaaggaactccaactttttattatttgcaacagttagttagctttctttgttttcacatctctgccttgcagaaccatgacctatcaaggtgttttgtcaaacaaaaactaatactttccctgggaaaaagccatgtgggtaggcaagtaccagaaatttttatggccaaataatacaccactatatccatagaccgcatttggtttatccactcatctgctgattgtttccccctcttgggtattatgagtaatgctatgaacatgggtgtacacatctctcttgaagtcccttcttaggtcctttagggatacatatccaggagcagaactactagatcacatatgctaaggtctgaatgtccccccaccaaattcgtatgttgaagcaaccaccaacgtgataggtgaggctttaggaggtgattatgtcatgagagctccatcctcattaatggatttagtgcctttataaaggggctcaagggaaccaattacctcctttttgcccttcgattcccttccaccatatgaggacacagcaacaggccccgtcctagaagctgagactgggccctcaatagatgataccagtctgccagcacgctgatcgtgggcttctcagtcttcacaactatgagaaataaattcgtacttttaaattaaac

SEQ ID NO: 14799 - DNA, 374 bp, Homo sapiens
atttactttcttaataagcttgctttcactttatggacttgccccaaactctttattatgtgaggtccaagaaccctctcttggggtctggatcgaggcccctttgcagtataacaaggatcaggagtagacaaagaaaagtccaggtccctggctcaacagaatctactctccagcaaacaagataaaacttgctatctccctttaattgaagtccctaatgtttaatggaagtcccagtaggcatccatatggtctctgtatttaccagcggctggaactcgctttgtacgttactctgcacaacaccacatgactgctcctgacagtaatttgaggagcttctggtgatggtaaacttgcacagtatgttc

SEQ ID NO: 14800 - DNA, 1820 bp, Homo sapiens
aacagatgagcagggatgtctgcatccacacctggccgtgcacctactacctggagcccaagaggcgatgggttactggacagctgtccttaacatcgctgtcgctcaggttcatgactgacagcactggagagattctggtcagcttccccctctccagcatagttgagatcaagaaggaggcttcacattttatcttcagctccatcaccatcctggagaagggccatgccaagcactggttcagctccctgcggccaagtcgaaatgtggtcttcagcatcatcgagcatttctggagggagctgctgctgtctcagcctggagccgtggcaagacgcatctgtcccaaggacccggggcgaggaagcttgaccgggactcatggcttggattccccagaaacgcctggaggacacggcgagggtcctgcaccaccagggccagcagctgggacagcgtcatgagaggcctggacaagatggagtcagacctggaggtggcggacagattgctgacagaactggaaatctcctgcttgggttggcccttttagctccaagctttggaagacaccaccggaaacaaagcccagggaagatgtctccatgaccagttgtgaaccctttgggaaagaagggatactgataaaaattcctgctgttatttcccacagaacagagtctcacgttaaaccagggaggctcaccgtccttgtgtctgggttggaaatacatgactccagttctttgctcatgcacaggtttgaaagagaagacgtggacgacatcaaggtccactcaccttacgaaattagcatccgccagcggtttattggaaagccagacatggcctatcgtttgatatctgccaagatgccagaggttatccccattttagaagtgcagttcagcaagaagatggagctgttagaagatgcattggtgctcagaagcgcaagaacctcttcccccgcagagaagagctgctcagtctggcatgcagcatctgggctgatgggccgtaccctgcaccgtgagccacccgcaggagaccaggagggcacagcactgcacctgcagacaagcctgccagccctttctgaggcagatacccaggaactaacccagatcctgaggaggatgaaggggctggccctggaggccgagagtgagctggagagacaagacgaagccctggatggcgttgcagcagctgtggacagggcaaccttgaccatcgacaagcacaacaggcggatgaagaggctgacctaggggcagaacgtccctgcattcctgtctcaccctgcacatcccgctgagatggagggctgggcggcagtgccagggctgcagaggcctgtgccatccggagtggtcttcctctggatggggctgctactgtggggctgcttctgcaccaggggcctccccaggtgtgcaccatgcctgcctcccacttggctgtccctgctgctgggcaggacccggccacatgttctgcggatgctgcagaagtgtggaccatggcgggaccccaaggacacttggcacaggcctggaagaggccgccctccgtcttgtctcggctccctttcatggacagactggccttcttagctgtactataaatttgtgagtgaagttagagcccagctcacttagccagctcactttgagggcatcctataaacacccaactgttcttttatcgtctcggttttagccaaaagtgaaattagcatgactgcatctttcaaacaaaaatattgatttctgcttttagggccccgtttccatccagaaataaagggaaat

SEQ ID NO: 14801 - DNA, 1686 bp, Homo sapiens
aagtttaaaactgccactgggctggttccccatccacagtcccaggattcatgccacagaccagccccccaaacccccagcaggggtgcccctgcccagaacctgtgctggatgcctaggagcacagagaccactgcccgttgttgggctgcgtgtgccacaattcataccccgatccataatccctaagacaagaatggctgtcattgccctgggttcactttctattcaaagaggactcatttgggcacagcccaatgtagtagttaaaatgcattttgagaaaaaataaatattctgtacaatgtatttacaaggatcaaatgttttgtaacccacccccaattagtttcccaattgggaaactataatttgataattaagaagcatattattggccgttagtgtcacgtcaacaaagaatgtggagctgaccacctaaagtatttttgaactatatatatagagagagagagagtacgcaaaatttcacattttaatatgcttagaaggagtttttaaagaagtagaaatgatttccttggcctctgactttcagtgatgaaaatgcaaccatgcagtcccccctttgcagaagggcagttcttcccaggctttctggaagcaggggcttccgaggagtctccacccacctcacagaacactcactatgagccctgcacagacagcaggattcacaatctccaatagggatggcaggggcagcccttaaaacttgaagaggtcgatgaagtgctgcggagacacaggcgtgaagcagctgtcagggtcggccgccgtgcaggggtgtcctgagtccttccaaaagagaatgctgcagtgccgacagaaatgcagtgtgtctccgtactgctccttcgctgggtaatgtttctgaagtgcaaagtacatcaacttccattcaatatgacctttttctgaaaggatcaaatgtctacaaaactgcttttcagcaaaatggtactgacaaagcttcttccacagctgtctgtcttcactaagcatatacaacgtgggggtcacctggcctaaggtgatgatgtcccatccgtctgagaaccggtataggatgttgttcagcatgtgcagaggaaggtcactgagggtgaggccattgttcacttgcttagtcatctgaagatcctgtagctgttgttgcccaggcgagaatagtttctaatcggcaaatccaaatattgatgtttcccactaatacagacttccctactcctctaataagaatgcagagggtagagcttaggtcttgcagaagatctttgattaagcgaggattgtggtggtcatcaagaaccttttgaacgattttatccaaaatgttgaagtaattcttctgtgccacgccactcaatgaagttaactgggattttgcaattagctgcaacagtttgaccacataattgaaccttcggatatcttgaattgcacttgagaagtctaaccgattaaaggcttctcccaaggtgcaatagccatgcctctggaaaagcaacacagaagttaaaattagtcaattagccaaaaagaattggcagttaatgtcaattaattgtgcgattaaaaaaatttttggcaaaggacaatttgtttttattttgaagactgattttagatttagatgagagtatagtaaaattatagcaatgc

SEQ ID NO: 14802 - DNA, 1487 bp, Homo sapiens
  misc_feature (1)...(1487): n = a,t,c or g
gttgccgccatgatagaacagcagaagcgtaagggcccagagttgccgctggttccagtcaagcggcagtcnattgagttgctgttgggagcggggtctggcccaggagccgggcagcagcaggcgacgccgggagccttgctgcaagcgggacctccaagatgttcctcccttcaagccccaatcatgctgctctctggacatgaaggggaagtctactgctgcaagttccaccccaacggatccaccttaggcatctgcaggatttgaccgactgatattactgtggaatgtctatggtgactgtgataactatgccacactgaagggacacagtggagcagtgatggaattgcattacaacacagatggcagtatgcttttctcagcatccacagataaaaccgtgggctgtgtggggatagttgaaacaggttgagagggtttaaaagggttaaaggggacatacttcctttgtgaattcctgttatccagccaggagaggccctcagcttgtctgcactggcagtgacgatggcacagttaagctttgggacatccggaagaaagcagccatccagacatttcagaacacgtaccaggtgttagctgtgaccttcaatgacacaagtgatcagattatttctggtggaatagacaatgatatcaaggtctgggacctgcgccagaacaagctaacctacaccatgagaggccatgcagattcagtgactggcctgagtttaagttctgaaggctcttatcttttgtccaatgcaatggacaatacagttcgtgtctgggatgtccggccatttgcccccaaagagagatgtgtaaagatatttcaaggaaatgtgcacaactttgaaaagaaccttctgagatgttcttggtcacctgatggaagcaaaatagcagctggctcagccgacaggtttgtttatgtgtgggataccacaagcaggagaatattgtataagctgcccggccatgctggctccatcaatgaagtggctttccaccctgatgagcccatcattatctcagcatcgagtgacaagagactgtatatgggagagattcagtgaagatatggactggaagactccaaggccgcttgtctttgagacctcagactgcaataaagtgatgcccaaatgttggatgtccaggctagcaccctcccttcagatgaccattgctagcaagaaacaggaggcggtggccatattccaaaaaccacttctgtcccatttcaccaggatgactaaggcaagctccctgtggcctctaaaaaccacctgccagatttcagggactgtttttttttttctttttcttttttcctgttttctaatgcaggcccaatgtgacaaatttgttggttgggatttttttttttttttgtaactggcttgtatgatattttctttctgtatttctctatatcattttgtattaaaagccaaatagatgccttttaa

SEQ ID NO: 14803 - DNA, 136 bp, Homo sapiens
tccaacacgtactgggccaccataaatggggaaaacacagcaaactcctcagctcgtgcggcgatgtggctgtacatcctttcaaccaggcgtgcacactttaggaccgtaggcaggtcatctatggcttcctaca

SEQ ID NO: 14804 - DNA, 1511 bp, Homo sapiens
  misc_feature (1)...(1511): n = a,t,c or g
ggctggcaagggctctcttctagtgagcgacaaacagcagacgcccctgctcggctgactacagcagacagagcacccacagaggagccagtggtcacagctccccctgctgcccatgccaaacacgggagcagagatgggagcacccagactgacggccccccagacagcacctccacctgcctgccaccggagcctgacagccttctggggtgcagcagtagccagagagcagcctctctgggactctgtagctacatccagagtccagggatttgtcagacatggtgggagatactgatctgaaggaggtggtgcttaaggactctgagccattctntcccctcctctgccctgtgccactctcagccatttcagcagccccgtcaaccgctgctccgtccctttccccagccagacactcattcccattgaccatctggtcccaggagctcaggaggaggaccccaggggagaggagagctgtgagagcaccggcacccccagaagactctgcttcttagcccacattcctccgggccttatggagaatgaggattcagccttgacttcttgcccaaggcctgctactggggtagcaactgacagctcagaaaggagctgagctccctctgcccctgccagttgtcagtcaggcagggagggagtggctgtgttggtttggggaactaatttccaaggacggctgcccgtggacaccaggtggactggttcactaatcaagtcagccatattgttctctggctaagtttggttccagccaacgtcatctgctcttcagttcctcactgccttcttgggatactaagacttgaattttttggggactattaagggtgttagtcttggagaagacacagcctcaccttctcacttgctgtgggtgaggggccatttaagtggactgggagacagtgcgcagtttgtatataattccctttcttgtggaacagaagactgaggcctgcaggttccgatgtgtctccatgggctgtgctcccctcttcctactgtcagtttctgaaacttctgactggcctcccagttatgcctcctcctcaagttcctgggcccgtggatgttaaagctgctcgattcccagggatctcggctgccttttcctctatcttgagccctataaatgcccacgggacccccaccaccagcctcttgaagtggctccacagctcctgtccctggaacatcctgtcagtttggtcataaaccctgagccagatgaaatgagccaccgtgaacagacatctgccatgcccccaggtgggcttcggtggccctacccggtaccagttctctctgagaaactggagatgtcttgttagcataagtgtcttcattcccacctggagggtttgggagaggagcaaagcagttgaaaactagttaatgagctacaagagtcaaatagtcctctgaatggagcccccatcacaaaanagtgcccaggaggctggctccctcaagctaaccaa

SEQ ID NO: 14805 - DNA, 550 bp, Homo sapiens
gcccacccagaatttcctgtgaaatgtgctcattttaaaacagcacacatcctgagaattgcaaagttgggcatagagatcaatacaaattagacttctttttagatacgctctacgctctgcagagccctctggggtctccaagggctgggacctgctggataaaactggatgaaactaagttgctgcttctttggtgcccttgaatggactttcttggctgcagtgacgttaggtccgcttcctagccgcgtgctgctctgccatcggggatgctaaagtcggggagggccaggaagcctttctttgcttggaagtttttgtttctccttcgcctgctaggttgggataatccgttgggaagtctctgagcgtctttaaacataaaatctagtttcaaaggtttaaattcccaagttgccccctaagttacatgttgcttaggcttggttgctatctgtatggtataaataattccatttagaaattaagaaattatgggctgcatttttgactccagtggctctgtagtatcccccaaccaccaaaa

SEQ ID NO: 14806 - DNA, 785 bp, Homo sapiens
cattgtatttcccttcttcaaattaattacctaccaaaaaatggaaaagaattttacatgcactttaaaatagtaaaatggaaagtgaatttttaaaatatatgcattaaaagtttactttaatttccagtgggacttcctttatgaaattttccataacctcttcctggagtattacaagatctccaacatctcataaactaattgtgatattagtggaaccataagcaaatgtatatttttagtggaaatagattatgaatgaaagccaagcaccttactttaaagccaaaatatgagattttccattaaaaaccattggtccataatagggagaggttttttatttgttctgagcaaatcctttaacctctcctgatgatacagttcagagtacacacactttggtgatggatcaagagcaatattttcttatgtgaaagatagcttattattactattgtgacatacaactagtagtaacagttaacatcaacacttcatatataccaggcagcatgataagcactttattattttactgaatcctcacaacagaccactgaggtagggactattgccatcatcattttataaaaggaaattgaggtttagtcctcaagaagtcttggctattaaggggcacttatccatacaacctctactttttctaggcactaaaagggggaaaaggcttaatagccaaaatagttatcaaaagaccctaaagctggggtcctgtacaccatgaaaggattactttcattctcatgtaagggcatgct

SEQ ID NO: 14807 - DNA, 427 bp, Homo sapiens
gtcttaatgtcatttttgggtatacatacatgtagaaagccctcctgatataaaatccagtagctatttgacagactacccattaatttattactggaacttaaaaataattactgtacttttaaaagaacaagaaattggtcaggtgtgagccaccacgcctagccaaacccatctctttcattaaaccacctcattttggttcagaaacaagactgccatgtatgtatttaatgcttattatgtgccaagcactattccaggtactaagatacagtgatggacaaaacaagatcccttctcctctatctcaggacttattaatttgggcattttcattttccaatataggatcttttagtactggtataggattcctgaaggaattcctgaaatataattatttttctgctagagcaaatcaatt

SEQ ID NO: 14808 - DNA, 447 bp, Homo sapiens
  misc_feature (1)...(447): n = a,t,c or g
gggctcnnnnnnnnnnnnnnnnnnnnnnnnnnnnnnnnnnnnnnnnnnnnnnnnnnnnnnnnnnnnnnnnnnnnnnnnnnnnnnnnnnnnnnnnnnnnnnnnnnnnnnnnnnnnnnnnnnnnnnnnnnnnnnnnnnnnnnnnnnnnnnnnnnnnnnnnnnnnnnnnnnnnnnnnnnnnnnnnnnnnnnnnnnnnnnnnnnnnnnnnnnnnnnnnnnnnnnnacaggaaaaacaaggcatcctgatctagttcataaaagagaatgcagaaatattttaaaaaggaaagacctggagtttaaagccataaaagcaagttattattcaaatagtctggaaaatcaaggttgatttaatttgtattgcaccttaattattggagaaagacaatactgacttctgaacacagaatgaaaatgagcaatgtaaatgactggccttttagaaa

SEQ ID NO: 14809 - DNA, 1926 bp, Homo sapiens
  misc_feature (1)...(1926): n = a,t,c or g
aggagccttaggaggtacggggagctcgcaaatactccttttggtttattcttaccaccttgcttctgtgttccttgggaatgctgctgtgcttatgcatctggtctctttttggagctacagtggacaggcatttgtgacagcactatgggactgagtaacattctctttgtgatggccttcctgctctctggtgctgctcctctgaagattcaagcttatttcaatgagactgcagacctgccatgccaatttgcaaactctcaaaaccaaagcctgagtgagctagtagtattttggcaggaccaggaaaacttggttctgaatgaggtatacttaggcaaagagaaatttgacagtgttcattccaagtatatgggccgcacaagttttgattcggacagttggaccctgagacttcacaatcttcagatcaaggacaagggcttgtatcaatgtatcatccatcacaaaaagcccacaggaatgattcgcatccaccagatgaattctgaactgtcagtgcttgctaacttcagtcaacctgaaatagtaccaatttctaatataacagaaaatgtgtacataaatttgacctgctcatctatacacggttacccagaacctaagaagatgagtgttttgctaagaaccaagaattcaactatcgagtatgatggtattatgcagaaatctcaagataatgtcacagaactgtacgacgtttccatcagcttgtctgtttcattccctgatgttacgagcaatatgaccatcttctgtattctggaaactgacaagacgcggcttttatcttcacctttctctatagagcttgaggaccctcagcctcccccagaccacattccttggattacagctgtacttccaacagttattatatgtgtgatggttttctgtctaattctatggaaatggaagaagaagaagcggcctcgcaactcttataaatgtggaaccaacacaatggagagggaagagagtgaacagaccaagaaaagagaaaaaatccatatacctgaaagatctgatgaagcccagcgtgtttttaaaagttcgaagacatcttcatgcgacaaaagtgatacatgtttttaattaaagagtaaagcccatacaagtattcattttttctaccctttcctttgtaagttcctgggcaacctttttgatttcttccagaaggcaaaaagacattaccatgagtaataagggggctccaggactccctctaagtggaatagcctccctgtaactccagctctgctccgtatgccaagaggagactttaattctcttactgcttcttttcacttcagagcacacttatgggccaagcccagcttaatggctcatgacctggaaataaaatttaggaccaatacctcctccagatcagattcttctcttaatttcatagattgtgtttttttttaaatagacctctcaatttctggaaaactgccttttatctgcccagaattctaagctggtgccccactgaatcttgtgtacctgtgactaaacaactacctcctcagtctgggtgggacttatgtatttatgaccttatagtgttaatatcttgaaacataggaggatctatgtactgtaatagtgtgattactatgctctagagaaaagtctacccctgctaaggagttctcatccctctgtcagggtcagtaaggaaaacggtggcctagggtacaggcaacaatgagcagaccaacctaaatttggggaaattaggagaggcagagatagaacctggagccacttctatctgggctgttgctaatattgaggaggcttgccccacccaacaagccatagtggagagaactgaataaacaggaaaatgccngaacttgtgaaccctgnttctcttgaagaactgctatg

SEQ ID NO: 14810 - DNA, 574 bp, Homo sapiens
  misc_feature (1)...(574): n = a,t,c or g
gtgagacagagatacttcctccaggagaatgaataagaagagaacatctctaaagatttatttcttgtttttggagtggacagtaaccctaaaaacttgacatttatggtaaattttcaagggaaggggatgaaaaaatggcatgctttggagcgaaattgcagctggggatgcagcatagtatttccaagaaggatccaagaaacaaagtgtcaaaatctgtattgtaagaaggctggtgctcctgaaatctagcaggcaggtgcttactagaagtcacaagttgttcatttctgtcttcaacatcatttgatactatagacttattcataaggtcaattgcctagtcaggcttatgcagtggatagattctgtaatgttggaaagattctgtgggatggaaagattctgtgggatgcaaaaagaaactgtgtctctgatgttgccattttcaccccaggatgatttgctttacaacgtgctgtctgcaaataagtttgtggttaaaattttagtttactccccatgatgtgctattcatctatttcaactgatcagnnaaangnctggtgga

SEQ ID NO: 14811 - DNA, 442 bp, Homo sapiens
  misc_feature (1)...(442): n = a,t,c or g
gttgatattcaccctgacgggaccaagttcgcaactggaggacaaggnatgtttatggaataaagaaagggaaagcttaacagccctgccaccttgctcttctcctgctgtccatttagctgtagagggaatacttgctatttttcaggatggatgcaacgctgtttaaaatgtacagttataatgtgttatctgaatgaataaaatcaaaatccttttatggctttagtgtgctctctgtaagtattttggcagcggatgtatcattctaatttctgtttattgagttaatattaaaatcagtttgtatccccaaacttgtagagcatcgagagcggtaggtggtccantgggcaaagcccagccccagagacaagggctctgtcagcatttttctcatctgaaaaaagggaatgagggtaatttaagcttctaaagcaac

SEQ ID NO: 14812 - DNA, 2151 bp, Homo sapiens
ggatgtggatgatgctggggactgttctggggccaggtataatgactggtctgatgatgatgatgacagcaatgagagcaagagtatagtatggtacccaccttgggctcggattgggactgaagctggaaccagagctagggccagggcaagggccagggctacccgggcacgtcgggctgtccagaaacgggcttcccccaattcagatgataccgttttgtcccctcaagagctacaaaaagtttctttgcttggttagatgtctgaaaagccttatattcttgaagcagctttaattgctctgggtaacaatgctgcttatgcatttaacagagatattattcgtgatctgggtggtctcccaattgtcgcaaagattctcaatactcggggatcccataagttaagggaaaaaggctttaattgtcctggaataacttgaagtgtgaatgctgaaaatcagcgcaggcttaaagtatacatgaatcaagtgtgtgatgacacaatcacttctcgcttgaactcatctgtgcagcttgctggactgagattgcttacaaatatgactgttactaatgagtatcagcacatgcttgctaattccatttctgacttttttcgtttattttcagcgggaaatgaagaaaccaaacttcaggttctgaaactccttttgaatttggctgaaaatccagccatgactagggaactgctcagggcccaagtaccatcttcactggggctccctctttaataagaaggagaacaaagaagttattcttaaacttctggtcatatttgagaacataaatgataatttcaaatgggaagaaaatgaacctactcagaatcaattcggtgaaggttcactttttttctttttaaaagaatttcaagtgtgtgctgataaggttctgggaatagaaagtcaccatgattttttggtgaaagtaaaagttggaaaattcatggccaaacttgctgaacatatgttcccaaagagccaggaataacaccttgattttgtaatttagaagcaacacacattgtaaactattcattttctccaccttgtttatatggtaaaggaatcctttcagctgccagttttgaataatgaatatcatattgtatcatcaatgctgatatttaactgagttggtctttaggtttaagatggataaatgaatatcactacttgttctgaaaacatgtttgttgctttttatctcgctgcctagattgaaatattttgctatttcttctgcataagtgacagtgaaccaattcatcatgagtaagctcccttctgtcattttcattgatttaatttgtgtatcatcaataaaattgtatgttaatgctggaaagaaaaaaagaagaaagaaagaaaccatccctgtccttcagtttataatctagttggagagataagaaacgtacaaaccaaaagataacagaatatctgaagcatgtactcattgtcagatgttccctctgagagcacagaggagggcaaaagcttctgtgggatgtgctagtcggctaaagcttcacagaggaggtggcaattgaaaatgagtcctgaatggggtagggtggttagggaattccatgagacaagacaaggggggcatggtgtgagaaaggcatggaagtaggaaccctcttcctatgacaggagtctacactgcttggactgcaccaaggacttcccttgacagttgtgcttctggttgaatttggccaatggagaggccattcaggaaagcagaaagaaaaaggagagtgaagatggaatacttacttgaagtatttatctggatggtgcctctcaaacaaaagtccaattcccatgggatgccttctccaaacagctatatttctagcttctctccttccccttttagacctaggactgccaaagcttccctattgctgctagtcatggagtactggcactaccgcctgtagtttcccttcactctatccacgcatttcatgaactctcttcaaattactcaatatgggtagccatcgacttcttaccaaggccctgactgagacactttcattcttttaaaaatatccgagtcaactaatatattaaaatagaccagcatctcttctcaaaaaaaaaaaaaaaaa

SEQ ID NO: 14813 - DNA, 226 bp, Homo sapiens
ggaggtggagcatgccagaggccctgggagcgctgggtgctgagcccgtgaaccccctggccagccggacgttgatgcaatatggctttgtccagaccctatccagctgctgccccatctccaagagcctcgccctgctggaagtgcactgctagtctggttcatcagccactctgcacaggacccctgcccaggacccagggtctgcaattttaaggccatcctt

SEQ ID NO: 14814 - DNA, 758 bp, Homo sapiens
tttacgtagggtctgaaggataaactctcgggcatccgcaaagttatcacggaatccactgtacacttaatccagttgctggagaactataagaaaaagctccaggagttttccaaggaagaggagtatgacatcagaactcaagtgtctgccgttgttcagcgcaaatattggacttccaaacctgagcccagcaccagggaacagttcctccaatatgcgtatgacatcacgtttgacccggacacagcacacaagtatctccggctgcaggaggagaaccgcaaggtcaccaacaccacgccctgggagcatccctacccggacctccccagcaggttcctgcactggcggcaggtgctgtcccagcagagtctgtacctgcacaggtactattttgaggtggagatcttcggggcaggcacctatgttggcctgacctgcaaaggcatcgaccggaaaggggaggagcgcaacagttgcatttccggaaacaacttctcctggagcctccaatggaacgggaaggagttcacggcctggtacagtgacatggagaccccactcaaagctggccctttccggaggctcggggtctatatcgacttcccgggagggatcctttccttctatggcgtagagtatgataccatgactctggttcacaagtttgcctgcaaattttcagaaccagtctatgctgccttctggctttccaagaaggaaaacgccatccggattgtagatctgggagagga

SEQ ID NO: 14815 - DNA, 1509 bp, Homo sapiens
tatatagtttcaggttttattttcataattatcttcctatagaagcaataatctgtatttccataacaacacatttaatattctactcatcggagttgggaaaaataggaataaagcagattccatacagaaataccgtactctgcatatgtacaaataaattcaatatattaaatctattttgtagctggacttcacttacaatgtaacagaacattgaatattagattctggagcatattcatgcaaacttcccactttggtgaaagtgatgacagtggagttctggaagacaattttccttgtaaacaccaagttttgcactttggactatgctctcaagatagaaacttacgtgagtggaaaaagaaaatgtataaatgtgaaacaaatattccttaccacacagaataaccctgacaacaaacaatatccccaagtcctggttattcaatcctcaccgtgggcaggaagggtgaaggaggctgcacctggacacagccttttgtgtggtttaaagcatagctgcgctgctgctacagaatgcacttcatcatcaccttttttaaaaaaagttttcagtacataagaagagtaaaattaaaaaattttttcccccagactttaatgggtaatatgatctatctatacataaatagtctacagtatctttaaagtattgccaaatctgtttaaacagattactaattagctcaaatgagcattaatgtaagactccagaagtttccgattggatctaaaggatacaagctgcaatgatgggatctttgaaacactgcaatgtccttaaatgcaaatgtctacatatagcttgttcatagttaatcccaatatcattaataaaaatgaggtgctacctgaagaactatgccaataaattaaggaagaaaaacattaaatttattagcattttgtatcagacttacaataaagactgtataccaacatccacgcacccaagaccacctcccaaaggaggatgttattctaagctctcccgcagaactgtgactaaaatcacttctgatactccaccttagtgttttcaggaagtctagcaaaattaagcaacctatactcaaataaggtatgactctaaaagagacagagacagggcatggatgagcaggaattactttggcagcgtgtacctgcagaacgcacactgctggtgtctgtagcctctttccaattaacagattacgagatgggtctaagccacacaacagggtgaaaaaggaatgtttcgaaaacagcattttaggaaataactataaaggatcaatatattggccagtgccggtgttttaaatattgtctttctaaaacaattcttccctttcagctaagttttcatagtatatagcattttccatgtcaagttatgacggagttacaatcaaaataaaataaacaatcaaaataaactgttttggagggaagaaatatatctgtattagactgatggaaacattacctcattcttac

SEQ ID NO: 14816 - DNA, 579 bp, Homo sapiens
  misc_feature (1)...(579): n = a,t,c or g
agaattttatttatctgccactaatccccatgtgtctcatacccaaatctaggattttcctcttcccacctggagtatccggcgtgcatggtttatccacaattaaagcagactgcaggctgctcccctcaccagaaagccgctcccttaagcagccatagattacatgccctggctctgcctgccagagaaagccggtggatttgattttgttagcaagagctgactgagaccctagcagctgcattctactttacatattaaagagtggaaatacaaataggacagtccttttgccactgcaagagcagggggggttaggtgggtagaaaggcaggattttacttgtggaaatcagtgcctgccttccatccacaaaaaccagatgtcaatatggaggaggcacatgtcagcggcgcctgggaagcctgagttccagctttccctccccacaaccctgctctgtaactgtgggcagagcatgtctgctccaagagcctcagtttacacccctgaaaaatggagttaatgccttacagggattttatgagccacagtaagagattatgtgtganagtt

SEQ ID NO: 14817 - DNA, 1094 bp, Homo sapiens
tggaagcagcactcaagatggtaggagaatgagctcctgtttcggagctgcgccgcgaggcccgcctgcgccgcgaggtacctgtaccgcaaggcccgggaggaggcgcagcgctcagcccaggagaggaaggagcggctgcggcgcgcgctggaagaaaaccgcctgattcccactgagttacgccgagacgtctggccttacaggggtccctggagtttgatgatgctggaggtgaaggtaactatacaaggtgtgaccagccacgtggatgatgaataccgatgggcaggagtcgaggatcccaaggttatgatcactacctcccgagaccccagttcccgcctcaagatgtttgcaaaggagctgaagctggtgttcccgggcgcccagcgaatgaaccgaggtcgacatgaagtgggggcactggtgcgaagcctgcaaagccaacggcgtcaccgatctgctggtcgttcacgagcatcggggcacacctgtggggctcatcgtcagccacctgccctttggtcctacttgcctacttcacgctgtgcaatgtggtcatgcggcatgacatccccagacctgggcaccatgtcggaggccaagccccacctcatcacacacggcttctcctcccgcctgggcaagcgggtctctgacatcctccgatacctatttcccgtgcccaaagatgacagccaccgggtcatcaccttcgcaaaccaggacgactacatatcattccggcaccatgtgtataagaagacagaccaccgcaacgtggagctcactgaggtcgggccccgctttgagctgaagctgtacatgatccgtctgggcacgctggagcaggaggccacagcagacgtggagtggcgctggcacccttacaccaataccgcacgcaagagagtcttcctgagcaccgagtgagcacactcaccactcagtcaggacatggacttggaactcaggatggggctgtcatagacagacccaccagtaggaactgtcacagaatggcctgctgaactgggatgtggaactgtggcgggtggagaggtctgaataaaccgtctgtgtcatggcaa

SEQ ID NO: 14818 - DNA, 1341 bp, Homo sapiens
  misc_feature (1)...(1341): n = a,t,c or g
ttttttttttttgcttggaaaacgaggatccacatgtgtaaataaacgggaactacagctcaaaggcagtcatacacttgtcattcttgtttcttcctctcatgacatggaaaggcaggtagaaagatctcttgaaggttgctccgaagcccatgggagtgaatgttccggtggacttggggctctgctgacggaggcccaggccacaaggggacaacgctggcaccaggcccagtcacctctgtaccactcgttagtagtctggttggtggccgccagatacaggacaaacaacaggtagccacccaggaggaagctcagaaccacgacaaagcccagcatgaagacaatccgtggaaaagtcaggaacaggtactgaataagaaagaccgtgtccataacatggaggtgtccaaggtcatcgatgtaagtctcctggtataaatctgacatcaccaccaagtggaccagaaaagtggtgctcacaatggcgacggtggcagccgaggccgtcaaggtcaagacgtagatgaggaagtacctgatgttccaggccccgatgcagttgttcacccaaacacagtgatggtcgaaacggtgcacacaccagttacacacactgcagtgcttggatcgagctggtttccttaaatcacaagtagagcacctcacgttctttggaaacatcacttcatcaaattcataaacatgaagaaataataattcatttgcttttgttataatgccaggattggttccacaagtcagggtgaaaaaaaacaggtttacacctagcagcagatagggcagaagaaggtaatgcaaggacaactccagctcctgacagtagccaaatacttcccaggtgtactcagtataaaccatcccttgcaagaccaggtgcaggacaatgaaggtgtggtttctcgtatggaaaaggtaatgaagcaatccatgcacgggctctctgaagacattctggaattatacaggaaaatatctgtgcttccttccccttggccaggcctttcaagctatgggttttcgagcagacgcagataagaacaagacccatcagcaccgaagccaggtagaacaagaagaggaccagaaagtccatcctgcagatttctcttggttgggtaattttcagccggcagctctggcattcctcttcccaacattcacagataattcaaacagcagctcctcttgggcagcagtgtgtgcctggcatgaccagtagctgccggacatggttcttccaggagcctggatctggctgcagagacagatcaattcaacacccacataagacgacaagagttgcagtcaanatgc

SEQ ID NO: 14819 - DNA, 802 bp, Homo sapiens
gtatgatgtttgcatgtgatattcattacagtattattttaatagtagaaaattgttaaaaatctatatgtccattaataggaaattggttaaataaaatgaggcttccacaaactgaaacactctaaatctatattctattatttacataagaaaattattttggtaaagtaagtaagtcaaaaacacagattacaaaataatatgtactgtataaaattatataactcaagtcaagtgaatggttcagcaaaatagtgtttctctgaatgatgaatttgggggtgatttttacttgcttatactttagtgtcccaaattttctacagtgactataaatttcattttaaaactaaaaagttcttacatttggggaaatgcagtgaattcccacatcatgttttaaattactcagccactaaaaatgaatgtgcatggcgtcattaacataatcattgcctgaaccgtatttttcacactatgtactctaggttcctggaggtgaaaggaatctggacttagagttcttggctacctctggctgcccccgaattagaacagcccatgggggtatgtgtattgggagtggaggagtggacgggtagattgactttttctcaggcatcaatctgttacaaggttcatggtttctatggggccagatgcatgagaggtcaaagcatgggcaataggggttaactgaacgagttgaatgctaggaagtcctcaggggagccaacgttccttgtaaagtgtgtagattttttgttttttaactaaataaaatcttggcactgaaaaa

SEQ ID NO: 14820 - DNA, 515 bp, Homo sapiens
gcccggtgagagccgctctgcctctctgccgtgggtgagggggctgggggctgcagatggtgcctgaaagtgccctggccaccccttccccagatcagcggacagctctcccctcgcctcttccggaagctgcctccccgggtgtgcgtgtccctcaagaacattgtggatgaggacttcctctatgcaggacatatcttcctgggcttttccaaatgcggccgctacgtcctctcctacaccagcagcagtggggatgacgacttctccttctacatctaccatctgtactggtgggagttcaacgttcacagcaagctcaagctggtagggaggcttcaacaccaggctggcccttcagatggtgtggttcagcaggtcacagcaacctctgagcctcaggttccttgggtgtaaaatgatcatcatgtactcctggggtcatcatcaagattccatgtgttagatccaaccatatgaaattaccagggcctggcatggtagctcacacctgt

SEQ ID NO: 14821 - DNA, 1489 bp, Homo sapiens
tttgtacatgaaagagtatttattgaaaacatggttactgacaggaagctcctggctgctctctggttacaatcttggctcacaactggaagtgttacatactttttacttcccctcaattttatttttccccaaggttccatcctaagataggtagatcttatataaatatatatacacgtctgtataagtatggcctatagtaatgaaaatatatagtacactcttcattgggtagtacctaccatgccaggccaccaatactgaatgccaatgtgctaacgtatgtccagggagagaggctgtgtgtgtggtttacaagtgctgcagcaccagggaagccccactggcacaggtgtggcctcagccggcctcagccagctccctgaaatcatggccaatggcagaaaccatagcactaggaagggaaggccaacttcctggggtctggaaggccaaaggaaagcaaactggagggggctgcaattcaggttaggggagatttctctctgaggaaggaaaaggtattaatgtgggggaagagcagtagaatctagtgacctcaccacagtctaggcccaggcctcagctgggttttccctgcagcgttcctggagacttaagagggcaggacttggccaggaggtctttgacttgctgggatgagactgagcgcttgcagggagaaatttccgtctgctctgatatctgtatgggccagagagatctggtggctctaaagaccagagatgttagagccaacctcagaagcagcaacgtcttggcaccatatgaagctggagtgagccctcatcaaaaaagacaaaagcaaaagcctcaggcttgtactcagatctaagatacaggtagtcacttcaaggctctcaacacgcccaacacacctgtcctctgcaggcagcctttcctgggccagctgttgctcacgtggggatccagctgatcagagagcaggctcaggaggaaaaggtgagtggctgttgttaaatccatttcaagaagcagtttcttggactggaaggcaagggcatctgctgtttgttcctcgtggcccaatcccaggcttcatggtgatggagtgggcagagcaccctgccttcatgactcttagtagacagggaccaagaggaaactctgggtggtccgaggtgggtttgagaaatggctggcatttactggccaccaaaatcactacagattctgtacaagcaaaagacaaggcaccagaatgtaagtgtttctcctgggcccaaaatcccttctcctgggtaccgtcgtttctggctccaggctcagccatagtgatagacaaagtcatagctgctgggctccttggggatggggggtggggcttcgggaatctggatgttctccaggtccaggagccgcagcttcatctccatgctcagcagggtgtccaggtcactcttggtcagcttcacatgacatgtctatcccagaaggcactgag

SEQ ID NO: 14822 - DNA, 1905 bp, Homo sapiens
aaaattgtttgctgccctgttgattaaatgtgttgtgcagctggaactcatccagactatcgacaacattgtcttcttcccagccacaagtaagaaagaagatgcagaaaacttagctgcagcacagagagatgcggtggactttgatgttcgcgttgatactcaagaccaaggaatgtaccgctttttaacatcacaacaactttttaagctactggactgcttattagagtcacatagatttgcaaaagcgtttaattccaacaacgaacagaggacctgcccttgtggaaagcaggattcaaaggcaaatccaagccccaaccttcttgaagcaggaagaccagcaagcctggcctgtgggctgccgcatttctccttccggatgtacatggatgagagccgcgttagtgcctgggaggaggtccagcagaggcttttgaatgtctgcagtgaagcactaagttacttcctcactctaacatcagaaagtcatcgagaagcctggactaacttactgcttttgtttctaactaaagttctaaagataagtgataataggtttaaagctcatgcatcattctactaccctctcttatgtgaaattatgcaatttgacttgattcctgaacttcgtgctgttcttagaagattttttctgcgaatcggagtagtttttcagatatcacaaccacctgaacaggaacttgggaataaacaaggcaatgatgggggaacttaatattttttgttgggccatttacatccctctgctctttaaaaggacgctggagctgaggtttcctacctgaaaaatgatttctctggattgccagtgtcctgagttactggtaaagatgcttagaagtcttactcaaacttgcaacactccagtcccttttagtgctggtggattttgtgtgttatattggcctcatgttgagcagaaagcctgtttaaacagtgtcagctcatgctcacgggtccttccctgtcttccacggcaggaaaagccccacgtttttggcaggtgtggaagtgaaacttacccaaagaactatagatgtaaagattgaacttctacaagaagtacaactcaggagagctgtattttgaaggataaaatgtttataattggggagtggggagagaagaagaaattattgttcatggtaaaagatatttagcaactatggtattcttattctgaagatttttgcacactcaggctatctgagatactggtaatcatcctgtgaaaaatgtacagagatgcaggtctgtaatataaaaatcttaaaacattatatagttcttcctgcactgttttctttattttcttattcatttgctaaatacccataatattttgtcaaatgcactaaacatttgggtggaactttcttttttattttatagggatttttagttttgccctttttggtaggtggtgattttgaggctgtaacatgcccagaagctgttgtggccgacacttcaacaatagggaaaaaaaggtagaaaatatccctactgacagtaactacctgtcacatatttctcttaggacttttaaagatgagccattaaaatagaatgatcctttatggaccaaaacttgaatcactgcaaaatgaatccagattgctgtcattttcttttcttttgggtggtggggcttgatgtagattttactctatgtacagaatttaacgttgaatatattaaaataacaaatctggcatggtttgcggaggttagatttactggaaatgtattcatactgtgaattgtgctctgatggttaaaagacaagattgtcaagcattccgtattaacagtggatgtagaaaattttttcagatggacaaaatgtatatggtacagatgtaaagttttctatgt

SEQ ID NO: 14823 - DNA, 1022 bp, Homo sapiens
  misc_feature (1)...(1022): n = a,t,c or g
cgtttctaggcctggtcggctggcggcgatggcaggattttcataatatatgtagtatgagttccacatcttggcctcttacccagcttcagcagtctcagctccaccagttagagaataaatgggatttgcatgaactccactctgagctgaaatacagactgcggtgttaatatccttttcttctgattgttattaacaggtccttatgtcgtcagaagatcgagaagctcaggaggatgaattgctggccctggcaagtatttacgatggagatgaatttagaaaagcagagtctgtccaaggtggagaaaccaggatctatttggatttgccacagaatttcaagatatttgtgagcggcaattcaaatgagtgtctccagaatagtggctttgaatacaccatttgctttctgcctccacttgtgctgaactttgaactgccaccagattatccatcctcttccccaccttcattcacacttagtggcaaatggctgtcaccaactcagctatctgctctatgcaagcacttagacaacctatgggaagaacaccgtgggcagcgtgggtcctggtttgcctgggatgcaatttcttaaggaagagaccctagcatacttgaatattgtctctccttttgagctcaagattggttctcagaaaaaagtggcagaggaaggacaggctcaagcttctcccaacacagagctagattttggaggagctgctggatctgatgtagaccaagaggaaattgtggatgagagagcagtgcaggatgtggaatcactgtcaaatctgatccagggaaatcttgggactttgatcaagctcagcagataaaatgctttaatagtaaattgttcctgtgcagtatctgtttctgtgagaagctggggtagtgaatgcatgtacttcttggagttgcaggcatgtgtactgcaaagcctgttctggaaggantactttggaatnccagttcagagatggccaggttcatgnctcaactgcccattt

SEQ ID NO: 14824 - DNA, 764 bp, Homo sapiens
gagctttggggccatttggatcacacgatgttttttcaagattttagaccctttctaagtagcagtccactggaccaagataatagagccaatgaaaggggtcaccagactcacactgacttctggggagcaagacctccacggttgccattgggtcggagatacagatctccgaggaagttctcgtcctgacagatctccagctattgaaggaatactacaacacatctttgcaggattctttgcaaattctgccattcctggatctccacaccctttttcctggagcgggatgctgcactccaaccctggggactatgcctggggtcagacagggcttgatgccattgtaacccagcttttaggacaactggaaaacacaggccctcccccagctgacaaggaaaagatcacatctcttccaacagtgacagtaactcaggaacaagttgatatgggtttagagtgtccagtatgcaaagaagattacacagttgaagaggaagtccggcagttaccttgcaatcacttctttcacagcagttgtattgtgccgtggctagaactgcatgacacatgtcctgtatgtaggaagagcttaaatggtgaggactctactcgggcaaagccagagcactgaggcctctgcaagcaacagatttagcaatgacagtcagctacatgaccgatggactttctgaagctaaagaccacacctgaatcagggctgtggtaatcatcttaccatagctgtaaattgtatc

SEQ ID NO: 14825 - DNA, 743 bp, Homo sapiens
tttttttttttctaattcaggagttcttttattgccagtgaccgagagatggctagagctcaaaattctctcagccccgaagaaggggatagatttctttttataccgtggtctaaatagggcagggggagcctagctgaagcaatttttacagaagcagaacacgcaaaaagttaaaaaaaattaatggttacagagatagttacagaaaaatacacagttccaggtgcaggggcttaaactatcacaaagagataaatgcgggggctttaggtaccttccaccgagcacattcccaggagctgctggtacagcttgcctcaatatcttatcagcaggtgaattcctggatgtgcttggagtcagcttgcactagttattcccttaagggagggggataaggggactgcaagtgaagaggctaaaatggagtctgtccggctctgtctgctaggagagagtcactcagattaaaacaaggtagggtatcacaacaagttttaaaatgtgcccatttaagttggttttttgtttatgtccttcattatggttggcaaaccaatcgcctccccaaacatgtcccattccctaatttccctggaacctgtgaatatgttaccttaaggtgacaaaaggaattatgcagatgtaattaaggttaaggatctggagatgagattattctgaagtatctgggtaggcccaatctaatctcaggagagagtcaaagcatgagaagaatc

SEQ ID NO: 14826 - DNA, 804 bp, Homo sapiens
gctccctaaaaagggactaggaaagaatgaagatggcattaaagtcccaactgaggctgaaaaaaatcaaaaaaagaaaaggaatagggcatcctttttagaagcggtcactgtagagcctccaaaacccattccattaatttggggggaaaaaaaaaactgtatggtaaatcagtagccgcttccaaaacaaaaactggaggctttacacttattagcaaagaaacagttagaaaaaggacatattgagccttcattttcgccttggaattctcctgtttgtaattcagaaaaaatccggcagatggcgtatgttaactgactttaagagccattaatgccataattcaacccatgggggctctcccatcccggttgccctctccagccatgggtcccctttaattataattgatctgaaggattgcttttttaccattcctctggcaaaagaggattttgaaaaatttgcttttactataccagcctaaataataaagaaccagccaccaggtttcagtggaaagtattgcctcagggaatgcttaataattcaactatttgtcagactttcatagctcaagctctgcaaccagttagagacaagttttcagactgttatatcgttcattatgttgatattttgtgtgctgcagaaacgagagacaaattaattgaccgttacacatttctcagacagaggttgccaacgcgggactgacaatagcatctgataagattcaaacctctcctcctttccgattacttgggaatgcaggtagaggaaaggaaaattaaaccgac

SEQ ID NO: 14827 - DNA, 1683 bp, Homo sapiens
  misc_feature (1)...(1683): n = a,t,c or g
ttgtttttaaagcctttttatttttttaaaaaaacaaaaacccccaaacaaaaacaaaacctaaattaaaatatttcccattggaggctatttctttttttgtcttttaaaaattttattacacaaatatcacccattcccacgtgtcagaggaaagatgtccttgctctctctaaaaccaatagtggagaacttttggaaaacaaaacaaagtccaactagcttcctccttctctggcccaaaataacctcaatgtgtcaactgagatagcataagacttatccccttaatgcttacatttaatttaaactttttagcacaacattggagattgactctaaatcagcaacaaaaaaatatatatttacaatatttctccgaaaaacaaaaaacacaaccaaaccctttaaacataagtgactttaggagttttatttatggagcagttatttttttaatcaccaagtgattttatattatatatatataaattttcttcctttcctttgtggtttttcgccccggtgcttggaaagatggaggcaggggttctggtcctgcagtctgagggcaggctctcctggcaaggccgtgtctaagagcagattgtaggacatgcgatggactccccaggttcctctgtcccccaacagagacacttctttcctccacatggaccaaccctcacctctaaaaaccatttcccctcacagtcccaaagaaaaggaaaacccaggcaagggcatggtccatctgctgccttttctgggctcccttttctgctgaccaatttacgtgcacggtaaaaatgcatgtttttccaaaccccaaaaaaacaaacataaaaaccaaaacccaaaagaaaccattggcttggaaatttctgtggatgaaatgtcccaaagtcagaggcactctcccggcacaatccctgctctgaaggggtctctccacctccccttttataaaaagacaacaaaataaaacaaagtaatcttttcagtattttccacaggagcaaccaaagaaaaaggcaggaagcttccaattataggtcattaacgataataaggtttttgctcaatacccagggttctttacagagaagttcccctaactgaggcactctggaataagtcactggcatttcctcaaagtttcaaccccagattattggggcctggagaccaatggaagtgggcagagggtcatgggagcagactgctgtttgtaaggtgcagtcaaaagattcagcagattggaagaaacaaacaaaatgccaccccctaccaggatccagtttcttctaaggccagttaatgccagggtcaaaactggcctaggtggcaaagaggggaccactctgcctctattgctttggaagtggcaagggtgcagttggcgtctctcttctcagtggctcacactttagacccctggtgcctgggctccattccctaactctgtagggcttcaggaagaggaaagcctgagactgggctacaggaagagggccagaaagggacagggatggacgaccaaaaggcggggcggggtggggggaagaggttgtgctatcagtatccttacagagggggagcagagtgcaaatttgcatcaatnatttataagctcttgccataggctgctgctactgagcatctcctcacacacttnaaaat

SEQ ID NO: 14828 - DNA, 484 bp, Homo sapiens
gcgactgggaatagattctctgttctttgatttttgtgttagcttctatgcattacataagaatataacctctcccagacttgtcagactggcctcatgtaggagaaggatctcaccaatccatccagccaaaaattttaaggtgctctctaatctctgtgtttattcagactgctgtctcttttttgatggtcccctcgagcttaggatgtaccacattccatcaatacccccacaataccgtagagtaggagccagaatctctagatgtagctggagatgttgaggtgctgaatgggttttccatttccttctatcttcacagctgagcctgagcatttatgtcccactctctgtctgctctaagctaaggagaagatctgtggcaaaaacctgtactcaaattcaggttgcaccctctgatcctgaggagaagctcgtagaagtggtcctactgtacgtccacctttttgtttgctgtggt

SEQ ID NO: 14829 - DNA, 1160 bp, Homo sapiens
gagatggcaggagtcctccacagggtcccttcttccctcctggcttacagcttcctctgaagacgggccagttccttgctgtctggcaagaggaaacagctggggtgcacttcactgggagttgggcaagatgtcggcagtttcctggtgcccttcaagtcctccaaaagtatcgagctaaaagcatcgccctgagcaactggtggtttgtggcccacctgacagacctgctggaccactgcaagctcctccagttcacacaacctctatttcggttccaacatgagagagttcctcctgctggagtacgcctcgggactgtttgctcatcccagcctgtggcaggctgggggtcgattactttgattactgccccgagctgggccgagtctccctggagctgcacattgagcggatacctctgaacaccgagcagaaagccctgaaggtgctgcggatctgtgaggcagcggcagatgactgaacaagttcgcagcatttgtaagatcttagccatgaaagccgtccgcaacaatcgcctgggttctgccctctcttggagcatccgtgctaaggatgccgcctttgccacgctcgtgtcagacaggttcctcagggattactgtgagcgaggctgcttttctgatttggatctcattgacaacctggggccagccatgatgctcagtgaccgactgacattcctgggaaagtatcgcgagttccaccgtatgtacggggagaagcgttttgccgacgcagcttctctccttctgtccttgatgacgtctcggattgcccctcggtctttctggatgactctgctgacagatgccttgccccttttggaacagaaacaggtgattttctcagcagaacagacttatgagttgatgcggtgtctggaggacttgacgtcaagaagacctgtgcatggagaatctgataccgagcagctccaggatgatgacatagagaccaccaaggtggaaatgctgagactttctctggcacgaaatcttgctcgggcaattataagagaaggctcactggaaggttcctgagaactgcttcaatgtggtatctttgtatggcaatgtatatagattttttaaaagaataaatgttgttttgcaaatgtaaaaaaaaaaaaaaaaaaa

SEQ ID NO: 14830 - DNA, 545 bp, Homo sapiens
gtcggctcagcaaaggggaggagattttcttcttctgcttcaattttttgaagcatattacctccgaggagttctctgctctgaagacccagaggaggaagagtttgccagcccgggatggaggcttcaccctggaagacatctgcatgctgagacgaaaggaccgtggcagcaccaccagccttggcagcgacttctccctggtcatggagagttccccaggagccactgggagcttcacctatgaggccgtggagctggtcccagcaggagcgccaactcaggcagcttggaggaagagccactcatcctctccacagagtgtcctctggaaccggccacaaccctcagaggaccgcttgccttcccagcaggggcctggccggaagcaggtcttccagctcctcttcctcaaaccattctgataactttttcaggatgggtagcagtcccctggaggtccccaaacccagatcagtggaccatccccttgcccggatcctctctctccacagactatggcagctggcagatggtaaagggga

SEQ ID NO: 14831 - DNA, 918 bp, Homo sapiens
gccagaaagtataactcagagggttttcccggctccggggagctcgcttggagccagcagtcagtgtctggacaggcagaagtccagtgaggaaagacatgggcttccaaggtgctgctggacctaagcctgagccatcacccatatgtccctccagtgtcccagtggggagttagaggaatggttctcatctccaggaaagacactggactgataccaggtggcatttgtatgggaaagaatccctcaaatgtaataaaattctccatgattgaagctgttgtctcaactgccctgggcagagtctggggaaagttaggagcagggaggtgttatctgagcaggccctagtcctactggtgtcttgagatgaatgttctattcgggaaccccacagtgagttcactttagagcatcattttagcttatttttaggattagaaataattagttgtgccttctgagcaccctttgacactctcaagaggcgtttctcacacgtttaaattgtgtgatctgtgtttagtttctccctgccccatacatgttgatatgttttggttcagatgtcacctgtatacttagtattactttccatagcagttttcacctgtggacagggttaacatggtgtgaatggtagaaggagccggtctggttttcctagacaagtctgtaaaacaaggcgtgggttagctaatcagtgaagtcttctaggttctgggattataactgacccttaggggcccttccatgctgaagtgtgcagggttggttttgaggctgccactgagtgccaaggtctgccaacatcagcacagttgtctgccaagcatgagggagtcaggggtgcatcctccatcatgggaaaggcttggggggagaccacacctgtgtttcctcttaagtattttggga

SEQ ID NO: 14832 - DNA, 431 bp, Homo sapiens
  misc_feature (1)...(431): n = a,t,c or g
gctacattgtagcacacattagcacttaactcctttttgtggctgaataatattcctttatgtggctgtaccacaccttatccatccattgatgagatgaataatgctgctatggacgttcatctacaaatttttgtgtgaacatgttttcagacctcttgagtatatacctagaggagaactgcaaggttatatgggaactctgtnnnnnnnnnnnnnnnnnnnnnnnnnnnnnnnnnnnnnnnnnnnnnnnnnnnnnnnnnnnnnnnnnnnnnnnnnnnnnnnnnnnnnnntctccacatttttaccaacatttgttaattatacccatctcactgggtgtgagatagtctctaaactgtggttttcatttctctaatggctaattgatgtttgggtatcctttctggtatttagaagaaatgctttgg

SEQ ID NO: 14833 - DNA, 1006 bp, Homo sapiens
ttttttttttttttttcaatacaatctatattatctcatatatagatttcttcctcactttatttgctcacttctgtcacgcatttaaaatgtcacagagaccaaaatagagtggctttctggtggaactcatggcagtcatacaacaagatacaaaactaggagactctgtcttctcatacatcatacaattaatttttcaagtattctttatgtacaaagagctactctacctggaaagaaaatttaaaaaaaaaaagacaaggtaggttatgcatcctaaggaggaggaggggatggagcggtcgggcacatgttcccgtccccacgaccccacggaccgctgattccctgccactgagctccccccaccctccacgcaaacagcaacgctgggcaggcgaaaaccaagggagtgggaatcagcagcactttggcctggagggagaagggaagccacggtggagagacagcttggtgaaagcagatggcggggcagggccagggctggtcctcagcctgtgtctgcacccaccctcccgggcagcttgggcccaactgctccgcccccccaagatggagggggagagctggcctctggcacccacatgcaggcctctgcccacgaggaaaggaaggaggccaggaagacggctgggccccaactctcctcacaggtggcagggagggaacctgttcattccaggaaggaccaaaagaaagaatccccagtgaacaccggcagggtccctctcccttaccctaccagcttctccaggtgactgcagcccaaacccagggataatctgggttttaaatgccaggacactttgcctgtagggacacgtgttgtgacacgaggctcttcctaagtcaggagctagtataagcccagcctgctgggggttccggaggccccaggtctagaggtgtggagggggagaggaggggcttggtggtcctgaccactcctgaggcctgtccaaggctctgggcccagcactgc

SEQ ID NO: 14834 - DNA, 963 bp, Homo sapiens
  misc_feature (1)...(963): n = a,t,c or g
ccagaaaaaaaaaataaaactctcattattngtgtggctaattataattcagcgttatttaagcacataaagaccaaaaaaaaaaaaaagaaatccaaaagatccaaactttttttaaacttaaaaaatctctttgtagtatgtcagttgcactttttttctgccataatgtaacgtagcttgccccgtcaaaaattcaattaaaattcatggccagcaatcctgttccccctcagcatcctggatttaattttcctgttgcttttgcttgcttctccatttaatagttactgaactttatgcatgttgatctatattgattttcactgcagttgaatgaacaaattatttcagtgtgacagccatgactcaagttccaattagtctgaaaagggtactttggaattgtcccatattaatcagagatggcaaaagaaaaagttctcatattaccaggttgattttgtgtctcatttcaaattttaatttaaaattatggttttcatttttgtttaccttaaagtgatgcttaaaagtggcatgtaattaggacacttaggtttgttgaaagcattttcggacatttgtataaaagaatttgtgataaatatatccaggtgctcaccaaagaaacatgtattaacaacttaaattagatttttctaactgatagttttcactcatttataatcagtaggagagactgtctagatgttgggggcagctctatgatttaagtctgtaacatgttataactgaatttagtaccctagttttgttaagctattaggattttctaatagaacttactccccctgcctccccagccttatgtttcttttaatgacttctggatcctgagctccctttgcagtctgaaaaaggtattgcagtcagaactgtgtactgatgataaaagcctctggtagcaataaaaagttgtccttaaaaaaaaaaaaaaaa

SEQ ID NO: 14835 - DNA, 839 bp, Homo sapiens
ttttttttttttttttgagtggcaacttcacgacttttatttgtggtgcctgtgctttatctcgaaaataccttctccccctgccccagacagtgggcggggagggggcagcaaaaaatagaagacgtccctccctattgcacatggaccctatatacaggcccacctggctgaggctggcgggactcttggcacattcttggatccctgctcaggaggggaggggtgacggggtggcatcacacgtgagatggggacctccaggcggccactctggtcctggctactgatccttgcacttcttggtcctcagttccttcctggtcccgtctctggccctggtcccctctggcaacgtccccctgcttggctcggcctcccacctccatcctggcctcgggtggccccctcggctcctggggactctgctcccctcccagtccggaggtcccaggggggctatggcttctctgagacttcccccggagccctgtcactcgtgttcacacgggggaaggggtgcgtgtggcagaagcagctgtataaatacgggtgcgggaaagtccctccgggtcacttggagagtttgctgatgacgcggatcaacgctgcattctcatccttgaggcgctggttgtcagcgcggaggtcagacagggccttcagctcctcctccagctctgcggccttgcgttccagggccctgcgctcgaatctctccagttccaggagggctggcctctcagcgaagcgttcttgcctctgcgtggcccgctccagctccaccttgacgtgcgccagccgcagcgtggtctcggtcagggcctcggaagccgctc

SEQ ID NO: 14836 - DNA, 909 bp, Homo sapiens
ggcaggctcgaaggcttctgcacatgctgctttccttgtggaaggaagactttcaggggccggttccgctgcagctgctgctgagcccaagaaatgtggggcttctggcagacacaaggccaagggagtgggacttgctgctattcttgctacgggagctggtggagaagggtctgatgggacggatggagatagaggcctgcctgggcagcctccaccaggcccagtggccaggggactttgctgaagaattagcaacactgtctaatctgtttctagccgagccccacctgccagaaccccagctaagagcctgtgagttggtgcagccaaaccggggcactgtgctggcccagagctagggctgagaagtggccctgccttgggatgtgcaccagaaccctggacccccgcctcacgaggaggcccaagtgcccaatgcagaccctcactggttggggtgtagctgggtctacagtcagacttcctgctctaagggtgtcactgcctggcatcccaccacgcgaatcctagaggaaggagagttggcctgatttgggattatggcagaaaagtccagagatgccagtcctgggagtagaagaggtggtgtttgtttatctcttggatactaaatgaaatgaggtgtgtgggcttgtcaacacagaattcaagcctcatttgctatcccagcatctcttaaaactttgtagtcttggaattcatgacagaggcaaatgactcctgcttaacttatgaagaaagttaaaacatgaatcttgggagtctacattttcttatcaccaggagctggactgccatctccttataaatgcctaacacaggccgggtctggtggctcatgcctgtaatccccagcactttgagaggcctgaggtcggcggactg

SEQ ID NO: 14837 - DNA, 717 bp, Homo sapiens
ctaatcctttttcagggaggcaaattgcacgtgagtttaagtatgaaggcaatgtatacctgctgattgtaaaatatttaaacattgtacatatctgtgtggttttaaaagtctgcttttaattatgtaaaattcatcttccctttccacagataacttctgttaacaacttgatatctattgtacaagatgtgttactggcatttccatgtatatatgtatataaatgcaggaaaccaacatgtcattgacacctctcttctttacttttccccatatctaatcattcctcaagtcttactgatttttatcagctagaatctatctccttatttctacctctattgccactctgatccaggctaccagcatttccctcttaggcttctgaagcaacttcctaactcccacttgtgctcctcacactcactctggtcggctatccattcattctccatacagcaactagagtcattcttttaaaattgcggacctgatccttccatctcccagctgaacgcttttcatttgcttcctgttctcatgagtatgccaaaatgtattctgggctaggaggccctgaggaatttggtccttccctcctcccccctcgttttctgtggcttcgccctcactgggcttgcctttcttttccttaaatacatcatgttctctcctattttagatcctttttccccgaaggtatgggaaacatta

SEQ ID NO: 14838 - DNA, 1303 bp, Homo sapiens
aaataagtgtagcatcagaagcagtaggaatggccgtatacaaccatcctgttaaacatttaaatttagctctgatagtgtgttaagacctgaatatctttcctagtaaaaataggatgtgttgaaatatttatatgtactttgatctctccacatcacttataacttatgtgttttatttctccaagtgcggtgttcctgaatgttatgtatgcttttttttctgtaccacaggcattatctatacctggggccagattttctgcactttgaaatgttgcctttgcctaatgtaggttgactttctgaattgtggagaggcacttttccaagccaatcttatttgtcactttttgttttaatatcttgctctctgacaggaaagaaacaattcacttaccagcctcctgaccccatcctccaccatttccttaatgttccatgggtattttcaacggaatacactttgaaaggtaaaaacaattcaaaagtatcgattatcataaattcacaaaatatttttgcaaccagaacacaaaagcagggctagtcagctaaggtaaatttcattttcaaacgagagggaaacatgggaagtaaaagattaggatgtgaaaggttgtcctaaacagaccaaggagactgttccctaatttattctcttggctggttctctcattgaattatcagaccccaagaggagatattggaacaggctcccttcatgccaagggtctttctaagttaatactgtgagcattgagcccccattaaaactcttttttacttcagaaagaattttacaggttaaagggaaagaaatggtgggaaactctccccgtaatgcttagccaactttaaagtggtacccttcaatatccccattggcaactgcagctgagatcttagagaggaaatataaccggtgtgagatctaggcaatgcattttgaatcttcactccctaccagggctcttcctatttttaatctcttcacctcagaactagacatatggagagctttaaaggcaagctggaaggcacattgtatcaattctaccttgtgctatacgtaggagagatccaaaatttggatgcttctggagactcttagacatcttttcattgttgtccatttttaaagttgatgattgctggaaacattcacacgcttaaaagcaatggtgtgagttattaatgggtaaactaagaagtgttatagggcaatgacttgaaatggtttttaaattgtatgggattgttaagaattgttgaaaaaaaattttttttttttggcagcttc

SEQ ID NO: 14839 - DNA, 1636 bp, Homo sapiens
taaatttgtaatactttcctatattgccctttgaaatttttggataaaagatgatgttttaagttccaatgagtattactagttactcaataccacttattgagtactctgtttctacgtatgtagaatgtatagggatagaagagttgaaaagggaaagcaaaactcctcaagtagcttccttaaaatgtcattcataggagatgtactggaattgctcattctgtgactttatttgtgtcctaaacattcttcagtgaaaataattttatttcagtcaaacatttatgaggaaatgagatcacatctttgtcactggatgctacttgaagagggagtactttgtaaccactttgatatgctgttatcaccaccccctgccctctgctgccataatcacacaaatttaaaaagaaagaaaacagtcttccatagatttttaaggaagaaagggcccaagccaggagatcgcttggttttcttccagaagttaaatggggggatctgaagatttgaatgtttggtctgctttgaaatgtatgtcttttgggatgtattatatgcctagctttataatcagtataaattttaattattccaggaatatgcataatattgaaatatttcatgtcctattttaatagaaaacctcagggcccaagtaacagtgatagaagttagaaaaacctttacttagaattgtccacctagtcagagcccaagaaagaattttcagtggaaaaatcaatatataacttagtgctagctagcgccacagactctagtagataatattatcatcataatggctggtgaaaccatataatcacagaaaaacattgccttcagcatgttcagttcgcagcactgagggcactcttgagggtgttgttaatgaagatttaatttttaaatacaggtggttccaagctttcaaataggttatgctccaaaagtgttatttgtaagttaatttttttacaagtcaaacaatgttggaagtggtatttaggttctagatcggtccacgaaagttagcccatatgtatatcttgaatagtataggggagggtattcataaagtccttatgtggttttaactaagtgaaattatggacaagagaaataattgtaaaatcgtcttaaaggcaaatttaatttttactcctgtttatgggacattcgttctattaactgtcagacacaatttctgttttcatctgagagccagttttcctttatttctacatctaaaataagaacatattgtacactattatataatacagaattgtcttaaactttaataaattcgcattttaaaggtgtttacagattattttttatatctgtagctgaatttgttaaagtctaaaaagctcaaggactttatgaagatctcattatatgaggaaaatcataggttaccattttataactctattgccataagaaaatacactctaaaatcttgatttgaaacatattagaaaccttgattcagtgctcagtggtctcctagtaagaagtcaccgatggtagcgtcatatgagaagaaagaaatccccaccacctcaacctctgctgagattgtgtgctaggaacagccttccctccgttttcccctcagttcaaa

SEQ ID NO: 14840 - DNA, 699 bp, Homo sapiens
ttttttgcactcaatgaacaaatctttgttgtttattttaaaattcaagacaatttttttgcaaatgctgattcaaaacgtaccaatccccatctatcatgcctatgccaatacaatctgtcacaaaaaagtttgcttctcattgtcacatagctatggggactggtggccttctaaaatcactgtccagctgctgcaagtgtgaggccagcaacccacggcagggatgcaggagggaagccatggctaagctgtgggcctggacaaaggccacagatggggttgaaaggtgagaagcggtaagctagaggagacagacggcgttgccattaaaaacaattcaacttcattttaatgttgctatgtaagttcacaataaaatccctggaagttcaaattggaaagagcagtttggggtcatgggctcaacaatataaaggcagattcagtgaggggtaagggtagtggctctgggggcagactgacctagatttgaatgccagttgtaccagactcaagacaccttgggtaagtggttttatgaagtacctcagttcttcatcagtagaaagagtgctaacacctccataagacttttgtatggattgagtaagataatgcatgttaaaccacttgtatagtttctggctaactgtaaacaagatgttctagaagttctagttatcttttttttttttt

SEQ ID NO: 14841 - DNA, 1001 bp, Homo sapiens
ttcctctcttctctcttcctctcctctctctcttcctcttctctctcttcccctcctgtctctcctcccctcctctctctcttcctctcctctctcttcctctcctctctctacccctcctgtctctcctcccctcctctctcttcctctcctctctctcttcctctcctctctcttcccttcctgtctctcttcccctcctctctctcttcctgtcctctatctcttcccctcctctatctcttcctctcctctctctcttcctctcctctctctctcttcctttcttctctctctcctgtctcggctgttgtgggttgcaggttgggtgctgctgttgtggtccttcccagaaactgccagtagagggcagcctgggcatcctaatgcttactctggttgttacacaaagaaaatattggggtcactggcgagcccacccacactcaccagaatctccactgtagtccccctaacaaacagcccttcacttcctcttccacttcagcaatttgtattttgatggccattggcctcagatcagagtgttttaaatcatcacgccctggcttatccctggtcgagccaggacacggggtgcttcagtgggtctgtcaccctctctccttgaagcatgttgcttttatttatttacttttactctcaccctgctcctgtaccagcaggggccacttcaaagccaaggtacagggtgataacttgtgggtccagcatcagttttctcccacttcttttctcccactcaaccccagcaaggtgcctggggagacttgagcagatgtttcattttggccctggccagtggctgaaagccaggcctccaatgcactgtgacctctggcttccccagcagctttcccagagaggcagaggggccttccacagcccgggttctcctgctgcctcctgcctgctgcagctgcaggcattctgaggggcaacgtggaggaagggccagggatgcatgggattttaattgt

SEQ ID NO: 14842 - DNA, 428 bp, Homo sapiens
ggctgctgggtattgaaaccagccctcacggttgggtccctgccaccatggcaacactctggtttctgagctggagtggccaaggcacaatggggtggttccatggcccagaagcactctagctacagattagtttatttcaggactatattaagtttcccaacttctgtcatgatatagtccaaagagaacctggaccacgcagacatcaaacagaacatgacactgacccattctatcagtgacgttgtgctgattgcacaggacagatgagaggctcgtatactagaagtcttgataacttgttttctagtttcacatgtccacagatgaagaaaaattgtgccccagcaaggattatacccagagcctcatccattcatacctgatttagatacttagatgatgagtaatagaaaaggtggtta

SEQ ID NO: 14843 - DNA, 338 bp, Homo sapiens
gcagagaggaagggagaggaggagaggaacagtgttatttgggggtcacagctctgcgtttgcaggccacgttctttcccatctccaccgaatgtacaagcgcttgcgtgtcggcctctgtggcaggctaagtcctatcagccatggaaacaccattgctctcttcttccggtcactgttgccaaactataccatggagggggagaggcccgaggaaggagtggctgggggtctgaaccgcaaccagggcctgaacaggctgatgctggctgtgcgcgacatgatggccaacttccacctcaacgacctggaggcgccgcacgaggacgacgctgaag

SEQ ID NO: 14844 - DNA, 1143 bp, Homo sapiens
aaagtggtcgcttatggtcagaggagcagcctgctcaccctctccaggtgggggctgtgtacctgggtgaggaggagctcctgcatgacccgatgggccaggacagggcagcagaagaggccaatgcggtgctggggctggacacccaaggcgatcacatggtgatgctgtctgtgattcctggggaagctgaggacaaagtgagttcagagcctagcggcgtcacctgtggtgctggaggagcggaggactcaaggtgcaacgtccgagagagccttttctctctggatggcgctgtgagcacacttccctgacagagaagaggagtattacacagagccagaagtggcggaatctgacgcagccccgacagaggactccaataacactgaaagtctgaaatccccaaaggtgaactgtgaggagagaaacattacaggattagaaaatttcactctgaaaattttaaatatgtcacaggaccttatggattttctgaacccaaacggtagtgactgtactctagtcctgttttacaccccgtggtgccgcttttctgccagtttggcccctcactttaactctctgccccgggcatttccagctcttcactttttggcactggatgcatctcagcacagcagcctttctaccaggtttggcaccgtagctgttcctaatattttattatttcaaggagctaaaccaatggccagatttaatcatacagatcgaacactggaaacactgaaaatcttcatttttaatcagacaggtatagaagccaagaagaatgtggtggtaactcaagccgaccaaataggccctcttcccagcactttgataaaaagtgtggactggttgcttgtattttccttattctttttaattagttttattatgtatgctaccattcgaactgagagtattcggtggctaattccaggacaagagcaggaacatgtggagtagtgatggtctgaaagaagttggaaagaggaacttcaatccttcgtttcagaaattagtgctacagtttcatacattttctccagtgacgtgttgacttgaaacttcaggcagattaaaagaatcatttgttgaacaactgaatgtataaaaaaaattataaactggtgtttt

SEQ ID NO: 14845 - DNA, 1078 bp, Homo sapiens
tcaagtctgccttgtgtggaaattatgtcagctttggcgtcttcaagttgtatggggacaaccattttgacaatgtactccaggcttttgtcaaaatgctgctgtcagtgtcccacagtgacttgctacaataccggaaactgagccagtcttattatccactcctggaatgtctcactcaggaccatatgagcttcatcatcaacttagagcctcctgtactcatgtatgttctcacatctatctcagagggactcactactcttgatacagttgtctcctccagctgctgtaccagtttagactacatcgtcacctacctcttcaagcacatagcaaaagagggcaagaagccacttcgatgcagagaggctacccaggctggtcagagactattacattttatgcagcaaaacccagatgtcctgcagcagatgatgtctgtcctcatgaacaccattgtctttgaagactgtcggaaccagtggtcagtatccaggcctctcctggggctcatcctgctcaatgagaagtatttcagtgaactgagagcaagtttgataaacagccagcccctccccaagcaggaggtccttgcccagtgcttcagaaacctaatggaaggagtggagcagaacctgtccgtcaagaacagagacaggttcacccaaaatctgtctgtattcagaagagatgtggcagaggcgttgcgcagtgatggcaacactgaaccatgcagtctcgacatgatgagctgaccagacttttctgaccatgtgcggagcagcctttatcaagagactcctgaaggtctgggtctcaggacagtgatgttggctagcccaggggaatgtatttttcaaaacatacaagcaacagcaaaaaccctaacttcttatacgtctagcctaattataagaatttctaacagtaccagtgtaaattcagtcttttctctgaaaagcagaggatgtgttttcagtctttctatcaaatattatctttgttctcctaatgctctgaaaggatgtagaaacaatatttaaccaaagaacgtaataaaccaggtttgcaccta

SEQ ID NO: 14846 - DNA, 486 bp, Homo sapiens
  misc_feature (1)...(486): n = a,t,c or g
gtctatggctgttctacttgtaagatagttttctatttccttcagtaatgtgtccacagtaccctgtatttcgagttccattatactgaagtactcgcgcggcgcctcgcctcggccggcgcctagcagccgacttagaactggtgcggaccaggggaatccgactgtttaattaaaacaaagcatcgcgaaggcccgcggcgggtgttgacgcgatgtgatttctgcccagtgctctgaatgtcaaagtgaagaaattcaatgaagcgcgggtaaacggcgggannnnnnnnnnnnnnnnnnnnnnnnnnnnnnnnnnnnnnntctaattagtgacgcgcatgaatggatgacgagattcccactgtccctacctactatccagcgaaaccacagcctgcaagaccacctccgccagcccagcccggagaaatcggagaggtatagcaaatacaacttcaacgagaacaaatgtgagctgtcact

SEQ ID NO: 14847 - DNA, 2501 bp, Homo sapiens
aatgagggaattgaggttcgtctagtaaagaggagagaatatgatgaagagactgttcgatgggcagatgctgtcatagctgcaggaggtgatggcacaatgctgctggcacgaggtaaagtcttggacagacttaaaccagttataggggtaaacactgatccagaacggtctgagggtcatttatgcctgcccgttcgatatacacattcctttccagaagccttacagaagttctatcgtggtgagttcaggtggttgtggaggcagagaatcaggttataccttgaagggactgggcataaaccctgtacctgtggaccttcacgagcagcagctaagcttgaatcagcacaatagagcccttaacattgaaagagctcatggatgaaaggtctgaggctttcagggaccccaacttctgccagtgagagcactaaatgaagtcttcattggggagagtctgtcatccagggcttcctactatgagatttcagttgatgatggtccatgggaaaaacagaagagttcagggctcaatttgtgtactggaacaggatcaaaggcctggtcattcaatattaacagggttgcaactcaggctgtagaagatgttttaaatattgcaaaacgacaaggaaatttgagtcttccattgaacagagaattggtagagaaagtaacaaatgaatataatgaatcactgctctacagtccggaagaaccaaaaatacttttcagtattcgagaaccaatagcaaatagagttttctcaagcagtcgtcagcgttgtttctcctcaaaggtttgtgttcgttctcgttgttgggatgcctgtatggttgtggatggaggaacttcttttgagtttaatgatggtgcaattgcttcgatgatgatcaataaagaagatgagcttcgaaactggtgcttcttggaacagtgaaggatttcctccatgacaaatttttgattactggcgagaatatttttacttccagaaacagactaccagtcgtaaagtgacattttttggttattgttgagactgcttgcccgtgggctcagaagtgagatttgcattattcttctgttggattctgatagaaaaaaagacattcactgtataagaaaatggatggactgaaccaattagaattgataccagtgaaatttttatattgcttacaattggtaaccaagagtgctgatacctttttaaatttagaggggcaggccttaaataaaggactaaatatttaggatttgaaacttaactgtataagtgtgttttccttccctttcctccctaattgtgggattgtcagaactgaacacatatcatttgattagtgccatattttttatagtacctgaaaaccaagattttgaaaaaattttcaagacagagaattttgataaatcctgacattgacctaattgacataggtaaatatgtttgtatatgtgctaataattttctaatttcggaacacgatgatgttatgactattgatttaaaaatttcaaataataatttttgaaattatagatgaatgctttcatttgagtttcattctgtaattcagcagttctgggtgaaatacagatagcaaaacaaatcatgatgctgttacaaatgtattagttatccaataagtgttttaagtcaatttttttaaaatgatatgagtcttacaggtttcttccatctttaaaatgctcaaacatggattcagggactaaaaggatgaactgattagacattttctattaggagtttggtaaaatattgtacaactatcttcacctgtgttaggcagtattatcagaaagaatggattctttaataaatatgtaaaacacagtagttttggaattgccttccttagtattgtgggttttcacctagcttatattccaagatttacagaatagcttttaggataagatgttaggactttttttttttccccatgagaattcctttatttttggaggaaattattatctaattattgatctacttataagtaatcctagaatttttgccaaaagatcctgtcgttgcataatcaaacagttggtattctcgtgccgttgttcaaagtcatgtgtttctttcatttggtgctgaaaatttctgttcaatcattgacaaatatttattgaacacccactctgtgccatgtaaaactatgtcaggtgctggatatgttgatgaatgaaacagactctatccttatacaatttgagtcttgtgggctcagaagtaaattctgtgaaagctggacggatagtcgaattgagtgctcttagttttgccaatatttaacatgttgttcttatcaattttttaaaataaatgttaatgtacaaagttaatctaggttttgatgtatatccagagaatcaatttttcttaaagtatctgcgtagacattcatagcaaagaatttatgacatatcagatagaaatacattaaaatgtagtgttttcc

SEQ ID NO: 14848 - DNA, 952 bp, Homo sapiens
  misc_feature (1)...(952): n = a,t,c or g
cagaaatctccaggccaccggctttccgctaccggattggctgcgtccgggtgctgaggcccggcccatttccccgggtcctttgatcacgcgcctgacggcttttccggggcccgggagccaaccgagggcgttcctgtcggggctgcagcggcgggagggagcccagtggaggcgccctcccgaagcgccagctgcccatgctgaccacccagccctccggctgctgatgtcatgagtaacaccactgtgcccaatgccccccaggccaacagcgactccatggtgggctatgtgttggggcccttcttcctcatcaccctggtcggggtggtggtggctgtggtaatgtatgtacagaagaaaaagcgggtggaccgggctgcgccatcacctgctccccatgtacagctatgacccagctgaggaactgcatgaggctgagcaggagctgctctctgacatgggagaccccaaggtggtacatggctgggcagagtggctaccagcacaagcggatgccactgctggatgtcaagacgtgacctgacccccttgccccacccttcanagcctggggtcctggactgcctggggccctgccatctgcttcccctgctgtcacctggctccccctgctgggtgctgggtctccatttctccctccacccaccctcagcagcatctgcttcccatgccctcaccatcacctcactgcccccaggccttctgccctttgtgggtgttgagctcaccgcccacccacaggcactcatgggaagaggctttccttctgggatggcggcggctggtagacacctttgctttctctagacctctggggctgggcttgggcacaaatccccaggcaggctttggagttgtttccatggtgatggggccagatgtatagtattcagtatatattttgtaaataaaatgttttgtggct

SEQ ID NO: 14849 - DNA, 1055 bp, Homo sapiens
  misc_feature (1)...(1055): n = a,t,c or g
gagcagatcatgctgagtgctgcggtgcgccggaccagccgggacgtcagcatcatgaaggagaagcttattttctcagagatcagcgatggtgtagaggtctccgatgtgctctccgtatgttcagacaacagttatgacacatatgccaacagcaccgccacccctgtggggaccccgagggggtggcagccacaccaagaccctcatagagcggagtgggcgttagctgaagacatgtctgtcccacctgtacctgacacagaagctggggagcctaggagagctggtggaagtgtgtctgaactcggagtgctctgggagcggggctccacagcctccttgtgggctccagccccttgtcagccgcagcctctcttgagggggactccctgtctcctgaggcccagctgggccaggactccatcctttcagatgcccctgcaggcctggggctccttctgggaagtatggggcctagggcttggtccccctcttctgaggccctctcctgtatcccgacctggaagctttgatgggtcatgggccatgccataccccctgtggcaatggagtgtgtggatgctcacctgtgccatctgtcctcctgtctgtgccaggaggcacctgagttctctgctgttatcctgccccaagggcctgggccgagcctctacctgaagcaactctgctcttcctgtcagtctcaaagcacaaggaggttcagcccagggaggaagccagctgcaatgtgggagacacgtcctcctccccaacccacctcattgccaccgccaaccccctgccccagggagcgggcctgagccatgttcccctagggagcagctgggagatgggccaaaagagtgagcttcaggattactggatcccattgcccagggtgttccagcagaccttcaagggcagaagggtcacttaacccagggagttccacagattgatgttgaacttnaggtttncccacattnagtgggccacagggaaggggccacttgggtagaattttttttggatattggncagggttgggtttt

SEQ ID NO: 14850 - DNA, 1178 bp, Homo sapiens
  misc_feature (1)...(1178): n = a,t,c or g
cagggggttgcagcaccgcnagngactttgcaagatcggggagttgggagggcgagagaggaggaggtgcagctttgatgctgggacctccctgagtggggctgatgaatgtatattcattagcaccatggctcacttcccaggaagactgatcaggagcccttcagggacaattttgttctcaagattcacaccttaggaacacatttttatcacctcaaaattttgatccatcacccctctctccacctatatttttacaaataccattcagacttaaattaagctgaagaaactagcctttggtaacatagggtgtcattggttttcagggatgtaaccaattccagaaatacattcttttgcctgggcatgaagactttgaaacacgggccgcttattttcagagttcctgttttgggacgtgacttggctacttgttacttccagggtgggttaccacacggcgggggtcatgcctttccctcccccaagatgataatagatttaataggactcaaagaagttgttcagaatcaaagaagaaaaagtctggcttaaacatagtaacttctgtgtgccaggttaatgacaaccaaaagctctctatttaccattattgccaaacttcatcagttgcccatcctgcaccaaaatcctgtgcgtgtttaaattcacgttgtcaccaaagaggtgcacagatcaacaacctggatgacgcaggtgttctccagggaaaccagaccaagtcaagtctccaggtaacttttttgaagtcttttttttaaggcgcgcaggtaccaagcaacagaatagagtaacctgaacgttcttactctcccaggcatggcccacgtggtgcttcaggtagaaatgtgcttcaccctcctggtggggggcgaggacacagcccactgcatggcagcatggtagagagctggggcgaatatctccatgtctttggaggatgtcagctggccgctttcagggcagagtcgggtgggcgttggtgccaccttaggaaggagagcgatgcgtgggtctggccagagctctggagccaatgccgggctgcctgagagcagaggaaatgcatggcccatgtgcatttctgagtattttaaactcgtttcaggccctgcagcctttcatgatgatgtagctcgcagagaagagca

SEQ ID NO: 14851 - DNA, 539 bp, Homo sapiens
ttttttttttttcctggtctcataaaacttttaaattccatcacattacattcacaccttttgctaaccaggatgaagagccttaaacaggtttaaagagtgcagactgcagttttgttaatacttttttcctctccaagttcttttatgctaacatttccagtggtgggaagtacaagtactattagtcatcttcattctttgcattgccaaagagttcctctttctccgtcttgttctgaaggatgaacaaaagcttgaggtgtacgtatcagaacgtaaactgcagcacgaagaccaccaacgttcacccagactgtatccacctttcgccatacgtgtcgcattccagataacgccttggtaaagcattttgtgtcttgagtaagtagtacagctcggcctgtggtaggtgtgcagacacggctcatctcccgtaggcaagctggataaaggttccagtttcttttcttggatcccatcctttttccaaatggcaaatctgttacaataatatccacagagccagttctcaatgg

SEQ ID NO: 14852 - DNA, 1122 bp, Homo sapiens
gtgagtgcgagtgaagaccatttatgactgccaggcagacaacgatgacgagctcacattcatcgagggagaagtgattatcgtcacaggggaagaggaccaggagtggtggattggccacatcgaaggacagcctgaaaggaagggggtctttccagtgtcctttgttcatatcctgtctgactagcaaaacgcagaaccttaagattgtccacatccttcatgcaagactgctgccttcatgtaaccctgggcacagtgtgtatatagctgctgttacagagtaagaaactcatggaagggccacctcaggagggggatataatgtgtgttgtaaatatcctgtggttttctgccttcaccagtatgagggtagcctcggacccggcgcgccttactggtttgccaaagccatccttggcatctagcacttacatctctctatgctgttctacaagcaaacaaacaaaaataggagtataggaactgctggctttgcaaatagaagtggtctccagcaaccgttgaaaggcatagaattgactctgttcctaacaatgcagtattctcaattgtgttactgaaaatgcaacattagcaaagaggtgggttctgttttccaggtgaaacttttagctccatgacagaccagcctgtagttatctgtgtacacagtttacagctacaaaaacctactttggtatttattacagaaaagtgctcagttaaatgtaagtgttattccttcagcaaaatattcactgacccaaaactctttatggcattttacaatgcacacagcctcatgcaagtttagacaagtggatttatactgtcttatgagtgcccgcccctgatatattacctcattatgcaaaaataacatatctttcatgactattttgacaaaagtttaaaacacatatgaagttcaaatttcaggaaccaaggactgccagaaaatattagcctctacattacgcatgcatttagaagcttacctgaaatctgccttttataaaggaatagtatggataagtggaattgtacattttttaaacttgattgccattaaagcagaaattataaggttgcaacaatatttgtttctaatcactggct

SEQ ID NO: 14853 - DNA, 708 bp, Homo sapiens
gctagaaagctaatttcccccgaaggttcatgaagccagaggcatgcccttgggggttggtcgggagaagggtgagaggcagtgctgtggaaggggcctggcccctgctgcctgcgattctccccgggtatgtggccttctgcctccttcagcctcagtttcctcacctgtaacatgagaataatgatgcctgcctgcccaggccacctcctgggactgcagtggggactctaagtgtaaaactgtcatgaggatggtttatgaagtcccagggaccacacctgccactcagggaagagaccgctgacctcagccatcagccgtgtgcatcgtgaggggcagcgagctcaggacggagagctctcccttggttcggagtcagcacacctgcactcccacacgcccacccagctgtgtgtcctccgccgagggtgagcctctctgtgactcttctgtaaaatgcaccccattctgcccactcctgccacgagacccatcctctgcgatcccgccaggcatgtgtgtgtgaatgcatgtgcaaagctctccatcagaaagggtggtgtggggccctgcaggtcctacccctcgggccttgaagctccctcgggctgcggactctgcctccttgggtctgaagcattagaaccaggagaggggtgtccctgggggcagaacaagggggtgcaaacaagccttcaagccatt

SEQ ID NO: 14854 - DNA, 445 bp, Homo sapiens
  misc_feature (1)...(445): n = a,t,c or g
tttganattcgannnnnnnnnnnnnnnnnnnnnnnnnnnnnnnnnnnnnnnnnnnnnnnnnnnnnnnnnnnnnnnnnnnnnnnnggcacgagatctttgccaatacttgccatttgcttttttaaattttagctatcttggggtgaagtggtatcatgttgagggttagattttcatttccctggtggctaannnnnnnnnnnnnnnnnnnnnnnnnnnnnnnnnnnnnnnnnnnnnnnnnnnnnnnnnnnnnnnnnnnnnnnnnnnnnnnnnnnnnnnnnnnnnnnnnnnnnnattgaaagagttctttgtatgtttggttactaaatgtttatcagatatatgatttacaaatacttctgttttctgggttgtcttttcactttcttgataatatacttttgatgcattaaaagtttaaatttacagtataattaatctggtt

SEQ ID NO: 14855 - DNA, 1053 bp, Homo sapiens
ggggagggtcagctcgttgcaccctggcccggcctcttttcgaccctgcggagcatccgcttccggttcccagactgaattgtcagtgagcggagtctgaggtcgctgtggactgcccactgggccttgcccgagcatggacagccggattccttatgatgactacccggtggttttcttgcctgcctatgagaatcctccagcatggattcctcctcatgagagggtacaccacccggactacaacaatgagttgacccagtttctgccccgaaccatcacactgaagaagcctcctggagctcagttgggatttaacatccgaggaggaaaggcctcccagctaggcatcttcatctccaaggtgattcctgactctgatgcacatagagcaggactgcaggaaggggaccaagttctagctgtgaatgatgtggatttccaagatattgagcacagcaaggctgttgagatcctgaagacagctcgtgaaatcagcatgcgtgtgcgcttctttccctacaattatcatcgccaaaaagagaggactgtgcactagaaagttgcagcccacagcccttcatgtggactctgtcatgacatgctaactagacttcaggggagccacttctgttttcagcccctccctggaatagtgagttgggaggatggggagacagctaaccaactgcattacccaaaccatattgcacttttagttccctagttttctaggtgagcttcattccctgaaaggaggatgatgatatctaggcataacctagcctgtgaggaacctagttaggaaagacaactgacatttattgaatatcatgcactagtcccttacatatgtcatattttaattatagaaatcagtagcaaaaagaatcttggggattttccatctgacttccctggccatcttatcccatccttgcactaccagaagattcatacacttttgagactccagtgagacgctgttttcaccccttcctcctcctagcctctctcccaaaaagtaaaacacaatgctgaagaaataaaaaa

SEQ ID NO: 14856 - DNA, 455 bp, Homo sapiens
ggttatggaagcctgagttagtgaaacctggcctgccacaacgtggtgaagaaagcaaaagaaaataactgggaaagaggtataaaacctagccccataaaacgtttttttgttcgtttgtttgttttttccaaacagaatctttcagaatcctgttgttctggcaggtattttttaatatttccttcttacaaatttcctttttacagatgatatgcattatattgacattaacaatcaatcttaggacacaagtggattgtttttataaataggggtctccctcaatattagtgatcctatattaagaaagatagtacatgtgaaccaatggtaaccaaaaagaatttgaaaaagcaaataatttaagtgggagctcacttgggaatataactctatgtcatcatgtatttatttaaagtcatattctatgaaatatccctatttgaaagcca

SEQ ID NO: 14857 - DNA, 404 bp, Homo sapiens
cggcactagtgggtcctgtagaggctacttttccggtcacatcttgggatttggagaagatgaactaggtgaagtttacattttatcaagcagtaaaagtatgacccagactcacaatggaaaactctacaaaattgtagatcccaaaagacctttaatgcctgaggaatgcagagccacggtacaacctgcacagacactgacttcagagtgctccaggctctgtcgaaacggctactgcacccccacgggaaagtgctgctgcagtccaggctgggagggggacttctgcagaactgcaaaatgtgagccagcatgtcgtcatggaggtgtctgtgttagaccgaacaagtgcctctgtaaaaaaggatatcttggtcctcaatgtgaacaagtggacagaa

SEQ ID NO: 14858 - DNA, 1768 bp, Homo sapiens
gcgctcagatacgcgacgcgtagcaggcggggaccgaacgggtgcctcagtgtccttcccctcccctcgcctggcctcgccgtcctctccccgcagccggaccggaactatgtgatcccggaagttccggggcctttgctgtgtgggataaacagtaatggcggaggctgcaactcccggaacaacagccacaacatcaggagcaggagcggcagcggcgacggcggcagcagcctcccccaccccgatccccacagtcaccgccccgtccctgggggcgggccggagggggcggcggcagcgacggcagccggcggctggctggactaaacaggtcacctgcaggtattttatgcatggggtttgtaaggaaggagacaactgtcgctactcgcatgacctctctgacagtccgtatagtgtagtgtgcaagtattttcagcgagggtactgtatttatggagaccgctgcagatatgaacatagcaaaccattgaaacaggaagaagcaactgctacagagctaactacaaagtcatcccttgctgcttcctcaagtctctcatcgatagttggaccacttgttgaaatgaatacaggcgaacgtgagtcaagaaattcaaactttgcaactgtaggagcaggttcagaggactgggtgaatgctattgagtttgttcctgggcaaccctactgtggccgtactgcgccttcctgcactgaagcacccctgcagggctcagtgaccaaggaagaatcagagaaagagcaaaccgcccgtggagacaaagaagcagctgtgcccctatgctgcagtgggagagtgccgatacggggagaacttgtgtgtatctccacggagattcttgtgacatgtgtgggctgcaggtcctgcatccaatggatcttgcccagagatcgcagcatatcaaatcgtgcattgaggcccatgagaaggacatggagctcctcatttgccgtcagcgagaaggacatggtgtgtgggatctgcatggaggtggtctatgagaaagccaaccccagtgagcgccgcttcgggatcctctccaactgcaaccacacctactgtctcaagtgcattcgcaagtggaggagtgctaagcaatttgagagcaagatcataaagtcctgcccagaatgccggatcacatctaactttgtcattccaagtgagtactgggtggaggagaaagaagagaagcagaaactcattctgaaatacaaggaggcaatgagcaacaaggcgtgcaggtattttgatgaaggacgtgggagctgcccatttggagggaactgtttttacaagcatgcgtaccctgatggccgtagagaggagccacagagacagaaagtgggaacatcaagcagataccgggcccaacgaaggaaccacttctgggaactcattgaggaaagagagaacagcaacccctttgacaacgatgaagaagaggttgtcacctttgagctgggcgaggatgttgcttatgccttttggctgcaggtggggacgacgaactaacaaactcttaagatgagtgggacttgtttcatgatgagctggagatttttatgacttggatctatagcaaccttgcgtggcgtgtgaactggtctgctgaccccagacagcagctgtcccctgtggtggtgtggcagtgcctgtgttctctcctaggcaggcctttaactcaggtgctgtctaagattttaccagggctgcttctaaccctactttcctaagggt

SEQ ID NO: 14859 - DNA, 2233 bp, Homo sapiens
ctcacagcagagtagctaaacctcatcaaagggaaaagattgacaaagaaatagagcttcacagaattcttcatcataagcatgtagtgcagttttaccactacgttcgaggacaaagaaaacatttacattctcttggaatactgcagtagaaggtcaatggctcatattttgaaagcaagaaaggtgttgacagagccagaagttcgatactacctcaggcagattgtgtctggactgaaataccttcatgaacaagaaatcttgcacagagatctcaaactagggaacttttttattaatgaagccatggaactaaaagttggggacttcggtctggcagccaggctagaacccttggaacacagaaggagaacgatatgtggtaccccaaattatctctctcctgaagtcctcaacaaacaaggacatggctgtgaatcagacatttgggccctgggctgtgtaatgtatacaatgttactagggaggcccccatttgaaactacaaatctcaaagaaacttataggtgcataagggaagcaaggtatacaatgccgtcctcattgctggctcctgccaagcacttaattgctagtatgttgtccaaaaacccagaggatcgtcccagtttggatgacatcattcgacatgacttttttttgcagggcttcactccggacagactgtcttctagctgttgtcatacagttccagatttccacttatcaagcccagctaagaatttctttaagaaagcagctgctgctctttttggtggcaaaaaagacaaagcaagatatattgacacacataatagagtgtctaaagaagatgaagacatctacaagcttaggcatgatttgaaaaagacttcaataactcagcaacccagcaaacacaggacagatgaggagctccagccacctaccaccacagttgccaggtctggaacacccgcagtagaaaacaagcagcagattggggatgctattcggatgatagtcagagggactcttggcagctgtagcagcagcagtgaatgccttgaagacagtaccatgggaagtgttgcagacacagtggcaagggttcttcggggatgtctggaaaacatgccggaagctgattgcattcccaaagagcagctgagcacatcatttcagtgggtcaccaaatgggttgattactctaacaaatatggctttgggtaccagctctcagaccacaccgtcggtgtccttttcaacaatggtgctcacatgagcctccttccagacaaaaaaacagttcactattacgcagagcttgggccaatgctcagttttcccagcaacagatgctcctgagcaatttattagtcaagtgacggtgctgaaatacttttctcattacatggaggagaacctcatggatggtggagatctgcctagtgttactgatattcgaagacctcggctctacctccttcagtggctaaaatctgataaggccctaatgatgctctttaatgatggcacctttcaggtgaatttctaccatgatcatacaaaaatcatcatctgtagccaaaatgaagaataccttctcacctacatcaatgaggataggatatctacaactttcaggctgacaactctgctgatgtctggctgttcatcagaattaaaaaatcgaatggaatatgccctgaacatgctcttacaaagatgtaactgaaagacttttcgaatggaccctatgggactcctcttttccactgtgagatctacagggaagccaaaagaatgatctagagtatgttgaagaagatggacatgtggtggtacgaaaacaattcccctgtggcctgctggactgggtggaaccagaacaggctaaggcatacagttcttgactttggacaatccaagagtgaaccagaatgcagttttccttgagatacctgttttaaaaggtttttcagacaattttgcagaaaggtgccattgattccttaaattcccctctgttgagagcatttcagccagaggactttggaactgtgaatatacttcctgaaggggagggagaagggaggaagctccccatgttgtttaaaggctgtaattggaagcagcttttggctgcgtaactgtgaactatggccatatataattttttttcattaatttttgaagatacttgtggctggaaaagtgcattccttgttaataaactttttatttatta

SEQ ID NO: 14860 - DNA, 1667 bp, Homo sapiens
  misc_feature (1)...(1667): n = a,t,c or g
tttttttttttaatgaaggggaaaatttattatttttttttcccaatgactcccaagtcctactcgcaaacaaatacattgtagaaaaaagtttaattgctggttattgtttgaatcttgaaatacaattcttcactgatgatactggtataaaatggtggttattaattcatgctagcacaaccaaaactaatttaacattattggtaaaaatgagtcatttttgaatctctattaaaatctgaacacataaacaaatctgtgctaaaactggaactgccttctcactctacatataattaaacttccagcttcaaccatctgatgttgaaatctaaagcacctccatgagttaaatgtccccgacaaaccatgtagatggacaaacaagattggtggtctttaattgctggcgacagaaaaggctgcagtttagtacttaaacctgcagttagtggtcaactttctatccaggcagagtaaactaaggagagctatgaaatatcaaaagaaaactagaggccaggacaaagaggcaatgtcagccaagccactgcaagatgggtatgcacccctgtatttcagccaagggcaggcaatccaaaattacacactgctttccttaacttgaccaaacagtgtatttttcctctgaaaatcttgtcaaaggttgtattccattgtacctagtgaaatacaaagtccactctcataaaaatattatatttttcaaaagaaatataatacattgaaaatcactgattgctgcttcttcgtctttttttccgtgaatgtgtaggtgtttgagtctcttgtatttcttcttttacacaggatatgggctgtttgaaaactatttcatcatctttatcatcatcattcagttcagccacttgagattttcgcctctccaaaaatgttggtgtacaaactggtgtggggccctggctatccacagtcttctcaggagtgtcaagagtacctgaaacttttttcttcttcttacgtaaaacctggccttttgtagacgtctgacgattagtttttgaaatactttccgttttctgtaaaatcaaagaaggaaaatcatagtcaattccttttttagctaatttcttcctgagtaatctttctttctttttaaatcgctcctccatccgtagcttttgtgttagtgtccgattccgattatacccgtttcactgatggatatgatggctgcttaaatggaatattccagtctttaaagagttctttatgtactttttcaggtggcataaaatgacactccaagagtctttcaccaaacaggtagttgttcattgtttcagcaactattttggcaacatcctcagactcaaactccacaaatgcatagcctttgctatttccagtccttttacttctggacagcctgaaccgtgtcacagtgccaaactgggagaaatatgaaaagatctgggtttcgtcaagtaggttaggtaggtggcgcacatagactactccaggagtaagttgttcttgtttttttcgctgggttatgcgcttgcgaacctgcgccacctccttttgaaactcgacatgcttcctgcggattaagcgacaggattggcccagccgggccagaaaaagtcgccatgccaaaagccgccgangctaaccangcg

SEQ ID NO: 14861 - DNA, 939 bp, Homo sapiens
gtgcccggaacccggaagtgcgagctggcgcgcagctgcagtctgggagtctttggagtaagaatggccttggaagggatgagcaaacggaagagaaagagaagtgtccaggagggagagaatcctgacgacggcgttcgcgggagtccgccggaagactacaggcttggacaggtcgccagtagcttatttcgcggcgaacaccattccagaggtggcaccggtcggctggcgtccctcttcagttctctggagccccagattcaacccgtgtacgtgcctgtgcctaaacaaaccatcaaaaaaacgaaacggaatgaggaggaagaaagtacatcccagattgaaagaccactttcgcaagaacctgccaaaaaagtgaaagcgaagaagaaacacactaacgcagaaaaaaagttggcagacagggaaagcgctcttagcgagtgctgatttagaagaagaaattcaccagaaacaagggcagaaaaggaaaaattctcaacctggtgttaaagtagcagatagaaaaatacttgatgacacagaagacacagttgtcagtcaaagaaagaaaattcaaatcaaccaagaagaagagagattaaagaatgagagaactgtgtttgttgggaatttgcctgttacatgtaataagaagaagctgaagtcgttttttaaagagtatggacaaatagaatctgtacgatttcgttctctggtatgtttcattcccccgtaaaattacataatattaaaatttattgcatttaaatcagatgaacttattgctgttagtgagatggtgaagcactttaaccttttgaatcaataggttcaaatttaacccaagaaaagagttgctcttactatctactgctgactcttgaactttttaaataatgtattgagtttacttaataaaatgatactcttgct

SEQ ID NO: 14862 - DNA, 941 bp, Homo sapiens
gaatattgcaggaaactgtgaaggaactagcccctcgatgtgatgtgacattcatgctgtcagaagatggcagtggaaaaggggcagcactgatcactgctgtggccaagaggttacagcaggcacagaaggagaactaggaacccctgggattggacctgatgcatcttggatactgaacagcttttcctctggcagatcagttggtcagagagcaatgggcaccctcctggctgacctcaccttctggatggccgaaagagaaccccaggttctcgggtactcttagtatcttgtactggatttgcagtgacattacatgacatctctatttggtatatttgggccaaaatgggccaacttatgaaatcaaagtgtctgtcctgagagatcccctttcaacacattgttcaggtgaggcttgagctgtcaattctctatggctttcagtcttgtggcctgcgggacttggaaatatatagaatctgcccatgtggcctgggcaggctgtttccccattgggatgcttaagcccatctcttataggggattggaccctgtacttgtggatgaacattggagagcaagaggaactcaccgttatgaacttagggggatctcatctaacttgtccttaacttgccatgttgacttcaaacctgttaagagaacaaagactttgaagtatccagccccagggtgcagagaggttgattgccagggagcactgcaggaatcattgcatgcttaaagcgagttatgtcagcaccctgtaggattttgttccttattaagtgtgtgccatgtggtggggtgctgtctggggcatctgtttttcattttgcctgtggtttgtgttgcagctgttgatagttgttttaaggattgttaggtataggaaatccagtaaattaataaaaaaattttgattttccaataaa

SEQ ID NO: 14863 - DNA, 989 bp, Homo sapiens
gggcgacggcttccgggcactggcaggcctggccttctgcgaccctgagaagcagcacatctggcacatcccaggcctgtggcatggagcacctcccatggccgcagtgagcttggcctacagtgaagccatatttgaattgaagagatgcctactcgaaaacatcaggaacggcttgtcgaaccaaaacaaaaacatccagcagctcattgagctggtgagcgcggctgtgagtgtgcagagaaacccagttcaggtgtaggaggctgctgtgggcagccctgtctgatggggcacccgtgtggggctgtgctctggtgcctgagaatggctggtgcccaatcgacatgagaagacgagcaaaagacagagggtttggagtctcctcaacagtgttaaaagaggaagtgacctcacagaccagctcagagatgttaccaagaatatcacagcccccagggtagggagacaagcagcagtttgttctgtctcagctcctgtcaaggatcctgcggggtgggccctctgtatagctgctctctgtcactggcccctggagtgggagcagcgtccttagtcactgcaggcccaggcgggcaggtggtcccaggacagaggtggggaagttgtcctgaggaagcagaagtaggccttgctcccgcccaacccaagggcctccagtggaccagcattcaagatgtgagtgcccgtggtgtgcaaggcactccccaatggcaccgtatttattgactgatatgtgaaggcttccctgacccctgcccaggaagagttcactggtcgctctgttgtgccccacagcactttgttatacctctgccacacacttcagcagcgcgttgtaactcatgtgtttacatgtctgtcccccctgactgtgagctccttgagggcagggactgtacattctccagctctgtgtccccagggcctggcacattgtagacgcttaataaatgtctgttaaatga

SEQ ID NO: 14864 - DNA, 536 bp, Homo sapiens
  misc_feature (1)...(536): n = a,t,c or g
gcagattttcaaaccattctcatgtacatatcattttatctcagcagcaatagtgtcactgttcctaattccaagtggagaagaccaaggctaggcctggttatctgctgtctctgatacacacaaccaaaccctggtggagcctggtgtgggtttcctgactcttactcagcccagtgtcccctggtgcttcctggctccacggtccctcagttacctgggtgccctgggggtggggcagggacgcaacacacccccacccccaaccacatgctgactgagcttgtgcaggtacttcaccgcgttgtctcatgtccttgtctgtcaaatgggtgtaaacattctcttcaccatattggattgttcttagggatgaatttagggagttttgaaatacccttttttcctttgtttttctctttcatctgttcccctttttcatcatttngacagctgaaccagtgcctctcatgaagaantggagattgantggcatgagtccctcagtggtgttcctgtgagcccccagttttccg

SEQ ID NO: 14865 - DNA, 430 bp, Homo sapiens
  misc_feature (1)...(430): n = a,t,c or g
gctgggatcatccgcggcggccgggctcgtggggcgcctggagtgagggttctggttcccgccggcgaggattgttaaaatgagtcttcggaagcaaacccctagtgacttcttaaagcaaatcatcggacgaccagttgtggtaaaattaaattctggagtggannnnnnnnnnnnnnnnnnnnnnnnnnnnnnnnnnnnnnnnnnnnnnnnnnnnnnnnnnnnnnnnnnnnnnnnnnnnnnnagactgggggtcctggcttgcctggatggctacatgaatatagccctggagcagacagaagaatatgtaaatggacaactgaagaataagtatggggatgcatttatccgaggaaacaatgtgttgtacatcagtacacagaagagacggatgtgaagacaccaagagagcaacgcttttcatagt

SEQ ID NO: 14866 - DNA, 478 bp, Homo sapiens
gagcagactgaggcccccaccctgaaaaagcctaggacattcctgggcactgtcatttagggtgctgtacaaatcacctccgcctagaaaatggaattcaacagtcaggatacagatttccaaggccaactgttggccccaacatgcaacagtgagaccataagcctcccgtgggccacattttgacagtggatgcccttcagggtgatatatgctataaagcagttttctatcacctaagtggtttttcttgccaacaagaatttttacccatcagcactactgtggctgaaaaacttctcttcaacagttcagtgcgccctgtgcaggagtcagcccggcatttgcttgtacacacagctccttgcataggtgtggagttagatctggacagtgaacttcaggaagtcctttcttataggaggctaatagggattgagaataacatgagaagaaaacgctaataaagggaaacctg

SEQ ID NO: 14867 - DNA, 588 bp, Homo sapiens
caccagactcttcccagctatggtgggccaggagctggaggaccctacccccgtggtggctccttggacccttcacattcaagtggccgaggatcagcagaggctgcagaggatgatgagatccgcatgatcaatgagttcccccgtgtggccagtgtggcctcctctctggctgcccgtggccctgactcaggcatccagcaggatgcagatggtctgagtgacacatcctgcgaaccacctgcccctgacacctggtataagggccgaaaggcagggctgctgctgccaggtgcaggagccactctctacagagaggaggggcccccagccactgccacagccttcctggggggctgtggcctgagccctgcacccactggggactatggcttcccagcagatggcaagccatgtgtggcaggtgcgctgacagccattgtggccggcgaggaggagctccgtggcagctataactgggactacctgctgagctggtgccctcagttccaaccactggccagtgtctttcacagagattcgttcggctcaaggatgaagctcggccatgtcccccagctccccgta

SEQ ID NO: 14868 - DNA, 660 bp, Homo sapiens
ctgggcgtacgtcaagatggcggcgtctgtattaaacaccgtgcgtgaggcggcttcctatgctatctctcttccgaggttctcacagagttcaggttcccctccagactctttgcaccaaagctccctctgaggaagattctttgtcctcagttcccatttctccttataaggatgagccctggaaatatctggaatcagaagaataccaggagcgatatggttctcgccccgtctgggctggactaccgccgcaaccacaagggtggtgtacccccacagcggactcggaagacatgtattcgtcggaataaagttgttggggaatccctgccccatctgtcgagatcacaagttgcatgttgactttaggaacgtgaagctcttgggagcaatttgtctgcgcccacacgggtatcatcttctatgctccatacacaggagtctgtgtgaagcaggcacaagcggttgacccagggccatccagaaagccagggatcatggtctcctcatttaccacattcccccagggttgaaccacgggaccttgacttcagtacctctcatggggctgtgagtgctactccgccagcccccaccctggtctcaggtgacccctggtacccatggtacaactggaaacagccaccggagagagaa

SEQ ID NO: 14869 - DNA, 790 bp, Homo sapiens
cgtcgactttttttttttttttcacattttaattttctttaaacctttttttatttagagatttttctggtaaggagatataccataggaaagcaatttcactggcagtgaggtatgtatatactctaccaaaatactccttattttaactgtttttaactttatttacatacgaagcaaagaatcaatgcatatccttggttcaactatagtattagccatactacatgaaataaaatggtgcttgcatacaaaaacttgttgtttgtaaaggaatctgatttcagattaaaatacctaattgtttttggaaaaaatttttaaaaagaatcacaatttatcatgaccaagacacctgcaccatattttccattcctcacagcacatttatttcagtaattctgttatgtcggttcttagcatgagcatagtgttacacgattttcgtacatataatcacatccaaaacaagttctaaaatttaaattgtaaacattctcatatgtagaaatattttaattggtgtattaagttttgctaactgatcaaatttggaagataatataaatgagaacgtctattctaaactgtgtagtgagcattgtttattaattacatttctacaatgttaaataaagtaagaggcaaacctgtcctgtaagcatgtcaaattttaggtaaaacattaaaaagaaacaaacctgttaacaaaagaatggtcttgcaataaagaacattagatttttaaaatctattatgatacaaaaatgtaaagggtaaatagcatctt

SEQ ID NO: 14870 - DNA, 699 bp, Homo sapiens
gtcgccctaggctgggactctagtaggtcttcggctcagttttggctgcagcgcccgcgtagatcgcttcggccgcgttctacgcccggctcaactatgagccggtgcgcccaggcggcggaagtggcggccacagtgccaggtgccggcgtcgggaacgtggggctgcggccgcccatggtgccccgtcaggcgtccttcttcccgccgccggtgccgaaccccttcgtgcagcagacgcagatcggctccgcgaggcgggtgccagattgtccttcttgggattatcttgcttccaattcgtgtcttattggttgcgttaattttattacttgcatggccatttgctgcaatttcaacagtatgctgtcctgaaaagctgacccacccaataactggttggaggaggaaaattactcaaacagctttgaaatttctgggtcgtgctatgttcttttcaatgggatttatagttgctgtaaaaggaaagattgcaagtcctttggaagcaccagtttttgttgctgcccctcattcaacattctttgatggaattgcctgtgttgtagctgggttacccttctatagtatctcgaaatgagaatgcacaagtccctctgattggcagactgttacgggctgtgcaaccagttttggtgtcccgtgtagatccggattcccgaaaaaacacaataaatg

SEQ ID NO: 14871 - DNA, 1080 bp, Homo sapiens
tataatattgttgatccttacggaagatgatggcttcaacagatccattcatgaagtgatactaaaaaatattacttggtattcagaacgagttttaactgaaatctccttggggagtctcctgatcctggtggtaataagaaccattcaatacaacatgactaggacacgagacaagtaccttcacacaaattgtttggcagctttagcaaatatgtcggcacagtttcgttctctccatcagtatgctgcccagaggatcatcagtttattttctttgctgtctaaaaaacacaacaaagttctggaacaagccacacagtccttgagaggttcgctgagttctaatgatgttcctctaccagattatgcacaagacctaaatgtcattgaagaagtgattcgaatgatgttaggagatcatcaactcctgcctgacaaattcccttcaccacaacccaaacttgggtatacgccctggctttacaaacgcgatctctttgaacaatttcgaactcatccttcatttcaggatataatgcaaaatattgatctggtgatctccttctttagctcaaggttgctgcaagctggagctgagctgtcagtggaacgggtcctggaaatcattaagcaaggcgtcgttgcgctgcccaaagacagactgaagaaatttccagaattgaaattcaaatatgtggaagaggagcagcccgaggagttttttatcccctatgtctggtctcttgtctacaactcagcagtcggcctgtactggaatccacaggacatccagctgttcaccatggattccgactgagggcaggatgctctcccacccggacccctccagccaagcagcccttcaagttcttttatttctgggtaacagaagtagacagacaggttacttggtgtatcttctgttaaagaggattgcacgagtgtgttttcctcacacactttgatttggagaattggtgctagttggcaatagataactcagcgtagatagtattgcaaaaaggggaggaaatacacaacaataataaatgtaaaaacctgctattcaaaaaaaaa

SEQ ID NO: 14872 - DNA, 1469 bp, Homo sapiens
aaacacaaacccagatgcatgcattgtgcattattttgtagacaagctactttttcttctgtccctttaacaaatttgcagcaattaccctccctttggggtctagagtgaaagctaatttgtgggtagatgagattgcagaagaatggatgtccatggctgtgaacactgcacactgcacatccatctccagtgctcacactgtgcagctaccactccctgggctgcgtgccatgctgtcgggttgcagatttgcacacataaattcctcaggaagagtttgcatgagcatcacctcgcaatattctgtactgaccaaacaagggatttgaacgtttttcagcacaaaaggataacttccgagtggtggtctgtacgcatactagcaaaggtaatggtgatctagcaaacaaaattggtttctgcagttagaagtgagcaggagcacttgtattatagtatttaaataatcctggttaatctctttttaagccgagtaacccctccagattttgcctttttattattgaggctggctttattttcttctactttttttcccgttttatagcagttaattatttttgtgattattatgcaagaagcattgcccttgagttaaactgttattgtttcataagcagctattaaaataactgagcattgttttatgaacatacactaatctgagatactgaaaatctttgcaactaaaaagcaaaacaacctacattagtcatctagccattgtttggatgttttgagttgattttttatggtgcctcttttagcttggaatattacgtttactttaatccaagtctaggccttttaaagggtccttaaaattaaagttcagaatgtgaatccctttgacatctattacaggtttataggacctttttggttgtgattactgttttcaatacgattgtataaatgaagttaactttgtcagaagttaaaatggaggtcataggagttcctggagaaatggctctcctgtttctttcattaccccactgaagttcaccccagtttctggccacaagaatatgagaaaggaaccctgttgttttccaagggaaatcattcctctctgtccccactgttgattaactaaagtcctggacaccttccttcctccactggccaagacccaccttgacccaccttgaacctcttttcagagccgagtggcatgaatatgtgtactgtttctgcttctgttgatggagtggctgtgggagaattaaaggaaatgctaatttgagcttcattcataggggaacctactatatattgcatccctgctggttggaaattatcttcatctctggactgcattgtttagaaaaatgttaatggcttacaattctgagaactttattgtgtggctctggggttaagaattctgtggtttgaaaaaaaataaatattttgtattgattctcacgtcaaaaaaaaaa

SEQ ID NO: 14873 - DNA, 388 bp, Homo sapiens
ggccggcggagtttcttcagaggaactaccgccctgggaggaagcgtctgtttagtttcaacacagacgactgggcttgggagcctacgaggttgcagtctggagggcgccaacagcagctaccagggctgcttttcctgaacacgctgcaagcacgtcaaggtagtcggagtcccctaacaatggataaattcgtcattcgaacgcctagaatccagaatagccctcagaagaaagattctggaggaaaggtttacaagcaggccacgattgaatctctgaagagagttgtggttgtagaagacataaaaagatggaaaactatgcttggagctttccctgatcaaaccaaaggggtatctttgtttgaagccctttacaagttttt

SEQ ID NO: 14874 - DNA, 5840 bp, Homo sapiens
gcgctcgccgggcccggggtttgaggcgaggagccgcggcgcgcggttcgggcggggcggcggcgctgacagcatcctgaggttagcattacacttttcccagtggagcccatgacttctgatcaggacgctaaggttgtggctgaaccgcagacgcagagagtccaggagggcaaggacagcgctcatctgatgaatggtcctatatctcaaaccacttctcagacaagttccatcccacctttgagtcagaaaacactcctcagctaccggtgtcagaggacggtgttgtttggggatggcatgatagagacggacagttcgtaccagcaactaaggtttcagagctgaaccctaatgcagaagtgtggggggctcctgtgttacatctggaagcaagcagtgctgctgacggtgtgagtgctgcatgggaggaggtggctggccaccacgcagaccgtggcccgcagggatcggatgccaatggtgatggtgaccagggccatgagaatgccgcattgccagacccgcaggagtcggacccagcagacatgaacgctctcgctctgggtccctcagaatatgactctctgcctgaaaatagcgagacaggaggaaatgagtctcaaccagacagccaggaagacccccgagaagtacttaaaaaaacattggaattctgcttatctagggagaaccttgctagtgacatgtatcttatatcacagatggatagtgaccagtatgtgccaatcacaacggtggctaacctcgaccacatcaagaagctcagcactgatgtggacttgattgtggaagtgctaagatctttacctttagtccaagtggatgaaaagggagaaaaagtaaggccaaatcaaaatcgctgcatagtaatattgcgtgaaatatctgaatctacccccgtggaagaagtagaagcactatttaaaggagataatttaccaaaatttataaactgtgaatttgcatataatgataattggtttattacatttgaaacagaagctgatgcacaacaggcttacaaataccttcgagaagaagtcaaaacttttcaaggaaaaccaattaaggcacggataaaagcaaaggcaatagctataaacacatttttgccaaagaatggatttagacccctggacgtgagcctgtatgcccagcagcgctacgcgacgtcgttctacttccctcccatgtacagcccccagcagcagttccccctgtacagcctgatcactccccagacgtggtcagcaacgcacagctatcttgacccacccttggtaactccatttccaaatactggatttataaatgggtttacgtctccagcgttcaagcctgcggcgtctcctctgacttctctcagacagtatcctcctcgaagcaggaatcctagtaaatctcatctgcggcatgcgattcctagtgcagagaggggacctgggttattagaaagtccttcaatatttaacttcactgcagatcgattaattaatggtgtccggagtccacaaacaaggcaagcaggtcaaactagaacacggattcaaaacccttcagcatatgccaagagagaggctgggcctgggcgtgtggagccaggcagtctcgaatcctctcctggtttagggaggggaaggaagaattcctttggctaccggaagaaaagggaggagaagtttacaagcagccagacacagtctccaacgccaccaaagcctccgtcgccaagctttcgagctgggggcttttccagctttccctccattacctgggagctgccggcaatttgaagacagaggacttgtttgaaaacaggctatctagcttgataatagggaccatccaaagaaaggaccctcagtgcagacgcaagcgtgaacacccttcctgtagtggtctccagagagccctcggtgccggcttcttgtgctgtatcagcaacgtacgagcgatccccctccccagctcatttacccgatgatcccaaggtggcggagaaacagagggaaacccacagtgtggacagacttccttccgccctcactgcgaccgcgtgtaaatcggtgcaggtgaacggagccgccacggaattgcgaaagcccagctacgcagagatttgtcagagaacgagtaaagagcctccttcttccccattgcaaccccaaaaagaacaaaagccaaacactgttggttgtgggaaggaggaaaagaagctggcagagcccgcagagagataccgggagcccccagccctcaagtccacacctggagcccccagagaccagaggcggccggcggggggccggccctcgccctcggccatggggaagcgtctcagccgagagcagagcactccccccaagtctcctcagtgaaaaccgtacgtctgggaggggtcgcagagcgctgtgttaaccacaaacgagacactctcccactcagtgcgagggcgagccgctggttaggagcttgcagtgtctgaggcctgtgggatcctcaagttggttttcttctgtgagttggattctccccctcttgaaaaaaaatcgatttttcaggatttaattaatacaaaccttattttaggttggtgcttaactggaggtgatgcataagtctgatttttttttccaagatagaaaaagcatttatcctaacaaattggtattttttattaagcctccatgtggctctgaatgcaagctatatatagtgagtttttctaaattaagggaactctgctttttttttttttttttaagtaactggtctgtaagtgcatatctctagaacgtccccgcagatgaatgagggccagtggccttggcagaggcaggtgtggcctcgtagaggcagtgctggccgcgccagggcatcagtgctgatgtgggagctgtgcttccacctaagccgttggtaggggactgtggcatttaagaatgtagagagcgcatcctttttgatctcctgggcggagtgaacctgcaggggccaccccagaaaccttggttctgatgcactgcaagcaagtaaccagcttctcactccagtttcaagtggctattatgtaatataaattcaaagcacattgtgaatagaacctacatgaaaacatacactttgttgcccactgacatgttaccagaagttgtaccatgatgttgttttgacccctgtgagctgatggccccggccctgctctgtgcacatttctgtccgtgttccccagcactctggttggagagagtccacatcttcagctccgtgtggacatctccctgtacctctgcatcagcacatggatttaagagttatgtaatcgtgagagaatggtgtttgtggtttttccccctctttggctggtggaggataaagttcctgctcttttacctccaagacgagggcctcattgattcacttccagaagtgctgcacttctgaagaacaaggatgcactaaagttagcaagtttataataaagttaaatataaattattttgttttaaaatgcctcaaatttttctttattctaagcagcaaacattaaaataagaatatttcctgctaaatgtaaccatacactttattccacaaaatgttatttaacaagactgagggttttttttaagaaaaaattatttccatccaatatttaaagacttgaattttatttaaacttgaaaatgactttgccttaacttttgtataagacagcttagagtccatggagcccggccctgggttggcgtgagtgggtcagagttactcagttactgcgtggatctcctgtcgctagttttactgagtaagcatactgtagtacaagagctagtagtagtttttgtaatataccttaaagatcttcaacagttgatcttttttcagaatgttggaaaatcctgtaaatgcaaatagtcaatactgtattaaatacgtgcacttggagtgtggcttcgcttgtacagttgtaaataatcagaacatatgaaaaaggtaccctacagagaaaattctgatacagattattgatatattataaatgttgctgttgagcgggatgtagataaactaaatgttgtggtttgaatattattttgatttgttgagattttcttttttctcttacatcggtgtgttgaactgattctgcctctttgctgcaaaagggaattggaaagtcttattaaaagcctccagatgttttcatactcttttaaaatgtatgtaaatgcatactaatcatatctaatgtgaaagagttttaaagtatatagagagcaaaaactggcaggatcgtaagtgaaggtgactagtaatctaatttaaatcacctgcagctaagcatgattgaccctgccagaggaaaacatgcctatttgaccatttcctttaaagcagttgccattattcaaatacagagaaatagccacagggctagtgtttttcaaatgcattttaaagaacatggggatttttttttgtagttgtcagttcactgaccaaaaaaaaaaaaaaaaatcagaaataattgatctgtgaaacccaaactctcaatactcagaaagctgggaggcaacctcgaggcctgggcctacgagctgcatcttcgcctacggaagggccagggcgccatcagccattcccaaaacacaaggcctgcccgtccgccagtgagtccttggtttttaataatgagaagtcctttcccccaaggtgtgagcattgcagcgcagtgtggtgtgtgtggttagagccagcttagtccttcactttgtcgaccgaagtgggagctcaacagctgcatgaggagggcagcgcgtgcattagccagtcgccactggagggctctgctgcctccggtcaatacactgtagttactgcctagccagcagcagtcttctgcatcaagaactgaaaccttgctcggaggtgatttttatagcatcctttttaattaaaggtgaaatacagattgctatataatgtctgaaaaaacctgatactacttcaagagtttctgctcagaagaaaatgagagttatcataataggaaggctgtggcggtccatgccaactgtgctgtgtcacatacagcgatgagatggctttcatacttttttttttttaagttaacaccctcctttacccccagcagtatctcaggttatagaatcagagatgcagcagtgacaaatggcattttaacttgtaaaatcgtgtgatgatgcttatcattttgaaatagaagaataaaaacctggtcccgtttcaccagacatgaatttcaagtggagtcgtcgttctctgagagtgagtgtcttgacattttcacccaggccctcctgtcatcacatcaccggctgtcactggcgggtggccgtaaacgtcctgcgttgctatattaggatctctgcagttcaggcttcaaaaccagttcagtgtatccgggcgacgggtagtggtggtgcatgcctgtctgtgtgccccgctggcgagctgtagttgcggcttgcgtgcctcgcggcccactacagggctgcagacaatcgaggcgagggcgctggccgccagcagctcacagcgcgggggtcatgtggtcgctcctcgagggtttcgtttttgttctgcttcattaagactggaatcaagcttacatgtaaactattggtaatttaagtttccttttgtgtcattcagtgtaaaactgtctaatttgaaaaaaaatgtaggttatgaaaataaagatttaggcactgttcaatttttcttttgattttttttaaattaaaatttcttcaataaaaaaaaac

SEQ ID NO: 14875 - DNA, 543 bp, Homo sapiens
ggaaagtacctcgctctagaaattgtgcctgcatggagcccctttagtcaaagactcctggaaaggagttgcctcttctccaatcagagcgtggaggcgagttgggcgacttcaagggcctggcatggcagaggcccaggcagccgtggccgagtggacagcgtggccgtctgctgtggctgaaggcagcttccacagctcactcctcttctccctgccctgatcagattccccaccttacccgggccctacaggagcctgtgcagatggccatgcccaaccaataacgagacggttcccctccctttccctgccaggctcatgtctttacaccttcactcagccacgccaaccagagactgggttccaatctcaccccaccacatacagagccctcatctgtgaaatgagaaaaagcattttctgttttcccaccaggcccccaagtgtggtctttttctttcctcctaatgttgaagagaaaaaaaaaaaaaaaaagtttgcccagattgcttaattaaaaattgcaaacaaaatctcaaa

SEQ ID NO: 14876 - DNA, 1896 bp, Homo sapiens
tcgtgcatggcagagatggcgactgcgactcggctgctggggtggcgtgtggcgagctggaggctgcggccgccgcttgccggcttcgtttcccagcgggcccactcgcttttgcccgtggacgatgcaatcaatgggctaagcgaggagcagaggcagcttcgtcagaccatggctaagttccttcaggagcacctggcccccaaggcccaggagatcgatcgcagcaatgagttcaagaacctgcgagaattttggaagcagctggggaacctgggcgtattgggcatcacagcccctgttcagtatggcggctccggcctgggctacctggagcatgtgctggtgatggaggagatatcccgagcttccggagcagtggggctcagttacggtgcccactccaacctctgcatcaaccagcttgtacgcaatgggaatgaggcccagaaagagaagtatctcccgaaggttgattcagtggtgagtacatcggagcctgggccattgagtgagcccaatgcaggttttgatgttgtctctatgaagctcaaagcggaaaagaaaggaaatcactacatcctgaatggcaacaagttctggatcactaatggccctgatgctgacgtcctgattgtctatgccaagacagatctggctgctgtgccagcttctcggggcatcacagccttcattgtggagaagggtatgcctggctttagcacctctaagaagctggacaagctggggatgaggggctctaacacctgtaagctaatctttgaagactgcaagattcctgctgccaacatcctgggccatgagaataagggtgtctacgtgctgatgagtgggctggacctggagcggctggtgctggccggggggcctcttgggctcatgcaagcggtcctggaccacaccattccctacctgcacgtgagggaagcctttggccagaagatcggccacttccagtttgatgcaggggaagatggctgacatgttacacccgcctcatggcgtgtcggcagtatgtctacaatgtcgccaaggcctgcgatgagggccattgcactgctaaggactgtgcaggtgtgattctttactcagctgagtgtgctacacagggtagccctggacggcattcagtgttttggtggcaatggctacatcaatgactttcccatgggccgctttcttcgagatgccaagctgtatgagataggggctgggaccagcgaggtgaggcggctggtcatcggcagagccttcaatgcagactttcactagtcctgagacccttcgcccccttttcctgcacctagtggcctttcttgggaagtagagatgtggcggctttcccaccctgcccacagcaggccctcctgcccagctgctcttgtcagccctctggcctctggatgaggttgagttctccacaacagctcccaagcatcatgggcctcgcagccgggcctgtgccacggcctaatgttgtgtgatttaaaatggactcagcaggaagcatattgtctggggattgttgggacaggttttggtgactctgtgcccttgctctctaacttctgagcccaccctcccagggtaggcacctgggggcatgccaggtgccccacctcccagggtaggcacctgggggcatgcaggtacccacctctttctcttgggtgaggctctggcaaggagatctctctgctcaagcacagcagaatcatggcccctctccatgaattggaacttggtacaggttaagtatccctaatcctgaaatctgaaacaacttgtggttcccaagcattttggataaggcaaattcaactttcagtctcttttctgggggaaaaaaataataaacctagcctagccaggcgt

SEQ ID NO: 14877 - DNA, 456 bp, Homo sapiens
gggcgctgaagggtgtccccgcactgctgtcccccgagctgctctacgcgctggcgcggatggggcacggggacgagatcgttcttgcggacttgaacttcccggcctcctccatctgccagtgtgggcccatggagatccgtgcagacggcctgggcatcccgcagctcctggaggccgtgctgaagctgctgcccctggacacctatgtggagagtccggctgcagtcatggagctggtgcccagcgacaaggagaggggcctgcagaccccagtgtggacggagtacgagtccatcctacgcagggccggctgtgttgagagccctggcaaagattagagaggtttgagttttatgaacgggctaagaaggcttttgctgttgtggcaacggggtgagttccaactggctcagacctgccccatccccactggggcctcaggagctgccccca

SEQ ID NO: 14878 - DNA, 1067 bp, Homo sapiens
tggggcgtccgcagccgctcgtcacccgcgtgatgctgtttctggcgttgggcagcccgtgggcggtcgaactgcctctctgcggaaggaggactgcattgtgtgcggccgccgcgctccgaggtccccgggcctctgtctcccgggcgtcctccagcagcgggccttcggggccggtagccggctggagtacggggccttcgggagccgcgcgccttctccggcgtccgggtcgagcgcagatccctgtttattgggaaggatatgttcgattcttaaatacgccatctgacaaatcagaagatggaaggctaatttatactggcaatatggcccgagcagtgtttggtgtgaaatgtttctcttattctacgagtctgattggccttacatttctgccatacatttttacacaaaataatgctatttctgaaagtgtgcctctgcctattcaaatcatattctatggcatcatgggaagctttacggtgatcaccccagtgctgcttcactttattacaaaaggctatgtcattcgattgtaccatgaggccacaacagacacttataaagccattacctacaatgctatgcttgcagaaacgagtacagtgtttcaccagaatgatgtgaagattccagatgctaaacatgtatttaccacattttatgctaaaacaaaatcactgttagttaatccagtgctctttccaaaccgtgaagactatatccatctaatgggttatgacaaagaagaatttattttgtatatggaagaaaccagtgaagagaaacggcataaagatgacaaatgagcctatttgttagtgttcgtgctcaaatgtgatttacgttttaatgtataataataaaattgccttttgcattccgttagtgactgattgttaaaaataatttgaaattatcaaagcttttaatttccagagaatgatgtttgtttataataaaacaagctatgtttgaaaaccaaaatgtagtatctaccattcgtgttttagaaaggtatgtgaataaatatgttcatgctagtaaaaaaaaaaaaaaaa

SEQ ID NO: 14879 - DNA, 709 bp, Homo sapiens
gagaaaggcagagtatttattgacattaggaaatgccaagacctatagagactagccagggaaaaggactggatgtggtgaagtgaagaacattttgaaagtaagctctgtgagggcagtaaaattttcacttttgtatactgctttgtctctaatgcaagaaacagtgttctaagcatgtttgtaaatatacaaatacccaggttaaaggggatagccactgtttagctcagtcctgttgctagatggaaatgtgaatataggattcccagatctctcaaattttcaagtggaactagaactccgtgaattctgaattttaaatacagtattggcaatgaattccaattttggggtcaaaacatgtctataggtaagattctgcccaaaggtcaccagtttgccacttctataaattaaatagtaaatataagtgtaataatttttacttgagtcaggtccaaggttaataaaagtttatatatgccttacagctaaccattgtttttataggtcagaaacccttcttgccctgattggaaactcaacttaccctgcagcaaaggtaaataaaaatgtttcaattgaacttcattgtgctcctgggcctttattcttcaagagttaacagtgcagacttctggtgatcctcatcctaggtgttaccacatctatagaatagtaactcaggagtgcaatagactgtcgc

SEQ ID NO: 14880 - DNA, 1098 bp, Homo sapiens
  misc_feature (1)...(1098): n = a,t,c or g
gcggcacgagggttattcagcccaattcccagcagtagagagaatactaaacttgtgtctcaaggtttcatggttttcccacgttctttggctattaatttaatttcccaggtcacgtagacaatcattgataattgaaacaagtcctgagttgaaataaccttgagttgagcaaaaatatcctcattttggcagaagctgggcttggtagtacagtaaaattttagtgtaatgtgctcttgtaattgaaaagggatagataatctggatgtttctgcaaaggaaaataggtgtgtacttaacagctttggctctactcagtttcttaaaaagataagagcaaaaaaagttaaatgttaatcaaaacatttaagtttcctttaaattgtagtaataaaatatatgaagctcctttttttactttgctctgtgactggtttaaaggtaagtttgttatgttgttggtagattttgccaggcttctcccaacagagtagaagtgatttggcctcataacttcacagtggtttaccactttgttctatgttctggttttgtaaaggatagtactggaatttgcgtctgaagaccaatattggtgtaactcctgtcagtatattggtaaaatgtagcagaggcaggagtttggatgtttggatgggattcccttaggattctacagccaataaagatcctatttcctatgcatgtcccaggaatcagtaatcctcttttactctgttgggatgagtctttttttgtttctgttcagagtggttactaacttcaccttctttcctcttgctgtcatctgcattcgtgcttcccacctgttgttggcatgtcctttaccttctctttccctgccacatcaacctacacactgactcatcattgacgtggaagatgtggaagatgtcaagtttgtgatcaactatgactatccaaacagctcagaggattatgtgcaccgtattggccgaacagcccgtagcaccaacaagggtaccgcctataccttcttcaccccagggaacctaaaacaggncagagagcttatcaaagtgctggaagaggccaatcaggctatcaatccaa

SEQ ID NO: 14881 - DNA, 676 bp, Homo sapiens
  misc_feature (1)...(676): n = a,t,c or g
aaagaggtactgagtataaaacaatataaaacaatatgagagggtctctctcttccctcatttcccctctttgagactctcactttttatcagtgggagttctcactcttatttttgctacttatgtattttcgtgcaatagattgatagtgatttatatagtatgcttgtgctgaagcattttggtgaactaaggttaagcgacgaagttttttatcatttggagaaatacaggtatcagacaagggagcagtaagcaggttcctattactattataactcttattataagagttttaaatccttttagtgctggaaaccatttccaaccatggccccaggatcaaatccatgccacacttgcaagggcacatgtgccagttttgttatatctttaactatgtcttcaactacttgcccttgatcatttatgtgcaaacaggcaattgtttagggttaaattttccacagactacttcttcagctgctagcaagtagtctagggctagtctattttgatagatagcatttctcatctgagtttcttgctgggggctaaaacaggttaaaggctctaccccgttttattaggttattatttttaaggacaggcttttaactgtntgattcggttgagcntataaatggggggtttgggatccccactgggccgtct

SEQ ID NO: 14882 - DNA, 624 bp, Homo sapiens
ggggaggagaacgaaccaagatcttcaaacgcactgcccccaagttttactaaaaatactgacctttctctagaaggcgatccattttctcagcctattaaatttcccataaatggactctcagatgtaaaaaatacttcggaggacagtgaaaacttcccatcaagttctaaaaagtctgaggagtggcctgactggagtgaacctgaggagcctgaaaatcaaactgtcaacatacagatttggcctagagaaccttgtgatgatgtcaagtcccagtgcactaccttggatgtggaagagtcatcttgggatgactgcgagcccagcagcttagatactaaagtaaacccaggaggtggaatcactgctacaaaacctgttacctcaggggagcagaagcctattcctgctttgctttcactcactgaagagtctatgccttggaaatcaagcttaccccgaaagattagccttgtacaaaggggggatgacgcagaccaaatcgagccgccaaaagtgtcatcacaagaaaggccccttaaggttccatcagaacttggtttaggagaggaattcaccattcaagtaaaaaagaagccagtaaaagatcctgagatggat

SEQ ID NO: 14883 - DNA, 673 bp, Homo sapiens
gcatacatacgtgtatatgtgtgagtgtgtgtatatataaaattaaaaggtgaatgaggtaaatatatgaaggggaaattcagccttgaacttcccttgggtcacagagatggatcctctgagctgtggggtgttagtgagtgtgtatgcgtaagcatgctctgcatctgcctggtctgtctgggtcagagtatgtccatgaactttacgagcgttcagttcaataccactcagtgcagaatccgcgttcctgttttacagcccagcagccgccagccggcccatctgttaaaacataacatgtacacttcagtccgaccactggggtggagccctgggtagggggcaactcttagcagaaacaacatgctacaaacaaagcctgcctctcaagttctattttcattcaatatttggcctgaacttgaagttttggtgagggagaaggaagtgtttgtctctagaaatggcaaactgcattttgtgaaataattatagccacggcttggggagggggagcttgtaggagagaaaaaaaaatccctccagaaatgtggtgcttgtcacatcaccatgcaacacgggtttacagctttgcagtatggcatgtatatcagaaactgtttgcttttgcttgttaaaataatgcattaaaactgaatcattttgcacc

SEQ ID NO: 14884 - DNA, 2064 bp, Homo sapiens
cttttcgagtcagtgctgccgccgctgcccgcggctttgcagagcaggatgaatgtgatagaccacgtgcgggacatggcggccgcggggctgcactccaacgtgcggctcctcagcagcttgttacttacaatgagtaataacaaccctgagttattctccccacctcagaagtaccagcttttggtgtatcatgcagattctctctttcatgataaggaatatcggaatgctgtgagtaagtatacccatgggctttacagcagaagaaagcgctaagtaaaacttcaaaagtgagaccttcaactggaaattctgcatctactccacaaagtcagtgtcttccatctgaaattgaagtgaaatacaaaatggctgaatgttatacaatgctaaaacaagataaagatgccattgctatacttgatgggatcccttcaagacaaagaactcccaaaataaacatgatgctggcaaacctgtacaagaaggctggtcaggagcgcccttcagtcaccagctataaggaggtgctgaggcagtgcccattagcccttgatgccattctaggcttgttgtccctttctgtaaaaggggcagaggtggcatccatgacaatgaatgtgatccaaaccgtgcctaacttggactggctctctgtgtggatcaaagcgtatgcttttgtgcacactggtgacaactcaagagcaatcagtaccatctgttcactagagaaaaaatccttattgcgagataacgtggacctattgggaagcttggcagatctgtacttcagagctggagacaataaaaactctgtcctcaagtttgaacaggcacagatgttggatccttatctgataaaaggaatggatgtatatggctacctactggcacgagaagggcggctagaggatgttgagaaccttggatgccgccttttcaatatctctgatcagcatgcagaaccgtgggtggtttctggctgtcacagcttctatagcaaacgctactcccgggccctctatttaggagccaaggccattcagctgaacagtaatagtgttcaagctctgctacttaagggagcagcacttaggaacatgggcagagtccaagaagcaataatccactttcgggaggccatacggctcgcaccttgtcgctttagattgttatgaaggtcttatcgaatgttacttagcctccaacagtattcgagaagcaatggtaatggctaacaacgtttacaaaactctgggagcaaatgcacagacccttacccttttagccaccgtttgtcttgaagacccagtgacacaggagaaagccaaaacattattagataaagccctgacccaaaggccagattacattaaggctgtggtgaaaaaagcagaactacttagcagagaacagaaatatgaagatggaattgctttgctgaggaacgcactggctaatcagagtgactgtgtcctgcatcggatcctaggagatttccttgtagctgtcaatgagtatcaggaggcaatggaccagtatagtatagcactaagtttggaccccaatgaccagaagtctctagaggggatgcagaagatggagaaggaggagagtcccacggatgccactcaggaggaggatgtggacgacatggaagggagtggggaagaaggggacctggagggcagcgacagtgaggcggcccagtgcgtgaccaggagcagtggttcggcatgcagtgagggggcggcactccattggccgcagtggcctgccctgctctgagcacttccgtggactgaaggaaccgtaggagcctgctctcagaaggacaatgatttccagcatgtgaattgcagccaggggtctctgccccctcgctcccaattcctagtcgtgacttcatttctaaaacagagcctgaccaaccttccatgtatctccatcctcccctgctccagcccagggaggactgaggggagtgccccgagacccacgcacatgttggggcttctgggccaagagtactttttatataactaatttctaaaatccaaa

SEQ ID NO: 14885 - DNA, 571 bp, Homo sapiens
ttttcattgtacaaaaaaaaagttttattttgaagattacagaacttgtgccatgaccccacctggcttccattcccagcaatccagggatctgtggtggggatgagagtgagaaaagggagtaggaggggaggagggaggcctggtgggggtggggaagtggagtaacatggttgttgagaagctcgtggccccctaggcctgggcctcactgtctttactcctccatactacaagagtgatgaggaaggggatgaggcagatgggggctatgatcatggccaggagtacatcctctggggggtcagagaaggtgggctgcaccagggagcagttggcaaagtggatctggtgagtctcaaagatgatcctctctgccaagggattggggaagcccaggtcaaacaactctgcaaagtgctccaggcaatctcgcagggtgctataaggcctgctaatcatggcccagtcgcaccaatccttttcgataggatccatttgatccttataatgattccagcaaaattggacagctgtctcatagttcttcaccgtccccccttctgacccc

SEQ ID NO: 14886 - DNA, 1090 bp, Homo sapiens
  misc_feature (1)...(1090): n = a,t,c or g
atttacaagtcttagaatgtgaacgtaatcaaaccctggttcaaactgcctggaattacatgaatgacagtcttcgaaccaatgtgtttgttcgatttcaaccagagactatagcatgtgcttgcatctaccttgcagctagagcacttcagattccgttgccaactcgtccccattggtttcttctttttggtactacagaagaggaaatccaggaaatctgcatagaaacacttaggctttataccagaaaaaagccaaactatgaattactggaaaaagaagtagaaaaaagaaaagtagccttacaagaagccaaattaaaagcaaagggattgaatccggatggaactccagccctttcaaccctgggtggattttctccagcctccaagccatcatcaccaagagaagtaaaagctgaagagaaatcaccaatctccattaatgtgaagacagtcaaaaaagaacctgaggatagacaacaggcttccaaaagcccttacaatggtgtaagaaaagacagcaagagaagtagaaatagcagaagtgcaagtcgatcgaggtcaagaacacgatcacgttctagatcacatactccaagaagacactataataataggcggagtcgatctggaacatacagctcgagatcaagaagcaggtcccgcagtcacagtgaaagccctcgaagacatcataatcatggttctcctcaccttaaggccaagcataccagagatgatttaaaaagttcaaacagacatggtcataaaaggaaaaaatctcgttctcgatctcagagcaagtctcgggatcactcaggatgcagccaaggaaacacagggcatgaaaggggacatcataggggacagggcgtgaacgatcttcgctcctttgaggaggtcccataaaaggcaaggcaccatgggtggccagttcgttcagggacatgggccagggcacagggcgntgganttttctctttccttttggagcctggcntccagtttctttgggttttttncccattcttaccagttgttgatgtttttggggtnttccanttccaaaaacatttnaacggcaa

SEQ ID NO: 14887 - DNA, 463 bp, Homo sapiens
tttttttttttaatcatgaaagcaaaaagtttattcatgtttgaaactacatataactaccacgaggaagactttttcaatccagggtgtaatccagttagaaaggaacacgaaacgtttttaatacattagaatcaccgccacaaattattttcatgactcaatcagtttcagaatcgcatacaatacaaaaagagagaaaggagagggggccccattacacagggtgaaatatacagtactgaatactgaaatctgaatgcatcacaattagtcgctgcttttttttttttttttgcatggattagtaataagatgaagaacattcaaaatgtttctcagtatttacaacagttttaccgatccccggggttgaattaagaccccaatggtttcccacactcggttttttaaaagttgcgagtgcaaccctgatttttcttttaaaagattacgatggaca

SEQ ID NO: 14888 - DNA, 657 bp, Homo sapiens
ctttcttcagccttttgaccacttattaattagtccatttgctagaagagtggtcaagggaaaaacgagagatgaaatttagttaagtctatgtgagcaagtgagagaaggttaggtaaggggagaggatggaatgcttgcctccaatgaactttggagcttgtatgtgagtcagattgctcccctattgctattatctattactcttgagagctggctgtcctttgaaagaaagaagtaatgttctttgaaagaaagaaaaatctcttgctgtgtcaaacctcaaaatgttgctattggggttagaaggcctcctctttatgctttttaatgctctttcaaacgtgttcttttagaccagttttctaataagctttgtaaaatgtactatccaaattagaagcggatttggaaatgcaaactaacgtgcacttagatatccaagtgggtgagcttagccactcttacccatgctctttccctggaatccctggagacctgtccaagatgatttccatataccagcatagaaaatcagaatcaagagcaaactctgagactggcacaatccaagaagatttcctggctctggcttttagtaatttgggactccaactgccactgtactggactgtaatttataaatccagtagctac

SEQ ID NO: 14889 - DNA, 382 bp, Homo sapiens
  misc_feature (1)...(382): n = a,t,c or g
gaaattggcagggatctggagttagaggcagcccaagtcatgtgtaatttagtggttcacaaaggaacaggtgtacttcagatagaatcgagcagtacaggatgttatactgggctatgctgacaaaccatcccctactatagacattttcttagtccagtacacttgtgtctacagtaggagcaaaagagatgctgggcttgaaaatgaagttgagaaaacaatttctnnnnnnnnnnnnnnnnnnnnnnnnnnnnnnnnnnnnnnnnnnnnnnnnnnnnnnnnnnnnnnnnnnnnnnnnnnnnnnnnnnnnnnnnnnnnnnnnnnnnnnnnnnnnnnctctatattaaaataaaattaaaaaaaacttttttattaaaaa

SEQ ID NO: 14890 - DNA, 770 bp, Homo sapiens
cccccgggctgcaggaattcggcacgagcatgacaagaaatgtctggagaagagtctgaagtatccttgtaatcagatgacttattaagaaagtctgctgtcacatccaagcgatcccaatgatatttactgcttttatgtttattagactcaataaactagagcgctttcaaaatttggttcttcaagagttgagcagtcttaagcaggatattcaggccctggaacaccttgagaaggaggttctggaattctgggggaaacagtctgctgatctgcaatctttctgtgatctgcaagtgctgaggtactttgaaaggtgttctttctagaagaatcttggttgaagtatgaggttcaattcaactcagacttcataagaaagccaaagcctggttttatgattgcagccctcagcctgggctgcctgaagacgaagagaaagagcaaggttattgttggctcaggccttgttagccagacttcgtgctctgtacgcattcaatttcctcccctccaaacatcatccctgggaactgctgagttcagatagaatatatgttggtagtttgcagttgggttattatccatttgttcataaaaattaaccttttgtattaaaatttggtcagatagtattaatagaaagttcaggatgttaaacaacttggagtggtgttgctttttttttataaaagtaaaatggacttttttttgtttgagaaatgtcttcaagttttgtgtgaataaaacactttagcagcaaaaaa

SEQ ID NO: 14891 - DNA, 901 bp, Homo sapiens
tttttttttttttttttaggtcaccagtttgttaactttattattcagagagcaccttgcagggactacgcacaaaataggcaatcactaagtatttacagacgaaggcaacttcaacttccttattgcatccaaaagcaagggcactaaatggtgtaaaagacttcaattcagggaaagacaatacaacggtatttgtcctgctcctagggcaaatcaggaaggaaagaatttccagggtctaggggaggctcaagaatgaagagagtacctaattcacaacaaaaggccaagttctgttcagaggattttatttcaagataaatcataacttctacccatactatgattccaaagggtgaaaaaagtgttttgcctcttctaccctccaaagagggcatggcaatgccaatgctctctaaaatgcctctgcatagttgtcagaagctatatttcagtcattgaaaatacttgtccattttcagctgaggtaaggtttgttaggaaacctctgtaacaacttattcaatttatttggaagtaaactcccagactctcccagggtttcctgtattgatctcatctttcgggcttcctgagccctcgcggcacaatcgaggaagccctggatctcttttctgcacgcatcgtcgcggaattcattctgcttccagcaagccatcatcaccgacatctccgtgatgcaagtcgcctctggaggggcagatccgggggaccttcagtcacaagaagacccaccttcctgccctcctacccacccgcccctgctcatgctccggcttccgctccggggccgtcctgactccgactgctcaccgcccttctcccggcgccgctccccgacgcggttagctagaatgagaggtttattgggcttcag

SEQ ID NO: 14892 - DNA, 1960 bp, Homo sapiens
atctttccagagaattaaataatcctttttatgggcctgttaaacaatgctccagtatgacattgaaagaacatgcagtcacccttctcctttcccttatctctacattttgggaaatttttcttaacagtgcttcctactaacttctttaaatgtagtagtctttgtgctgtggggacaaaaatatggccacaagtagtaacttttctggttttctttaatagacaatacacagaaatcaagtcaactggatggtacagatggaaaccagctggaagacaacctggagagtagtgagcagagactcttttggcatgaagattcaaagcctggaacattagtctgaactgcagttggacctcctgaccaagcactgcgttctcacactagtgtggccttggcaaattgtatttgtcttccgagaggatgttcgttttagaaacctaaagacatcaaaggttgaagagaagacttagttgccctggaagtgaatcagtgaatcacacaccaagccccacaaagcccctaaaggaggatttggcctttcaaactctaggcactaacgtaactgtagggtctgcccacatgttgaagtattgccaagagaggactcagtgtgaagccttcatcaatagcaagcactttttaagggagtaaaagttgttaaaggcaaacgtcaaaaacatgaaagggcattcaggatgtcccatggcaataagaacaggggaaatctcagagcacaattcagcaggatgagagaaggggaaccagacgctccggagtcattgctcacttcagagtttgaattcgtgagctgacaaagagtaacatgctctttctacacagacatggacaatttagacagtattggaaaattacttgaagctggattttcatgaagttctgaatgagtgtaaatgttttttaggatactataaagagtgatgtttttcataagcaccataaaatgggttctggaaaactgattaccttagcatcctgtaatataacttatggtagcagattggggaaaatgaaggcagcccactgaataattgacaaagtctgcttggagaacattctaaggtacaatatcatggagctcctttttcctttctccactaattgcgtgatgagctattgttctggctggtaattctccaactcggctgtcatttgaagtggcagacttaatatggaaagtttttataattatgagtttgaaaaagcattttaagatgatacagaaagtatccaaaacaacagaaaaaaaaagccacgtcattttagatgaattgcgtgccttaaaatggtgaacgttagaaaattaaacaagtctggattccacaagtagttccaagtcaccaagtgacaaaaacaaggtttacatttaaaaagaaaaacaacaacaacgacaaaaagctccaagctgcagtggatttaattatgaggctaaaactacctcatactttccttggaagaactaattagctatggtttattgtagggttttgtttgtttgttttttaaagcaaatgatttccatattcctgattgatcttttttgtcatctttgcttcaaaattacataaaaggtgctcctttcccccttcttttatacaagtttcttgttcatattgtgaatagaaaagtttctgaacaacttttttggaacattttctatctatattccaaagcatgtaatatatacataaaaacgatttgttaaactggtccttagtcatttgtataattagaaatgaagtttgggaaaaaattttggaaaaaagacaagcaaaaaaaaaataacttattccttttttgcatatttgtatagccttctagaatcagaaataacctttttgcatattcttttattgttctgacttttcaagacctattatttttttacataggtcaataaacaaaaggtgtgctactgaaaaaaaaaaaaaaaaaa

SEQ ID NO: 14893 - DNA, 438 bp, Homo sapiens
  misc_feature (1)...(438): n = a,t,c or g
gagtcactgggcaagatttggaagaattcttggtttgcatagggttttaatttttgttttggtggttttattttttgtttttgtttgtttctaatactataatttctttgttaattttcagtaattagaaattttaaaaagtttctgaatttatgtaaactgagaaaatattctaatgttatcatataacaaagatgaaatatcttccagaaacctgaatttccatctctataaattcctaatgggttgtcatcagcctctgttgatgggaaccttgctacgtattattacttcattcttctgagcagctttagttgtcataaagtgcgtcctcatctttttggctttctcatgttacttttttgtagttttttccacttgaaaacagatctgngnttccttacatgtgcaagtcaaaccttcagtcattatacaggg

SEQ ID NO: 14894 - DNA, 442 bp, Homo sapiens
caaggtctcagatcccagcttccctcctaacccagttcccagcttggcccacctcacccaggctgtgtcacatctgacttcgcagattacacctgagagggaagccccagccatcacaatgcgagaacattttccaatgacgaggaaatgccaaatacattttaaaactcattcaggattagcgttcaccttaaacttgacagactcttgagaacgggctggccagcgtgctgtgcgcaacccttagtgcccttctgtgactaatatttggataattgattgttggaagctcaggaagcctctctctctctccgagggattgaagttaacttctttatttctgaggtagggaagaaaatgaggatgccctgccttttgctagactgaatactgtcctccaaaaattcacattcaccagaaatcccagaatgtgaccttatta

SEQ ID NO: 14895 - DNA, 1022 bp, Homo sapiens
  misc_feature (1)...(1022): n = a,t,c or g
ctagatataatcttcagtcagataaaatttatgggagctggtgtcttatgcctgantcttagtaatttcataccggtttgaagtacgtgtgcccatgcctaaagccttgactttcagaatgttgtcttttgattcttctgtcttgatttgattaggggtgaaatttagaagtcttagtaatgtaacttgaagatgttaaaccaaaatctcaagtaaaatgaaaagcaaatatgggctactgaattaagaaactggcattctagtattaaatcctcacttcaggagcttttaaaaatactgagacccccccataaccagagattcagattcaaagactgaggataggaccttagcattgtagctatttaaagtttctaatgtgcacccagggttgggaatcaccaatgtgggtgtgaaaatgcctacaaagggttttagtgccttagaagtcctaagaagcccaatctgtatcaaagcagatccattttgcaaggatctttcttttagaactttctcagttctcttagtaagaactttagaagtaatcttgataataagcacagacagcctaacagcagaggcaacttaaataactcctgagcagttggcactagaacagaatacttggaatgacaccaaagttaaccaagtccagcatatgtccaaagagttaagtgtttcatttactgtagcattctgggtgagaaattggttgctgaaatcttaagacagtggtctcaacccttggctgcacattggaaatcacctgtagggttttaaagcatccaaatggtaattaacaggcagcaaaacttcagaactagttctgcatctactgtgcaaagatcatgattaactgtcaagacactggtagaacagaacaagcaaaagattaagagttcaaaagtaaatgcaaccaatttaacatgtagtgttattaaaaaattacaaaggcctaggaccagcctggggcaacatgggtgaaaccccatctttacaaaaaattttttaaaagtttggcc

SEQ ID NO: 14896 - DNA, 1305 bp, Homo sapiens
ggacagttatgcccgagagttcaccaccaccgtggtctcttgctgtcccgcggagctgcagactgaagggagcaacggcaagaaagaagtgctgagcggtttccaagtggtgctggaagacacagtgcttttccctgagggcgggggacagcctgatgaccgtggtacaatcaatgacatctctgtgctgagagtgactctgtgctgagagtgactcgccgtggggaacaggctgatcatttcacccagacacccctggatccaggaagccaggttctggtccgggtagattgggagcggaggtttgaccacatgcagcagcattcagggcagcatctcatcacggcagttgctgaccatctatttaagctgaagacaacatcatgggagttagggagatttcggagtgcgattgagctggacaccccctctatgactgcagagcaagtagctgccattgagcagagcgtcaatgaaaaaatcagagatcggctgcctgtgaatgtccgagaactgagcctggatgatcctgaggtggagcaggtgagtggccggggtttgcctgatgatcatgctgggcccattcgggttgttaacatcgagggcgttgattccaacatgtgctgtgggacccatgtgagcaatctcagtgaccttcaggtcattaagattctgggcactgagaaggggaaaaagaacagaaccaacctgatatttctgtctgggaaccgggtgctgaagtggatggagagaagtcatggaactgaaaaagcactgactgctctgcttaagtgtggagcagaggatcatgtggaagcagtgaaaaagctccagaactccaccaagatcctgcagaagaataacctgaatctgctcagagacctggctgtgcacattgcccatagcctcaggaacagtccagactggggaggtgtggtcatattacacaggaaggagggtgattcagagttcatgaatatcattgccaatgagattgggtcagaggagaccctcctgttcttaactgtgggcgatgagaaaggtggtggactcttcttactggcagggccacctgcgtctgtggagaccctggggcccagggtggctgaggtcctggaaggcaaaggagcagggaagaaaggccgttttcagggcaaggccaccaagatgagccggcggatggaggcgcaggcgcttctccaggactacatcagcacgcagagtgctaaggagtgagggcttagggcactcacctcctgtttccacaggaatcttttggtcaataaaatagattgactcagaaaa

SEQ ID NO: 14897 - DNA, 610 bp, Homo sapiens
tgcttctgtaacatcctgaaaacatagctttccatcccctgttggctttgaatggtgggccgagcacccaggtcgtctgtattttggttttcttttgctaagcagagatcttgaattcttcaaggtgctgatagcaactgctggctcctttctgtagtcacacacctaatgctagtttagtgattcaaaatgcatcacatttttaggcaggacctagattttccctgtcaacctaagatgaaaataatttcagtgttgattcagaactgaacattaagtaggccctcgtcctgcagttggccacttgagtgttttgttttgtttttattttttaaggtgggcattttcctttaacctctactttttcaaaagcaacaaaggggcctcaacctgagtttcctatgggcctctcttctgcatccccaaagcggccaagagcaaatcctgggggataagaaaaaagtgtaaactaggtaggattgtgatgctcaaaataaccatctagcaatatcttggagctttgagaatagattttgtgggcttatttcttcttgcctcttccccatcctttcaagagagaacttatttttgaaaagtatctatatataca

SEQ ID NO: 14898 - DNA, 1107 bp, Homo sapiens
aaggaagagctcacctcccatcagtctcagctaaccgcctttttcctggaggccctggacttccgagcccagcactctgagaacgatctggaggaagttggaaaaacggaaaattgtatcattgactgtctagtagccatggttgtcaaactttccgaggtcacattcaggcccctgttcttcaagctgtttgattgggctaaaacagaagatgccccaaaggacaggttgttgacattttacaacttggcagattgcattgctgaaaagctgaaagggctttttactctgtttgccgggccacttagtggaagccttttgctgacaccttggaccaggtgaacatctccaaaacagatgaagcattttttgactctgaaaatgaccctgaaaagtgctgcttgctgttgcagtttattttgaactgtttatacaaaatcttcctttttgatacccagcattttataagtaaagagagagcaggagccttgatgatgcctctggtggatcagctggaaaacaggcttgggggagaagagaaattccaggaacgggtgacaaagcacctgataccatgcatcgcacagttttcagtggccatggcggatgactctctttggaaaccactgaactaccagattctgctaaagacgagagactcctcgcctaaggttcgatttgctgctttgattactgtgttagcactggctgaaaaactaaaggagaattatattgtcttgctaccagaatccattcctttcttagcagagttgatggaagatgaatgtgaagaagtagaacatcagtgccaaaagactattcagcaactggaaactgtcctgggagagccactccagagctatttctaagactttctgtggtgtttcatactctactcagagttcacactcatatttcatatttttatttttgggtgttgggtgccatgttacttttggtgccttaatacacctacttggattacttacaaatgttttatcacttctttacaaaatccccacctggcttgtgctgccacataagcctctcctgcctatcgtatagagctgcagaaagagtaaatgatacacggtatttttatacaga

SEQ ID NO: 14899 - DNA, 55 bp, Homo sapiens
gaaccatttaccccaagccaggtatgggagacagttgtcagatgaacacgtaaat

SEQ ID NO: 14900 - DNA, 983 bp, Homo sapiens
ttttttttttattttccaaaagccttgtttttatttatatagagtcctaaccacttcggtggtaggaggagtgggagaggctcctttttcaatccagggacctccatgatgttggtttgttgttaccaaacacacaggtaagtggcatcacggatctggtaaactaacgacaatgtttagtctctctctgctagagcaacaaggtgagcatcaatctctgcttctgtaagaatcctgaatttaggattttcaactgtcactactccaacttctatttctgaaggtttgaaatcaattgatagaacagtagacaggcatgtaattgcagtttccactgtctgttcaaatgtccaatcaaatttcttcttcactttttttttcaaggaagctggttgactcagtttgtttaactcccgctgcagtggctttaaacccacagtagtaacctgcaggatcacacttatatacctgagggccttgctcttcatctataccaattaaaatcatacaacaaccaagaggcctcatttcagcattctgtgtgtagacctgagaaatatcggcaattcttttacacagcatgtccacaggaatctcatagccatacttgtatttccagttagctgcctcatagcgtgccctctgtacctgggatctgctgtcagctgtcattacggtcatcacacaaccaatgttttcagttatcttgaataagtgagtcactgtgctggaatccataatttggtcagttacttcctcctgtgtgacaattacggcagcagtctttccctctgacagctactgatgtaaggccaccctggttaatagccttaaaagcatattctacttggtagagccgaccctcggggtgaaaaaatggtaatgtggcggtcaaaaccggcgctggaaccacgggacatgttggtagaagcactactttaaacacaatccctgggccccagtagctcccgcaccaggcaccg

SEQ ID NO: 14901 - DNA, 1810 bp, Homo sapiens
ggagcacccggagaaaaaggcgagcccggcccacgcggcccgagggaggcgaggcgactttggcttgaaaggagaacctgggaggaaaggagagaaaggagagcctgcggatcctggtccccctggtgagccaggccctcggggcgaagaggagtcccaggacccgagggtgagcccggcccccctggagaccccggtctcacggagtgtgacgtcatgacctacgtgagggagacctgcgggtgctgcgactgtgagaagcgctgtggcgccctggacgtggtcttcgtcatcgacagctccgagagcattgggtacaccaacttcacactggagaagaacttcgtcatcaacgtggtcaacaggctgggtgccatcgctaaggaccccaagtccgagacagggacgcgtgtgggcgtggtgcagtacagccacgagggcacctttgaggccatccagctggacgacgaacgtatcgactccctgtcgagcttcaaggaggctgtcaagaacctcgagtggattgcgggcggcacctggacaccctcagccctcaagtttgcctacgaccgcctcatcaaggagagccggcgccagaagacacgtgtgtttgcggtggtcatcacggacgggcgccacgaccctcgggacgatgacctcaacttgcgggcgctgtgcgacctaatcgtcacagtgacggccatcggcatcggggacatgttccacgagaagcacgagagtgaaaacctctactccatcgcctgcgacaagccacagcaggtgcgcaacatgacgctgttctcccgacctggtcggttgagaagttcatcgatgacatgggaggacgtcctctgcccggaccctcagatcgtgtgcccagaccttccctgccaaacagagctgtccgtggcacagtgcacgcagcggcccgtggacatcgtcttcctgctggacggctccgagcggctgggtgagcagaacttccacaaggcccggcgcttcgtggagcaggtggcgcggcggctgacgctggcccggagggacgacgaccctctcaacgcacgcgtggcgctgctgcagtttggtggccccggcgagcagcaggtggccttcccgctgagccacaacctcacggccatccacgaggcgctggagaccacacaatacctgaactccttctcgcacgtgggcgcaggcgtggtgcacgcccatcaatgccatcgtgcgcagcccgcgtggcggggcccggaggcacgcagagctgtccttcgtgttcctcacggacggcgtcacgggcaacgacagtctgcacgagtcggcgcactccatgcgcaagcagaacgtggtacccaccgtgctggccttgggcagcgacgtggacatggacgtgctcaccacgctcagcctgggtgaccgcgccgccgtgttccacgagaaggactatgacagcctggcgcaacccggcttcttcgaccgcttcatccgctggatctgctagcgccgccgcccgggccccgcagtcgagggtcgtgagcccaccccgtccatggtgctaagcgggcccgggtcccacacggccagcaccgctgctcactcggacgacgccctgggcctgcacctctccagctcctcccacggggtccccgtagccccggcccccgcccagccccaggtctccccaggccctccgcaggctgcccggcctccctccccctgcagccatcccaaggctcctgacctacctggcccctgagctctggagcaagccctgacccaataaaggctttgaacccaaaaaaaaaaaaaaaaa

SEQ ID NO: 14902 - DNA, 865 bp, Homo sapiens
gatttgattcagagtgacatagctgctctccatcacttttactccaagcatctcgaattccctgacaatgatagcctcgtagtactctttgcacaggttaactgtaatggcttcacaattgaagatgaagaactttctcatttgggatcagcgatatttcctgatgttgcattgatgaatcatagctgttgccccaatgtcattgtgacctacaaagggaccctggcagaagtcagagctgtacaggaaatcaagccgggagaggaggtttttaccagctatattgatctcctgtacccaacggaagatagaaatgaccggttaagagattcttatttctttacctgtgagtgccaggagtgttaccaccaaggacaaggataaggccaaggtggaaatccggaagctcagcgatcccccaaaggcagaagccatccgagacatggtcagatatgcacgcaacgtcattgaagagttccggagggccaagcactataaatcccctagtgagctgctggagatctgcgagctcagccaggagaagatgagctctgtgtttgaggacagtaacgtgtacatgttgcacatgatgtaccaggccatgggtgtctgcttgtacatgcaggactgggaaggagccctgcaatatggacagaaaatcattaagccctacagtaagcactatcctttgtactccctcaacgtggcctccatgtggttgaagctagggagactctacatgggcctggaacacaaagccgcacgggagaaagccctgaagaaggccattgcaatcatggaagtagctcacggcaaagatcatccatatatttctgagatcaaacaggaaattgtaaagccactg

SEQ ID NO: 14903 - DNA, 1204 bp, Homo sapiens
ggaagatgcacccgcttcctgggacccagctgcttgatgttgctggaggcacaggtgacattgcattccggttccttaattatgttcagtcccagcatcagagaaaacagaagaggcagttaagggcccaacaaaatttatcctgggaagaaattgccaaagagtaccagaatgaagaagattccttgggcgggtctcgtgtcgtggtgtgtgacatcaacaaggagatgctaaaggttggaaagcagaaagccttggctcaaggatacagagctggacttgcatgggtattaggagatgctgaagaactgccctttgatgatgacaagtttgatatttacaccattgcctttgggatccggaatgtcacacacattgatcaggcactccaggaagctcatcgggtgctgaaaccaggaggacggtttctctgtctggaatttagccaagtgaacaatcccctcatatccaggctttatgatctatatagcttccaggtcatccctgtcctgggagaggtcatcgctggagactggaagtcctatcagtaccttgtagagagtatccgaaggtttccgtctcaggaagagttcaaggacatgatagaagatgcaggctttcacaaggtgacttacgaaagtctaacatcaggcattgtggccattcattctggcttcaaactttaattcctttcctatcatggagcatgaaccagtcatatcctgttgaaagcctggaactgaaggataatctggcaaatgagacagcagcagagcatctcctcttaaggatacgtgccttggactcatgtttgaatcgaacagtctcaaagtggaagaacaaattcttgtcacttttttacagctttctttggagctgcttcagtccatctcccagaggcatttggtctgtatctttgctcaactgctaatttctcttggctgtagggtgtgtggttaaggtacaaccacccctaaagctcagttttgaagtgagtgtatttatagcttctctgctggtgctgccttctagagggatgatagatcatttgaacccaatgacaatttttaaccagaaaatttaattgtacctgaatcaacctttccagcctaggacgaagtcctaggcccaagtcagagtattaatgatcatgagaattgtgtgctgaaccagtaaacgagtttaccttttgaaaaaaaaaaaa

SEQ ID NO: 14904 - DNA, 1107 bp, Homo sapiens
gccgtgctgccgggtacacgcggggcctcatctcatcctgcactcatggcagagcaggcctttcctccttgaacatgtagacaagtctcaggtcagtgcgccggcccgatgtctcccagtgagtggagaggccacgccacagtccgggccaggtctgacccagcactggcacccctgagcctatggcatcatccgaggactgtaatcctcaacccgttcctcagagcaacttggtgaaagggagtgtctgtctgctgtcagaagcagtggtggagatggcggctcctgtgctgaggtagagtcccaggggatgcgcacgttgtgaatgggagagttcacatccgcgactggcgagaggagacactgtggaagacaaagcaaccggaagcgaaacagagactgctctctgaagcctgcaaaacccgcctctgctggttcttcatgcatcaccctgatggctgcgctctgtccacggactgctgcccgtttgcccatgggcctgcggagctgcggccaccccggaccaacccgaggaagaagatttcatgagctgcatccttgccagccgaggccctggttggggaggccaaaccaaggaagagcttccccagcagtcgtcagtgctgtggtctctgctctggctgtgtttcagcccacctcctcccagctttctccacatcctcacagtgatgaaccgtatttcataaacatcacacgccagagaagccacagttactcggaagcccccagctgactgcctggcttgtttcagatgcagccgcttgaaacgtgcgcagcatcttcatatcataaagattgtgcacggatccttacaatgtctcctgggggagagcggctgaggctgccttgcacatggccttcccagggcgctgtccgacgcctgccccaccatgtccacatctgtgaagaggatggggctcctcgagaagtaagaccgtatctgccagcgtttctcaccacactggagagcagctgctctggagcagggatccaccagattggtatttttaaaaaaggtgtcaggcttgctatgttgaggttgtttttagagttacagagaataaaaacactcataatttcctgaaa

SEQ ID NO: 14905 - DNA, 1211 bp, Homo sapiens
aaggagcaggtcaagatgagggaatctcgctgggaagctgacaccctggacaaagagggactgtcggaatctgttcgtagctcttgcacccttcagtgaccctagaagaatgattggacagatgtgagccatctggagcagaggggcactaacccaggctgacgccaagaatgaagtggcccactgcagccctggcgagcaggcttcttggatggacagtgctgagacccccatatcccagagtccccagcctccctcaggttactctgcaccccacagatggtttgatggctgtgctgtatactggaggggagggcaggactctgggagaacagcacttctttcatgagacctttgttactcggtggttactgggtcctgtgcctgtccgttttggggcatgcagccctctatcatttttggctccgagaagagggcaaggggcccccgcagggtacttctgtgcttgccctcgccctgccagcaggcagctgtgcccctggcctgcccttcccgggaccccttattccaactcagctcctctttgcactggaatggggcactccaacacccctcagggaccaccctccccacagtatgcactcagccccacagaacccaccagtctttctgggaactcacacctgcccgccatcttggtactttaggttaatccctcaagcatgaaagctggatcttttggggtttaagaagcccaagccttgttcctggccctggcctagggagcactcaggagggttccttggtcctcatctctcccacctccgttccctctgggccccacactagccacagcgcgggccttgtgctggagtttgagcctgggacagggagagggaggcttggagacagtctgacccagtgccctctaggccacccacttctaggcctgccctgcccgccgtggagccctgggcaagctctttcccctttctgggcctgggtctccccatctcttcaatggggctgataccttcacagcccacagcatgggcacttatgaggacaaagtgaatttaacctggaaaagaatgtatttgagagtttcttttaaataatcagcgggtgttggtgatttgtagcccttctgcccttaaatgcttccttgggcaagagctgtctgtcctccctgcaggaggctgagtgtaaagagtatcattcattgtttctctattaaattattttctcta

SEQ ID NO: 14906 - DNA, 436 bp, Homo sapiens
gcgccaactgctgcgggataacaccacagggtctaattcttccctcaacacctcgctgccttcacctggtgcctggccctacagtgcctctgacaactcctttaccaacgttcatagcacttcagcaaagttccctgattacaaatcaacatggtccccagatcccataggacacaaccccactcatctctccaacaagatgtggaaaaaccatatttcctccaggaacactacaccgctgccccgcccacctcctggtctgaccaaccccaaaccatcatctccctggagcagcacagcaccccgatcagtcagggggtgggggacacaggactcacggctcgcctcggcctctacctggagtgatggtggctcagttcgtcctagttactggctggttctttcacaatctcaccccacagattgatgggtcaac

SEQ ID NO: 14907 - DNA, 1028 bp, Homo sapiens
ttttttttttagtaaatagtataaatgtattttgtaatttaaacaaaagcttctgttaacattattgctaacatggctagacactgtcactaaatttggtggctctgctcaggatggtctgaacacatgcaacattctttttggagccacctgaaaaacaaggattcatcatccagctgaaaccgaagacagattttttttttaccaaactggagggaattttgaaatggctgaccaaatctgtgggatacagaatgtacaaaattctcttttagggttgctggggtgacagggcagctcaaagaggtaaccatctataacatctgaaactgaggtatgagacctgtattacaactggataacaaaaaaaaaaaaaaaaaaaaccgccatatatttaaaatgctggagatggtgaagacacacactcgtttcaaatattacaccccctccctccaactgaagcagcccattccaagctgcttacttgaaactgcatgtaacatgtcttaggatgaatagcaccagcaggggcttatttagtgatggttaataactctctcaaacaatagagggcaggccagctagtttattcaaattgaatctaaaccttagatctctggcttaacaataacaagagaaacctttatagacacaatatatcttgcattaaatcagagacggtttaaatcagtcttgtaacttctaatattctgggctggcaactacagcatgacaaatgtttagtgcagttacaaaatcacattttactttccttggctagcaaaccttaaacaaatctgaaaaatgcactgttttacaaaggcttttaccatatacccactgctgccagtctcaagtaattatggtttcttcatcccccaggaacatttctaaataagggggatttttctttgatctgctcgccttgaagtgtatgtaagaactcaagagagtaagttgaaagaatgaagattaactgagatgccaagaaaagtttttattgcaagcacagtgagcagaaagagatg

SEQ ID NO: 14908 - DNA, 729 bp, Homo sapiens
ggagaccttgggcaaattacctaatctttcacccttggttttctcatatgatgacagtgcctttctgatggagccgttatgaaggtaaacattaggttccaacgcatgggaactacagttgtgttaaaatgagaatttcccaggagttcgtgtgtttcattgtgaggtgctattcagctctgtctatttccctcacatctgtcctttctctttctcatcccccactcacttagtaaacatgtctgcttggaccaatgattgggagtatggcgtgctgagccctgggtaaccgggaagtaagccagcattttcaacaagttgctaattataccacttttaaacacaataagagaagaaggaatgaaccccatgagctggggccacttggcaagtcccgatggtcttcttaggccagtcaggatgtttcttagactcacatcagccttgatgacgatctcctcccacatcgactgagtcaggggtcgctgtgtgctgagtaatgcagtcctttgctgggcgggaagtgggcagcactctgaagggacatgagagtggatgacggtgaagctgtgggaaactgcgggggagctgcacacgcctgatgcctgtgtcagagccacgcagtctctgagtcgtgttcccaagcacaactcacatctgtgaagtacatcagggaaaattaaataagtccaagtaggaaacaagttcagatatatttggaagatatta

SEQ ID NO: 14909 - DNA, 1540 bp, Homo sapiens
gcggccagaggcgggcgctaccagccggcagctccggagctgcacgcgccagtgtccgcgcacaatcggggcaccgagctcgaccttagctggatctccaaaatacaagtgaatcacccggcagttctgaggcgtgcggaacaaatccaggctcgcagaaccgtgaaaaaggagtggcaggctgcttggctcctgaaagctgttacctttatagatcttactacactttcaggtgatgatacatcttccaacattcaaaggctctgttataaagccaaatacccaatccgggaagatctcttaaaagctttaaatatgcatgataaaggcattactacagccgccgtttgtgtttatcccgcccgggtgtgtgatgctgtaaaagcactcaaggctgcaggctgtaatatccctgtggcatcagtggccgctggatttccagctggacagactcatttgaagacacgattagaagagatcagattggctgtggaagatggagctacagaaatcgacgtggtaattaacagaagcttggtgcctgacaggccagtgggaagccctgtatgatgagattcgtcagtttcgcaaggcctgtggggaggctcatcttaaaactatattagcgacaggagaacttggaactcttactaatgtctataaagccagtatgatagcaatgatggcaggatcagattttattaagacctctactggaaaagaaacagtaaatgccaccttcccggtagctatagtaatgctgcgggccattagagatttcttctggaaaactggaaacaagatagggtttaaaccagcaggaggcatccgcagtgcaaaggattcccttgcttggctctctcttgtaaaggaggagcttggagatgagtggctgaagccagaactctttcgaataggtgccagtactctgctctcggacattgagaggcagatttaccatcatgtgactggaagatatgcagcttatcatgatcttccaatgtcttaaatcagtcaccagttccagaaaagttctttacgacaatgtttaaaaattatttttctacgtaattgctaaaattatttaattaaaaaattgggcagtaggtaactggcattcctctctttaaaatttctaccgaacttaatggaatggaaaaagcaaactcatccacatgtggtactcatttcaggcacatctgaaatgatcttaattactagaagatctgcactattaactttgtgaagagtttctcctaaaaactttaagtaaaatgttaatggtagctttgataacatcaaattctaagggagaaaaaaacaatattaaaccgcccaagcagtgtgccctagcagaggaaaatgcaacatctcgcaagcgctgctgtaacgacttcaggagtcactgattcagcactaatttcctgctgtgaaaactcatctttcatttttgccgtggataggcgcttttattaattgttgtcctaatgaaatttctgacattgtcatatacaacgatgaatatcattaaaatttttaa

SEQ ID NO: 14910 - DNA, 645 bp, Homo sapiens
tttttttttttttcaagatttgagtagtttaatgagttttcacttattggataaaagtgtcaacatagtgatggcaaaacaaacgcagctccagcccttgtttccaccttgttgcagctcaggggcgctgtccccagcagccatcggcgccagcatgaggaaggagtctcaggatgcccctccagcgagagccaggtcgggcctcactccttgaacttccattcctggcggcacatggggcagtgctgctgcacctgctgtgcgtgcagccacttgaggatgcaatgcatgtggaagcagtgggagcactggccccacaccagcgggcaagtcgtcgccgggcaccttgcagtcagggcagcatccgttaaatgccatccttgcagatgccacagttctcatcgttggccacccagagccaagtggccacgccgttccagcacttaatcttcaccttcatggcagcagagcctcacgttgaggatatcttcaaagatctcaaatgggcctggccaacatgacgaaactccgtctcgccctacccgcccttccgttggcagcgccggcgtccgcgcgggaaggtataaaaacgaccacagtcgcggcccgactccctcaacagcgcccgccgagtctcctcgtgcc

SEQ ID NO: 14911 - DNA, 396 bp, Homo sapiens
tgatgaggaatctgccagtagtcttatggagctcctttgcctgtaatgagtcacttttctcttgctggtttgaaaattctgtagttgtctttgatttttgacattttgactataatgtcttgttctagacctttttggatttattctgtttgggcttcatgaatctggatgttcatttccatgcccagatttgggaattattgagtcatttttttaattagggtttttaccgctttctctttctcttctcctctgggccttccataatgtatatattggtttgatgggagtaccatgatttccttaaggatttcttcacttcttttcattattttttcattttgctgttctgggctgtaatttcaaattgcccatcctcgagttttcaaattctgt

SEQ ID NO: 14912 - DNA, 1137 bp, Homo sapiens
gctgtatttcctgaagaactaggtaccagtgttcctttaactgatggtgagtgcagatcactaatctataaacctcttgatggagaatggggtaccaatcccagggatgaagaatgtgaaagaattgtggcaggaataaaccagttgatgacactagatattgcctcagcatttgtggcccccgtggatctgcaagcctatcccatgtattgcacagtagtggcatatccaacggatctaagtacaattaaacaaagactggaaaacaggttttacaggcgggtttcttccctaatgtgggaagttcgatatatagagcataatacacgaacatttaatgagcctggaagccctattgtgaaatctgctaaattcgtgactgatcttcttctacattttataaaggatcagacttgttataacataattccactttataattcaatgaagaagaaagttttgtctgattctgaggatgaagagaaagatgctgatgtgccaggaacttctactcgaaaaaggaaggaccatcagcctagaagaagattacgtaatagagcccagtcttacgatattcaagcatggaagaaacagtgtgaagaattgttaaatctcatatttcaatgtgaagattcagagcctttccgtcagccggtagatctccttgaatatccagactacagagacatcattgacactccaatggattttgctaccgttagagaaactttagaggctgggaattatgagtcaccaatggagttatgtaaagatgtcagacttattttcagtaattccaaagcatatacaccaagcaaaagatcaaggatttacagcatgagtttgcgcttgtctgcattctttgaagaacacattagttcagttttatcagattataaatctgctcttcgtttttataaaagaaataccataaccaaaaggaggaagaaaagaaacagaagcagctctgtttccagtagtgctgcatcaagccctgaaaggaaaaaaaggatcttaaaaccccagctagaatcagaaagctctacctctgcattctctacacctacacgatcaataccgccaagacacaatgctgctcagataaacggtaaaacagaatctagttctgtggttcga

SEQ ID NO: 14913 - DNA, 1303 bp, Homo sapiens
caagatggctgccctgacagcggcgattttgcagcactccagagcctgctcaaggcctcctcgaaagatgttgtcagacagctgtgtcaagaaagcttttccagttcagcccttggcttgaaaaaactcttggatgttacatgttccagcttgtctgtgacccaggaggaggcagaggaactgctccaggctctgcaccgcctcactaggctggtggcattccgtgacctgtcctctgccgaggcaattctggctctctttccagaaaatttccaccaaaacctcaaaaacctgctgacaaagatcatcctagaacatgtgtctacttggagaaccgaagcccaggcaaatcagatctctctgccacgcctggtcgatctggactggagagtggatatcaaaacctcctcagacaggcatcaggccgcatggccgtccccacctgcctgctccagatgaagatccaagaagatcccagcctatgcggagacaaaccctccatctcagctgtcaccgtggagctgaggcaaagaaacactggacaccatgttagatggcctgggccgcatccgagaccaactctctgccgtggccagtaaatgatccagccagctgccagggccactgccatgacccagctgctcatgagtgataaatgtctccccatatgcaggctgcccttgcagctgcagctgacaacaggcaggatggtggggacagcagggggctactgccatccagaagttacagttggattgggaagaagcagccagatcccccgctgttctcactcatcttctttctctttctgaagctggagagcagaagcccccatctttgaaaagctcctgagtgcaacttaattaccaccatggcagggtgagggaacatttgcatcgtcagctgcctctgcatagctgtttgagaaattcaggcccaaatcatgcagcctatccaataagtaagtttatttccaacattagctctaattagttcatttccaatcccagaacacatggagggaatcggacaggtgatgccagcagttcctgctcctctgtcagggaagccaggcagagcccacagagcatggtccatccagagtgttccctgagccccctccaccatactggaacccctcttcagtgtaggaagtctgaaatgggtgctaattcccttcttcatgaaaccagggccctcttccttcatctaatgcagccactcctaggtgaagaagtgggaataattggaaataaacaacagttctaaaacttcaaaaaaagtcgacgcggccgcaagttta

SEQ ID NO: 14914 - DNA, 489 bp, Homo sapiens
  misc_feature (1)...(489): n = a,t,c or g
tcaagcgcacctaacctacaggattatgntcgtactcatcgtaaaaagctgacctcttntggctgcanagatgacgcnanacgnggttntgctgttaaaaggnnntatatntcatttgctcgacacccaaccaatggctttgaattgtattccatggtgccatctatttgtcctctagaaactcttcataatgccctatctttaaagcaagtggatgaatttcttgcttccattgcttctccatcatctgacgttccacggaagaccgctgaaatttcctctacagctttacgttccagtccaataatgagaaaaaaagtatctttaaatacgtatacacctgcaaagatcctcccaacaccaccagctaccttaaagagcactaaagcaagcagcaaaccagctacaagtggaccttctagtgcagttgttcctaatacctcatctcggaaaaagaatataactagcaaaacagaaacgcatgaacac

SEQ ID NO: 14915 - DNA, 1782 bp, Homo sapiens
ttttttttttttgctcatcgtttccatacagttttatttgcaatttgttggaaccatggagaacaatcggcagatacacatgttgcttctgggaacagcattcaactccagatgctttttctgctaaggagcagggccacaggtgcgccctcagcacccagtgctgtgctgcgcggagggctgtactgaaggttctgaaggcctggtgagtccccctcacggccagaaggagagacccggcttcggcttcatggccggcctcccgcaggtgtctgcccagctcctctgcatcccagcgcccttgctggaggctagccaagaggtggtcaacaatacgtggatagaagggagtggagacacacttcaccagcagcttgggcatccaggagcagggaaagaagttcttggtcacaattggaatcattcaccgtagtgactgccgtgatttgctccagtgccatctcgtgcagatgctcatctcggctctcgaggagaagtttcagagatggaagcaggagggactggttaagcagcagcagacacagctccttcacaccctctgcaggcagcatctgcttggtgttatacaaagagcgacacattttcaaaacttcattccccaatccttccttgttctccatcgtacatctggttagcatcactgtagctagtctcacccatggattattggttatgacatattcacttttcataggtggccaagcttgcaaaagtaaaaccaagtgctgaaattcagcctcgtggtgactagattccaggagttccatgaatagacagtagcggttctcttcattctcaatgtcagctatgtctacctgtctctggggccaggaggctttgagaatggcttcagttctaaagaacacgaggagcttgctgtcctcctcagtcaggtgaaatgattgccccaaaatctgcagcacgtgaatgccgcggccgcaccggccaggcgtcatcagcacagaaaggccgcagccactccagcaggtcctcaggtgaaaaccagctcctcacccttgtccacactggcgtggaactgctgcaacaacaccttccaggaccttcagtgggtccccttggcccaccaaggtcagcactgcccaccactcaatgcagaaattattttcatgattgcactctgcactatatccttgggtgagatgtcaagagggccaactgccacctctagcagctgctgaatcattgctagaggctgaccatctaaacaaatagccacagcttcatcatgaagtttctctttttctgatcgggacagatcatagaggtgactgtatttttgcagtgtttcctgctcactattcttcagagaaaggatgaagctgtggctcagggtttccaggtgggcaagtgatttctccagatgattcaaagtatctgcataggtaactttagaatccttagcttcttgagcttcgtcttctgagtttcttttccttggcttctcaataaaatgtttgactgtcttaatagcctttctagtcatctctttacgggcttccacagacagcttggtcacagcttttggagaaaatgtaactgcatctaccacagtgatgaggtcacctgggtggagacgatcaaagtacttcatgcagacatcataggcatgaagccactccggtgaagagcctgggacttgtttaatgagatgagggtctccagtccagaacaacttctgtaaccagatggtgtacagagagcttggggaaagcatctgtccatccttttcagggattttgg

SEQ ID NO: 14916 - DNA, 1063 bp, Homo sapiens
ggctgcgctcaggcccgtggatctcatcgaagatggcggcgcgatctgtgtcgggcattaccagaagagtcttcatgtggacagtctcagggacaccatgtagagaattttggtctcgattcagaaaagagaaagagccagtggttgttgagacagtggaagaagtgaaaaaagaacctgttttggtgtgtccacccttacgaagccgagcatacacaccgcccagtgatctccagagtcgcttggaatcttacgttaaagaagtttttggttcatctcttcctagtaattggcaagacatctccctggaagatagtcgtctaaagttcaatcttctggctcatttagctgatgacttgggtcatgtagtccctaactccagactccaccagatgtgcagggttagagatgtttttgatttctataatgtccctattcaagatagatctaaatttgatgaactcagtgcgagtaatctgccccccaatttgaaaatcacttggagttactaagcaattcggaagagaaacacattgaaatcactgtctttccctgagcaagggggctgctcattagatcttttgatactttaccatgtgaaatactaccagaactgttctctaaacccactttttctgtagaggaatgtatcatctttttttttctcatattacaaatggacaaataacggactttctattttcatatttgctgaaaccattttttaaatgaaattaggtcattatttatgaaaagttttgagagggcactgtcaacttgggtttaagacaggaggacattgcaagttcacacctttcataagcataaagtagttgcaagaaagtattttcatcctgttaggattcatatctaagatagagttatgcattgcacatacacaaataaacttttattagatagatacctataaaagaaacataaaagtatgttgtgtattactgacagttctagattaatttcttttagaattaaagtagatttgttaaagtgtattgtgtgttgtaaattttttaagtgaaatttgcaacacacaatacacttt

SEQ ID NO: 14917 - DNA, 349 bp, Homo sapiens
ttttatcaatttaaaaatcttcatagtacttgtctttcttaccccattcacacagtctcacacagttacatattccaagtatccatacatgctcagcctttcatgtagatgcaatctatgtgaagaaaaacatagattgcttgctatgtaactatagattcacagaaccggaaggatcacaggagactgactacctagtggagcagtgtttctcaactgatattatagcccttattaattagtctttatttgggggtaggagggggtgggagtgagggtggcactgctgaaactggactcagagggatcccgtccaattggatagatatcagacaacttacagtcactg

SEQ ID NO: 14918 - DNA, 570 bp, Homo sapiens
ggcactgttctgctagttacggcattcacactttaggtaacattttttttccccttcagatccttctgcaccaactccaacttcccctcccaggatctaagccacagtggggactggagcctcgttttccccctaggcagacctaaatcaagcagcttaccacaatagtgcatgctgagtagattagttccaaggaagggagactggaatgctggtgtcaaggaaaagcctccctcatcatctagtctaagaccataacgggcagaagcataagaggttccagggccataggagaatgagaagtagggcacatatagggaggaaagaaaagtgaagaagggggaaatctctgaatttttttactgctgggaaaagtgtactacatgaaggatgcttggggctttgctaacctgctcaccgctaaccctccaagtctaaccatccccagaggccacacaaaccaagtgactcctgtagttcccatttgccccactatggagtcagggcaaaagtggaatagccactccatgtgattttagcatgtttaatcattttaacaataaacacgcc

SEQ ID NO: 14919 - DNA, 1417 bp, Homo sapiens
  misc_feature (1)...(1417): n = a,t,c or g
ggaaggctcgcctgggagctcatacctggctggggcgaggattggctgttccggggctagggagcgctttctcccgggaaccgcggctgtgacccaagtggcccggaccagtttggggctgcgtgcggcctgcctcaagcaaccaggtacgtaggtcggcggcccagctcggcgctgcggtgggagccggagggcgacagtcagagccggggtgccagcgggacgcgaccgccagatccacttaggaccccgtcgttctgcgaagcggccacgtctgagtcccggggcctcctcgtgctgcagatgtcgccttaggacctcggccaggataccctctgccatgctcttgtgctgcccgtgatcaccgactggcccttgtaagcaccttcgcagcaggaagcccagagctgcgcctgccctttctgaaggctgtggaagaggttggagtgggcgcatcttagcttgccccatccccatttgaggtctgtcggagctgcccttcagtgtgagcatccacaatgggtaccccagcctcggtggtcagtgagccacccccttggcaggccccgattgaggcccggggcgccanagcaggcctcggccaacatcttccaggacgccgagctgctgcagatccaagccctgtttcaacgcagcggggaccagcctggccgaggaacgggcacagatcatctgggaatgtgcaggggaccaccgtgtggcctgaggccctcaagaggctgcgcaggaagaggcccccaaggcagaaacccctggggccactcgctacaccactgcagccgcctcagaatcctggagccccactctgcactggccaacccacagagtgccacagagacagcctccagtgagcagtatctgcactctaggaagaaaagtgccaggttccgccggaactggaggaagtcaggccccacaagctacctccaccagatcagacactgatccagggaaagagccaggaatggcagtgtcttccctcttgccaaaaggcctggggaggtgaaggaagagagactttaggcaagcagcccaaaggggtaaatgaaagcaagaggctgctgcccactgacctgctccattcagaacaagactggatgcttctgttgagctctccattatgtgggacccattcctcaccaaaatgaggagagacagtgactgttcctgccacagtccttcccagtctaacactattcctgggctgcatgatattcccctgggagcaaagtgacaggcacttagatgcagcatttcaccactcatgctactaatcatctacctgctactactgtaaaccatggttccagcagcctgttccacacccccacaccatcaggatagcacatggaaactgtagtttaagtggcaaataaaaacatttgcatcaaaaaaa

SEQ ID NO: 14920 - DNA, 1998 bp, Homo sapiens
tagaaaccatcaatagatgtctcacaaaacatctggaacaactgaagacccctgtggggactctttcagacatctttggaaacctgcatcttgactcattgccagaggagtcagatgtggccactgattctatcccaagagagatcttggtcacaggaacctgccatttgaagtgtgtgtgttacggcattgggaactttgccacctgcatcgtagctagaaaccagctaacgtttttgctgcttttgttggaaaagtgccagattcccagaagtcactgttgggtatatgaccctctgtttagccaacttgaaattgaagtccttaacacccttggtgtgactgttctcagtgagaacgaggaagggaaacggagtacttcgcggggagcctaccatcttttacatgctccattgtgggacggccttgtacaacaatcttttatggagtaactggtcagtagatgccctttctaagatggtcatcattgggaacagtttcaaaggacttgaggagaggttgttggcaaggattctgcagaaaaattatccctacattgcaaagattttaaaaggactggaggagcttgagtttcctcagacttcacaatacatggacatatttaatgatacctctgtccactggttccctgtgcaaaagctagaacagctctccatagatatttgggagtttcgggaagaaccagattatcaggactgtgaggaccttgaaatcatcaggaacaagagagaagatccttctgctactgactgaactcgttgtgaggtactcagtgttggctgaggtaagaagctgccaccagagactaaagggaaggctgctatggaggaactacagagaactcctttgccaggaaagaacatcaacttggctgtcctgttttgaggacgataccccacatgaggacttggtataaagattcctgccctacgtggcattgtcccgttttacatccttccctcatgacctggcctgatgtggagtagctcctgagtaaagaagttacccttttgaaggtgatctaaaaatactgtttatttacagtacatccctcttaggggcaagtctctgactggttctggacctgccacagttcacttggccatgtcgatcaggctctgcagtgaggtgggcacccacgtcttctcgccctggacaaagaccactccccggtcgatgtagatcacaatgcggccaaaggtgtagagctgcttcccttcgtgtcgcttcccaatgacgggcatgaagacaatgttgtgctcctcagccttggtctcaatgaggtccttaaagttcatgggcacagagctagcggccacgccaatgcccctctgagccatgttctcagcctcccgcctctcctgcatggcctcgtactggaagtccttcctccgctccgtgtgggtgagataggcaatgttctcccgtgctcctggctgcatgtaggcaccaacgttggaggacaccgcccggttcatgatatcaagtgcctcattaaatttgtccttgacagatggatgtgccagcacttggtctgagaacatcgacttccaacccaggtaccacttggtgatctcctcataatttgggctgttactgagccaagagcacagcacctgccaaaaagaaaaattacttgcatccatcgtggcaacaaatgaaggcaagatttctgaagtggccatttgttttgttttgatcctggtcctacaggctagtgacactactttacagggatttatagtagctaaacagtctagcacttatgaatatggattttggagtcagcctggtagctaaagtggcccttgcatgtaaactctctgagcctcagcttccatgtctacacaacagggataccatatcccctaccccatagggttgctgagaggagctgagataaagcaaataaagtgcttggaacagcttctgatacatggcaaatgtccaataaatggtgcccactatgaaaaaaaa

SEQ ID NO: 14921 - DNA, 596 bp, Homo sapiens
gccttttcttccatcttgattgcagtggtgattacacacatgtagacattcatcagaactcatcaaagtatacacttaagtctgtgcattttattacatgtaagtaacacctcaatctgaaaagtatcagggcaacaccacacactgcagaggggcagggctcctccggcagttactcacttcccttgaaacagaagctcaaacatggagtagtcttctgtgactaaacttgttttccgccctcccaacttccaggaagaaccttcttctgaataggatttgaggtaacttaggaaactgctctcaatacggaattttaaagttggtgaggaagtcgacagaaggggaagtcacagtaggaaaatcaaggtactatcaggatgaagtcagcacgcagagcaaggccagcgaggcccaggcgccaggccttggtccctgcccacctcacccaggccagccagacagcacggactgccctacaaggtcacctcagagagatgggggtgttctctcactgctggcttttgatgagcccaggagggctcagccttcactatcctccctaacaggcatttggggtgcagagatgctgacgc

SEQ ID NO: 14922 - DNA, 2053 bp, Homo sapiens
  misc_feature (1)...(2053): n = a,t,c or g
gattgaaatttgttggatttatttctttctaaagtttgtacatttacatgtatcatatacatattttaaatccttcactattttgcgtgatttctattacataaaaaccatttaaatgcaataaattttgttgccgtaaaacaacaaaatatccccaacttataaaaacacaggaacaattatattcataaacatttacacaataaatgtactctatatatcacagcttctatacatatcagatgactcacttgtctacaaggtttagatttacttgaacaacagtgaaatagggtaatatttatatacaactattttaataaaaaaataaagcaattgtaaaatgtaaacttaattgtcaaaatattctttaaacactttaacaatatccacacaaattactgttcctttctaaaagagaccaccacaaacgccatcgttttctagaagacggcatttcccagatctggtaggtggtgatgaggacaggtttccagtacgtgttatagtanccgcccagctaancccaaaactgctaatgcncgaccagttccgccattgaaaaaggagcaggctgctattttgacactaaattactttcacaatttgcaggggacatatggcaccaggactgcaatagaactgaaatgattggtggagaaaactttgaaggtaaagaaatattccacaatgccaattagtttgagccacagtgaatataactcagttattataataggctggaaaagttaaaagcttcttttatattaaaagatacaaattatcgcctttctgcctgtcctatggtaatcaaggctgacaatataaattctccgctagtgtacatttagaaatgggttcctaaagcttgagatataagagactgcagggaggtggttaggcctttacctaacagctctgatctggactgaacaaagctgctaagctagcacttgagtattcctcgacccttcccctagaaaggaaacgttagccatttccaggaatctgggtgtggaggcaaagatatcgtccgtccgtagttagaactcagggtgccagtttgttttttgcaaaggtaaaatacgtggtgttaacttcactcaagagaatctttgtccatgaacgtttgttcatgtgcccacgcctccagtgactcagtcactctcggagttgataccttgcctcagcagggtcacgctatcaggacacctggatccctaaagcaggggaagtggcatttgaaaccccaggctgtccttgctgctcagtagaagcctgagtgaagtggcggccgggggagaggttcctctttgcagagatgatgtgttatcaccactctctggcagggctctggtgttcaggactcagagcagtgagcctcagacctgcagtgtggtccttaatcgagccttgggctgggactcttctaggagcgcctgaagacttatttatggcgaccgatgggaaaatattaagtgaaaactccaaaattctctccattaaccaacattttcaggaattgaagttagggtgcttatttctataacactattcctaagagcttagctcctctgccctgcaaagggaaatgcattttagttcggttcctttccatttccatcctcgctgttgttgctgatggaaaagtgctcaactgctcagcatgttcagtcggagctctcttaccagtaaagctcagaggggagtgtggacaaggcacatcagtgctcctacaggaagtgcctccttgtttcttcacttgtactcctctctcaaaggaatgatctgcagagcaagcagctctgccaccttggaaaatgatgcacaccagcttctgggacttcacccaggctacggagagatgctggagagctgctgcttgtgaattacaagaaagccttcaatttggtggtccacaagaaagaatgtgatatggatcccctcatttatgtgttaaaaatataatgcatctcaaagtcagacactagagctcagattccaccctggcccttggaaaacatctgtgatgcagtttccaccccctctgttc

SEQ ID NO: 14923 - DNA, 5267 bp, Homo sapiens
ggcagctcgggctcgtccagcgacgaggagcacggtggcggtggcatgagggtcggaccccagtaccaggcggtggtgcccgacttcgaccccgccaaactggcaagacgcagtcaagaacgggacaatcttggcatgttggtctggtcacccaatcaaaatctgtcagaagcaaagttggatgaatacattgccattgccaaagaaaagcatgggtacaacatggaacaggctcttgggatgctcttctggcataaacataatatcgaaaagtcattggctgatttgcccaactttacccctttcccagatgagtggactgtggaagataaagtcttatttgagcaagcctttagttttcatgggaaaacttttcatagaatccaacaaatgcttccagataaatctatagcaagtctggtgaaattttactattcttggaagaagacgaggactaaaactagtgtgatggatcgccatgcccggaaacaaaaacgggagcgggaggagagcgaggatgaactggaagaggcaaatggaaacaatcccattgacattgaggttgatcaaaacaaggaaagcaaaaaggaggttccccctactgagacagttcctcaggtcaaaaaagaaaaacatagcacacaagctaaaaatagagcaaaaaggaaacctccaaaaggaatgtttctttctcaagaagatgtggaggctgtttctgccaatgccactgctgctaccacggtgctgagacaactagacatggaattggtttcagtcaaacgacagatccagaatattaaacagacaaacagtgctctcaaagaaaaacttgatggtggaatagaaccatatcgacttccagaggtcattcagaaatgtaatgcacgttggactacagaagagcagcttctcgccgtacaagccatcaggaaatatggccgagattttcaggcaatctcagacgtgattgggaacaaatcagtggtacaagtgaaaaacttttttgtaaattatcgacgccgcttcaacatagatgaagttttacaagaatgggaggcagaacatggtaaagaagagaccaatgggcccagtaaccagaagcctgtgaagtccccagataattccattaagatgcccgaagaggaagacgaggctcctgttctggatgtcagatatgcatctgcctcctgagaaactggtggctttgaacacttggtgtggactactgtgttatccgggatatcaggtattatgagacatcacctagccatctgcatcacatctctctggacaagcagctattaccaaaaaaggcatatacttccagtcctgtgctccatctgccttaattctttgctcgttcctccatgttggcgccacttcccagagagctccactgcatctcacactctgcccacgtgctggggaagtctcacggcctgcacatctcttgtgactctgggaaccgcctctcccgccggagcccccgagccccaccaatggcagctcttcccagtcagcagcttcagagcaggcagtctccttggaaggcccgactctgttcctgcatggcctgcagtttctactttgtgcatagagtcattttcagagtcaccgcgaccctgttggccttctagaaagtttcttttgttcttttctgagacaaccacctaagtgataatacgcttttttggaaactaatatatattgccagactgcatcataacctttatcatgccaagcatcctgatgcaactcacatttccctaaacatggggtacagttatgatttataaattgagttggcttaaatctccctcttctcccttcccaagtgttacaaagatcatttactgcaactgtcgttggacactgtagcttaaagggaacgtggacctcaatgctttctgccttcaacttttcagcattgtgaccccagggtggttgccaccccatcttttcctgaccccccccacccccccacctccaagaggttcggcccacatcactgtacctggtgcttgtaaatttggaattggtgccttctccttttggcaaccatggttatcaatcctttttctgttttagtgtcttatttcttctttcaagttatttgctagccaaagatgacatcactgagattaggagacaggggagagcttgctgcagattctgacagtgcagattttaaatgtcaggatattagaatagctggcgctggtttatgaaagctgcgcgttgttccgcgttctctcggtgtgcctggccttttatgtggcactctgtatgtcagtttgtgtccttcatgtgctgatgtgattacacaaacaccatgcactctcttttcatatcagagtacaggacagagaagtgatcaatgtattggtctagtgagactgagatgaaaagaaataacctacagagtggtctgtaatgccttttggttggactgggaacaagtaaaaatttctaataaacattttgagacttccagaatcacttttgttatcttatcagaccatgggcctgctgagggttgagcagacagcctgcattctaacataccctgttcccaccccacggccattcagactgcactcaatacgctgaagtcgcttttgttgttgttgttgttgtttgcatcatttggatttttttcctgctttcaataccaaaaaaatgcagatgctttaaggcctaaacagaattctgaagaatttaaaatatgcaattaaagtttgatatgttttgtctcccaagcaccttgttttttgttgttgttgttgttgttgaagtcagctgattttctctttagaaagagggtcagctagaaacctaggttttttggaattgtaaatttttttttagtatagtctggagagaaaggtcattcaaaaggaaagtacaatgggacttgctgcccttcatcatctcgttcccgtgccaggtgtgtgttggtcacgtaaaagcctgggaagcatcagaggagtcccggattgctgctgctacctggagacagggttagcaaaataacactagtgatgagggagaggcttcttttcaccataagcctgctgtgtacaccgagggcggcaggagaagcatgggaaggagtcagcctaagtttgcacattgcataaagggtacactaaggtatgagctgaagctttaggttctccgtgcttccctcaagacctccttcttgctaacagaagcagtaggcaattgctgcagtgcgtttctcaccctgccaataggtctgtctgtatctctgttaaggaaaatagcctggtccctcctggcagtgcttggaagcttgatgctaatttttatatagcgtggcaaactgaccagcagtgccaggccttgatctgtattctgcactatccctttacttggttcctggcactgaatggtctccagccctgaagaatcacgtgtgatcacagcagctgacctgggctttctccccgagaggaaggggcatgtcatttttatttgacagagggaaaatgggagctgtccttgactgcctttgttgtgctttcccgcgtaagatagcactgtgttttaaactgttgcattacactgtctttgcaatgatgtaaatgtaagaaatcacttagctttaaaagcgcagtggtttgatcttatttatatgaagactttttaacatatcaagaattaggtgcattggcaggtagggtttggggtgtgataactgcttcagatggaatgttcacttaagctttgtcttcttaaaaattatcaatgtgaatgtcataattatatatatttttgtggaaaattttctcctaagtataagttattgtgcaaaatatagtgtcattgatgcaaataatagtttaacttttagtttagaactcctaaaagatataaattgtattgcatatgcattaaaagtttgttttatttaattttatgtagatgtgtgaagtgttaggtaaaatttttttcacttatccatttaaacaccttgttacttgaatattgtgttgactggtctgcaacagtgatccattctgtaatatagctcttttaactgggaaggaaccacaccccagttgtgccgattacattagtgttggcacacagtcgggtgctagtgtaacacaaatgccgcgttgtctgggtgtacagtgtttgtgggagacgccacttcctcaaaatggtttttgattgtttttaacctataagacgttctgatgctcacaaacctctattcaacacacaaaacaaacatgaaaagggtagttagttggggttgtaacagcttactgggggtgggacttcataaaacagtgggctttctgttcatctaaagtttcctcaggataccacaggaccactgtttaagtgtgctcattgtcactttaaatttcaacgataccctatttttgtcattctaaatatcagatgtactattggtataattgcacaccaaaaataagccaaacagtgcattacgctaactgggatccctgcttttatgtgagctaaggaaagatggagccaactccaacgagggcctctttttctctcttgtctagcctgtttctaaaccgaatgatccagggattcaagcttctattgtcaagtgaaaactttcctcagatggactccaggtagccaggtcacctaaacctagtgggtcctgtggcgatgcctctttctgccagtccctgaatctctgcagcttctcttacctgtcttacctgtagtaaagcacaattgcagtggcgtcgcattcagaagaagggaaggtcagcagaggctatgcatgttgtgtgatgatgagtgtttacagccaccttctcctaaaacgaaatttataccggggtggatagtattccattaggtagacttatcgactttgctaagtgctttttagacagcttaaaaaattttcaagattttaaaagatgtataaggttaagtttgcaaatataatggaaatgctgtatatcttttgaagtgatgaaatccacgttggaattttaaagaaaatatgttgtaataatgctgttgtaagtaatattttaatgtctctttgcctgttttctatttcagcacattcattgtggtgaatgttcatagcattataactgcttagccattgaatgataacatttgttagtggaaattggaaaatttatttgtgaaattctgcagaattcatttttctatttccaatatttgctgaggttaaataaaaattttcaagccattgatgtaataaaaaaaaa

SEQ ID NO: 14924 - DNA, 454 bp, Homo sapiens
gcaccaacattttctttctgcctgaccttcatacctgatgaattaaaagggcaataattaaggtggaatttgcctcacatgaagttttattattttagttattaaaatagtttccaacactactgagaagcaaaaagcaattctcgttgttttaagaacataggatgtttggaagagtgagacaggggacacattgaaaacagagaggcaatctgaaggccaccttgacgcatctgcaaagctcccagattctgactttcacaagacttgctttctgtttctgggcctcgcctaaacagactgccagtcatccgaaccgtggcaggatggagatgtttgtgtaaggtagactcaagtttgcaagactcaagaaggaaaccaccaaactaattttactttcacttaaaccagattgaaaccaagacttgaagaattaaaaactttgacattaaaa

SEQ ID NO: 14925 - DNA, 495 bp, Homo sapiens
  misc_feature (1)...(495): n = a,t,c or g
cggcacgaggcagcaggggtgctgatcaccaaggccctttttnctggcctggtatgcgtgtgattatgtttgtcccggttcctgtgtattagacatggaagcctcccctgccacactccacccccaatcttcctttcccttccggcagggagtgccctctccataagacgcttacgtttgtacaatcaaggtgcacagttgtaagtgaccacaggcatacaccttggacattaatgtgcataaccactttgcccattccatctgaataaggtcctactctcagaccccttttgcagtacagcaggggtgctgatcaccaaggccccttttcttgggcctgttatgtgcgtgattatatttgtctgggttcctgtgtattagacaaggaagccttccccgcgcccccacccccactcccagtcttccttccagcagggagtgccccctncataagatcattacattnggacaatnaaggngcacaattataagtga

SEQ ID NO: 14926 - DNA, 1276 bp, Homo sapiens
gtttaactttagaatttcattttattaaacatacttttaaaacaagcacctcttggcaataaaagcaaaaacaaaaaacaaacaaacaaaaacccaaccaaacaatagtactccttccactctatgctaacggaagacttctcacaccagccagttaaacaatgaaattcttaaacacgcagcctgctggggctgcatgcagagcctaaaatgcaggtgtgctgacttcttggagctggagcagaggaaaacatcaaaaagcatatctggaatctatcacagctttctttcttaagcaaataaaaatgcaaattagtttcataaccacaattcaatttatcaaactttttctgaagaattttcatttaattatgtatacataacaggaaataaaactttttcacaaacactctcaaggcttacgattatcaagaaaatgacaaaagtaaaagcaggaggaatattaaacacatggcggggaggtcaatttccgtttctgctcttaaaaagtaaaaaaatcaccatataattaagtacaaaaacctgcattgaatgacaactgctggtgtatttacttgatcagaaatgaagaccaagaatataataaagccctatgataatattcaccgggagcactcccctcagtgtgtgtacactaacaggttggcaaagtttctggagcattagcttatagaaacacaggagtccttggttagctgcattatatggaacgttctcttctgaaatgcacccacgattcagtttcacttacaaattgcaaactaaagttatctcttcagaaaaatatctgtttggcatctcctggactttgttccattggacagtagggacattttaatttgctaccattaaacattttattcagggcatctcttgatataatatgaccacagaccaatttcatgggtggattgttatctgttgtttgctgacgaagaatggggcaggcaaatatagagtgataccagcactttttaccaaggtccacttcaataggtaattcatctttctggttccaaactccagtacactgcctctgttcaatcacggctttgatgttaattaaagtgcagcgccacacaacctgctgagaaactgacactgagaggggactccacggagagcccaggagggcacaagcatcccgtgtaaagatgtcacagatatcagcccactggtttgcatcaagtaggtgaacatatggtgagttctcaatcccttgtctcaggtacacaaggcttcccatccctcgtgc

SEQ ID NO: 14927 - DNA, 859 bp, Homo sapiens
aatattcacactctgcccagagaggggatattgaccttctccccgtagagctccgactgcagataattcagagagaacgaaggaggaaggagctgtttcgcaaaaagaacaaggcagcagcagtcatccagcgcgcctggcgaacgtaccagctcaggaagcacctgtcccaccttcggcatatgaagcagcttggagctggagatgtggacagatggaggcaagagtctacagcattgctcctccaggtttggaggaaggaactggaactaaaattcccccaaaccactgcagtaagcaaggcccccaagagtccatccaagggcacctcaggcacaaagtccaccaagcactcagtgcttaagcaaatctatggttgttctcacgaagggaaaatacatcatcctacaagatctgtaaaagcctcttctgtgctgcgtctcaactcagtgagcaacctacagtgtatacatctccttgagaacagtggaagatcaaagaacttttcttataacctgcaatcagctactcagccaaaaaacaaaacaaaaccttgactgcctatggaggaagactgtgttcgggggagctggcatagctagtgcagagttcagattttctgctgataatcttttacaccttgggaaaactttaatatccgtacctgaaggctgattcacctaaaaatgtgttaactgaaagaaaatgtcagaatgtttcctttctgctcttacacagcattgttttgtccaatcaacacagcctgcactgaaaggacctgcatagactatgtctgtgcaaagtgcctgagtgtctgctttcacctcagtctgtacagttggaaatgagaattcataat

SEQ ID NO: 14928 - DNA, 1078 bp, Homo sapiens
ttgactgttggcctttctagcaaggttagggaagctttcaaagatgatatcctgaactacgttttccaagttgtttgatttctccacctccctttcagagatgccagtgatttgtagaattggcctctttatataatcccatcctccttgaaggttttgttcattcttttttatttttgtccatcttattttagagaaccaatcttcaagttctgagattcgttcctcagatttttttttctgctgttaatacttgtgattgcattgtggaattcttgtattgtgttcttcggcgctttcagatcggttaggttcttttttattataccagctactttatccttcagctcctgtaacactttactgttattcttattttcctcggattgggttttgccattctcctgagtcttgatgattttttttcctatccatattctgaattatatttatgtaattccagacagttcatccaggttaagaactcttgttggagaactggtgtggttgttagaaggacatatgacacagaggccatttgagttactggagttcttgcattggtttcttctcatttccacctatgggttttcctttaattgcagtgtagattgagtacagtccgtagacttattttcggatgttttcaccaggctgaggctttgtgcagggtctttatttgaagctgacttctcatttctggtttcagaggggagtatattagtaaggtatttttgatgctgaagctttgggatgtgatccagtaggtggcacttgggcttactggtcagttggtagactcttgcttggtcatgtggctcccctatgtttccttacagttgcagccatgttccctctcaatgatctgaaaatgtgcttctctcccccttgagtgctggctgtaggtcatggcttggcactcctaggctgcccactgcagctctggggcaatctcagtgtttatatttctttcctaactttgaggcagaagaggaagggacattagtagtggttgtagccaagggtcttttgtttgtctcctcagaggtcgagcggccgcttatttagtagtagtagc

SEQ ID NO: 14929 - DNA, 1551 bp, Homo sapiens
aagatctctacttttcatgagaatctgagactctttggagccaggctttctcggttctcagaggaaaagtatgaatgagtgtgaagtgtatgtgagaacttttgtttgcaatatttatttttgtgggtgtcgacttcctatgtgggctttttgggtgacactcccttaagggttcagtttgacaattctgagagttgtcctgcagttggaggccaccagaggtatctgagctccctgcttcctatttcataatcctccagccccagcaggtccactcctggttcctgtgtgtttggcccgggcacaatccccactgctttgctagacgtgctttctgccatgtggctttgggcctaagagcttgttgataattgcagcttgtggcagtgggaaatatggctgaatgagcgtctaaatcgttgagaccagtgcaactttgggtgcaaggctttgtttagggatcaagccttttgccaccttgggctggtctttggcctgggtgctcactgggaccccatatgtctgcgtaggagcagaactttccatgggcagtaagtgtccagctctgtttctggttctttccccaactccagccccgtccagttgttctcctgattgacccgactccactccagggaaggccatcttgaccctgtgacagggcatagctcataaactacccctccctgggatcccgctcctcttcagcctccttccccatgaagctgggctaactttctaagtcattttgcttagaaattcagtgtggcccataccctttgtcctcccagcctggcatccaggcagggaaccccttaaaaccaccagccccagggagcttccctgctataaacacagacccccttgtctttgcctctgatttttacacagtgtagagtggccagcagtgaacaggttgaggatgtgcgggtagatagataactttgggtctggtttgtgtctgtgttcatgtttgtttaagggatatgtgtgactgtgggtggggacgtgtgcttgtggggccacaggtggcccctgctggaacccggctgggcgcagcgcctatgtaggacgggtgttctcagtgacctacctcccaggctcctctgcacctgcaaaggaacaggagtgagtcgtgactgacaggggtggttgagactagactaggtagagtagttaccaggagatgtgaatgtgccgtcaggtgatggatgggtttgtcaagggaatcgttaccgttttataccaaaggtattaacatgggcagcctttgacacatgtattccaaaaacgagtttatattttcaaacggtttttacagcttagactttgtacttactgccctgcctgtgacagttgtatgccttcattttgtatccaacagcaaagtctacaataaaactttaaaacaatcatgactgaatgtcaaaatcgtgtattgggcagatgctttttaaactgtcgtgtgagaaacttttatattaggccatttggatttaattaagtgctaaggaaagagggcttacaaaatgtttcgtaaatatttaatac

SEQ ID NO: 14930 - DNA, 802 bp, Homo sapiens
aaggccatgttatgtgttctccagcccatggagaataattttaacacagtcaatgaaatttctacacaacaatgttcttgtctcaaatccaagaatgcctcctacacctcctataatactggctttctggtgagtaaagatgccattctcatgtgtaatcaggtggcaaatggagatatgaccaaagtaaccacctgcctacactcataaccctgtacacactcttcctgtgtcgattcaattcaagtaccccttttgatcacttagcaaatctgacctttaaaagggttagggtttttatatccatgtaagtttctgtattgctttggaagtctctggttaaattaatactcttttaatagtgacctgtgattctgttttgatcaagtgttttcaaacttgacatctttgatgggtttctccagtgtcaaaatcctaaatcaagtctttttggcttaaaactaactttgggatttttttcagctgcatcccttggggagtctaaagaatgtatctctcatcttgtagaggtattaagtgattcgatttatttggtagattaaatgggcaggcattgtcaaatgtggcgatactgcatgggagggcactgtcaagtgaggtgacattagatctcatctcagttatatttatgggtatgttgttgatatgcgtgttccaaaaattgcatacatttatacaaatttaatatgatttgtaattttgatagttatgctaaatatttgctaaagttatatttgtataaacatgtcacgaatgggctgggcaccgtcactcatgcctg

SEQ ID NO: 14931 - DNA, 1110 bp, Homo sapiens
cccggaagtacttgttgcctgagcagtgggctgcttaggaagagaaggtcagagttcgcgggggcagaggcattcttgccgctggcccagtcactatgtagtggaggggcagacaccctcccgcaaattctggaaggttcttagtctcgactagggcagtagccccaggactcctagtcgccggcttcaggtcactgccggctgaacggagctgccgtcgccatgtttggctgcttggtggcggggaggctggtgcaaacagcttgcacagcaagtggcagaggataaatttgtttttgacttacctgattatgaaagtatcaaccatgttgtggtttttatgctggggaacaatcccatttcctgagggaatgggaggatctgtctacttttcttatcctgattcaaatggaatgccagtatggaaactcctaggatttgtcacgaatgggaagccaagtgccatcttcaaaatttcaggtcttaaatctggagaaggaagccaacatccttttggagccatgaatattgtccgaactccatctgttgctcagattggaatttcagtggaattattagacagtatggctcagcagactcctgtaggtaatgctgctgtatcctcagttgactcattcactcagttcacacaaaagatgttggacaatttctacaattttgcttcatcatttgctgtctctcaggcccagatgacaccaagcccatctgaaatgttcattccggcaaatgtggttctgaaatggtatgaaaactttcaaagacgactagcacagaaccctctcttttggaaaacataatttgaataaaataatttttaatggattctgaaatttgtcatgttttgaagataactgactccatctaaaagtatgaggtcaaaggatcacgaaacctaagtttaaaaactgcttagagactgaagcttaattaaaaatctttattaaaaattaaaaacattgaaaaatgaaaatatgttcatcattaaagacttttttccccttaagcttaaaataccattcaaaggcaagacattttgttttggctatgattcattttttttacttaaaaataaaacctataccaaacagt

SEQ ID NO: 14932 - DNA, 175 bp, Homo sapiens
  misc_feature (1)...(175): n = a,t,c or g
gagaaatctgaagcctgaattcctttgggaaaagcaaaaccttaatgatcctatagcaggggtccctgnnnnnnnnnnnnnnnnnnnnnnnnnnnnnnnnnnnnnnnnnnnnnnnnnnnnnnnnnnnnncaagcaagcaaagcttcatctgtatttacagctgctccccttgctt

SEQ ID NO: 14933 - DNA, 794 bp, Homo sapiens
  misc_feature (1)...(794): n = a,t,c or g
aggaggaggaggagaaggctctgggctcctctgcaaaaataaaaataaaaaaataaataaaattttaaaaataataaaaattcactatatacacatataaagaaataaaaagaagtctcagttgcagctatttgtcaaaattaatatccatttctttttatatacggtgaatattgcgcaattatagatctggattttgaaccacttaatgaagcggcaacaccaggtgttttgaggtgttggcattcttcgctgatttggctgttcccaatgtttacattatttaatcttgcaaaaatggttctgtgcacttggatgtgaaatgctgtccagttttattttttttatgttgttatccttggatgtacaaaaaattcagaaaatgatctctgtagatattctgttttattttggtcatctttagaagttatcaggaatgtgtttaaaacaagaagagaacttttctaaggaatgatacatagaaaagattttattttaaaatgagttgtaaagcttgtgtttctttgttgctgcaagctatctgcccaagttaatgcaaatggacacattttttatgtcagnnnnnnnnnnnnnnnnnnnnnnnnnnnnnnnnnnnnnnnnncgcgnnacacagnganaaaaatgcttgagctttttctaacttccccttgcagtctgttgtgtgagcagcctgtttatttctctaatattatgtcagtttattctctttaatggactgtaaaaaaatgtaatcacaagagtgccaaatatcttgaaatgccaaaaggcttttt

SEQ ID NO: 14934 - DNA, 705 bp, Homo sapiens
  misc_feature (1)...(705): n = a,t,c or g
ggaagaagttacactttgaaaaggacgtggacgtcaacctgtttgagagcacgatccgcatcctgggggggctcctgagtgcctaccacctgtctggggacagcctcttcctgaggaaagctgaggattttggaaatcggctaatgcctgccttcagaacaccatccaagattccttactcggatgtgaacatcggtactggagttgcccacccgccacggtggacctccgacagcactgtggccgaggtgaccagcattcagctggagttccgggagctctcccgtctcacaggggataagaagtttcaggaggcagtggagaaggtgacacagcacatccacggcctgtctgggaagaaggatggggctggtgcccttgtttcatcaattacccacagtgggcctcttcacccacctggggcgtattcacgctggggcnccaggggccgacagctactatgagtacctgctgaagcagtggatccagggcgggaagcaggagacacagctgctggaagactacgtggaagccatcgagggtgtcagaacgcacctgctgcggcactccgagcccagtaagctcacctttgtgggggagcttgcccacggccgcttcagtgccaagatggaccacctggtgtgcttcctgccagggacgctggctctgggcgtctaccacggcctgcccgccagccacatggag

SEQ ID NO: 14935 - DNA, 1148 bp, Homo sapiens
  misc_feature (1)...(1148): n = a,t,c or g
ggacagcctgtgtgtcccccagtataacaagtacagggaggagagggtgatcctcttcctgaagatggcctccgggcacgccttccagcctgacttggttaagaggatccgtgacgccatccgcatgggcttgtctgcgcgacacgtgcccagcctcatcctggaaaccaagggcatcccgtatacgctcaacggcaagaaagtggaagttgccgtcaaacagatcatcgctggaaaagccgtggagcaaggaggtgctttctcgaaccccgagaccctggatctgtaccgggacatccctgagctgcagggcttctgagtcagactggctggcgtgtcactcagccgcacccgtgtgcactgtaacttttgtgtgctcaagaaattatacagaaacctacagctgttgtaaaaggatgctcgcaccaagtgttctgtaggcttggggagggatcgtttctctgttttgttaaatctggtgggtacctggatcttccacacgagtgggattctggccttcagagaccaggagggagtgtctgggccgcaggtgttggcactgtggtgagagtgtgtgtctttgcacacacagtgcagcgggaacggtggggctggctggtgctgaagacagacacactcctgagccaaggtcttgtcttcaacctccccgtcccgttgtcccattttgctctgtgaaggtgcaaatccctttcttcccttcccatctcaggctctcctgttttccctcagggtccagtatgcctttgagctttagctgttagaaaggaacccccgtgacttgacacagctttcacagctggctgctaggaccggcgggctgggtgttcacgtgtgtctgtgtcatggatgcaatgcaggccctgggaggactgtgcgtcacccgtcaaccagagcgtgcctccgggccagcttccctccaaggaatggagtggatttcataacagggattctctttattggcacagaattgaatgggtttaacatgttttctaatgtggaatttagggcatgttgaaggcagtggggtgttccacccgttgttccctcatggggttgaggccctccagctgttgaggcccagggagttttgggtcaacngagtnagggacccttccttaacaggggaa

SEQ ID NO: 14936 - DNA, 2136 bp, Homo sapiens
  misc_feature (1)...(2136): n = a,t,c or g
caaattagcccaaggttcagaattccttggctttacacaaagtcatcatggtgggcagtggtggcgtgggcaagtcagctctgactctacagttcatgtacgatgagtttgtggaggactatgagcctaccaaagcagacagctatcggaagaaggtagtgctagatggggaggaagtccagatcgatatcttagatacagctgggcaggaggactacgctgcaattagagacaactacttccgaagtggggaggggttcctctgtgttttctctattacagaaatggaatcctttgcagctacagctgacttcagggagcagattttaagagtaaaagaagatgagaatgttccatttctactggttggtaacaaatcagatttagaagataaaagacaggtttctgtagaagaggcaaaaaacagagctgagcagtggaatgttaactacgtggaaacatctgctaaaacacgagctaatgttgacaaggtattttttgatttaatgagagaaattcgagcgagaaagatggaagacagcaaagaaaagaatggaaaaaagaagaggaaaagtttagccaagagaatcagagaaagatgctgcattttataatcaaagcccaaactcctttcttatcttgaccatactaataaatataatttataagcattgccattgaaggcttaattgactgaaattactttaacattttggaaattgttgtatatcactaaaagcatgaattggaactgcaatgaaagtcaaatttactttaaaaagaaattaatatggcttcaccaagaagcaaagttcaacttatttcataattgcctacatttatcatggtcctgaatgtagcgtgtaagcttgtgtttcttgggcagtctttcttgaaattgaagaggtgaaatgggggtggggagtgggaggaaaggtgacttcctctggtgtttattataaagcttaaattttatatcattttaaaatgtcttggtcttctactgccttgaaaaatgacaattgtgaacatgatagttaaactaccactttttttaaccattattatgcaaaatttagaagaaaagttattggcatggttgttgcatatagttaaactgagagtaattcatctgtgaatctgctttaattacctggtgagtaacttagaaaagtggtgtaaacttgtacatggaattttttgaatatgccttaatttagaaactgaaaaatatccggttatatcattctgggtgtgttcttactgacaccaggggtccgctgccccatgtgtcctggtgagaaaatatatgcctggcacagcttttgtatagaaaattcttgagaagtaactgtccgctagaagtctgtccaaatttaaaatgtgtgccatattctggttcttgaaaataagattccagagctctttgatcgcttttaataaactgcaagttcattttaaatgaagggccagcatatatacttgcaagataattttcagctgcaaggattcagcaccagttatgtttgaatgaaccctccttttctctgagattctggtccctggaaatccctttctgctagtggtgagcatgtaagtgttaagtttttaatctgggagcagggcataggaagaaaatgtcagtagtgctaatgcattttgcactagaacgcttcgggaaaatattcatgcttgccatctgttcatttctaaatttatattcataaagttacagtttgatacaggaattattaggagtaattcttttctgtttctgtttataatgaagaacactgtagctacattttcagaagttaacatcaagccatcaaacctgggtatagtgcagaaaacgtggcacacactgaccacacattaggctgtgtcaccattgtgtggtgtacctgctggaagaattctagcatgctacttggggacataatttcagtgggaaatatgccactgaccgatttttttttttttcctctttgcagtggggctaggacagttgattcaacaaagtatttttttcttttttctcagtcctaatttgaacaggtcaaagatgtgttcaggcattccaggtaacaggtgtgtatgtacacatctttgacctgttcnaattaggactgagaa

SEQ ID NO: 14937 - DNA, 845 bp, Homo sapiens
gcggatactactgcagctggctcctccaagtacttctgtcttggggcctgattcctcattcccaggtgcacagtgctctctactgctaccagcaaccatttctatggcaagggaaaggcctcagatccagggacaggatagggcagcagccagtgtacctagaatttgtggctgccaccaccttttctcttaggactggcttgtctctcccactggtgggctgcagaagaggaacagagtgaatatcataaaggaatgctcaattcagaactgtatcacctcattttacaaactcccaaagggctgccaagagtcatcattatagatcgatgggttaaaataccacctaaggaactcattgtaaaagcagcaacttgtctgtaaggtcacaccaaacttacaggggttctgatgttgtttgcttccattgttgttattttcttctctgatgatgaattccgtaaaaaagaaaaagtgaaagggtcctcttgtcctctcttccctcctccaggaaccttgtggatttccccaagtgaaatgtctaagtgatactataattacagagctgacgaatgagaaaaaaattcagaattatctagaaatatgaaatgaagtacagggtgtgacgctcagttcacttcatacaaatgcaggtcatttctcagtaaaatgtctatgaaatgggtacctgaattactgatatacaaatgacaacacatgaatgagaagagcagtgagattcggggaaggaaaactccacgttggttatttcacctctagggaaagtctgtttgcatttgagtcccacatgtggcttttttctgtactttctacttgatgttttt

SEQ ID NO: 14938 - DNA, 672 bp, Homo sapiens
ggcgtttcaggggtaccacattccccggaaaaatactcaaaaaacccaatcactacctgttactagcatctagcttccagatcatttcaccactgggggagcccagacactggctgcatctctgctcctttaagtgctcaatgaatttggggtaagggaggaaagaaaaaagccaggaaggcccgtagggccagtatagtcacccacagtggcactggggtgtggggagtagaggccagagtaggggaactgagcctgattttagctctttctcccaccccacctccaaattttatggggaaggtgtgcagttcatgtgtgtgttaattttaaaagtgccttctttaaaaaattacttaattttaaaaaataaaagtggggaaacttcctcaggtgactttcaagggcaaaatattaaacttctcctcattcttctctgctgagaacattccccccagtgcactctggcagcttctggagccagagaggcaggtgggtgtacactatgagaagagcagaaacccgtacctttaaggggcttcccttacttcaaaaacagcctggtccactccgtcttacacagtgtgggcaaatgggatgctaatctccccagtccccagaacagcaacattgcacaattcaattcattctctacattagtagcgcttaaaa

SEQ ID NO: 14939 - DNA, 887 bp, Homo sapiens
aattcggcacgagggttatcagaacttattaacattagtgtcactaaaattggtatacaactccccactgctaaatttggctaaaaagaaaatttatttcatggtggttgatgacaaagatgactttttaatagttattcttgtgtttgctccctcagcatttgacattgtgcagcaaagaaatggttatggagaagcccagtccgctgcttgtagggcgggagtttgtgaggcaatattatactttgctgaataaagctccggaatatttacacaggttttatggcaggaattcttcctatgttcatggtggagtagatgctagtggaaagccccaggaagctgtttatggccaaaatgatatacaccacaaagtattatctctgaacttcagtgaatgtcatactaaaattcgtcatgtggatgctcatgcaaccttgagtgatggagtagttgtccaggtcatgggtttgctgtctaacagtggacaaccagaaagaaagtttatgcaaacctttggttctggctcctgaaggatctgttccaaataaattttatgttcacaatgatatgtttcgttatgaagatgaagtgtttggtgattctgagcctgaacttgatgaagaatcagaagatgaagtagaagaggaacaagaagaaagacaaccatctcctgaacctgtgcaagaaaatgctaacagtggttactatgaagctcaccctgtgactaatggcatagaggagcctttggaagaatcctctcatgaacctgaacctgagccagaatctgaaacaaagactgaagagctgaaaccacaagtggaggagaagaacttagaagaactagaggagaaatctactactcctcctccggcagaacctgtttc

SEQ ID NO: 14940 - DNA, 439 bp, Homo sapiens
ggggatgtattgggtgagacacaggacttccatagcttggccacctatttgtctcagaatatctcatctgtgttcttggataccatctcagatttccacctcttgctgttcctggtcaccaatgaagttatgcctctgcaggacagcatcagcttgctgctggaggccgtgcggaccagaaatgaggagctcgcccagacatggaagaggtctgagcagtgggccaccatcgagcagctgtgcagcacagttggcgggcagctcccaggtctccatgagtacggcgccgtcgggggctccacacacacggccactgcagccatgtgggcctgtcagcactgcacgttcatgaaccagccaggcacaggccactgcgagatgtgcagcctccccaggacctagggcgcctgcctctgctggctaggaccgggcccagcca

SEQ ID NO: 14941 - DNA, 406 bp, Homo sapiens
aattttttaactccacagaagatttcagtttgcttctactgagaaattgcttctactgagaaataggatttgtcatctacctgggaactttctagagtccaagctcaattggcaaaagggcaaatgctaatatgcacatttgcccttttgcatctccaagtgcatactacttactgttcaggtttcaatttaccctttttttgtgcagataagagacagatggtgagtgtgggaaatgaaggttgggtgtcggtaggttctggtagattttccttacttttttgagctcagcaatgtgataaccagttttctgctgggatttattggggcctttccagggatatacagtatttaatatatatatttactgggaaaaaaggatgttccagttttttaaggcttttcc

SEQ ID NO: 14942 - DNA, 1371 bp, Homo sapiens
  misc_feature (1)...(1371): n = a,t,c or g
tccagttaatttttatgatttattttacaatgtttcccctcccctcagccgcactagaatgtcagctccatggggtcagggatttaaggcagaagagtgaaaatgcccaacctaaaacacaagatctacaaaagcacctggctacatggggccaggctgagcaactgtatgttgtctacaaagggcctcaacctggcctcacatggccacgtccagncaccaaagacaaatgtacagggaaggggagggtgtgaggtccaacactcacctatagaaacatgtttttagctgctttacttccaaaaagaaaaaaagggcataggctctctttttcaattaaacagaaaactacataattacgttcaaacactcactgaagagcctgcctcatgggaagggcagggctgtcgtgggaagagtcagctgcactttgggcaccatctcaggtgctgtccaagccggatctgaatgggactggtcaagtgaggggtcagtcctgcagtctgcgctcacacctcttctccagatctgccatctcctttaggaccaggggccacgctgtaccgcagctcctggaacttggctgtggggacctcaaagcggtatgctgacccatctgaaagcttcagctgcatcaggacgctcggctgcagggagcgagccagggcactggtggagattgttacatccacccgccaaccgaaagtcaagcaacatgcggcagccaggccaccctggctggctgggccacagaatcaaggagggccgctggctcccaaataccacgctggccaagtccccgaccaggtcttgggggatgcagagctcctggagctggtccctgaaggtgtcaggcttcaggctggtggggggcagacggagggcctgctggagcagtgtgtgcatgcctgccagcagggcacccagctgctcctccggcaggttggcgctgaccccaagacggctgcagcagtctcggcagtcctccccctgcaggctgctgaccacaaacttcagcaactttctgaacgtgctcctgtctaggtcccctagtagccgggccattgctgccacctctggaggaagctgggcccccaagaaactcactcggccactgtgactatcaccaggatgatgcaggtatggagttgcagtccccacagcagacattgctgctgcttcctctttgatcagccagcccaggaggtcggtcccagatgcagatgcctgaggctgaggagctcgctggctttcgtcggcgtccgggtgggcggcggggaaaccgcgagaccttgaggatcagccggagcggagccgagcgggcgtccctgtctcgtgtggacggtctgcgcctccagggttttgagagct

SEQ ID NO: 14943 - DNA, 2109 bp, Homo sapiens
  misc_feature (1)...(2109): n = a,t,c or g
ataatgaattgggtaaggaacagttaataagaaaatgtgccttgctaactgtgcacattacaacaaagagctggcagctcctgaaggaaaagggcttgtgccgctgccgttcaaacttgtcagtcaactcatgccagcagcctcagcgtctgcctccccagcacaccctcattacatgtgtctgtctggcctgatctgtgcatctgctcggagacgctcctgacaagtcgggaatttctctatttctccactggtgcaaagagcggatttctccctgcttctcttctgtcacccccgctcctctcccccaggaggctccttgatttatggtagctttggacttgcttccccgtctgactgtccttgacttctagaatggaagaagctgagctggtgaagggaagactccaggccatcacagataaaagaaaaatacaggaagaaatctcacagaagcgtctgaaaatagaggaagacaaactaaagcaccagcatttgaagaaaaaggccttgagggagaaatggcctcctagatggaatcagcagcggaaaagaacaggaagagatgaagaagcaaaatcaacaagaccagcaccagatccaggttctagaacaaagtatcctcaggcttgagaaagagatccaagatcttgaaaaagctgaactgcaaatctcaacgaaggaagaggccattttaaagaaactaaagtcaattgagcggacaacagaagacattataagatctgtgaaagtggaaagagaagaaagagcagaagagtcaattgaggacatctatgctaatatccctgaccttccaaagtcctacataccttctaggttaaggaaggagataaatgnaagaanaagaagatggattgaacaaaattaggaaagctttatattgccatggaaatttaaagtttgaaaaagactttgaagactggagaaagtacagttctgtcttcaatacctctgccatcagatgactttaaaggtacaggaataaaagtttatgatgatgggcaaaagtcagtgtatgcagtaagttctaatcacagtgcagcatacaatggcaccgatggcctgggcaccagttgaagtagagggaacttcttaaggacaagcctcagaggggaaactcttaaatccccaacagagtatcatgagcctgtatatgccaatcccttttacaggcctacaaccccacagagagaaacggtgacccctggaccaaactttcaagaaaggataaagattaaaactaatggactgggtattggtgtaaatgaatccatacacaatatgggcaatggtctttcagaggaaaggggaaacaacttcaatcacatcagtcccattccgccagtgcctcatccccgatcagtgattcaacaagcagaagagaagcttcacaccccgcaaaaaaggctaatgactccttgggaagaatcgaatgtcatgcaggacaaagatgcaccctctccaaagccaaggctgagccccagagagacaatatttgggaaatctgaacaccagaattcttcacccacttgtcaggaggacgaggaagatgtcagatataatatcgttcattccctgcctccaggacataaatgatacagaaccggtgacaatgattttcatggggtatcagcagggcagaagacagtgaagaagataagaagtttctgacaggatatgatgggatcatccatgctgagctggttgtgattgatgatgaggaggaggaggatgaaggagaagcagagaaaccgtcctaccaccccatagctccccatagtcaggtgtaccagccagccaaaccaacaccacttcctaggaaaaagatcagaagctagtcctcatgaaaacacaaatcataaatccccccacaaaaattccatatctctgaaagagccaagaagaaagcttaggcagccctgtccaccattccccatttgatgctcagacaactggagatgggactgagggatccatccttaacagctttaaggatgagaatgggcaaagctggggaaaaaaggtgatctaagagttgtaccacctatataaacatcctttgaagaagaaactaagaagcatttgcaa

SEQ ID NO: 14944 - DNA, 603 bp, Homo sapiens
  misc_feature (1)...(603): n = a,t,c or g
gtgaaaattccccctcgaggttgagagaacctctgaggtggctgtattttctcctaagcttgagatagggggctgtggtccttcctttctcctgaggagaaagtccttgctctggtgacctgtaagttgcagaggagggtggagtgagagtgtcatgtattgggatagtcagggatccctgcctttggcctttcttcttcttcttcttcctcttccatagttggatcatgtatattttacttctaaaggagagaatgtcaaaaagttctgtatttttttatattctatatattaggtaggtcaatcttaattggtctcaagaggaagaactgtctgtcatttcggtaagtaggatactgtgaggaagaccaaaaagagatatggatgcttcctcgctcaggaggcctgagcttggtccttttcctctctgcttggattctggaccaccacctgggaccaaccttcagctctggaaccttcataaagcaggtcagcgtggcctgattgtcccaggacctgaagggagcaaggatggcctcagggcctggtgaagtctgctactctgccttactgctgaacatcctgcttgnatcaggaaactca

SEQ ID NO: 14945 - DNA, 2072 bp, Homo sapiens
tttagtcctgtaaattgggttgtattgatgtcaactctggtgccttagaagttagtagtttgggaacctatctgtaaaatcagatgttttttctttgtagagaaggatttctggtgcttttgcttactaagagaccgatattcttaagttgttttcttgttttaacagccttgagaaatgtttggttttggccagcagaattcttgtctacttttttctttcccaaaaagtgttttttaatttctctaccaaagaaaaaatgagcaggtttaggtttttacatgacttatatacattagataaaaggagctgtataatttagcaggaagggactatgggagaatactttactgtgagtggaaaatgttagcacatttgactggtttgccctggaatccactgcacctttacactgcaccatgaaacctacactccctggtatcatagcgcgtcatcacctcaacaagtcagtcgtctccattgatatttgtacaaaaggtatacatggggaacacgtgttcattcattaagtccatcttgcgtgcagctatatccctgattggttatttttcctttccttctgaggttctcatgtcattttcttcatcggatgtgactaaaatttttctggtgtcttctgccctctctttaattttgcctcttgaggggtagcagatgtgtcagtgcattttattacttgctgaaacattcaggcttacatttcttattagtttagtattttaaaagatttaattttctgaatgaggcatttgaattgtaccagcaatgggacttttaaaaaattggatgtaaaaccattcagggtgatttttcttgtcagtggacagtgacgaacagagatttgaaatcccttacctccaataataagccattcagcctaaattcatttttatgaataaatctcttctttctcatggtaaatgtggcttgtgccacctcaaacactagtgaaagggtatgtacaaccgcaacatcaggccaggacaccatttatttaaccaagtaatggaggagagtgaaacattttcccaaggccttatttctttttcagaatgctttaagtgttgattatgtgtgctgggtctctagagaagtttttatttgttacaatactgctgctttgagcaattttgtttctcttcattgtctgttagggaaatcaccagctttggcatcttaacaacaaacagtggatgggtaatttttatttctgatacgcatctttagagtcaaatatatcttttccctgtactcctcatgtacaaccaaagaacatacattatgaaaattgtattataatatctggaaacacaacattttcctctggcaggtgacttttgtacgaaatgaaaaaaaaaaaacctgtattttttttgttgttcttttgtgattaaggatatacatttagtagtctttgttattaaaggaacctgctgataagtacaagtgtgaccatctcattcaaatgtttgttgttatgatgcaaatggatattggtttcaatagaagctggatccttaatactgcattttctgaattctgttttaatatttgtgttaaagtagacatagctgaactcacatggaatcctggagttttgttatcagcagctttgcagtttgggaaacaaagaaaccaaagctgagtgttttaaagaatgaacatatctggaaatccttgctctcaaaacaaaacaatataatctatcaaaggtgttttactcagtgttctaatttttaaaaaattttatctgcatatttgcatcaaatatttatgtgtaaaatgtatgttttacctccttaaaatgcctaaaagttagttaatagttactttggtttaacctatacacaatgattaagtgcatttaatattggtaatttaatgaaaaccattccttgcccaatggatgtataaatttttgaaagaataagcagaattatataatatgaaatgctatgtaaagttttctatgtaaaaatattatgtataatactattaaaatatcccatgctttgatcaggtggtacatcaataaaattttaaaaagtaaa

SEQ ID NO: 14946 - DNA, 1154 bp, Homo sapiens
ttttattttttttttttttattttaggaatatatatttttaaaaggattcaataatctttttaaagcaaaatcaaagtatggctacaggaggagaggaaatatccaaattgtaatcaatgcagattgtttacttaaggccttatatttgtacctgtataaataccatatcacagcacaaaaacataccccatctggctctcttaaggtacatgataaatcagactaatgcacattcatcaaagtggcatcatctcaggatatgtgcatattggacgtgggtatgaattcagggtttcctggggtctctttcagggactctcctttctcgtcggtatttctatttccttattttccttctgtttatgaagaactgttatttttatatttaatgcccaattttcactacttgttcatgtcagttctctgaaatgttactgcctatgaaccgtgacatgtactctttataacagaaccagaagttaaaagatgtagacatcacacaaatcaatgattattttaaaaatagaaaacaatgataaaaattcagttgccaacttagaggattttatacattatgaagtgttctattttccttccagggtctgaaatttatttctcaagaaaacagattttatttctaagcctttactatctttgctagaaacagaaaaaccagttttctctttgacaaaattgtcccaggagaacaacacaaatgctttttccaaattagagcataagtcttccttaaatgtccttagtgtgaacaataaggatacaacagccatcttttaaatgtcatgaaggctattgttaagacggtgtttttggccgttttgcagatggtccatcgaagttagttctgttatcaatgttattttcatcttctgcatcatcttcatcatcaccgtccaagtcctcgtctggagccgccgccacccggtgctgcacttccccctgtaccagagggtcgaataattccgttaccatgtccttcatctgggccacgccagacaacaggccctggaaagggtcgccgtcacccggcgcctcacaggacacccgcagcttctgcggcttcccttcctgcccgacgtactctcccagcagctccatggtgaccgctaagcttccagaacacgacaccgggaag

SEQ ID NO: 14947 - DNA, 2128 bp, Homo sapiens
  misc_feature (1)...(2128): n = a,t,c or g
ttttttttttgtatttatatgacttttattttaatatcattttaatatcgaatatgtcacaagatttaatgaccaaattagtcatttacatttttcaaagtatctaaatataaaattgctaaaaattcaaatacagatagcaagctacaaatatttcttttgtttttgggtggggggtaggaatggaagacattagaaaaggacgctcctgttgggctgaacaaaggatccagaatgaaaggaagaatttcatcagcatggaccccttgtggcaaaggaaatacactcaggctttaaggatggctgttttaggacacatctcttcctgtacaacaatttaaaaaatgtttctaatgcaggtcctcagtgaaacaccgggtccccggccctggctggggacagtaaggacatcaccgcaggaggggacactgaagaggctgtcgaggactgcagaggcatctggtgtggccaganggtggtgtcaggggcatctgatcccttgcctgttcccacccagggagccggacggcacggacacaggtctccctccgctcacccctctccctgaaacgtgagaaacagcagctttccgcctgcttgaaaaaggaggcaggcgctgtaaggagaagaggaatggggaatgtggccccttccaaggcagcgaagcagagaacatgcaggtggaactgccagctgaaacctacacttgctacttaagaaacggaaagaccatgtctggctgggagtgcagcgtgcctgaggaccagccaccgcccctcctcctggcaccccacactgtccacgcagctcctgggctctgaggtcagaagctggggtgtgctgaaggggaaagtgacacggccttggacacaccactaggtctctgttcctaacttttagtaagacactaccctcgaagcaaatgcactcatttaaacaaatggcatagttaaaactattgactaagacctaaacatttcttctgagaaatcgaaccatagcttttccaatctgcctgttcaatatgggaacagattttaaagagagtaacataatcaatcctccgccccaaagaatggtccatcataccaaccatgataaagagtacacctgtttattaaaaggaaaaacagaaatgtacatttttgttgtttgctttaagaaatttgatcaagttgcaaggaaatgtgtgggcacggctctgtacatcctcgggcagggtggcaggcattgaaggtggctgggcggcacgtggctcctctagggggtggtctgacccccaagcatcgcttatcaaagccactgccaagcagacttccgtcccatggcaatgtccccagcgctccctcctagggggcccccgacaccttccccgagagcccacctgccctgtgccagtgagccaggggctggcctccccccgaggacttcaggacaccgggtgggctctagggcacttggccctggcaggcaggctctgagctacggaacagattgaggctggaggccagtgtcactgctgcccggatttcttctccttctggaagctgaagctcgtacgtctgttcagttttctttgtttttgagcaaagtagtcagcccgggcagtgctagctcgcgattccaggatgtagttaaccttgagcacaatttcattgacggtagcagcgtccgattcaaagtagaggtgtttatagtcgtgattgcttagatacgtgagtttaaatattgcgtgactggggcttttctcttcagcaaggtcacaggcacagagcaggtcggaatcgattgagatgggtttctgcttaatccaaaacttagtgctggctttctgattcgtaacagggtctatctctactttgtctccagagatacctagctgtacgtcggttgtgaatcgcagtctgtggatcatgctgactttgaatgacttgtaatggtggctgctaacagtatcctgtactgtggctatgtcaatttgcgaatcctcctcaaaaaccccgtctgcccttgaactgttctcgcggaccaggcagaactcgcatgcgctctggctctccaaagtgctgtccaggtcaacggcgacattgggctcgctctgcttctccaggcggtactgagggctcgg

SEQ ID NO: 14948 - DNA, 830 bp, Homo sapiens
aactagtctcgagttttttttttttttttttaaagcaaaccattgtatgtgtaagtgtttaagttacctttttgtctattggtctctttgccagccctcccctttcccaatgaaagccatgtcaaattaatcactggattgactgcttcatctttttatttttaatgaaaggtgtaccacggttgtaaagcaataagatttgagatgaacactattgaaacttcgctttttgctaaaaaatagcaagttgaatagtaatcaaaaaacatagaaagattttagttcaaaatgattgctcctttctctacctggacttttaaaaaatcaattgtcatctaatatgagtttatttgtctatagacacaagtatcaatgtctaaaaaaaatcatgactttaaacttccaccgatgaggcaggtaggagataaagatgaattctgaactgttactaaaagtactcattttttaccttgtagggagggtgggcaatggggttacctgaccttatttgagggtatgggctttcttttttatttcatcacttgttatctcaaagagactcggagccagtgatccttttatcctgctacagtctttagggagctaaaaaaaaaaaaaaaagcaggggctgcccaaaactcttgatttcatatttccttctctaaatatatatgtatcctgttttttggataaaattttaccaagaatccaaaaaaaaaaaaaccctagaatttaatcaacaagatcagtctacaggtcacagtggatttcttttcaaactgacaatgtttaggttttaagcaaataaagttccagttaatgtgaaactc

SEQ ID NO: 14949 - DNA, 2064 bp, Homo sapiens
ttttcaaaaaagacaggccaacaatgcctaaactctttatttcaccaaccagtatttctgattttcttcttgatactggattttaaaaccttagaagtctataaatactgcattcagactttccacatcaagagaaaggggaccagggcagaagatgtcaggccccatgctgttttggggtgggaaaagtggcaaagaattctcaacagcctgtgtcagttttctaacttaattgaaacacctttaagctctccttcatccccaaactttcccctatggtgtctatgatagaaaaacacttctctctcatatatgtcccatcactagggagccagggggaagggagtgggcattacacaggcaagcccaaactttttattcagccagaaaatggatttctgattcagtttaatggtaaggagttgtgtaaaaccgtaccaagtcctgcttcttcctcagagtgagctgggctgcatttttgtgactggaagcatttctcataatggtgaattaagcactataaaaaaataaagtcaatcccatctctatgagtagcataagagctgcttccaagaacccagggatgcccacatcccataacccacccagacacggccaattcctcatagacagctacataaaaccctttcgtcaacttgttttggggggtgagagagaggcagtgcttagggaagatgtaggatggattttttttattcctgccactaccaaaaactataaatctacacacacactcacacgcacatacatgtccatttttaagaaagcttttcctccctgtgactacaggaacccagaatccagcctccctcaggctgagagacgatgcctattaacggcacagatctagcatatcaacatactatagaaggctcctgtgttgtctcacaagctgagagggcagggcaaagaagtggacactcatgggggacttgctttttgtcttaaatccaatctactcagtaacacttgcaggtccaggggctgggagaggttctgtgggcacaacgtggtggacgacctgatggtcccagcccactgtggtaagcagggagtgattgagcggggaccaagtcgcatctctcacaaagtctctgtgggcttggcttctaaacaactcagaaaggcttgagtccagcacagcaagtgagcagtcttcactgagagaggccaggaagggaacactgtgtggggagaacaccagcccagtgacacactgggagtgtacagctgagctcaggacacagcttgtactcttggtgtccacaagggagactgtcccattctcatcaccaaagacaaagacttcactttgctgaggatgccaagccagcgaggtaggaaggtagccaggcgcactgcagccaatctgtgatgctggcttgggacagcgggtatcccagagtaaaattctattgtcctcgctgcatgaaagaaacacagagtccttgtgaggagaggcagcaacacaagtgacctgagcagcatgagctcggtatgaactcagtaccacctgctgagcaaggtcccaaaccttgatgcagatgtctttgctaccactgacagcttgtgtgccagagctcaagacactgactgtagacacaatgtcatcatgctcatacttgcagaacttgctgacaataagtgtctcattctcatctaagttcccacaattcaacagcacctgaatcggaggccactagaatacctctctccccaacccaagtgaggtcagccactccagcctccgtttggactccggcggagcagaagccttcgttgggggcggcacaggggtccttaaaaagccagagggagccggcccagcagcgcccactcaggctggaggccccgaggagaagcgccccatcggaccggtaccgcgcagcctccaactgccgttccatgcaggcgggcgcatttgggggaagattccacctcccgggccccgggggcactagggggggtgggatttccttccgcatctccacggttccaactccaacctagactcaaactggaacgcgcacggctccgctccgg

SEQ ID NO: 14950 - DNA, 826 bp, Homo sapiens
ggtgtattcagggggcgacgatggccttctgaggggctgggacaccagggtacccggcaaatttctcttcaccagcaaaagctatgatgaacacatcctactgtgggacacacgaaacatgaagcagccgttggcagatacgcctgtgcagggtggggtatggagaatcaagtggcaccctttccaccaccacctgctcctggccgcctgcatgcacagtggctttaagatcctcaactgccaaaaggcaatggaggagaggcaggaggcgcggtcctgacatctcacacattgcccgactcgctggtgtatggagccgactggtcctggctgctcttccgttctctgcagcgggccccctcgtggtcctttcctagcaacctaggaaccaaagacggcagacctgaagggtgcaagcgagttgccaacaccctgtcatgaatgcagagaggataacgatggggagggccatgccagaccccagagtggaatgaagccactcacagagggcatgaggaagaatggcacctggctgcaggctacagcagccaccacacgtgactgtggcgtgaacccagaagaagcagactcagccttcagcctcctggccacctgctccttctatgaccatgcgctccacctctgggaagtgggaggggaactgagcttgaaatcatgaagccccttcccacaaggaaaccaggagggagactgcgagtgagtgcccgggaccacctcatcagagatgcttactgcagccctgcaggtgcctgtgcactgatggaatccacagtgtagtcagaaaagctgttgacttctcttaaat

SEQ ID NO: 14951 - DNA, 466 bp, Homo sapiens
  misc_feature (1)...(466): n = a,t,c or g
cgaggccaagaattcggcacgaggcgtggttcctgttttgccacatctgtgagaggcgctgggaacggggacttgccttacacctctcggttaacaccctggagactgatggagttcagagcagggtaatttacagcccatccctccaatcttaattcactcgatgctcctttcttccttattgtattagtgtgacccaggtacctgccaacaataatggcctctccagctaggagcctctccccaactcccagggacaatttataccttttccttggattttccccccttaaattaaacaaaaagaggaaaaatgagaaaaggttaggcatggggttttggaggcacttgaaggcccccgtgggttctggggcagggaaggccaatggccttgaggggcacacatgtgtgtcgttncttccccaggaaggggccttttcaaccgggcctggtttttaacaggccc

SEQ ID NO: 14952 - DNA, 590 bp, Homo sapiens
tttttttttttttttttttagttataagacaaaaatttaatgaaaattggacagtatgtataatccagggctaaatagttacattggactggagtagaaatttaaaatacaatagatgctggagtaaatgttacatattatcatcatctgattcatcttcttccttcagagattccttagcatatttctctgcttcttctcttatatcttttggaacaatttcatgtcttccattagttaattcaccaacccagctgagttctagttcaaaagctttatccttaacttcgtcatgtactatgtaaattctagaatagaaaagggaaaggtaagattttggtaacctccaaacattgaagtagttcacagacccaaagtcagtacaaattagaatgtccatccataataaaagtatctataaaattacacagacacattctacatagtatttaacattagagaagacaaattacacagggactgaaataaaatgaaacatctactctcccgacaaatgttgaatatacctaatcaacccaagttcagtttatttttgcacattgctttagagatataacttggctgggcac

SEQ ID NO: 14953 - DNA, 654 bp, Homo sapiens
  misc_feature (1)...(654): n = a,t,c or g
gatctctttggatttctgctgatccagcttatcagatcccagaaacctggcaaacctctaaagttcacaaagagcgaaggggaagccaagtcaggcctccagtttggcttcggatgccaaaacttaatctgggctgtgggagctaactgttttcatatgaaagagcaaattcagaacatgagcatggaagtccctgcgaacgtcagatctccgtgtgcatccttacccccttgctgctttcatgctcactctcctcttgccgtggctcggctttcaggtttatctccatccctggaagcagagttgctctggcccaggctctcccatgagagtttggccttgaacattcattgtctggcccccctccctagttcctcatctccccaaagtcaagcccaatgtgtgaagaaatgacccagctcagcagccaaggccccgggtgccacaggtccttcgttgggagaggcatctgcaggcctttccttgcccactgggatccttgcctagcatagtgacgatgttcagccctggagacaaacaagaaggggaacaccaacatcaatagaagtatatatttacaaattgcatttctgctgtattgaaactaacattctgccctttaaaatcctgaaaataaaatttcantataaaatg

SEQ ID NO: 14954 - DNA, 873 bp, Homo sapiens
tttttccaaactgcaaattgccccaagttttatttgtagtccatacaaaagggaaaaaaaattaaggttttctaacaccacctacttggggagatggggaagtgggactgtgccgctcaccatcagctagaacattagtggtcagcagggacttggatacataccaactgactgtcccaacaggaactcagtctcaacagtctacagagggacagtcagggtaccctggactgctggcacagcttggcacataggaaatggttaagctgaccctttcctggcctccttcccatctaaaaagaaaaaggcgccggcgacctcagctgcaggttgcttccccatccagacgaccttaaatatcgcgcacaaaaataaaagggagccaggaaaaaaataaaaacataaaagaaattcccattctggggagacgggaggcagggtagaggggaaaccgcagatctagagccagtagcaagatttgctgctgaggcgaaggaacaaagtaggttactgccgaacacttaacaggatcatctcctggggaaggcccacatggtagagggcatgaaaaaccacaaccaggaaaggtatgggccagagtagttataacctggatctgtaaccctacccacctcttttctccctccctccctgtggtgccccatcccaggatggccctacatgcggcgctggtagccagagtgcatctgagccgcccgcaggtaatcattataggagcccgaatagcgtgcgtaatcggaatgggcatcggcatgccgacggtaatccagcgagactttgtcggcgagcggcggaacgaaagctgcgactctgataaacggcggtaatcagagagctcgctaaacgcggtcg

SEQ ID NO: 14955 - DNA, 956 bp, Homo sapiens
ttttttttttgagtactatgataggtgaaatggtatgactataaaaaggatttgtttctttttgtctcctggaatgacatgatgcctttctagagaaagaaaaattgcagggctacaggaaaatgataaaaactactggattcatttagactattcgatttaggaaggtacaaccacttctttaacatcaagctaaaagtgggggaaagtctcagtctcccaggtaggtctcctctcacactgtcctgggtggcaggcgctgtttatacatgcccgctatcgctctggctgcactgtagatcatctgccgacgggacatcccagtaaatgccatgtgccaatcagtccggctgacattcagtaaactcttttccaggacttcacccactgtcaccaaaaggcctgaccacctcagattatagtcctggggagttagactttgagcctgctgtacaaattccaaaggcactggtgtggcttgtgtaaatgtttctagatgaatgccatggacaggatcttcaaccaccaaacaaccaatgtcaaaccatttgtcaggcagcaattctgcaatgaagttttctactgacacagctgtctgtttttcatggatcaccccagttcgacgcaagctatctatccgttcctgagcaccttttaatccagctgcatagcccactggttgtggggcaatattggactgtccagcttcccctacaaccacagctaagccaaagacctcctggaaggcatctcggacagcagcaacttttacttctttatttgaggtcactacaatatccagttcacctccagatttgatatagggagccatgccagggtccagcgttgtaatcatgctttctactgaatgttttgtcttatcaagcacagacttcaccataggattcccagccacacccttaataaaaccccagattccaccagcagatgcttca

SEQ ID NO: 14956 - DNA, 1222 bp, Homo sapiens
ccgctcaaagcacagtgtcctgttaactcttgagtgctaagtagatctttgcaacagtaagcttgattgatcatgggttaaaaagagagaatattgaaatagatgttttaatacaggctggaaatcaactattcaacactatcattgatttagtatacaagaaatcatatggattaactgaacttaatagtactcaagtaggatatgcaaaatttatattttacataatctgtgaacatttttagtacctaaaaatgtttcaggtatttcaaagatgggaacaaccagtatctagtcatcatacattaatgtgaacatgcttattaaaagttaacctctttataaaaagtattaataaaccaagatgtgcctaaatattagggtacttcaagctaaaggtcatagtttatatataaaaagtacgagattcaaggaagtaatgtatctgatgctttgcttaataagattcactagtgcttgcccttaattcatagaacagtattgtttaggttacattaacctgaaatttaaagcataattattaggattccggcctataaatacaataattaaaatctatactatattattgctaccatgaaagtcttatctttggctgtttttcaagtagaaaagtaagtgtactgtgagccttttatttgagatgctgagagctattaggatgagtatttcagttttcttgtcaatagtgatactctgatgatgttgcagttatttgaagtagaactgattgtctaaaccagacacacatagggagtgtgctccattgggtcttgtgggagagtgctggcaccattaacccctccctccaactgtggcaatccacttgaggactgggcttctctaagccacagttgttatctgctgtgtaaagtcctggatgccagcactgtggcttcttagagagggcagatgctttgtatatcgagctgcagcattcatcgtagaaaatgctacaaagctgtctctcttccccttctctcatgttccctcttttcatcaagatgaaggctgttgggtaagaaaaactaagtgatttaacaaatcattatgatttaaacttagaaataaacctagaattttttgggtgtcccttttatcataggtgtttaatgtatattttaatgattgtagaacttgaattgctctagaatgtgaatgactacccttgtgttttactccttttggcttttgttttgta

SEQ ID NO: 14957 - DNA, 904 bp, Homo sapiens
cggcacgaggggctgaggaaaggaggtgggtctaggcaggggaaattggggtgccaccagacggagacagcttggactaccagaatcaagcactcttttggaagagggtaatctctctccaaaaactgaggacacttaccttccccatatattgagtccagctgtgtttggtggcccaggtactaatttcaagatgccaggacgttccagttcaaattcaggttcaactggtttcatctccttcagtggtgtagagtctgctctctcctccttgaaaaacttccaagcctgtatcaactctggtatggacacagcttctagtgttgctttggatcttgtggaaagtcagactgaagtgagtagtgaatatagtatggacaaggcaatggttgaatttgctacattggatcggcaactaaaccattatgtaaaggctgttcaatctacaataaatcatgtgaaagaagaacgtccagaaaaaataccagatttaaaattattggtagagaagaaatttttggctttacagagcaagaattctgatgcagactttcaaaataatgaaaaatttgtacagtttaaacaacagctgaaagaactaaagaagcaatgtaagtcaacatgctttgctttggttcggctttttgaaattagggaactgacttgatgaacagccccagttaactgattttataaagtttgcttatctgcttggcttgatcctcattctaagttgcgttttattgttgttgcaattctgtattttgtctaatttttggttcaaatcagcctgctcatttctggaaagccaaccagtttccacaaagtgctcagaaaatttcccagcagctagttatgtgtattgtcacattgctggggagggaaattgggaaaacaaaataaa

SEQ ID NO: 14958 - DNA, 515 bp, Homo sapiens
gcacggagccggcgcttttgcagttgcttctgcggaaaggtggtagttaagaatttgtaaaggccagagaactacctacgattctctcagcggtctctcttctcctcaagtttgaaatgctttatctcatcgggttgggcctgggagatgccaaggacatcacagtcaagggcctggaagttgttagacgctgcagtcgagtgtatctggaagcctacacctcagtcctaactgtagggaaggaagccttggaagagttttatggaagaaaattggttgttgctgatagagaagaagtggaacaagaagcagataatattttaaaggatgctgatatcagtgatgttgcattccttgtggttggtgatccatttggggccacaacacacagtgatcttgttctaagagcaacaaagctgggaattccttatagagttattcacaatgcctccataatgaatgctgtaggctgctgtggtttacagttatataagtttggagagacagtttctatt

SEQ ID NO: 14959 - DNA, 715 bp, Homo sapiens
ccgacccgggcaagattggcagcggcgctgcgcgtgcgttgttgagtgttcgggacgccggcctgcaggcgccatggtcttcctcaccgcgcagctctggctgcggaatcgcgtcaccgaccgctactttcggatccaggaggtgctgaagcacgccaggcacttccggggaaggaaaaatcgctgctacaggttggcggtcagaaccgtgattcgagcctttgtgaaatgcaccaaagcccgatacctgaagaaaaagaacatgaggaccctctggattaatcgaattacagctgctagccaggaacatggactgaagtatccagcgctcattgggaatttagttaagtgccaggtggagctcaacaggaaagtcctagcggatctggccatctacgagccaaagactttcaaatctttggctgccttggccagtaggaggcgacacgaaggatttgctgctgccttgggggatgggaaggaacctgaaggcattttttccagagtggtgcagtaccactgaggactgttgctgtattgattaggaaaagagacagagtaatttgcagtttgtttgatttatacttttgtttatctacaacccaataacagacatgagggatggccctgtctctctgggacagagcctcacagatgatgtccatgttttgtgtgaatgaaactcaaacactcttcaaaaaaaaaaaaaaaaaaa

SEQ ID NO: 14960 - DNA, 873 bp, Homo sapiens
  misc_feature (1)...(873): n = a,t,c or g
gctgattttgcagccattaaaatgagtcaataactatgtggaaatatagaagaatattttataatataatactaagaaagaggacagtaggccataaagtgttagcagtgttatgctatgtctatataaactaagcatgggcccattaaaaatagcaaactgaaaacagttcatgtgtggggggccaagtttagaagtaattttaatgtatctaagaagtgatttcctttattgttgtactcaggtacgaagactaaaaatcaggatgaatccagaaaattaacacaaaaaagtatgtattaggctacttcctgtcatagtgaaattaaacactcaaagtaatgnnnnnnnnnnnnnnnnnnnnnnnnnnnnnnnnnnnnnnnnnnnnnnnnnnnnnnnnnnnnnnnnnnnnnnnnnnnnnnnnnnnnnnnnnnnnnnnnnnnnnnnnnnnnnnnnnnnnnnnctctattaaaaaaaaaaaaaggaatgtaatttcaatctttttcttgatatatggcttgagaatgataatgtaaaaggaattcttctcttacttcaataaaatggggtttaaaccataaccttaaattccagttaaatatcacaatattgaatacctatagttgactttgggatggggactttttccaagtcattaagagtgtttgtttaaggtgatctcattgatggtagttctcagccgtctcaaaaactgcaagctaatcagtcagacattctttaatgaccccattttttcactttattgttaccatgttttctatttttactgatttttctaaagcatgtaagagtgaatttattatagcagtaatcttgtgtttctcctgatgtgcaataaatcaataattcacc

SEQ ID NO: 14961 - DNA, 1205 bp, Homo sapiens
  misc_feature (1)...(1205): n = a,t,c or g
cgagcaccgggaaggggagcgtggggccgctggaatgggtgaatttaaggtccatcgagtacgtttctttaattatgttccatcaggaatccgctgtgtggcttacaataaccagtcaaacagattggctgtttcacgaacagatggcactgtggaaatttataacttgtcagcaaactacttcaggagaaatttttcccaggtcatgagtctcgggctacagaagctttgtgctgggcagaaggacagcgactctttagtgctgggctcaatggcgagattatggagtatgatttacaggcgttaaacatcaagtatgctatgggatgcctttgggaggacctatttgggagcatggctgccagccccagtggctcttcaacttttggttggttgtgaagatggatctgtgaaactatttcaaattaccccagacaaaatccagtttgaaagaaattttgatcggcagaaaagtcgcatcctgagtctcagctggcatccctctggtacccacattgcagctggttccatagactacattagtgtgtttgatgtcaaatcaggcagcgctgttcataagatgattgtggacaggcagtatatgggcgtgtctaagcggaagtgcatcgtgtggggtgtcgccttcttgtccgatggcactatcataagtgtggactctgctgggaaggtgcagttctgggactcagccactgggacgcttgtgaagagccatctcatcgctaatgctgacgtgcagtccattgctgtagctgaccaagaagacagtttcgtggtgggcacagccgagggaacagtcttccattttcagctggtccctgtgacatctaacagcagttgagaagcagtgggtgcggacaaaaccgttccagcatcacactcatgacgtgcgcactgtggcccacagcccaacagcgctgatatctggaggcactgacacccacttagtctttcgtcctctcatggagaaggtggaagtaaagatttacgatgccgctctccgaaaaatcacctttccccaccgatgttttcattttcctgttcttaaaaagagggcagctttttcctntttccagtttggntcatcanttaggaactttgggcgattgggggttccacagtttgcaacagggcaaggaatggggggattantctttccattnttttaaaaantggcaggttcattt

SEQ ID NO: 14962 - DNA, 347 bp, Homo sapiens
tttttttttttaagcttttgagtgtttcacacaaggtatgttacagaagacaagtgcctaagtcagaactatgagaaatattgccatctgacaggttagattaaagaaggagagcacagcatctgggaagactgaaaagggaaccatagaaataggggaaaaatggtgaaacatgggagatgtcattgaagtcaagagaaagaaagcatcaggaaaattcaggtgtcatggagaaagcaagtaagatggggacagtgaagtttgctagacatgatacaagtagatcgttaggtgacttactgatacaacgttataagtagtgaccccttaactgtaggagttaattc

SEQ ID NO: 14963 - DNA, 1162 bp, Homo sapiens
tttttttttttttttttaacattttgaaatttattttggtttctgttcaacaaaaccaaaccacattgggatggcatttacagaagctcagaaaaacattatgcactgaaaaatacttctcattagaccacaacaagctttaaaaaaataaaattaagtaattatagttaagttacaaaaagctgaaagtataaaacattgtggaaacagtgaccatctattaactgggaaaacacaaaagaagagaaacaatttcaaccattaatcatttatcaaacatgaagtctggtgcattaaaggaatatctatcagagggtgaggggctggcttactggcagtttgacatactacacagctcagacccaaacccttcacagagagactctaagtgtacatctgacttgcagaactagacgagttgagtcactgttagctctggatataccgttaaattaaacctcaaaatctctccccaggactcttgctcaagcaagtcacgccaaatccaaccttcctaacaggggttttcagaaaatggccctgcagaagcacaggatctggtgcctcacagtttcctccatgctggcaatgctctagttctcatcacgcccattagcatctggcatcaggttaccctgtacagtcaacggccatagaagtcgccagcagggaaattccagaggtttagaattctatcagcacatgtgtgcaactggaagcccatcatgggagtactatgtcagagcgtatgtaactagctgtcaggtctttccccgttgcctcagcctttctacacagactggccttcaacttcccctgagtccagaagtagactctttcagcaactctattcaggaatctgcagcaggaaaactgcttcctctattaacatctatgactgaagcacagatgtgtctaatagaaatcacccttcacccaaaagctgggcgcagaaagggaagcccttagctgactataggaggtgcctcttgtggctccacgtgcttcttacacaccaccccccagcttgagcgatgcctcagccagctcaccctcatccacacaatcgctagaaaacatgcttcaaatattctatctttgaaaagacaccatgcagaaaataagctttcctctgatgtgcggtattttcttcaatgctatc

SEQ ID NO: 14964 - DNA, 269 bp, Homo sapiens
  misc_feature (1)...(269): n = a,t,c or g
attgantcgnancngctatgacnnnnnnnnnnnnnnnnnnnnnnnnnnnnnnnnnnnnnnnnnnnnnnnnnnnnnnnnnnggcacgagcaatatgtaaacaaatcaacatgactgtgtttcaacaaggcctgatttgttaagtttcatatatagtcatatgtcacttaatgacagggatatgttctgagacatgtcacttggcaatttcatcattgtgtgaaaatcatgatgtagttacacaaacctagatggtataccctatggtatc

SEQ ID NO: 14965 - DNA, 1740 bp, Homo sapiens
cagggatggcggcggaggcggccgatttggggctgggggccgccgtccccgtggagctgaggcgggagcaacgcatggtgtgcgtggagtacccgggagtggtgcgtgatgtggctaagatgctgccgactctgggcggcgaggaaggcgtctcccggatctacgcagaccccaccaagaggctggagctgtacttccggcccaaggacccatactgccacccagtgtgcgccaaccgcttcagtaccagcagcctgctgctccgcatcaggaagagaacgaggcggcagaaaggggtgctgggcacctgaggcccactccgaggtcacatttgacatggagatccttggcatcatctccaccatttacaaatttcaggggatgtctgacttccagtacttggctgtgcatacggaagcaggcggcaagcatacgtcaatgtatgacaaggtgctcatgctccggcccgagaaggaggcctttttccaccagggagctgccgctctacatccccccacccatcttctcccggctggacgccccggtgggactactttcttaccgaccagagacccagcaccgggaaggctacaacaatccccccatctcaggtgagaatctgattgggcctgagcagagcccggcgcccccacaatgccatctttgtcaactttgaggatgaggagggtgcccaagcagccactggaggctgcagcccagacgtggaggagagtctgcactaaccccgtggaccggaagttggaggaggagctgaggaagctgtttgacatccgtcccatctggtcccgaaatgctgtcaaggccaacatcagcgtccacccagacaagctcaaggtcttgcttcccttcatagcctattacatgataacaggcccctggcgcactattggattcgatttgggtatgaccccccgaaaaaacccagatgccaagatttatcaagtcctcgatttccgaatccgttgtggaatgaaacacggttacgcccccagtgacttgccggtcaaagcaaagcgcagacctacaactacagcctccccatcaccgtcaagaagacatccagccagcttgtcaccatgcatgacctgaagcagggcctgggccttccgggggacgagtggtgctcggaaaccagcttccagcaagtacaagctcaaggactctgtctacatcttccgggaaggggccttgccaccctatcggcagatgttctaccagttatgcgacttgaatgtgggaagagttgcagaagatcattcaccgcaatgacggggcagagaattcctgcacagaacgggatgggtggtgcctccccaagaccagcgacgagctcagggacaccatgtcccctcatgatccggcagaccatccgctccaagaggcctgctctcttttccagctcagccaaggctgatggcggaaaagagcagctgacgtacgagtctggggaagacgaggaggatgaggaggaggaaggaagaggaggaggaggacttcaagccatccgacggcagtgaaaacgaaatggagacagagattctggactacgtgtgacagggcccaaggctgggcctccctgacaccgccagactggtgtctggcctaatgagggagcctcgcccatggtctcacgtggcaagaagtgcctttagctctggatcccaaccgtttggcacagcttttgccacagccaggccgcggctggaattgtccttatta

SEQ ID NO: 14966 - DNA, 1325 bp, Homo sapiens
gcgggaagactcatcggagcgtgtggatttgagccgccgcattttttaaccctagatctcgaaatgcatcgtgattcctgtccattggactgtaaggtttatgtaggcaatcttggaaacaatggcaacaagacggaattggaacgggcttttggctactatggaccactccgaagtgtgtgggttgctagaaacccacccggcctttgcttttgttgaatttgaagatccccgagatgcagctgatgcagtccgagagctagatggaaagaacactaatgtggcttgcccgtgtaagaagtggaactgtcgaatggtgaaaaaagaagtagaaatcgtggcccacctccctcttgggggtcgtcgccctcgagatgattatcgtagggaggagtcctccacctcgtcgcagatctccaagaaggagaagcttctctcgcagccggagcaggtccctttctagagataggagaagagagagatcgctgtctcgggagagaaatcacaagccgtcccgatccttctctaggtctcgtagtcgatctaggtcaaatgaaaggaaatagaagacagtttgcaagagaagtggtgtacaggaaattacttcatttgacaggagtatgtacagaaaattcaagttttgtttgagacttcataagcttggtgcatttttaagatgttttagctgttcaaatctgtttgtctcttgaaacagtgacacaaaggtgtaattctctatggtttgaaatggatcatacgaggcatgtaataccaagaattgttactttacaatgttcccttaagcaaaattgaatttgctttgaacttttagttatgcacagactgataataaacctctaaacctgcccaggcggaagtgtgtttttttttaaatttaaatacagaaacaactggcaaaaattgaactaagatttacttttttttccatagctgggatataggctgcagctatagttgaacaagcagtctttaaaaactgctgtgaaacacaggccatcagggaaaacgaaatgctgcactattaaattagaggtttttgaaaaatccaactctcatcctgggcagaggttgcctagttggtatagaatgttaagtttcaagaaagtttacctttgctttaggtcataagttccttatttgattgctgtatatggatacatggctgttcgtgacattctttatgtgcaaatttgtgatttcaaaaatgtcctgccagtttaagggtacattgtagagccgaactttgagttactgtgcaagatttttttttcatgctgtcatttgtaatatgttttgtgagaatc

SEQ ID NO: 14967 - DNA, 363 bp, Homo sapiens
  misc_feature (1)...(363): n = a,t,c or g
ggcgatcttagctccctgtagccttgacctctctgggctcaagtgatttttctctcctctacctcccgagtacttgggaccccaggcgcatgccgccatgcctggctaatgtgnnnnnnnnnnnnnnnnnnnnnnnnnnnnnnnnnnnnnnnnnnnnnnnnnnnnnnnnnnnnnnnnnnnnnnnnnnnnnnnnnnnnnnnnnnnnnnnntgttaccggcgtgtgccccagtgcctggccgtcttggaggtcttgtttctctgggtttatgcctcaaggtggcgcctgctcccctgtgctccctggtagcctggtagtgagcctgcttctcacacagtcatacctggttgtggtcccacagtgg

SEQ ID NO: 14968 - DNA, 1995 bp, Homo sapiens
attagacattgccaccctcacctctggccaaaaattcttgatttaaaaagaaaagtctattttgttaacgacaggctctgttgtatgtgttactatcccaagcctggattattttatttatttaaaagtattttaatttccatattggctttattctaatcccatccatccctgtggagctgcagagcatcttcatgtgagtagacggatggacataaatagattcatgctcatttaggaagctgggagtttcgtgaagctgagggtgagttcctgtgattcttgttcgcttcaacaaaaagtgggagacccaagtttttatagcaaaagaccaaattagctgtagagtcttgaatgcagaaaaaaattaccctagctttcttagcacttagggttttgtgaggattcagtgtttagcacagtgcttggcacatagtaagccctagtaaatgttaaatattgttattagtgtttcgtaaaacttgagaaataggagctgagctcattcccttcctgttgattcaaaaataatacctacatgaaaacatgattccaagttgattgaatgttgtaggaattactggtttagagtagcccagttctcggcctaccctgctggttgggatcttactgtattcttgaatgcactggtttgaaaatatgccagacttcagcccccaaggaaacaaggctgcaagaatttatgaactccagctggaaaaggtaaaggtgacctttggctagccacatactggaccttaccccactgacgtctttcagaacattccaagggttttcctcaaggaacatttttgagctagaaattaaaatgggttctctggcagactgcaccccttgagtcaaagttaacagtattcctttgaatgcaataatagaggcttttctgcgttaagggagaaggaatgaccaattgaacttacacattccccagggcaggtccctttgccgggcccctacaggctgggggtggcccctcctgtcctcagggatcagactcccagactggttagttctgcatgtttccatcaaattaaaggttattccctggccgcctcctggagaaaaccaaccccaccctgccagctgggggcaatggggcagggattttggcctctcagaacagctcctagaggctgctcatgactgaatgttttcccaaatcacctaaatatcggtttgctttttgttttgggggagaggatttagcctcttacttccctgatggattcaaagttttatctatctccttatctcctgccctgtcttggcacaactctggatagattgcaggtgtggaatttgctggagtttggtgacttcgtcaaattcctttggattctgttccgccaaatcagcagtctcgtcctgtggatgcagtgactggaatttcccatctgcaaagcatctctgtagcccagattttgtggagccttaagacactccctcaatgccaccctgaccccacggctggagaaccctgtgcttatgtggtgggcagggccactgttgatggaggatggcggggacggggtggtgctcaaaggatctgtggtgctggaggtctacacgcctctcaggacagcgtgtcaggaacctcagagcagcttcacatctgccaaagctgagagggagcgaacttgggaagcattttgctcattgtcctacccaagtattaatagcataatagttgatgccaaaggagatggtgacgtcccttccactgtagttgctgtcacaaccttgacgtctttaagctaatggccgtttgcatctgtgtcttcaaacagatcctggttacagccattttgtgtgattcacttcgggggttaagtaatgcaggattctgcaaacaaggtgtcgccgtccaaatgtactgtcctggcatagagagcactgctttgttttccactgttgtagagaaaactagggagaactttatttttcaataaacttttcttgtgtgacaaaaaaaaa

SEQ ID NO: 14969 - DNA, 1570 bp, Homo sapiens
ttttttttttttttaagtcacagaaacttttattggaaagaaacgagctgcagcaaagtgacactcagtgcacgcggccaaatgggcgaggtgggggtacaggtgggcaccggggccggcccaagaccagagccggtgactgctggggcctgctcatggggcctccggccacagaccctttgggctggagtgtgcaggcccagtagaaatacaaaaataaactctgcggtccagctgtccctgctgtggcagttcatttgggcagggcagtcgctcctcccaccaggccccctgctgacaagtccggccacagcatgggcagcaggagtctgaggggtgagtgggcatccacaggatggagccaaagggctaggcaggtatggccttgggcagtgccaggactgtggcagcgccagggtctggccagcagctggggaggccccaggggcctctcaggtggacaggtccaggcattggttgaagctggatgaagctggggcctcggctcctcctcatcaaatacagatcactgggaccctgtcctcctccatggtgctggtctcctcggccccactgcccctgcttctgctttcttcctccacctcctcctcccccagctccatgtccagctcgttgcctgcctctgagggtgtgtaggtggagccactgatggaacggcagctaaagaagacgattcgcttgagccgcttgttgtagaagaagtagttgaaggaccagaggctaccatcctccccgaagggatctgagtccaagtctgggttatagctgtagatgtcacattcagccaggcagatctcctcgtccaccgcgttccacagctgtggtttcagatccttgaagtcctcccgcacagctgagaacagactgcagttgactgcattcaccacccagctaaggctgggctcccggctgaactcatggctgcgggctgtgctgaagtcatagtcaggcctgaaggactcattgagcgtggcaatcaggtagaagagggtcttgcggctgcacttgtcactgagggggccctcctcctcaccgccttggcttttgctgagtctgctggggctcagtcctgaagtctggggtggagaaagtgcctccagcacgtggggctggccctcctggcagaactgcttgaacatgtgtttgtcgtctcctgccatcttacatgagtagctctcaatcctgccaatgatgtgggcatctccggtctccacagtcagctgtgagttgatggcttcaaagctcgagttctccaatagcttcatgtctttggggaaggagctccgtgctccagaggggctagtattgcctgcctggctgggttagatccaggccgcgccgagccgggtctggctgggctgagctccgcgtcggtgccggtgcgcaggcgggggcgggctcggcagcgcgggctcttcaagatcggaggcggcgccggcctccgctcgggccgcactgtatccgggggaagaagtccgcggcgacgtcccaattaacatcacgccctgcacgcgatccgggctgccaccgcgacatagcctcgcccccc

SEQ ID NO: 14970 - DNA, 635 bp, Homo sapiens
ttttttttttttttttttacacagtaatgatataattatgtgatgcaaatattaacttcatccctttccttgtaaattcagcttttctcaccagagctcaggggcagtcatgacaataaaaataacaatagtaattacaagaaatgtgctctgagtacagagaaaccacaaggcccatctcaacacacaaatacaaaaacaactcgcatttacggggcgtttccaggagttaatagcatacagtaccatgggtagggtgtggttggcagaagctgtccactttttctaagtgcaggtgttcgttgctgaggatcttgtgctcctcctcccttcgttttctagagtaacttcccagaggaccctgcctggagcctgccaagccagagtccagcgtaaaggcccggagggctgtttgtgtctttctggcctccctagggtagagggcagagctggctgcagctctgataccctttcctggagctctgcactctctcctcccctctttaatcccctctgtctcccctcccttctgctcttcagcccccatcctttcctcctctcctcctctgccttgaccagctgacctcccagcagacagcaccgcaggctggaaggcttctcagggcgttgatagg

SEQ ID NO: 14971 - DNA, 570 bp, Homo sapiens
ttgtaatcactggccagcatcgaaatggtgtaatttcagcccgaacacggattgatgttcttttggacacttttcgaagaaagcagcccttcactcacttccttgcctttttcctcaatgaagttgaggttcaggaaggattcctgagattccaggaggaagtactggcgaagtgctccatggatcatggggttgacagcagcattttccagaatcctaaaaagcttcatctaactattgggatgttggtgcttttgagtgaggaagagatccagcagacatgtgagatgctacagcagtgtaaagaggaattcattaagctacaagaattagttgatcgagtgctggaacgttttcaggcatctggactaatagtgaaagagtggaatagtgtgaaactgccatgctacagttatgaatacactattcaggaaagaccccaatgctgaaggcaggtacaatctctacacagcggaaggcaaatatatcttcaaggaaagagaatcatttgatggccgaaatattttaaagttgtttgagaacttctactttggctccctaaagctgaag

SEQ ID NO: 14972 - DNA, 4259 bp, Homo sapiens
tttttttttttgaattgcaaaatctggtttaattaagatctggggaggggagcacatagtgaaaatacatatgcacaggaaccaaatcaatgctagacaatgtattagtttacaatataataggataactacaagtttgaaggctcaaattgagtccatcagctgtaaatacaattttatatttggctcaagtggctgttgaatatcaagtggtgccgagtccctccagagcacctactgaccccctcagccttggaaggagtttcaccacagtctcagaagaaatcccagtcgtgcctttaactcttttggcccttgggagtcattgcaaccccaatacaaatgccggcccagggatttccagtggccacaagttattgcacagagaggtctgttctaagccagactcttacagctaaggaggtgtgagattagcccttaaatactggtctagcattagcatggtctataaaagcatgttaagaaatagctcctcagtgattatgtaccagctactagttatcctactaagagaaaaggcaacatggcagcttcacatttcacatgaaagactagcattaactggggcctggcgtgcgggcttaactttgacataacactagcgattattttagacccaggaaaaaatgatttcataccagtcttttcttcacataagatttgtgtagcattaaaattatgggttactgaataagccatgaaggcaaaaatgtggaactctcctttgccaaaacagaaacaaacatccctgttttgactcctgtccagtttccaaaacaaaacaacaaaacatacatacacctttgttattgcacatctttcacacaaacttgtgtatgtataatatacatatatatttttaaatatgctacacataaaaaaagactatggcactttacagaatatatgtttaacaaagatcattacaccacagatgtttgaaaactatacaaaaacccttatacaattaatgcaacattgtttgaattattagcacacaggtttaaagaatccacagaatccaaggcaaatatttctgcctcagagttcattgagaagcgcagcccatcccatcccgtcatgagactttctttaagccaatttcaggcaaaataaataagactttcctggtagtaataatggtcctatttattagaaaaataagtgtgagccaacaatctatttttaacatttctttctagcatattcctcatacccagtggtttttaaacagctgtgtggaagagcatggtttagactagcatgattttagatggtcctttcatcccaagcctggctaatggattcaaggtttaaaagtcccaacattacctttttactatttactaagtcagtgtttaggtagtttttagtggtttggggttctgtgtgtgtgcatgcctgtgcttttgtcttctgttgcattcagattaataacataaacactatcgagtgagtttattatggccaagtcacactcccttgtgactgttcccaggttgatctagaggtacactgccaccttagccaaagagcaggtgatggacatgctcggaggatcctgtgagcttaggacttaacttgtaaggacactgagattgtaaacctagtgtcagaaaatggtttctctatccaagaaagaaagaaaagtgagtcttctgataagtttatggaaaaattttgtgtttttcatcaaggtttgagacttggttagaacattataaatgtacacacagagacagaagctttgtccagtggctcctccagcctctttctgtgtggtgttagagatatggttaaggtttcctaggctgctatgaagatacccgtttttttcttcaccaaaatcacaggatttacatctcactcactttgaattttggttcaggaatgggaaactcattaaggctagttccacacctcccaccccttttgcccttagcccttaatctgtgagaagatggtttctcatataggccaaacaccagaatgtagtaaaactgcggttgtcccattccatctctgtataattatctgttctgcaccaagatacggtgctttagactcagacagctttaacatgattcactcagggcaaggttgcaaactctgaagtcagggttgtatagctggtagcacaataccttgtccacagaaggtactttttcaaaacaaagtcctcaagtgagcagattaatgaacccaaatacctacactttttctccttccagaaatctggcagttccatctcactttcttaaagtgctaaggagtgtttctgtatcatgatacaattttgaagctcccataatgtcagagtagcttgtttctgtgctgctctggtcattctgagatactatcttcctgaatcagtgatattggtaatttatggaaagtagattaaaaacccctgaatccttattcatagtggtatttgattctttttgtaaacaggtgtagggaagtgctgtgaccttgatctagcgcctctttttgaattaactttgtcctctgtgctttcctggaattaaggtcttggctgcagttcttcagttgcagcaatttaatgttatctcagtctgctttcaggatcaacaccagtaactacaaaaacttaactcccataactagcttctttttgttgtagaatgccattctgctactgtcgggattggaaatagagctgactacagcatggtcaccaaactgggagtaaaggtctccccccaagtgccgagattctggcaggtcctcccagtgaacatctgcataagccacagctagcttggagacctcagtccctggaaggaggaaacagtgaggtttcctttcgcagtcaaagcacaatcctaaccttagaagaaaaacatgtgatctccagaagaagaggagactgggccagaactggtgctagcctggctgctgggaagaagaaaaaatacgtcttcactagcaagatttcatatttttgttctcatatgattgtataggtccttattgtttctttactcaaatttctaaaatctctggagtgacagttcagttgatccaccttaccctaggattcagcctagaataagttccacagcatgactccacgccatccctgctgacccctttggtcagctaagcaaaagacagtgtcttgctgtgccctttagcacacatcctgtccccagtaagtttatagttttctgttcgttggagacaacttgaaagaacagaggaaaacaagaactccaacccaaaaccccattctgaggcagagatgctcacaagcaagcagtgttggagcagaaacagcctgcagatctggcggacggtctcttccgttaccagagaaactgctgccctaatgatttagattatcatccatcattgaacctgggggagatggagtctgacagaacttggcaactccaggtctaggattatatactattttcatgttccattccttataatgtgcactgcagaccgcatgtccagtaactttgcgtagctggatgtggcctctcattggtcctgtttaagcctcgggccgtggaacgtggctttggtaggtaaaggttagttctccacttgactcaaatgatgaaactgtggactgtttcacaagattactcaagggagaaaatggcattgtctcttccaaactaaaggaggcagatcaggtttttcccctcttcaatttcttcctgtactttgtcactagaggttgcaatttctgcttgtgcagagaagacagcacagatgaaagtgaggactgtgcccccaatggcggtataaaaggcccagcccaaggagcagtctccaggtttgtaggcagatgcataatgtccacagtagtctatggccttctggcaaccccagccagcagggtagagtatcaaaccgaggataaggaatagacctgcaattccttgcaacagcccacagacattgaagatgcttttcttcatgatgctctgtacacacatggtgaagacggacaccaaggccaccatgcagagaataaagattcccacagccaggaaaatagctgtggcctgccagaagccgctggcgatctcgccgaagctctcggcgtagggcccgcacagcgtgtcccgctggaagtgctgcacccctgggttccggatgcagcgggcgtagatgcccagggtggggtggtagggctccggggagcccccgcccgggcccgccggctccacgccgccgcggctcctcgctttccc

SEQ ID NO: 14973 - DNA, 550 bp, Homo sapiens
  misc_feature (1)...(550): n = a,t,c or g
ctggtctgctcttcaccctcctggcctggcgaangagcaagtggctggtgntcgtgatnacagtcatgagtctcctggttctcgtcctgagctggggctccatgggcctggaggcagccacggcgtggctcnagtgacttctgctccaatccagacccttatgttctgaacctgacccaggaggagacagggctcagctcagacatcctgagctattatctcctctgcaaccgggccgtctccaaccccttccaacagaggctgactctgtcccagcgagctctggccaacatccactcccagctgctgggcctggagcgagaagctgtgcctcagttcccttcagcgcagaagcctctgctgtccttggaggagactctgaatgtgacagaaggaaatttccaccagttggtggcactgctacactgccgcagcctgcacaaggtgggtaactcatcgatgcctcattaacaatgttatgaaggaagggactattgattattcccaccttaacaggttagaagatgaggagcagagttgagggaccttc

SEQ ID NO: 14974 - DNA, 276 bp, Homo sapiens
ctcggtttcaactcaaagaccacctaacttcatgaaacctctgcagatgggccctgctggatgagatctttctgcccttgaatgcacagagcagtttctgtctttttctttatccctttccatcccgcacctgtttccttcccttctctacagtgtcccttgctccgtgttctcacagccccctgtgctcagttttcacagcacatattgccctacgttgtgagcctgctttcgtcctgtgactgtgagctccttgaggactggaaccttgtctga

SEQ ID NO: 14975 - DNA, 2398 bp, Homo sapiens
gaattcccaaagtcctaaaacgcgcggccgtgggttcggggtttattgattgaattccgccggcgcgggagcctctgcagagagagagcgcgagagatggagatgggcagacggattcatttagagctgcggaacaggacgccctctgatgtgaaagaacttgtcctggacaacagtcggtcgaatgaaggcaaactcgaaggcctcacagatgaatttgaagaactggaattcttaagtacaatcaacgtaggcctcacctcaatcgcaaacttaccaaagttaaacaaacttaagaagcttgaactaagcgataacagagtctcagggggcctagaagtattggcagaaaagtgtccgaacctcacgcatctaaatttaagtggcaacaaaattaaagacctcagcacaatagagccactgaaaaagttagaaaacctcaagagcttagaccttttcaattgcgaggtaaccaacctgaacgactaccgagaaaatgtgttcaagctcctcccgcaactcacatatctcgacggctatgaccgggacgacaaggaggcccctgactcggatgctgagggctacgtggagggcctggatgatgaggaggaggatgaggatgaggaggagtatgatgaagatgctcaggtagtggaagacgaggaggacgaggatgaggaggaggaaggtgaagaggaggacgtgagtggagaggaggaggaggatgaagaaggttataacgatggagaggtagatgacgaggaagatgaagaagagcttggtgaagaagaaaggggtcagaagcgaaaacgagaacctgaagatgagggagaagatgatgactaagtggaataacctattttgaaaaattcctattgtgatttgactgtttttacccatatcccctctcccccccccctctaatcctgccccctgaaacttatttttttctgattgtaacgttgctgtgggaacgagaggggaagagtgtactgggggttgcggggggaggatggcgggtgggggtggaataaaatactatttttactgccactctttatttttttcccctactttttctttgtgtccggtttttgtccctgtaaatgcgatactaaggtacacactaagtgagcatttgttcctgactctcaaagaggatggtttggagttctcttacgtttcctggtatttcccaagtctcttgggttggttggaaggctgtggctggtctcagtttggttactcaatgccccaggaggggctgagcaccagcccatatcttttgctttggttcacatgatgatacctgcttttctcaggcctgctagaggcatccaacgccctggtttgtaaatagcaacctaaaggcgtattttggcactggtctggggacattccccatctctcatcccttttcccccttcacagatggtggtgggcttcgctctacaaagaggactctgatgttactcttgagcttatgagccagagagctgaaaaccgcaggcttgttgtgttaagttacaaggaaaatggatttggtaattaaaattagaagaaacacaccttcaaacttcaacttctttaaaagaaaaaaaaaactgtcctatcttgttctgtaaaatattagaacgctttgttttacaaaaaatgatgagagaattcttccacatgtacttctgtgcttagaacatttttacggacctaagcgctggagacgttgctgcatgtcggctgggttttttttttcatacacccgagcacggaaaaactaacgcaaaattgtattttcttacctagtggaaatctgaaatgactgcaaattcctagtgaatgtacaggtttgctttcgtgtccctcttctggttgctttagaagtgacgtgtaatttctgaacccatgtttcatctgtataaaagaacatctgcaccagtttttctcctgcccctcagaagagccaaactttgagttttatgtctgtttgtcattgataaatttcaataaatctttttatacaatttttttggggatggcttctttgagtccaacaggccattgatcttttcaagatgcattccagatgaactgctaggtgagggggaagcttcatttttgttacctgatagaatagcttttcttatgagatatatataatgtgatactatgtttggatatttttggtcttaaagcaagactcagtggtgtatcttcattaaaagcttcctttaaaaaagttacagagttactaaaaaaacaagtacccaaacaatcaagttgggccaaccttggaaccttgttttgaatatctttcattgttttgtttgtcgtattgtaaaaagaatgtatggttgaaaactcaggaatgtttataaaacaaattatttcaaaaaaaaaa

SEQ ID NO: 14976 - DNA, 1417 bp, Homo sapiens
gtccaaccatgagcatgaggggcttcttggtgtcatttccactccccttgccaatatttatttggaaacatttcaaactacagaaaagttatgcaaattacatcaggaacacacacatcccctgtgcggagatctgtgctttatgtctttgaaagtaagttgtcgagatcacagcactccacccctccacaccgaagcccgcagcttctcaggaaagggcagtcttgtgtaatcagtgcatatcatcacacacaggatgtctgacactggcaccacgctgccatctcagagtccatttcaatgctgggggtcatcggttttcagcaggttcttccctggggttcaacgcgtcttcccgccagagggatggaatcttgggtgagtgttgaaatgcgtcagaaacaaaaacgcaaagtggaactggagcacgtcacagaccttggaccagaagtggcctgtgaggcactggaagagacgccaccgtgcgagctgatggtcacacagcttgaggaccacaaagcccaggcaagagagcacccccaaagctaagtaggtagccgaggtggtgctgccatagtgcctgtgggtgcgcagcgcctgccccacagcggccaccacggtgagcacccagtgcgacctcgaagccctggggatgcagcagagcgaggccataactggccagggagacgcactcaagagagaggaacagccagggccgccagccgcggtctaggtagaggcaccaggccacgggccatgcaaagatgggcagtgtgagccactggtccagcaccgcggcacggcgccactgcgtccacaggcgcagccactgcacggggccatagagcagggccatggctgcgaacacgtccttcaggtagcggggacccagccccatcgcgccgcccctgtgcagccacgacagccccagcagcgtgtaggccatgttcacgagtgagttgaacggcatggccaggaaggcagggaggccggccacgggcgcctcggcgtagtgctcatagcccacttgcacggaaacactgtcgaaaatgcccgtgaaacacagccacggcacagaggccaccgggccacggcccacgtgcacgaaggcctgcccccactctggattcatctggaaccggcggcgtgaccctggggcagggagcttcagagagcagccttcaatacgcagcctctgcagaacactctgggcctcccggctgagccagcagaaagaagccccgtgatttcgtgatttccgaggcagatgctgcgaccttgccccgaaggaaggcaggagtcctgctgattggctggcgccagcggaggaacgttctgcctttttcagtattggcgcgaaaaggccagctatcaccatacgggtatttcgcctcactcgcctcgctgggggaaattc

SEQ ID NO: 14977 - DNA, 528 bp, Homo sapiens
tttttttttttttttggatttgaattatctgactttatttagcatgcaatgaattttattctggcaataaattaatatgtgcagttataaaaaatgttgggtactttttccaagaaaaatgtttctgaatgtgcacactagaatatatgcagaatcctttaaacagtcgacttcatattttaaacttgtaagtgtggtaacatcaagttttggaagaatggactttttctgtaattcatgatttagtttgagtttataaaggttttaattgcaatttcagttcctacaagctaccaagcctgaaattagagaactgacagctgagaaaggcaatcacctgatcgagtctcctaattgtacagctgaagaatccaatggccttgccaaagattacgaagctaaaaagagacatagcctggattacaagtcagtttttataggtgctccaggaatgtcttgagctaaataaggcacacgtatcacacagaactttagtcgtatctcagagtccagttttactctgctttc

SEQ ID NO: 14978 - DNA, 1221 bp, Homo sapiens
agtggaatgtttgaatgactttgccaggtcagagcaagtaatatttctgtatctgagtttttgtttgtgttttgataaggctaatgaaattgcattccaggtaggggttaacgtcaaatttccatggctggtagctgtgcttttggcatatcacagtgttgtgtcactactacaaggtaaagcatctacagcggagaatgagcttgaaaatgagagacctattgtgaataaatatgcccatgagagcatatttaataagcctctataacatgcagccaaaccagacattcactcctgcagagaaatgttgccctggagaaaaagagatatataaagataggctatcacccttcttttgctgcagtactaagcatagcaagaaattagaatcatttacattggaaatttgaaaattccctttatatacacaactttactgtgtataaataaaaaatatttattaatgcagtgatgtccgtcaggttgttttaggaatggcttctgcaattagaaaaatagcttgctagaatgtaaatgttctgttactggtaaatgtactgcacacattcattggacgttaaaacaagtgagtagccttttttacctgccagcagcatggctgtgtgcagccactaggctggaggacaataaattaccaaaaattataatgtaccgagctgaaaatgctcagtacattatgtggcatattctggatgtgatgagaaatctcattgccatttgggacactgacatcccagaagtaatccacaactggctttgcaaaagcaaagtgactgctcagatgaacagagcagagtactcactcactatggtgggcatcagctgcaaagcgaacatgaactgtcccatgatcatgttgatggttttctagatactgccaacatgttagctctttctgatgctgatgagtttcaaacacgaacagacacccttgatgtgggtttgctaagaacatagaagaacaggaagaaaagttgccagggttcacacatcccaggaaaaaagaagcataaaaagcattagcagtcagtgactggatgataatgctgcaataatgggaatggttttgtttctaaaccaaattatttctaaatcaaatcatttattgctttgtttctaaagcaattgagtcactaagtttgtgaactgtaggagaacacatcaagattgaatcctgtgttaagcagaaggtaaaaccag

SEQ ID NO: 14979 - DNA, 450 bp, Homo sapiens
ggttattaacacactgaagctaccgtgtgaggaggtgcctcactcatgtactgcattattatagcttgctaaacataccttggttaataaggaactatttcttgaatgtcacttccttgtctcctgccacgcatctggtggtgggcccggagcccttgttgaccaataggctcaatatttgtgagggagacctgggacagcagagtagaggtgtgttaggacacgctgggccctgccagcatttgtgtctgtcacctctaaccacgaagaggataatgacttgaggagagcagtgcctgctggctgcagctcctccttcccaatctcaagtgaatacctcttgaattcctctaggctgtagcctagaatcatgtatagaaaaggattctggggaatgtaggttccccttaacccaaatgctaacagtacaaacttcagttgtgcagctaa

SEQ ID NO: 14980 - DNA, 4963 bp, Homo sapiens
gcagtatctgggagagacgcagttcgcaccgggccagtgggctggcgtggtgctggacgacccggtgggcaagaatgatggcgcggtgggcggcgtgcgctacttcgagtgcccggccctccagggtatcttcacgcggccctccaagctgacccggcagcccacggccgagggctcggggagtgatgcccactccgtggagtcgctgactgcccagaacctgtcattgcattcgggcacggccacgcccccgctgaccagccgcgtcatccccctgcgggagagcgtcctcaacagctccgtgaagaccggcaacgagtcgggatccaacctctcagacagcggctctgtgaagcggggcgaaaaggacctgcgcctgggggaccgcgtgctggttggcgggacgaagactggcgtggtgcggtacgtgggggagacagactttgccaagggcgagtggtgtggcgtggagctggacgagccccttgggaagaatgatggggcggtggcgggcaccaggtacttccagtgcccacccaagtttggtctcttcgcgcccatccacaaagtgatccgtatcggcttcccatctaccagcccagccaaggccaagaagaccaagcgtatggccatgggtgtgtcagcactgacccacagtcccagcagttcctccatcagctccgtcagctctgtggcctcctccgtggggggtcggcccagccgcagtggcctgctcacggagacctcttcacgctacgcccgcaagatctcgggcaccacggccttgcaggaggcactgaaggagaagcagcagcacattgagcagctgctggctgaacgagacctggaacgggctgaggtggccaaggccacaagccacatctgcgaggtggagaaggagattgccctgctcaaggcacagcatgagcagtatgttgcagaagccgaggagaagctgcagcgagcccggctgctcgtggagagcgtgcggaaagagaaggtggacctgtccaaccagctggaggaggagaggaggaaggtggaggatctgcagttccgcgtggaggaggagtccatcaccatgggagacctggagacccagacgcagctggagcacgcgcgcattggggagctggaacagagcctgctactggagaaggcgcaggccgagcggctgctccgagaattagcggacaacaggctgaccacagtggccgagaagtcgcgcgtgctgcagctggaggaggagctcaccctgcgccgaggtgaaatcgaggagctccagcagtgcctgttgcactcgggtcccccacctccggaccacccagacgccgccgagatcctgcggctacgggagcggctgctctcggccagcaaggaacaccagagggagagtggggtgctgcgggataaatacgagaaggccctgaaggcctaccaggcggaggtggacaagctccgcgcggccaacgagaagtacgcacaggaggtggcgggcctgaaggacaaggttcagcaggccaccagcgagaacatggggctaatggacaactggaaatccaagctggactcgctggcctcggaccaccagaagtccctggaggacctcaaagccaccctgaactcgggcccaggcgcccagcagaaggagatcggcgagctgaaggcagtgatggagggcatcaagatggagcaccagctggagctgggtaacttgcaggccaagcatgacctggagaccgccatgcacgtgaaggagaaggaggccctgcgagagaagctgcaggaggcccaggaggagctggctgggctgcagcggcactggcgggcccagctggaggtgcaagccagccagcaccggctggagctgcaggaggcccaggaccagcgccgggatgccgagctgcgtgtgcacgagctggaaaaactggacgtggagtaccggggccaggcgcaggctatcgagttcctcaaggagcagatctcgctggccgagaagaagatgttggactacgagcggctgcagcgggcagaagcccagggcaaacaggaggtcgagagtttgcgggagaagctcctggtggctgagaacagactccaggcggtcgaggccctgtgctcctcccagcacacccacatgattgagtcgaatgacatttcagaggagacgatcaggacgaaggaaactgtggagggcctgcaggacaagctgaacaagagggacaaagaggtgacagccttgacctcccagaccgagatgctcagggcccaagtaagtgcgctggagagcaagtgtaagtcaggcgagaagaaggtggacgccctcctgaaggagaagcggcgcctggaggcagagctggagaccgtgtcccggaagacccatgacgcctcgggccagctagtcctcatcagccaggagctgctgcggaaggagcggagcctgaacgaactgcgggtgttgctgctggaggccaatcgtcactccccagggccggagagggacctgagccgtgaggtacacaaggctgagtggcggatcaaggagcagaaactcaaggatgacatccggggcctgcgtgaaaagctgaccgggctggacaaagagaaatccctgtcggatcagaggcgctactccctcatcgacccgtcctcggcgcccgagcttctgcggctgcagcaccagctgatgagcacggaggacgccctgcgggatgcgctggaccaggctcagcaggtggagaagctgatggaggccatgaggagctgccctgacaaggcccagaccatcggcaattccggttctgcaaacggcatccaccagcaggacaaagctcagaaacaagaggacaagcactgatcctgaggggatactgtggagcagcccagtccacaccagagccccacgcggctgcccggcagtacctcctccaggcaggagccgggactgtcactttggagacaaaacagtgtttgtaacaataacgtactcaccgccgcggacaatcccccaccccgatccctcgccagaccaggacgcttcctcaagcccagccttctacagagagtgtgaacggtacagccctggcctgacccggggaccttcagcctggacacccggcagcttctggagtttgtcagtggaggcagaggggatccggccaggcccctctgtccagaaggagctgccctgaggaccatcttagcggccctgtcctctttttccgcccattctccctcgggtctccccagaggggccggcgggggctggggagggggtaagtttatccatgcagacaccaagggggagcatccagtctttaagagccaagtgggggccccttttccgaagccacttccaggccaaggcagtcgccagggcttcttgtccccaccttctgaaccttcttcaaacagtagtacaagctcccctcagccagcctgcctgcccagcgaggcccccaggttcaaggtgttggcgggggcggagggcaggggaacgggatccttctcccgctgcccaccaacaccaacacacacacacctctaagctgctggccgaagatgtcaccaaggccaaagacacagtattatgaaggtttggaaacccctctcctcacctcccaccgtgaccttgggcaaaccctgggttcggagcccagggcagaggcagctcagagtggaggctctaggcaggtttgacaaaggtcagtaatacggtttcccctggggttgaccagatgttccaaaatatctgcatccacctggagatgcagctaagtgggtccttatgtacacaccacgttcacacacacacagagggaccacgtgttgcacgcatgaccgtgtgggtggcgggcgtttgctgtgaaccatgctcaggccacacagagacacatacttggtttctgggactgagacccaggcctggcaggaccgtgcctacagatactgcaaacgttcctacagcctagaggtgcgtatacacacccaagttacacgcagccaggcattcaggggtgtgtttgccacatggagcatcccttcctggtcttgccaggcacctgcacagagcgtctccagccccatctcctaacgggggctgggggtaagagaaatctaactgcgctcccccaacccctcgccctgccatcttcccctcaagcctgctaagttatcccagggcctgtgcgtggtggaaaaagccagccttggccctgcagcctccacctcgccgctgggggaccaacaggttgcttacagctttgcaccccggcatcagcacaggggtccctgccccaccctccggcagctcagggagtgttttcctgtgaggcctcccccatcagtggaccagagggagaagcccgatgccccatcccgggctttcccgtaacgcacaggacacgtgtgcaattcataggaacggcccagatcgccctcatgagtgccacctggtacaggtaggtggcgctcacgttcctgcccaaatgcagcccatcggggagtcacagtcagtccccccggcccccctcccagtccctgttggctttcggtagctctcgcatgcagttctattaacagccgtctagaagcgatgctttagtggcctaacccagggtcaaatacagctctttctagcaaaatcaggcagctctgccccatcggtaggggcaccgattagtctactaacagccagaggtccatctaggagggtgccgggaggagctgagcccccggaggtgggctcctggtgacgggtgtccaagaagcggtttccttgggagcttctgcctccgtgggcctctcagcccgccccgtgtggccgcccgggtgtggctcagccatgtcccctccccaggtccttcattcacccctcccctccccacagtggaattgttgaagtgtggcgagtctgtgctcgggacaataaagcttgtgacaggtccaggaaaaaaaaaaaaaa

SEQ ID NO: 14981 - DNA, 475 bp, Homo sapiens
accaaacgccagccagccagtcagtgggtcccgcagtcgcccgcaaccggggcgaatcaatgcggccgccaaggtggctttaaccaagagagcagatccagctgagcttagaacaatatttttgaagtatgcaagcattgagaaaaacggtgaatttttcatgtcccccaatgactttgtcactcgatacttgaacatttttggagaaagccagcctaatccaaagactgtggaacttttaagtggagtggtggatcagaccaaagatggattaatatcttttcaagaatttgttgcctttgaatctgtcctgtgtgcccctgatgctttgtttatggtagcctttcagctgtttgacaaagctggcaaaggagaagtaacttttgaggatgttaagcaagtttttggacagaccacaattcatcaacatattccatttaactgggattcagaatttgtgcaactacattttgga

SEQ ID NO: 14982 - DNA, 890 bp, Homo sapiens
ttcatagctcgcggggtacgggcgcgcgtgcgcactccgcagcccgttcaggaccccggcgcgggcagggcgcccacgagctggctggctgcttgcacccacatccttctttctctgggacctggggtcgcggttacttgggctggccggcgaacccttgagtggcctggcggggagcgggcctcgcgcgccctggcagggccctgtggaacgaagagaggcacacagcatggcagaaaaccgagagccccgcggtgctgtggaggctgaactggatccagtggaatacacccttaggaaaaggcttcccagccgcctgccccggagacccaatgacatttatgtcaacatgaagacggactttaaggcccagctggcccgctgccagaagctgctggacggaggggcccggggtcagaacgcgtgctctgagatctacattcacggcttgggcctggccatcaaccgcgccatcaacatcgcgctgcagctgcaggcgggcagcttcgggtccttgcaggtggctgccaatacctccaccgtggagcttgttgatgagctggagccagagaccgacacacgggagccactgactcggatccgcaacaactcagccatccacatccgagtcttcagggtcacacccaagtaattgaaaagacactcctccacttatcccctccgtgatatggctcttcgcatgctgagtactggacctcggaccagagccatgtaagaaaaggcctgttccctggaagcccaaaggactctgcattgagggtgggggtaattgtctcttggtgggcccagttagtgggccttcctgagtgtgtgtatgcggtctgtaactattgccatataaataaaaaatcctgttgcactagtaaaaa

SEQ ID NO: 14983 - DNA, 381 bp, Homo sapiens
ttttttttcctctgaaaatattttattgataaattaagagcattcccctcccacccaactgctataaagtctcctagatgggtcatggacccctgtgggtgtcacatggaggaaagggagtcccattcacacaggggtgggattcctaggcatggcagaggtgggtagggggcctgaggcaggtcccagggtcctctgaggacagcccctctcactcagcaccagagtggggagtggtggtcaggagtggagcaccttggagctttattgctggtgaatgccaaggaaaatgggacccctgccaacctagatttgcagctgagggcatcagcacccagggctccagagaagggtggcactgattcccaatcgatagaagcc

SEQ ID NO: 14984 - DNA, 987 bp, Homo sapiens
agccttttcataatgatagcatttataagcagaaaattagcgctatttctgttcattatttagtttttctttgttgctgacttcctattttctacataggataggtactctgcaataataatttcttcatcttccagagttgagtcaagatagtcttcctcatgctctggaatgtcttccagtatctcattgacggcctctgtctccatgtcttcgtctgttgaggcactagaggttcctgcggagtcagaaggggacgtggctggcggggacaaagagtcttctggcgacagcggcagctcgggaggcaggcttcctccgttgtgagcaagggtctgggcggccagctggacgttgcctctgaacactctcagcgcagcttcggccacgagtgcatcaaaacccatgtacaccaatcggtcaatgttttcctgggaaagaactttcttgacggttgtcggtttcaggattggaatcatttaaccaccacatctgaggattgctgagcagaatctgctgggccgcgtgcgtggagtagcccatccctttcagaaacctgatgttctcgaggcggcgtcttttcttctctttttcctccttccttatttgggccagttcctctctgcggttggtaatatgagtggccgcatgatccacgttcccatcacacgccctcaggccaagccgggcttcctgggcagtaaaccccaactgcaacaaattgtccacttttgatggatcaatatatagctctttaaagagctgacgtgccttgttaagatactcataagcctctacatcatttccactgtgatagtttcggatcccttgaagtaagtagagtcttagaaacagtaccttctctttcccacaatttccttttatgtggaccagtctctgatgattttctccgtaacaatttttaaagcatttctgggccaagtgtaatatatattctgcatcatcaaggcattcaagcggttccag

SEQ ID NO: 14985 - DNA, 3932 bp, Homo sapiens
tccagtaaggagtcggggtcttccccagttttctcagccaggcggcggcggcgactggcaatgtttggcctcaaaagaaacgcggtaatcggactcaacctctactgtgggggggccggcttgggggccggcagcggcggcgccacccgcccgggagggcgacttttggctacggagaaggaggcctcggcccggcgagagatagggggaggggaggccggcgcggtgattggcggaagcgccggcgcaagccccccgtccaccctcacgccagactcccggagggtcgcgcggccgccgcccattggcgccgaggtccccgacgtcaccgcgacccccgcgaggctgcttttcttcgcgcccacccgccgcgcggcgccgcttgaggagatggaagccccggccgctgacgccatcatgtcgcccgaagaggagctggacgggtacgagccggagcctctcgggaagcggccggctgtcctgccgctgctggagttggtcggggaatctggtaataacaccagtacggacgggtcactaccctcgacgccgccgccagcagaggaggaggaggacgagttgtaccggcagtcgctggagattatctctcggtaccttcgggagcaggccaccgcgccaaggacacaaagccaatgggcaggtctggggccacagcaggaaggcgctggagaccttacgacgggttggggatggcgtgcagcgcaaccacgagacggccttccaaggcatgcttcggaaactggacatcataaacgaagacgatgtgaaatcgttgtctcgagtgatgatccatgttttcagcgacggcgtaacaaactggggcaggattgtgactctcatttcttttggtgcctttgtggctaaacacttgaagaccataaaccaagaaagctgcatcgaaccattagcagaaagtatcacagacgttctcgtaaggacaaaacgggactggctagttaaacaaagaggctgggatgggtttgtggagttcttccatgtagaggacctagaaggtggcatcaggaatgtgctgctggcttttgcaggtgttgctggagtaggagctggtttggcatatctaataagatagccttactgtaagtgcaatagttgacttttaaccaaccaccaccaccaccaaaaccagtttatgcagttggactccaagctgtaacttcctagagttgcaccctagcaacctagccagaaaagcaagtggcaagaggattatggctaacaagaataaatacatgggaagagtgctccccattgattgaagagtcactgtctgaaagaagcaaagttcagtttcagcaacaaacaaactttgtttgggaagctatggaggaggacttttagatttagtgaagatggtagggtggaaagacttaatttccttgttgagaacaggaaagtggccagtagccaggcaagtcatagaattgattacccgccgaattcattaatttactgtagtagtgttaagagaagcactaagaatgccagtgacctgtgtaaaagttacaagtaatagaactatgactgtaagcctcagtactgtacaagggaagcttttcctctctctaattagctttcccagtatacttcttagaaagtccaagtgttcaggacttttatacctgttatactttggcttggttccatgattcttactttattagcctagtttatcaccaataatacttgacggaaggctcagtaattagttatgaatatggatatcctcaattcttaagacagcttgtaaatgtatttgtaaaaattgtatatatttttacagaaagtctatttccttgaaacgaaggaagtatcgaatttacattagtttttttcatacccttttgaactttgcaacttccgtaattaggaacctgtttcttacagcttttctatgctaaactttgttctgttcagttctagagtgtatacagaacgaattgatgtgtaactgtatgcagactggttgtagtggaacaaatctgataactatgcaggtttaaattttcttatctgattttggtaagtattccttagataggttttctttgaaaacctgggattgagaggttgatgaatggaaattctttcacttcattatatgcaagttttcaataattaggtctaagtggagttttaaggttactgatgacttacaaataatgggctctgattgggcaatactcatttgagttccttccatttgacctaatttaactggtgaaatttaaagtgaattcatgggctcatctttaaagcttttactaaaagattttcagctgaatggaactcattagctgtgtgcatataaaaagatcacatcaggtggatggagagacatttgatcccttgtttgcttaataaattataaaatgatggcttggaaaagcaggctagtctaaccatggtgctattattaggcttgcttgttacacacacaggtctaagcctagtatgtcaataaagcaaatacttactgttttgtttctattaatgattcccaaaccttgttgcaagtttttgcattggcatctttggatttcagtcttgatgtttgttctatcagacttaaccttttatttcctgtccttccttgaaattgctgattgttctgctccctctacagatatttatatcaattcctacagctttcccctgccatccctgaactctttctagcccttttagattttggcactgtgaaacccctgctggaaacctgagtgaccctccctccccaccaagagtccacagacctttcatctttcacgaacttgatcctgttagcaggtggtaataccatgggtgctgtgacactaacagtcattgagaggtgggaggaagtcccttttccttggactggtatcttttcaactattgttttatcctgtctttgggggcaatgtgtcaaaagtcccctcaggaattttcagaggaaagaacattttatgaggctttctctaaagtttcctttgtataggagtatgctcacttaaatttacagaaagaggtgagctgtgttaaacctcagagtttaaaagctactgataaactgaagaaagtgtctatattggaactagggtcatttgaaagcttcagtctcggaacatgacctttagtctgtggactccatttaaaaataggtatgaataagatgactaagaatgtaatggggaagaactgccctgcctgcccatctcagagccataaggtcatctttgctagagctatttttacctatgtatttatcgttcttgatcataagccgcttatttatatcatgtatctctaaggacctaaaagcactttatgtagtttttaattaatcttaagatctggttacggtaactaaaagcctgtctgccaaatccagtggaaacaagtgcatagatgtgaattggtttttaggggccccacttcccaattcattaggtatgactgtggaaatacagacaaggacttagttgatattttgggcttggggcagtgagggcttaggacaccccaagtggtttgggaaaggaggagggagtggtgggtttataggggaggaggaggcaggtggtctaagtgctgactggctacgtagttcgggcaaatcctccaaaagggaaagggaggatttgcttagaaggatggggctcccagtgactactttttgacttctgtttgtcttacgcttctctcagggaaaaacatgcagtcctctagtgtttcatgtacattctgtggggggtgaacaccttggttctggttaaacagctgtacttttgatagctgtgccaggaagggttaggaccaactacaaattaatgttggttgtcaaatgtagtgtgtttccctaactttctgtttttcctgagaaaaaaaaataaatcttttattcaaataaa

SEQ ID NO: 14986 - DNA, 701 bp, Homo sapiens
  misc_feature (1)...(701): n = a,t,c or g
ggggagtggcactcgcagctgcagcaaatctcaaaataaagaggcaacggcctttctcttcctctccatctccctgatagcacaccttttatttcttttcttcttttttttaagcctcacgaaagattttacttgtagatcaactttcaaaatgtaggaagtcagaatgggtgacatcatcagaaaaatatgtggagctgatcacaagaagtgaagaacccagagcacgaaagcggttgtgactcctgggcccagggaagttgacagcgtctgggcttcagaggaagccaagcgccgtccgagttgtccttgaagtgaggctcgtgctgtacgtacctgttcttctggctcgtaagatcgtgaagtgttgtgaccgactaatttgctcgtttcctggtagagtaacccacagtttggtccacaaggcttgctgcccaatctttgccaacagttgaaccaagactctgaggctgatatgcaatgtcacttacaacattaatcagatactgcannnnnnnnnnnnnnnnnnnnnnnnnnnnnnnnnnnnnnnnnnnnnnnnnnnnnnnnnnnnnnnnnnnnnnnnnnnnnnnnnnnnnnnnnnnnnnnnnnnnnnnnncgagccgcgcccagcctgaactttccatttctctcccaagtctcctattctacatgctgaggatgccagaggtccccttaccaca

SEQ ID NO: 14987 - DNA, 748 bp, Homo sapiens
  misc_feature (1)...(748): n = a,t,c or g
gctgaggtctggctgctgctgcttcttgctccagcaccatggaatgcctgcgcagtttaccctgcctcctgccccgcgcgatgagacttccccggcggacgctgtgtgccctggccttggacgtgacctctgtgggtcctcccgttgctgcctgcggcgccgagccaacctgattggaaggagccgagcgcgcacgtttgcgggcccgaccggctccgcgtggcaggtgaagtgcaccggtttagaacctctgacgtctctcaagccactttagccagtgtagccccagtatttactgtgacaaaatttgacaaacagggaaaccgttacttcttttgaaaggaagaaaactgaattataccaagagttaggtcttcaagccagagatttgagatttcagcatgtaatgagtatcacagtcagaaacaataggattatcatgagaatggagtatttgaaagctgtgataactccagagtgtcttctgatattagattatcgtaatttaaacttaagaggcaatggctgttccgggaactcccttcacagttgtctggagagggtcaactcgttacataccctttaccttttgagtttagagctatagaagcactcctgcaatattgggtcatgttgttatctagatcnacacccctcaggggaaacttagcattttgcagccactgatccctgagaccctggatgccttggtngacccccaacantcctcctgtagacagaagcaact

SEQ ID NO: 14988 - DNA, 1267 bp, Homo sapiens
ttttttttttaagtttcacctatttttattagaaggaatcttgaattcaacatggctttttaaacttctttatttcaaatacacatgaacggtcgtggcacagagaaacagtgatgaaggcacaatcaacaggaccagttactaggttttcaattatagcagcaaatctgaaaataaataatcttcctttaaaaatccaacaagtacctaaaatattactacggataggaatcattcagccaatgaagacattttaaggaaaatatatacaatacatttaagaaaaaaaaaaatctgggtacaacctgggcaaggagattcctcaggcagcttctctaagggatgcttccagaaacatcccctaatggcagacaacctttccaaagtgttcttaatggggacacttcagtttttccattccataaatggaacacattggttacaccttggcggatttctaaatccttcctagaaaacattactgcctacactggaaatgaaaagtatcaaatctactgggcagtgcatcttacagtactgtcgatagcagccatttttaaggctcagagaatatgtcttcaaaagatattttcaccaaatttgagcaaacactgagcatttcaaataaataatggaatgctaatcaggcaaaagtaccaaacccttggttccaggacagtttgctaattactaatacaatgaaacaactaggagcaagtgacacataaaatagcctccctaaagtccaagagtattaaaatattccccacaacaaacaatcttcatttcagaacaattttagcaccacttttttttttccacaattttgactgcaacattaacagtgggaatgttacttcgcgcaaagtgctttcccatcaatgctcagtttactttcttgaatgaggtcttctaaattctcagctcagatgcaccctggagtgccagcttgctccttcctgtttgttcctttgaaaatgatctagttagtgcccaaaccgggtgaaggagtgtttcaggtaagaagaagagtttatatataggtgttgatacagatatgtataacaaaatcctcagtttggttgggtctttaaaaaatacctttttagcactgtatgatcacatgcattaaagaaagtaagcatactagttatcgtagcatataagattcataatttaaaatggcacaactacccaaagtccaacaaaatttttacacactattaaatactggcaacataaccttgggaaaagttccttttctata

SEQ ID NO: 14989 - DNA, 613 bp, Homo sapiens
gttgaaaagtgatgacggttgacgtttgctgatttttgactttgcttgtagctgctccccgaactcgccgtcttcctgtcggcggccggcactgtaggtgagcgcgagaggacggaggaaggaagcctgcagacagacgccttctccatcccaaggcgcgggcaggtgccgggacgctgggcctggcggtgttttcgtcgtgctcagcggtgggaggaggcggaagaaaccagagcctgggagattaacaggaaacttccaagatggaaactttgtctttccccagatataatgtagctgagattgtgattcatattcgcaataagatcttaacaggagctgatggtaaaaacctcaccaagaatgatctttatccaaatccaaagcctgaagtcttgcacatgatctacatgagagccttacaaatagtatatggaattcgactggaacatttttacatgatgccagtgaactctgaagtcatgtatccacatttaatggaaggcttcttaccattcagcaatttagttactcatctggactcatttttgcctatctgccgggtgaatgactttgagactgctgatattctatgtccaagtaagtgagaatt

SEQ ID NO: 14990 - DNA, 1152 bp, Homo sapiens
  misc_feature (1)...(1152): n = a,t,c or g
gagagatgcgcctgaaggaggcgggcacagtggggagaggaggtgggcaggaggaacggccctttgtggcccggtttggatttgacgtggtgacgtgctgtggatacctcccccaggtgaatgactggcaggaggactgggtcgtgttctatgcccggcagcgcattcagccccagatggacatggtggagaaggagtctggggacagggaggccctccagctttggtctgctctgcagttaaagatccctgacctgttccgtgacctggagatcatcccagccttactccacggggacctctggggtggaaacgtagcagaggattcctctgggccggtgatttttgacccagcttctttctacggccactcggaatatgagccggcaatagctggcatgtttgggggctttagcagctccttttactccgcctaccacggcaaaatccccaaggccccaggattcgagaagcgccttcagttgtatcagctctttcactacttgaaccactggaatcattttggatcggggtacagaggatcctccctgaacatcatgaggaatctggtcaagtgagcgggccttactctggaaggaggcctcagaggtttctccacagtcctcttctgggcaaattcttgtttcttcacatgccggactagcttaagaccaatgcagtagcttatttccaagccttgcaaagtatataatatctaagaggaaaggtttttttcatcccagcgttgttccactttgtggggctttgtaggtagacggagccacactacaggcagggtatgagcagagggatgtatggagtgtgggtgactctgagcctcactgctgctgcaaggtggggaaactgtaagtgaacccctgtgggtgacgggggagggtatccggtgcgcaggggaggtggccagcgcccccgggcacttgctgcttcataggtaccttttccactacctcctccctggctctcctgtggcaaggaatgtctcttgaagctgttcacgtttgatggcttctttgggttggccaagactttggggtttaagacatgaaaccatctttacttaaaagggttnttaaaaatgaaccaatttccagaatcaagcgtatttccccttttttttcccggnagaacccc

SEQ ID NO: 14991 - DNA, 670 bp, Homo sapiens
  misc_feature (1)...(670): n = a,t,c or g
gcggcacgagatactctgcatgaaactaaaaccattttacagaaattttgacatacaatgctttgttaaggcatcatggatgtggcttctatttttaaatggaaatgtttaatcaatagctgagaaagccattgagaattacttctcttctttcatcctcttgcctactattgaccatttcattattactaaaactttcattgaaaggtaggtagagcacacaaaaaagaggaaattcaaatggtccagttgtgaactctgaatagtttccattatccagatcacagctacaaggaccaggcctttgatactctgagcctcgatagctctgatagcatggagaccagcatctctgcttgctcaccagacaacatctcttagtgccagcacttcaaatattgctagaatagaagaaatggagagacttttgaagcaggctcatgcagaaaagacgcggctgctcgaatccagggaacgggaaatggaagccaaaaaacgagccctggaagaagaaaaacgacgccgggaaatcctggaaaaacgattacaggaagaaactancagaggcagaagttaatagaaaaggaagtaaaaataagggagagacaaagggcacaggctcgtcctttgacacgctacctgcctgtccggaaggaagactttgatttgc

SEQ ID NO: 14992 - DNA, 602 bp, Homo sapiens
tgtatgtgtgcctgtgtgctctttcaacaaatttattcaattcacagtgatatctgttggacagagtcagcaatcctaccagacaaaactcatacacacattgattccagatgagaaacaacagtcccccaaggagcttgagaaatcacctagggcagccaagctggggaagggaagtggctgtgcattgctgtgtgtcctttaaggctctttggtcctggttgatttcctcttagaaggttccaaataaaacttccctttcctattcagtacacaccagtctttctttggtgtttaacctaatgggctgaggaagggaggcagccaggaaattatacccattaaagtgtgtggttaatgcctatatatatcatttttactcacagttagtggacttatcttttaaaacagaggtatgtggcagtggggtaagagaacttcccttattatagagaagattccaagaataggttcagacatgatttgaagaaccatgtaactctgctgccttgcacggtcccctttttagcactaataactcctaagtgtctgataatttcaaggttagcagcactcccaaagaagctgtccgggctgggtgt

SEQ ID NO: 14993 - DNA, 1497 bp, Homo sapiens
gggacctgcgaaggaaaacagggaggaagtgagcggtttgatcagcctgctatcacggtgttctggctctcttatttagccaggcgcttaagggacagatacatcacatcctaagtttgggaaaggcctttgacccatgtcatctgagcgtctcctccagtagctctgaaagctgtggacaccaatggccaggattccttctcccctggtttttgaggatccctgggtcttctgagactggccaggagagggatggtggggccagtggttgtgtgaaagcaggaggggcagccctcctggacaagtgtgatccccctataaacggctctcaggaggttagtgagtaggagattctgccttgttctgatgagcctgtgcaggggctccaggggagcatgctgtccagggggcacagaagggtggtgagtgtgatcaaatctagtctcactcccactttttagtctcactcctacttttgtccaccacccctgcctcctggatcttctcccactttttttttcagctttaggacctggggagatcctgtgagtcaaggcagacacccaatcctgcccccacactcggggtcctccaagaggttggggggcagagtcccagagcagccctttaccccagggtccaggccctggaatcctgagactcgcgtttccttggccagtggtaacacaggacgtgtgtgcgcatgtgcaagtgtggatgtatgtgtgtgcgtgtgttttgctcatttctttagggaacttgggagtcggggttggaggtgctgggcaatggaacttcaaattcaatgtcgcccagcagtgaggggagtcgggaggtgaggcctgtagcaaaccaattggtggagtctcagcgataccccagggtgagaagtggtttcacccagaggggcagggtgggggcctcgggcagatctgtccctcttggcccctctgtcctcaaatgtccaaaatgttggaggacctctgttcatatcccacgcctgggctcttgccagcagtggagttactgtagagggatgtcccaagcttgttttccaatcagtgttaaagctgtttgaaactctcctgtgtctgtgttttgtttgtgcgtgtgtgtgagagcacatcagtgtgtgcaggctgtgtttccccatttctctcctcccttcagacccatcattggagaacaaatgtaagaaatcccttcccaccaccctccctgcctcccaggccctctgcgggggaaacaagatcacccagcatccttccccaccccagctgtgtatttgtatagatggaaatatactttatattttgtatcatcgtgcctataggccgctgccaccgtgtataaatcctggtgtctgctccttatcctggacatgaatgtattgtacactgacgcgtccccactcctgtacagctgctttgtttctttggcaatgcattgtatggctttataaatgataaagttaaagaaaactctgaaaaaaaaaaa

SEQ ID NO: 14994 - DNA, 1501 bp, Homo sapiens
  misc_feature (1)...(1501): n = a,t,c or g
agctttacataggactaggatcacggattaattgtaatatattctcatatgattattctggatatggtgccagttccgggaaacccacagagaagaacctctatgcagacattgaagctgcttggcttgctcttaggacaagatatggcattcgccctgaaaatgtgattatatatggccaaagtatagggacagtaccgtctgtggatcttgctgctcgatatgagagtgctgctgttattcttcattctcctctgacttcgggaatgcgagttgcctttcctgataccaaggaagacctactgttttgatgcattcccaaacattgacaaaatctctaagataacctctccagtattaataattcatggggactgaaggatgaagtcattggacttttcacatgggcctcgcattgtttgaacgttggcccaaagacctgtgggagcctctcnggggttgaagggagccagggtcacaatngatgtgggaacttttatggnacagtatcttggaaagggttgaaacagtttgtgtcacaggaactgggtaaatttgtaaaatattctgtaaatttgctactgggttttcctttcttgctgaactgcactctttggtaaataacataaaacctgaaggttttgtttgcaaatcatgtcagttgccttcataaatgtacaggtaatgatttgttaacagacttaatgaaggttttaattaccagaactaaaaactggaaataacagtaccgtgcagtcaggctgtgtaatttatattttttctgtgaatttttttttaacatcaagatgagtactgtatgagattttaattctataaaatcaaatgctgtaaaagtattgccaaatgcttttgcatactagaaacaaatttataaatatttttaaaacatctcaatatattaaatcttatcctggaatacaactgtaatattttgaaaaaagctatgtatctaaagcaatttaagtactcataatggaatgaactgtaaaagagatttaaaaccatgcaagtttcactagaattaacctaaaccctgttgtacaggggatagaggtttaaagttattttattgtaaaatacattgaattttctgtatactctgattacatacatttatcctttaaaaaagatgtaaatcttaatttttatgccatctattaatttaccaatgagttaccttgtaaatgagaagtcatgatagcactgaattttaactagttttgacttctaagtttggtactgtgaggcaagtacttaaaattttcatgctggttacttaaaaggcatttagagatttcaagaatgattttgtatacgatgttttaaattttgactgatctcatagtcttcatagaattgcagtagtcttcattgtatgaaatcccgaaagtccatgagttgatcttaaagaccactaacagactggctatcagatcccttttcactttggctatttttttcattttttgangatggagtc

SEQ ID NO: 14995 - DNA, 1129 bp, Homo sapiens
tttttttttttttttttttgggagaagtgtataaattattatgttgataagcaagataagtgccaaagggtagataagagtgaaagcattgggaagcctggcagagtgcagtcagcaggtcagttcctggcggttcattgagcagcttggcccaaagatgtaagtgaagtccctcctggtggagggatgagagcagctccagttactcggccttcatgacacaggaagttgaaggtggcacaggcattgggcgtgtcctgcacttccacagcaatgccccgctgcctcatggcttgaagcacctgggactgcagcctctcggtccggtctccagtccccaccaccacgatctctatccggggctccagcaaccagaagagggaaaagctgtcttcggtgatgtcctggtgggatcccacgttccactgcaccaccgagtgcgggagcagagcgcaggggccgagcacgcggtttccgtttatcatgaagccgcggctgttgtagctgtcgatgtacattgcctgagcggcctcgcgttgcagcagagagatgcgcgtccgctgatacagctcgtcatccgccggcgagagccgatgccctcgccgcggggcccagggaagctcaacgggcggacagcgcagcgagggtcgcgctcggtacaagctacgtagcggcgagagccggtggccatggctgaccaacgcgcggcgaagtcgtcaccggcgccgttagtccccgggttgggagggccctgcggagcctgacccagcgtggctgcagcgccccctgcgtccggagggcaccgcacagctcgaccggcccagcaggcgagtgtcctcagtcttaggaggccgagttccccgacctccggcgcagctccagtgtcagcacctgccgcgcatccccgccccgggcccttgcccatagtcccgggggagtggaacacctggcagcgtggccaccctcagggcgttgcctgggccgcagccgcggcctggcccccgggctctcagctattaagccgcgctcccggggcgggcgaccgcccacctggtcgcgtcccgaacacctggccagacggtgggtgccagacttctagcccctaattccagcctttggggcttcgggc

SEQ ID NO: 14996 - DNA, 844 bp, Homo sapiens
gcggccgcgcccgttgcacgagcagtccctggggtctgtagtggcctctggagagcccttctccccaggccaggcgggaaggcccccgctccggcctggttgaagtaggggaacgggtcccaacgcggggccgactcccttgaccctctgacttgctggcttcccttgttttacagtcctcggcctggcggaagttttgcaggttgtgaagacccctagtctttcattctctccttgtcacagccttgtagggcgtgaaggggtcattgccccatttagggatgcgcacctcctgatttcccgtccactgctctgcgccctgaagtggctgaaaagtgctcttaaaagggatgggaatcccggtcgccctcagctggtgcgctctccactgggtcgtggggctcctcatttcatcctaagtgagcccctccatcacctgtgtgttaaggaggcatttctttcccatcagtaaacacatttcgcctcttcggccgaggtaggaatataaaaggcccctggcctacccaagttttggtccagcaggggagccagggccgggaaagggccaagcccgccacactcggcttgtggggcggtgtggtgccgtgatgcagctgtgggtttggccaccgacagacctgggctcaaattggacctgctgcttttgactgtgagaccttccataagctccttttgctccaagcctcagttttctcctctgtgaaacagagaaaatcgttcctatcagagttcttatgaggatgaaatgggattttggatgtaaaatgcttccatccagtacctgctaaacaaaatgcttactaatggccgggcgcgcgtgtca

SEQ ID NO: 14997 - DNA, 733 bp, Homo sapiens
gaagccggaggcagctttaaccagcccccagggatgattgtgaaggaggcccctccccttgtgaggagggggcactcctctccagcccctggtaccacagtcctcacgatggtgcagtgatttctagccaggcgtcaagatgcgctgctttccctctcctgcctcatcccttgttggcagctccagttcaggccgtggagggacgtgatgctgggctgtgtttactaaacccacgggttttcagcctcttaagcccagctccgatctccaattagttgagagcgctgggttgactaacctctggtatctgagcacagacagagggtgctgtgggtctgctgggtggcagaaatggttccttccggcttggcgttctctcctggccactcttcctgctgcctctgactactcagccttgttttcggtgtgtaggccccagctgcccactggaactgccggctaatgcttgctctcccaagatctttaactcctcctggctgcacctgggtagggatggtggcatcgatgcccctctgtctgctgaaggacctgttgctgcttctgtcttttcacccctccttggctgatgaccccagagccctctgatgatggcattctcctggcaagagaaaaagacttaactagacttctgaacttgaacagtttcaggttatattttaattttttttttttttgtacaggttctgattctaatacatttcaacatgcaaaa

SEQ ID NO: 14998 - DNA, 340 bp, Homo sapiens
ggaatgcatatggattcaagatatctagcctaaacaaaattgctgacacaaaatccagcatcgacaaaaacattacccttttgcactatctcatcactattgtggaaaataagtaccccagtgttctcaatctaaatgaagaattgcgagatattcctcaagctgcgaaagtaaacatgactgagctggacaaagaaataagtaccttgagaagtggcttgaaagcagtagagacagagctggaatatcagaagtctcagcccccacagcccggagataagtttgtgtctgttgtcaccagttcatcacagtagccagcttcagcttctctgatgttgaa

SEQ ID NO: 14999 - DNA, 3167 bp, Homo sapiens
tccctcagcgtccggccgaggcgcggtgtatgctgagccgctgccgcagccggtgctccacgtcctgggccttagcttcctgctgcagacccgccggccgattctcctctgctctccacgtctcatgaagccgctggtcgtgttcgtcctcggcggccccggcgccggcaaggggacccagtgcgcccgcatcgtcgagaaatatggctacacacacctttctgcaggagagctgcttcgtgatgaaaggaagaacccagattcacagtatggtgaacttattgaaaagtacattaaagaaggaaagattgtaccagttgagataaccatcagtttattaaagagggaaatggatcagacaatggctgccaatgctcagaagaataaattcttgattgatgggtttccaagaaatcaagacaaccttcaaggatggaacaagaccatggatgggaaggcagatgtatctttcgttctcttttttgactgtaataatgagatttgtattgaacgatgtcttgagaggggaaagagtagtggtaggagtgatgacaacagagagagcttggaaaagagaattcagacctaccttcagtcaacaaagccaattattgacttatatgaagaaatggggaaagtcaagaaaatagatgcttctaaatctgttgatgaagtttttgatgaagttgtgcagatttttgacaaggaaggctaattctaaacctgaaagcatccttgaaatcatgcttgaatattgctttgatagctgctatcatgacccctttttaaggcaattctaatctttcataactacatctcaattagtggctggaaagtacatggtaaaacaaagtaaatttttttatgttcttttttttggtcacaggagtagacagtgaattcaggtttaacttcaccttagttatggtgctcaccaaacgaagggtatcagctatttttttttaaattcaaaaagaatatcccttttatagtttgtgccttctgtgagcaaaactttttagtacgcgtatatatccctctagtaatcacaacattttaggatttagggatacccgcttcctctttttcttgcaagttttaaatttccaaccttaagtgaatttgtggaccaaatttcaaaggaactttttgtgtagtcagttcttgcacaatgtgtttggtaaacaaactcaaaatggattcttaggagcattttagtgtttattaaataactgaccatttgctgtagaaagatgagaaaacttaagctttgttttactacaacttgtacaaagttgtatgacagggcatattctttgcttccaagatttgggttgggggcactaggggttcagagcctggcagaattgtcagctttagtctgacataatctaagggtatggggcaaggatcacatctaatgcttgtgttccttatactctattatatagtgttattcatgattcagctgatcttaacaaaattcgtagcagtggaaccttgaaatgcatgtggctagatttatgctaaaatgattctcagttagcattttagtaacacttcaaaggtttttttttgtttgttttctagacttaataaaagcttaggattaattagaagaagcaatctagttaaatttcccatttgtattttattttcttgaatacttttttcatagttatttgtttaaaaagatttaaaaatcattgcactttggtcagaaaaataataaatatatcttataaatgtttgattcccttccttgctatttttattcagtagatttttgtttggcatcatgttgaagcaccgaaagataaatgatttttaaaaggctatagagtccaaaggaatattcttttacaccaattcttcctttaaaaatctctgaggaatttgttttcgccttacttttttttcttctgtcacaatgctaagtggtatccgaggttcttaatatgagatttaaaatcttaaaatgtttcttattttcagcacttacatcatttggtacacagggtcaaatagggcaaataattttgtctttgtataatagatttgatatttaaagtcactggaaataggacaagttaatggatgtttttatattttaatagaatcatttatttctatgtgttatgaaattcacttaatgataaatttttcaacatacttgccattagaaaacaaagtattgctaagtactataacatattggccactaaaattcatattgagattatcttggtttcttggaagagataggaatgagttcttatctagtgttgcaggccagcaaatacagaggtggtttaatcaaacagctctagtatgaagcaagagtaaagactaaggtttcgagagcattcctactcacataagtgaagaaatctgtcagataggaatctaaatatttatagtgagattgtgaaagcaaccttaaagttttgaagaagactgatgagactaggtgctttgcttcctttcatcaggtatctttctgtggcatttgagaacagaaaccaagaaacatggtaattactaaattatgaggctttgcccttttgtttgcttttaagtagaaaaacatgttggcaacattgagttttggagttgattgagataatatgacttaactagttttgtcattccatttgttaaagatacagtcaccaagaatgttttgagttttttgaaagaccccaatttaagccttgcttatttttaaattatttccattcagtgatgttggatgtatatcaattatttagtaaataatctcaataaatttttagcaaaggccacagcacaaaatttattgagattatttactaaataattgatatacatccaacatcactgaatggagataatttaaaaataagcaaagcttaaattgtgggtctttcaagaaactcaaaacattcgttggtgactgtatctttaacaaatgggaatgaccaggactatttagcgtcatatgtgctttgtgtgcgtgagagcatcgttgttgtcatggtttttttagttgtttggtaggtaagtgtgtggggttgctgccggtgagtgtgtggcgtgtgtccttggggttggtgtgtgtcgattccaagtggcggggtaggttgtcgggggcggcggtttattgttaggtggtggacctgggccgg

SEQ ID NO: 15000 - DNA, 95 bp, Homo sapiens
gtcagatgtcatagattgttatttctcgattgttgatgtcatagattgtcatttctcgattgttgcttcctcaatactgtgtctaactgagcaaa

SEQ ID NO: 15001 - DNA, 4100 bp, Homo sapiens
tgctagctctccaaactaggacttgctcagcagaggccgccagcccggagctggatccagagcccggccttggggaccccagctcccacctgcgccctgccttccagatcagccaaccgcctgccatggagactttctttaggagacatttccgggggaaggtgccaggccctggagaggggcagcggcggcccagcagcgtggggctgcccacaggcaaggcccggcgtcgctcccccgctgggcaggcctcctcctcactggcacagcggcgccgctccagcgcccagctccagggctgcctcctgagttgcggggtgagggcccagggttccagccgccggcgctccagcactgtgcccccttcctgcaacccccgcttcatcgtggataaggtgctcactccacagcctaccaccgtgggggcccagcttctgggtgcacccctgctgttgaccgggcttgtgggcatgaatgaggaggagggtgtccaggaggatgtggtagccgaggcatcgagcgccatccagccaggcaccaagacaccagggccacccccacctcggggcgcccagccgctgttgcccctaccccgatacgtgcgccgagcctcctcccactgctgccccgcggatgccgtatatgaccacgctctctggggcctgcacggttactatcggcgcctcagccagcggcggccctcaggccagcaccctggccctgggggccgaagagcctcaggcaccaccgccggcaccatgctgcccacccgtgtgcgcccactgtcccgcaggcgccaggtagccctacggcgcaaggcggccggaccccaggcctggagcgccctgctcgcgaaagccatcaccaagtcgggcctccagcacctggccccccctccgcccacccctggggccccgtgcagcgagtcagagcggcagatccggagtacagtggactggagcgagtcagcgacatatggggagcacatctggttcgagaccaacgtgtccggggacttctgctacgttggggagcagtactgtgtagccaggatgctgaagtcagtgtctcgaagaaagtgcgcagcctgcaagattgtggtgcacacgccctgcatcgagcagctggagaagataaatttccgctgtaagccgtccttccgtgaatcaggctccaggaatgtccgcgagccaacctttgtacggcaccactgggtacacagacgacgccaggacggcaagtgtcggcactgtgggaagggattccagcagaagttcaccttccacagcaaggagattgtggccatcagctgctcgtggtgcaagcaggcataccacagcaaggtgtcctgcttcatgctgcagcagatcgaggagccgtgctcgctgggggtccacgcagccgtggtcatcccgcccacctggatcctccgcgcccggaggccccagaatactctgaaagcaagcaagaagaagaagagggcatccttcaagaggaagtccagcaagaaagggcctgaggagggccgctggagacccttcatcatcaggcccaccccctccccgctcatgaagcccctgctggtgtttgtgaaccccaagagtgggggcaaccagggtgcaaagatcatccagtctttcctctggtatctcaatccccgacaagtcttcgacctgagccagggagggcccaaggaggcgctggagatgtaccgcaaagtgcacaacctgcggatcctggcgtgcgggggcgacggcacggtgggctggatcctctccaccctggaccagctacgcctgaagccgccaccccctgttgccatcctgcccctgggtactggcaacgacttggcccgaaccctcaactggggtgggggctacacagatgagcctgtgtccaagatcctctcccacgtggaggaggggaacgtggtacagctggaccgctgggacctccacgctgagcccaaccccgaggcagggcctgaggaccgagatgaaggcgccaccgaccggttgcccctggatgtcttcaacaactacttcagcctgggctttgacgcccacgtcaccctggagttccacgagtctcgagaggccaacccagagaaattcaacagccgctttcggaataagatgttctacgccgggacagctttctctgacttcctgatgggcagctccaaggacctggccaagcacatccgagtggtgtgtgatggaatggacttgactcccaagatccaggacctgaaaccccagtgtgttgttttcctgaacatccccaggtactgtgcgggcaccatgccctggggccaccctgggggagcaccacgactttgagccccagcggcatgacgacggctacctcgaggtcattggcttcaccatgacgtcgttggccgcgctgcaggtgggcggacacggcgagcggctgacgcagtgtcgcgaggtggtgctcaccacatccaaggccatcccggtgcaggtggatggcgagccctgcaagcttgcagcctcacgcatccgcatcgccctgcgcaaccaggccaccatggtgcagaaggccaagcggcggagcgccgcccccctgcacagcgaccagcagccggtgccagagcagttgcgcatccaggtgagtcgcgtcagcatgcacgactatgaggccctgcactacgacaaggagcagctcaaggaggcctctgtgccgctgggcactgtggtggtcccaggagacagtgacctagagctctgccgtgcccacattgagagactccagcaggagcccgatggtgctggagccaagtccccgacatgccagaaactgtcccccaagtggtgcttcctggacgccaccactgccagccgcttctacaggatcgaccgagcccaggagcacctcaactatgtgactgagatcgcacaggatgagatttatatcctggaccctgagctgctgggggcatcggcccggcctgacctcccaacccccacttcccctctccccacctcaccctgctcacccacgccccggtcactgcaaggggatgctgcaccccctcaaggtgaagagctgattgaggctgccaagaggaacgacttctgtaagctccaggagctgcaccgagctgggggcgacctcatgcaccgagacgagcagagtcgcacgctcctgcaccacgcagtcagcactggcagcaaggatgtggtccgctacctgctggaccacgcccccccagagatccttgatgcggtggaggaaaacggggagacctgtttgcaccaagcagcggccctgggccagcgcaccatctgccactacatcgtggaggccggggcctcgctcatgaagacagaccagcagggcgacactccccggcagcgggctgagaaggctcaggacaccgagctggccgcctacctggagaaccggcagcactaccagatgatccagcgggaggaccaggagacggctgtgtagcgggccgcccacgggcagcaggagggacaatgcggccaggggacgagcgccttccttgcccacctcactgccacattccagtgggacggccacggggggacctaggccccagggaaagagccccatgccgccccctaaggagccgcccagacctagggctggactcaggagctgggggggcctcacctgttcccctgaggaccccgccggacccggaggctcacagggaacaagacacggctgggttggatatgcctttgccggggttctggggcagggcgctccctggccgcagcagatgccctcccaggagtggaggggctggagagggggaggccttcgggaagaggcttcctgggccccctggtcttcggccgggtccccagcccccgctcctgccccaccccacctcctccgggcttcctcccggaaactcagcgcctgctgcacttgcctgccctgccttgcttggcacccgctccggcgaccctccccgctcccctgtcatttcatcgcggactgtgcggcctgggggtggggggcgggactctcacggtgacatgtttacagctgggtgtgactcagtaaagtggatttttttttcttaaaaaaaaaaaaaa

SEQ ID NO: 15002 - DNA, 503 bp, Homo sapiens
  misc_feature (1)...(503): n = a,t,c or g
cgcgggttttgcccttggtttactgaggggggtcttggttgctgctgaagccccccaccccttctaaagtgcaatgcaaaagggacatcatgtatatgcagcgtttgtttggaattttctttgcttttgttttctttgcggttgttctgtgtgcatggattccacacctctgccgtaggtagatccgtcagcgggcattattaccgtgtcttgtaaagggtcggttttgttatgcaacacgcagaatgctgtttttagccttgttttaccagagttgttttttttttcagttatttcttcaagggaaactaaatgatttagttgggagcaaagctttaagtgtgttgggcgtgcttctgtgtgggctgtcctgtgtcgccaggtcgaagatcacagtgaggtagagggccctgcccccatccccaggggccgccacttngctccgtttgctttgagtttttagaccccagaggagatgagctttttccaagctgtgtctgggc

SEQ ID NO: 15003 - DNA, 638 bp, Homo sapiens
gcaatacagtgtgattataatgccatcattgggatccatgctgtgaaagcatgttaaaaggaggcccgttgggtatatgtagtaaccgcttattacgagtaaaaacagacttgtgttatatgaaataaccatgttgtaaagagttctgttgtggtggggcatccgtggatcgttaaagactgagggcttcaaaatagttgtttgaagtggtaatagaatgtcaaattgatgccttaacccacccattttagaggatacataggccagatctacaattaataacttttaataggagaatttgagggagttgaagtgaaacaggaactttcataggctacaggttacccaagaaaaactattaccagtaaatccataaaaaaggatctgtgctacccttacaagttgagcagtatagtcagtcggatcctacttcgccagtttaaaaagccgtagtgacaggaagaggcagtgtggtgtgttggtgaagggcctggacactgaggccgggctgtctagttgaagtcctggccccattgctcaccagttttgaccttgagcaagttctttaactctgtgcctcaagtaagtgagagtaataatagtagcccaccttatggcattgtagagaggcttaaatg

SEQ ID NO: 15004 - DNA, 535 bp, Homo sapiens
tttgagaaagagggtttatttagcacatctcagagttacagctcttacagaaagacacttgtctaggcacagcaggtgtgttcaaatttatatgaatgactacttgagttcagacgggattacgtttttcttgcttttgacttatattatttcacacatcttgaattttagagtctaggcttacacatcgtccagtttcttggcatggcttgcttaatctgagctttcaaacttcagattaacctggactgaggctaagagtttataatgaaacccaaaactaaggcaagcttcccctgggtttcagtttaattgttgaagtcttcataacttcctggggcatagggaacatgtatctgggcacattgtaggattaggtggatttttttgaaaaaggccaaatctgccatatatacaatagttgactccttgggcatagctattatgcagttgcaaaactggaaatcttcaagaatcctttcatatttcctctttattggtgctaattttccttctgcaccctagtccttagttt

SEQ ID NO: 15005 - DNA, 324 bp, Homo sapiens
cagccttttgcttggttggaatatgattttctgttgcgtgttccttgtagccatagatgtgattatgtccacaccgggctgccttaatctgtcctgcttggagagtgacttgtaagatgctgaattattcatgataatacagtgaatgttctgggtccatgtactcagataaacatgaagaaaataagcaaagaaaaatggagactgggaaagcaaagctgttttcatcctataattgaagtagtgtggagcattaacttgtggatgattcagagttaaaagataaaaagacaccagagttctcgctgaaaaaaaaaaaaaaaa

SEQ ID NO: 15006 - DNA, 546 bp, Homo sapiens
caggcactgtcctccctccagctgctcaacgttctcttcaggacctgcaaacatgagaagctgaccttggacctgacggtgctcctgggtgtgctgcaggggcaacagcagagcctacagcagggggcacactccaccggctccagccgcctgcacgacctctactggcaggccatgaaaaccctgggagtccagcgccccaagttggagaagaaggatgccaaggagatccccagtgccacccagagccccatcagtaagaagcggaagaaaaagggattcttgccagagacgaagaagcgcaagaaacgcaagtcagaggatggcacgccagcggaggatggcacacctgcagccaccggcgggagccagccccccagcttgggcaggaagaagaggaacaggacaaaggctaaggtcccagcccaggcaaacgggacgccaaccaccaagagtccagcccctggcgcccccacccggagccccagcacccctgccaaatccccaaaactgcagaagaaaaaccagaagccgtcccaggtgaat

SEQ ID NO: 15007 - DNA, 5401 bp, Homo sapiens
agaattttcaaatcctgaaactcagaatctggatgccatggaacaagttggtctggaatccttacagtttgactatcctggtaatcaggtaccaatggactcttcaggagctactgtaggcctttttgactacaattcccagcagcagctctttcagaggactaatgcactaacagttcaacagttaactgcagctcaacagcagcaatatgcattagcagcagctcagcagccacatatagctggtgtattctcagcaggccttgctccagctgcatttgtgccaaatccatacattattagtgctgctcctccagggaccgatccgtatactgcagcaggattggctgcagcagctacattagcaggtccagcagtggttccacctcagtattacggcgttccatggggggtgtatccagccaacttatttcagcagcaagctgcagctgcggcaaataacacagccagtcagcaagcagcatcacaagctcagcctggacagcaacaggttctccgtgctggagcaggtcagcgtcctcttactcccaatcagggtcagcaagggcagcaagcagaatcacttgcggcagctgcagcagcaaatccaacattggcttttggtcagggtcttgctactggcatgccaggctatcaagtactagctccaactgcctattatgatcagactggtgccttagtggttggccctggagcaaggactggccttggagctccagttcggttaatggctccaacacctgttttaattagttcagcagcagcacaagctgcagcagcagcagcagctggaggaactgcaagtagccttacaggcagcacaaatggtctgtttcggccaattggcactcagccaccacagcagcagcaacagcagccaagcactaatctgcaatctaattcattttatggaagcagttctttgactaatagctcccagagtagttctttattttctcatggacctggtcaacctggaagtacatctcttggctttggaagtggtaactctttgggtgctgctataggctcagccctcagtggatttggttcatcagttggcagttctgcaagtagtagtgccacaaggagagagtctctatctactagctctgacttgtacaaaagatctagtagcagcctagcacccatagggcaaccattttacaatagtctgggattttcctcctctccaagtccaataggcatgcctctgccaagccaaactccaggacattcacttacgccaccgccatcactttcatcacatggatcctcatccagtttgcatttaggaggactgacaaatggtagtggtcgatatatctctgcagcacctggagcagaagcaaaatatcgaagtgcttcaagcacttccagtctatttagctccagcagccagctctttcctccttcccggcttcggtataataggtctgatattatgccttctggccgcagtagattattggaagatttcagaaacaaccgcttcccaaaccttcagcttagagacttgattggacatatagttgagttttctcaagaccagcatggttctagattcatacagcaaaaactagagagagctactccagctgagcgacagatggtatttaatgaaattctgcaagcagcctatcaattaatgactgatgtttttggcaactatgttatacagaagttttttgagtttgggagtctggatcaaaaattagccctggctactcgtattcgtggtcatgttctacccttagccttgcagatgtatggctgccgcgttattcagaaagcattagaatctatttcttctgaccagcagagtgaaatggtaaaggagctggatggtcatgtgctcaaatgtgtgaaagatcagaatggaaaccatgttgtacaaaaatgtatcgaatgtgttcagccacagtcactacagttcatcattgatgctttcaagggacaagtatttgtgctttcaactcatccttatggctgcagagtaattcagcgcatcctagagcattgcactgcagaacagaccttacctatcttagaagaactccaccaacatacagagcagttggtacaggatcagtatggcaattatgttattcagcatgtactggaacacggtcgacctgaagacaagagcaaaattgtttccgaaatcaggggaaaggttttagccctgagtcaacacaaatttgccagcaatgtagtagaaaagtgtgttactcatgcctcccgtgctgagagagctttactgattgacgaggtttgctgccagaatgatggtcctcacagtgccttatacaccatgatgaaggaccagtatgccaattacgtggttcaaaagatgattgatatggctgaacctgctcagagaaagataatcatgcacaagattcgacctcacattactactttgcgcaaatacacatacgggaagcatatactggccaagttggaaaagtattatttgaagaatagcccggacctaggacctattggaggaccaccaaatggaatgctgtaaattacaggagcaagagaaagaagataatttaaccatgtgaaaagaatttttttgtgcgtgaattatcaaaacacaactcaactatgaatcttcaatttttttttaaagcaaaactatttattgactttattcatccatttgtaaattttttaaggttcttgtgtatatttggggggtgggggatgaattataaattatattcagccctgagtggagacctatcagattggattgctggcaaagcacagaatgcctgtatatgatgtaactgtatcaaaaataaaaagctgtcacatattttgtaaatttttaccttgtaaagtcacaaaaatagtttttaaaggaaaaagtacagtattcttttaataaactggctcacagtctggtaggtctacaaccccatagcacaacaggtttatagagatgtatatagaattatagtccttatttttttcctttgcgtgaaaccttttataacagattaacaatcaactgcataaatattattaatattttaaaaagagttaagttgtattttgataattcacaaactatcatgcaaataacgagtaagtagacaagaataaagtggtttgagatgaaaagaacctaacattatttacagtagatgtggttttaatacaattactgccctaaaatgtctctggcaatgtacagaaatattgtatatacttacatatgtaattgttgtaagagttaaatacaaaatcatggtgacacttccaattaagtgcactaaatgaaaagttaagtcacttattaacttttcagtttggtttgcaatgagaaagagtggaaatttgtattttgttttgcttatagaattacagacatgttgaggaagtgttgagctttattttgctttttcatagaggcagaaagtaggaaccagatagagatgaaaaggggccactgaaaagtgaatttgatagctcagcatttaagcatgattacatattcagatagctctttttgctttctataaatatatgcattgtgtgtgtagtaatagatgtaagtttacactttgaaaggaaatcttgtttcaatgtttattataaaagccttgctaatttagtagtgatgctttccttggttgtacaggtgtacatttgtaaaccttcatgctgtaaatggaatttgttttatctctttgggatacatttgcattttagtgtacatttacgtccctgccctctttgacctggcaatatagtgttgtataatgtaaatttatttctccaaatcgagagtgattttttaaaaattttttatctttatatggtttcagaagtatgaaccagctttctttttattattgtgagatcattttgttttataacatagttgttgactgttaatatggacctgctagaatttggatcactttcaattgaagtcagggtattgtgcataatagaaagtattggactgagatatttggttaccatggaggccaatgcttttttcatcttattaaatgtgatgtgacttttttctttgtacagaagagtactgtatttttgaatagcctactcccaagtaagagcaaatctgtatgataacattttttcctctggacataagacataacagtaacacgatgtacatttacaagcggccttatgtacatttcccaacaatctttttaaggcaaaattgtgaccatatgtgtataattaaaatcgtttttaatcctttgcctatgaaaatattttggaaaaatacttgctgtgtatattcagtttctgaaagataaagaaagtgctttgtattttgttgaagtcagtattttgtataaacatttatgttgacccacttatgttcagtgctgaaaactaaaatgaacatgctattctgtcagctgaatatggaagagatctttttttactagagatctgcagaagaaacgcaatcttctgagcacaatatggaatctaaaggttttatcacttagttgttcatattatgaacctaaaaataatggcataaagtttggggatgccaggcatactttttcatgtttggtgttgagttattttacttttctaacccaacattccttggtgagaccattaaatccaaacacttgtcaccgttccttctcatagtcactctgggtcatcagcatgtcccagtcactgcaggcaacgccttgtgtttgtttcatttttttaaaacccacacaaagccgctgtctcactttttcctactttaccaacctcagagtatttcgggcccgtatcgaacttttgttctcagtatcagcccatggtttcaggatcaaagctgtcatgttggagattggtaatggctttcctgtctttgtacagttgaattcctagtcttccttcatccttgccctctgttggcacaggcattatctctgcaattttagaaaatgacaagtagagaatactacattgagaaactaaaccctcttcttggggtcctgatactcattcccatttgtcccagtgctgacaacccaatcttcccaatactttcaggcctgctctacaaaagtacctgttcttgtagaaattttacagtctgccattttgggtgcccaccccaatttttaccttttagtaagttggcatgaaattttggtaaaatctgaaaatcacatttcagaataaaacaattgggcaaaactacctaggctttactcttgagtgtctccttttgatagggattgtttctggaccagtttgtctaagtcctggctcttattggttcatatgaaataatgttaacttcacttctttgtatattatgtataaattagaaaatgaaaaatgtgtgaataacattgtatgaaat

SEQ ID NO: 15008 - DNA, 1526 bp, Homo sapiens
acaacgctgacctcttccaggccatcacagatcattacatccaggtcctcaactgtaagcagaactgtgtcacggagcttgcttcccacccaagtcgagagaagccctttgaagacttcctcccatcgcattataattatctgcagtttgcctactataacattgggaattatacacaggctgttgaatgtgccaagacctatcttctcttcttccccaatgacgaggtgatgaaccaaaatttggcctattatgcagctatgcttggagaagaacacaccagatccatcggcccccgtgagagtgccaaggagtaccgacagcgacgctaactggaaaaagaactgcttttcttcgcttatgatgtttttggaattccctttgtggatccggattcatggactccagaagaagtgattcccaagaagattgcaagagaaacagaagtcagaacgggaaacagccgtacgcatctcccaggagattgggaaccttatgaaggaaatcgagacccttgtggaagagaagaccaaggagtcactggatgtgagcagactgacccgggaaggtggccccctgctgtatgaaggcatcagtctcaccatgaactccaaactcctgaatggttcccagcgggtggtgatggacggcgtaatctctgaccacgagtgtcaggagctgcagagactgaccaatgtggcagcaacctcaggagatggctaccggggtcagacctccccacatactcccaatgaaaagttctatggtgtcactgtcttcaaagccctcaagctggggcaagaaggcaaagttcctctgcagagtgcccacctgtactacaacgtgacggagaaggtgcggcgcatcatggagtcctacttccgcctgggatacgcccctctacttttcctactcttcatctggtgtgccgcactgccatcgaagaggtccaggcagagaggaaggatgatagtcatccagttccacgtggacaactgcatcctgaatgccgagaccctcgtgtgtgtcaaagagcccccagcctacaccttccgcgactacagcgccatcctttacctaaatggggacttcgatggcggaaacttttatttcactgaactggatgccaagaccgtgacggcagaggtgcagcctcagtgtggaagagccgtgggattctcttcaggcactgaaaacccacatgggagtgaaggctgtcaccaggggggcagcgctgtgccatcgccctgtggttcaccctggaccctcgacacagcgagcgggacagggtgccaggcagatgacctggtgaagatgctcttcagcccagaagagatgggacctctcccaggagcagcccctggatgcccagcagagccccccccgaacctgcacaagagtctctctcaggcagtgaatcgaagcccaaggatgagctatgacagcgtccaggtcagacggatgggtgactagacccatggagaggaactcttcttgcactctgagctgggccagccccttggtgc

SEQ ID NO: 15009 - DNA, 1014 bp, Homo sapiens
gcagagcgctgctcccgagaaccctgcacccctcaatggagtaaattaccataaagcctcttccttacccatgctttggggtgttaacagctgaggctattcgtcggtgacctgtgggactcgagctattcctgcagctcagcagacctcctggccgtggcagacttctgcgttatgacccggctgctgggctacgtggaccccctgggatcccagctttgtggctgccgtcatcaccatcaccttcaatccgctctactggaatgtggttgcacgatgggaacacaagacccgcaagctgagcagggcctttcggatccccctacctgggcctgctactctctaaagcgtcaccatcctgctcctgaacttcctgcgctcgcactgcttcacgcagggccatggctgagccagcccaggatgggagagcctgggacacccccgcggcctacagcctggggcctcgcgctcctgggactgggcgtcgtgctcgtgctctccagcttctttgcactggggttcgctggaactttcctaggtgattacttcgggatcctcaaggaggcgagagtgaccgtgttccccttcaacatcctggacaaccccatgtactggggaagcacagccaactacctgggctgggccatcatgcacgccagccccacgggcctgctcctgacggtgctggtggccctcacctacatagtggctctcctatacgaagagcccttcaccgctgagatctaccggcagaaagcctccgggtcccacaagaggagctgattgagctgcaacagctttgctgaaggcctggccagccttctcatcgtccccaagtggcaggccctgcgcagggcgagaatggtgcctgctgctcagggctcgcccccggcgtgggctgccccagtgccttggaacctgctgccttggggaccctggacgtgccgacatatggccattgagctccaacccacacattcccattcaccaataaaggcaccctgaccccaaaaa

SEQ ID NO: 15010 - DNA, 805 bp, Homo sapiens
  misc_feature (1)...(805): n = a,t,c or g
ctagcagttgcagtgggctctgcactgcaatagcaaatacgttattagaattaatctcaaaagaagcattttccttatggaaaaatcagttcaatttataggatctaatacaacagtaagagacaatagaagtcctcatgattgcattaagaatttccatttggcttaagaattttactcagaatttatttaaccagactccaaacctctagttacttttattggagtaattaggctctaaaggtgtttttaaaaagggggcctagtggttcgctgaggaggaagagagactctaaatgtgtgttctttttaagtgtgtttctaatcctgtttttctgcaatctgctacacctcataattacttttttccttaaacagtgactatttcatcaacagacattcaaggaactacttcagtttataaaattaaaaaaaattgtgatatccagtctctctaggcttttcttggctcttaatcccacattaaactgagaagtcagaactaagatggtaaagatgccatttaccagattaactgagaccatgttagaactgaacggcttaggcagaactgggaggggaggaaacaagttggtgctcaatctgaatcaccgngtagcccagagatgagggtctnggcagagcccccatgacaacagtgtccccagggatctcagaaggaaagatgaaagattctcctttatctcctgggctccaagaactgccanctcaggnatcccnaaatgatgccatacatttntcttattggggggccagntnnanctggngnnttcagttgggctta

SEQ ID NO: 15011 - DNA, 2388 bp, Homo sapiens
gcaggcccgttggaagtggttgtgacaaccccagcaatgtggagaagcctggggcttgccctggctctctgtctcctcccatcgggaggaacagagagccaggaccaaagctccttatgtaagcaacccccagcctgggagcataagagatcaagatccaatgctaaactccaatggttcagtgactgtggttgctcttcttcaagccagctgatacctgtgcatcatcgaggcatctaaattagaagacctgcgagtaaaactgaagaaagaaggatattctaatatttcttatattgttgttaatcatcaaggaatctcttctcgattaaaatacacacatcttaagaataaggtttcagagcatattcctgtttatcaacaagaagaaaaccaaacagatgtctggactcttttaaatggaagcaaagatgacttcctcatatatgatagatgtggccgtcttgtatatcatcttggtttgcctttttccttcctaactttcccatatgtagaagaagccattaagattgcttactgtgaaaagaaatgtggaaactgctctctcacgactctcaaagatgaagacttttgtaaacgtgtatctttggctactgtggataaaacagttgaaactccatcgcctcattaccatcatgagcatcatcacaatcatggacatcagcaccttggcagcagtgagctttcagagaatcagcaaccaggagcaccaaatgctcctactcatcctgctcctccaggccttcatcaccaccataagcacaagggtcagcataggcagggtcacccagagaaccgagatatgccagcaagtgaagatttacaagatttacaaaagaagctctgtcgaaagagatgtataaatcaattactctgtaaattgcccacagattcagagttggctcctaggagctgatgctgccattgtcgacatctgatatttgaaaaaacagggtctgcaatcacctgacagtgtaaagaaaacctcccatctttatgtagctgacagggacttcgggcagaggagaacataactgaatcttgtcagtgacgtttgcctccagctgcctgacaaataagtcagcagcttatacccacagaagccagtgccagttgacgctgaaagaatcaggcaaaaaagtgagaatgaccttcaaactaaatatttaaaataggacatactccccaatttagtctagacacaatttcatttccagcatttttataaactaccaaattagtgaaccaaaaatagaaattagatttgtgcaaacatggagaaatctactgaattggcttccagattttaaattttatgtcatagaaatattgactcaaaccatattttttatgatggagcaactgaaaggtgattgcagcttttggttaatatgtctttttttttctttttccagtgttctatttgctttaatgagaatagaaacgtaaactatgacctaggggtttctgttggataattagcagtttagaatggaggaagaacaacaaagacatgctttccatttttttctttacttatctctcaaaacaatattactttgtcttttcaatcttctacttttaactaataaaataagtggattttgtattttaagatccagaaatacttaacacgtgaatattttgctaaaaaagcatatataactattttaaatatccatttatcttttgtatatctaagactcatcctgatttttactatcacacatgaataaagcctttgtatctttctttctctaatgttgtatcatactcttctaaaacttgagtggctgtcttaaaagatataaggggaaagataatattgtctgtctctatattgcttagtaagtatttccatagtcaatgatggtttaataggtaaaccaaaccctataaacctgacctcctttatggttaatactatttaagcaagaatgcagtacagaattggatacagtacgggatttgtccaaataaattcaattctgtactgcattcttgcttaatagtattaaccataaaggaggtcaggtttatagggtttggtttacctattaaaccatcattgactatggaaatacttactaagcaatatagagacagacaatattatctttccccttatatcttttaagacagccactcaagttttagaagagtatgatacaaaggctttattcatgtgtgatagtaaaaatcaggatgagtcttagatatacaaaagataaatggatatttaaaatagttatatatgcttttttagcaaaatattcacgtgttaagtatttctggatcttaaaatacaaaatccacttattttattagttaaaagtagaagattgaaaagacaaagtaatgtcgacg

SEQ ID NO: 15012 - DNA, 699 bp, Homo sapiens
ccttcgctgcgttcagactgcacaccatatcttgaaaggtttacaacaagaaaatcacttgaagatccgtgtagagcccggcttatttgagtggacaaaatgggttgctgggagcacattacctgcatggatacctccatcagagttagctgcagcccaacctgagtgttgatacaacctacagacctcacattccaatcagcaaattagttgtttcagaatcctatgatacttatatcagtagaagtttccaagtaacaaaagaaataataagtgaatgtaaaagtaaaggaaataacatcctgattggtggcccacgcatcttcccttgaagcgtgtacctgccaacttcagggcctgtcacctcagaactccaaggacttcgtacaaatggtccgaaagatcccatatctgggattttgttcctgtgaagaattaggagaaactggaatatggcagctgacagatccaccaatccttcctcttacccatggaccaactgggggcttcaactggagagagaccttgcttcaagaataaaccacaccagtgaacaagaaggaaaggccttttggagtgtgtctttctgtgtgtttaaaaacagtgggaaaatccacaccacactctaagtggacagctcagaataatttagcatatttcctttcacacttaaagttcttaagatgagactgtgtaaat

SEQ ID NO: 15013 - DNA, 1186 bp, Homo sapiens
taaaaattgcagtgggtactttattaagaatttattttaccatctagccattcaaaacatctttacatcaacaaacacagcagtttgactattgaaatcataagcgatttatcttgaaaaggttatatttgtaggtggatgcaagtatattggagaaatatttctatcaaaatcactggttttgttaggagtattttgatttttctatttttacgctgggaaaaaaattaaaacaagtatgtcagtgttcattttatgggatagttggcttcactgtgtttgtcatgtttgtccgaattacagctgtttatcttgcaactttaagattaattaaatgcaaatgtaactctgtgaatcatgggaatacctgccagacctcttattaataccttcacttaaaaccccctgtgcctgagagtcattaatttgctaaaagaaaagtgctaaagcagccctttgcccacaaacaattctgcgatggctgcccaattaatcccaaagcattctgatcctcctttcaggcctcgtggccctttgaggacacaagaaggctccgatgataacctggcaacctaggtagaaacccagccaagtgtgagcgtttgaagctgcagtttggctgccatcgtgtcggcgaaaagaaagaattcaggcaccatgtcatccagtacaaaggataaaaacggattccaaccggaaattcaatgtggcaccacatatgggatacatgagtgcggttatacaacaggccacatattttttttgaacagtctcctacatgtgatgccgaggacatgtgtaaccatcataacgtctctaggaatctgtatttaatttgagttggggtggtggcagggattggagatctgaagccgccacaggtttgtggcagatggctctgtgtcagctatgacaagcagccaggctcagcttcctctgcagattttcttttctctctgatcaggtaaatatgggcacactctggaaagttcttcagattctgccttaggctgcaagtttgtgacttagccccatctgtcacaaatcttccctaggttctgttgtaagcagagacctgaatttaccatgtagggctgcccaagaaaacggagcgatttcacccttatagagatgttttcttataatatctggtctcttgcagaaattctggagcctttttgaaagc

SEQ ID NO: 15014 - DNA, 585 bp, Homo sapiens
agatccatgtttcttgagtttttcttaaacgacagaagattttgcttcccagactagcatccctctgtggctacaaccagcctgaaccgaggggtctgccctttagaagggcccagctcacgggctcactgtgcactcaggccctagccagcctgctgtacgtaggtgtttgcgatttcatcattggccttgttttaacagacagcagagcagagcacctgccataaagcaagcctcgatgtgctaagtgccatgtggagcccttgccctgctggggctcgctgctcccatttgagctgccacagatcagcccctccccccagggtctccgaggagtcaggaccgcacagcctgccctcctagggaaggacttcctcagggaaggcaggcatgtggaagccaggtgcagagtcctggcctctccacacaggtgccgccccagtgatgtggtttgagaagctgtatgctggactgcagtgcgtagagaagtacttcatctaccccgccgtggtgctaaagcctcacggtggaagcccaaaagtcgtcagcaaccggaaagtatgctcctattgcggggcttctaat

SEQ ID NO: 15015 - DNA, 433 bp, Homo sapiens
  misc_feature (1)...(433): n = a,t,c or g
ggcctttgggaagaccatatcctccatactccttggccgatttctcttggaacaacatcactgattcattggatcctgccaccctgagtgccacatttcaaggccaccccatgaacgaccctaccaggacttttgccagtggcagccctggccttcagggtccaggccttttccaggtccagccgatcagcccaaccccctcgcctcctgcacacagcagacacctgtcagctagaggtggccctggttggagcctctccccggggaaaaccgttccctgtttgggctggaggtagccacattgggccagggccctgactgccctcaatgcaggagcagcactccatcgacgatgaatatgcaccgggccgttttcaagttggaccanctactgtggggcnccttccataggttttgacaannggcnaccatg

SEQ ID NO: 15016 - DNA, 573 bp, Homo sapiens
  misc_feature (1)...(573): n = a,t,c or g
ggctaattgaatgaatggagttaatggatatttaagtatccaatcatgctccacttgatgggaacaggttttgagatatgtgttgttaggtgatttcatctnnnnnnnnnnnnnnnnnnnnnnnnnnnnnnnnnnnnnnnnnatgtacagactgccacatacctaggttatatgatgtagtccattgctcttnnnnnnnnnnnnnnnnnnnnnnnnnnnnnnnnnnnnnnnnnnnnnnnnnnnnnnnnnnnnnnnnnnnnnnnnnnnnnnnnnnnnnnnnnnnnnnnnnnnnnnnnnnnnnnnnnnnnnnnnnnnnnnnnnnnnnnnnnnnnnnnnnnnnnnnnnnnnnnnnnnnnnnnnnnnnnnnnnnnntatttatgtttttgcataaaatagctgaattttcagtagtgaaatttactgaatatgttgtaataaattggagttcagaaaggctttactcaagtagttggtcataagggaaataagataggtgttgagagtttaaatctacaggaaggaagtngatccgagatgtaagctntaagaggcagatgactaatggcttgaacc

SEQ ID NO: 15017 - DNA, 1020 bp, Homo sapiens
  misc_feature (1)...(1020): n = a,t,c or g
ggagagtgtggcctgagaggggaatgttcagcctcactgtcacattaagggtacctcaaaatacatggtccttccagtgtgttccttttccttcctccatttcactttgtcccctcttcttcctttctctcccattttcctggctttttagcactcagcttttttttataagtatgtatttactttttattatatatttggtcctttgggactttgtgatgattaagaatttattccattcaggattttaaaatgatgtgtttaatattttgttctcttaaactcttttgaagctatgctgctaaccaggtataggccagaaaggaggtggcccagtcagtaccttgctcacgtcagctaagggggacagtgatgtcatgtgggtgactcttcttcatttgaccaaggccagcctcctgttcttacctctgcccattcatttctggctatgggaaaactaccacctgttgagtgagccaatgaggccaggaagatcagaggggctgggttccggcccatgggccactatttgaatttctctgtagtaagctctttgtagggctggctccaactgcagtagcccaaagaaaacctgtctgactcgacattttaatgcctgagagttggtgaaagttcagctgaagctaatgtctagacatcagcagtaactaggcatccagaaagtagcttcaaccaaagctaatagagcccaagtttccgcaggaagtttggtgctgagctgtccagagcagttgtttatctgagtgttgctagcccttagccatgctttcttagctttattcttcgcctgttcctagggcatagccctgaaaccaggagctatgggctcactggcttcgcctttattcttacttccctagtcatgcgggaacaacatagtcttaaaaagggaaggtgtgggactgggggagttagggagaccctgattttctatttccctatggctttctaantaactaggcntcgagattcttnaaaccgttttgtggcctcagtgtt

SEQ ID NO: 15018 - DNA, 1846 bp, Homo sapiens
aaggcgggggaagcactgaaccaacacaaacccctatctcaagaacttgttaacctccggggagagctagtcactgcttcaacccacctgtgagaaattggaaaaagccaggaatgagttacaaacagtgtatgaagcattcgtccagcagcaccaggctgaaaaaacagaacgagagaatcggcttaaagagttttacaccagggagtatgaaaagcttcgggacacttacattgaagaagcagagaagtacaaaatgcaattgcaagagcagtttgacaacttaaattgcgcatgaaacctctaagttggaaattgaagctagccactcagagaaacttgaattgctaaagaaggcctatgaagcctccctttcagaaattaagaaaggccatgaaatagaaaagaaatcgcttgaagatttactttctgagaagcaggaatcgctagagaagcaaatcaatgatctgaagagtgaaaatgatgctttaaatgaaaaattgaaatcagaagaacaaaaaagaagagcaagagaaaaagcaaatttgaaaaatcctcagatcatgtatctagaacaggagttagaaagcctgaaagctgtgttagagatcaagaatgagaaactgcatcaacaggacatcaagttaatgaaaatggagaaactggtggacaacaacacagcattggttgacaaattgaagcgtttccagcaggagaatgaagaattgaaagctcggatggacaagcacatggcaatctcaaggcagctttccacggagcaggctgttctgcaagagtcgctggagaaggagtcgaaagtcaacaagcgactctctatggaaaacgaggagcttctgtggaaactgcacaatggggacctgtgtagccccaagagatcccccacatcctccgccatccctttgcagtcaccaaggaattcgggctccttccctagccccagcatttcacccagatgacacgtccccaaagtccacagactctctgaaagcattttgatgcaggtctgcaggactgaccccaaggaggaacgtgggcacaagaggtatatcagcacacgtgtgatcaccgtagggtaactggagcgtcaccaccggcggaatcgcagcttctgagactggaagtctggaggaagacttttgcctccgtccaaaagattcctccaaaaaaagatttaaaaaaagatttcggcatcgacacggacgttgttgcacaaagcacttaaagaacgagagcatcttgttcattgcctttttcacctaagcataaggggaaaaactctcagggccctattaagatttataacctttgtaatgttcttcaccacagacaccttcttgtgagttttcagtctgactgtgggggtggggggtgtgaatgaaatggatgtcacagagtgtcatgtgtctgatgcagcctcctctgctgtgtattaaatgtcaaaatctgaatatatctggatatgtactaatcaaataataatcaatcaatcagcatatacatttcagccaaagccatagaagaaaaagcaatagttgcttgaattatgatcatctaccaccaactctgctcagccctgtaacagggtagggagagggtataacaggaagagctttgacttgtccctgtctatacattctctgtatcttttgggggtaacttcttggcagtttttcagtgttcagccatgtcagttgaaactagatttttctgtagattttttacttacccatgtgagcctaacactatcctgtaattcattttctcaggctatgtgtaaatgtagaaccctaatttttctataaaaaaacaaactaactaactgtgt

SEQ ID NO: 15019 - DNA, 1742 bp, Homo sapiens
  misc_feature (1)...(1742): n = a,t,c or g
ctcagctgcagcgcttcgatcgcacccaccggtgccccttcccccatgtggtgcgagctggcgccatcttcgtgcccattcacctggtgaaggagcggctcttccctcggctgccacccgcttctgtggaccatgtgctgcaggagcatcgtgtggagctgcggcccaccacgctgtcggaggagcgggcactgcgggagctcgccctgccaggctgcacctcacgcatgctgaagttactggcgctgcgccagctgccggacatttaccccgaccttctcggcctgcagtggcgcgactgtgtacgccgccagctgggtgactttgacactgaggctggagctgtgtcctcctcagagcccactgtggccagagatgagccagagagcctagccctggctcagaagtcaccggcccccaaggtcaggaagccaggcaggaagccaccaacccctggcccggagaaagcagaggcagctgctggggaagagtcctgtggtgcctcccctacccctgctaccagtgccagcccacctggccccacactgaaggcccgcttccgcagtctgctggagaccgcctggctcaatggcctggctctgcccacctggggccacaagtcctcaagaccagaccagccctcaccctgcccacagctgctggacagccagagccatcacctgtagcactggttgccagtgctgtgtgtatagcagtcactcttccacccttccctttttgccttgcccagcttgccccggggccacgagtggatgctggggctgtggctgctcccctggaggggttccatctctgaccctgtggcccattcagggtgggctgaagagcccctgagcttttaacgtgagggtctttattggataggactactccctatttcttgcctagagaacacacatgggctttggagcccgacagacctgggcttgaatcccggctcgtgttcttgctgcaggacctgggcaagaaacttcacctctgctgagccctcattccccatgtgtaaaatgggacaacgcaacctacctcacagggttgttgtggggatgctgcctgatacataccctgtcaccatttggtctctgcttcctctctgggacagggcctagaattggaggcagagaaccttcctatagaaagtcttcgtgtgtcctaggacttggctatcgtagagtggtaccttaggcagtggatgtgactcacactttcaggagtcaccccccagcatttggggttgggttggccctactccagcctggagctccctgagggagcctgcactccctgctcccaatccccgctactggtgcagggatgcagcctggagctggcgtccttgttctgggcctgctgctgccgccaccccaggaggccccaggcctgtcctgaattgacatcagtgcttccctgaactgcctcccccaccccctggcattatccccaggaaacttatgttttctagaagctaagcagctgctgggactcagggactggtgcaggtaggctgagtggcagctcagtcctagaaggtctctgaagatctggactgaggaccctgctactccccaagccagagcccatcagccaggcctgctgtgagccacctgcctgtggagtgctgagctcaaccaaaggctggcaagctctgggcctcatttaagggattctgatgagccgatggncctggaggcagcccattaaagcatctggctcgtttttgg

SEQ ID NO: 15020 - DNA, 434 bp, Homo sapiens
gtgtgcgtgctctggaactttttgtgaaagcagatgtcctgagtggagagaatgcctacatgtgtgctaaatgcaagaagaaggttccagccagcaagcgcttcaccatccacagaacatccaacgtcttaaccctttccctcaagcgctttgccaacttcagcggggggaagatcaccaaggatgtaggctatccggaattcctcaacatacgtccgtatatgtcccagaataatggtgatcctgtcatgtatggactctatgctgtcctggtgcactcgggctacagctgccatgccgggcactattactgctacgtgaaggcaagcaatggacagtggtaccagatgaatgattccttggtccattccagcaacgtcaaggtggttctgaccagcaggcctacgtgctgttctatctgcgaattccaggct

SEQ ID NO: 15021 - DNA, 659 bp, Homo sapiens
  misc_feature (1)...(659): n = a,t,c or g
ctggaacatcagctgttctctaggtcttaagtctgctgctctaacctacaaattttggacatgccaatctccacagtcacatgggccaattccttagtttctctggagaatcctgactaatgtatgcaatgtctttatttcatcctcattcttaaaggatattttcatcagcaacaccacaccctcctgatcaccatagctttatgcaacaacaagaaacaaatttattagctaacctaaccactaatgacgcaagagacaattctaaggactttcaaaacagcaaagtaggagcagctgctacctctagggatgagggatgcaattgtccaattattgggtgaaattgtcatttcatgctattgggctatttgaaattcctcctctaatttcagaataaatcactgaaattgacatcggccagtctgaatttcaagaaattacctgctgaagacaagagggatctcttcttcagatttgcagtctggggaagacacagcctctactgtactttagaacctgagattgggtggtggaaggagccctgggtcgagtggtaagattcaccttaggttagtattgcgtaagtgccgaagantgtagccaaagatgtaccatagactncatgtttgtatttcncggcttatattggtggtttt

SEQ ID NO: 15022 - DNA, 1201 bp, Homo sapiens
  misc_feature (1)...(1201): n = a,t,c or g
aattcggcacgaggtgagtgtgagcctcaacatagttccagaactctccatccggactagttattgagcatctgcctctcatatcaccagtggccatctgaggtgtttccctggctctgaaggggtaggcacgatggccaggtgcttcagcctggtgttgcttctcacttccatctggaccacgaggctcctggtccaaggctctttgcgtgcagaagagctttccatccaggtgtcatgcagaattatggggatcacccttgtgagcaaaaaggcgaaccagcagctgaatttcacagaagctaaggaggcctgtaggctgctgggactaagtttggccggcaaggaccaagttgaaacagccttgaaagctagctttgaaacttgcagctatggctgggttggagatggattcgtggtcatctctaggattagcccaaaccccaagtgtgggaaaaatggggtgggtgtcctgatttggaaggttccagtgagccgacagtttgcagcctattgttacaactcatctgatacttggactaactcgtgcattccagaaattatcaccaccaaagatcccatattcaacactcaaactgcaacacaaacaacagaatttattgtcagtgacagtacctactcggtggcatccccttactctacaatacctgcccctactactactcctcctgctccagcttccacttctattccacggagaaaaaaattgatttgtgtcacagaagtttttatggaaactagcaccatgtctacagaaactgaaccatttgttgaaaataaagcagcattcaagaatgaagctgctgggtttggaggtgtccccacggctctgctagtgcttgctctcctcttctttggtgctgcagctggtcttggattttgctatgtcaaaaggtatgtgaaggccttcccttttacaaacaagaatcagcagaaggaaatgatcgaaaccaaagtagtaaaggaggagaaggccaatgatagcaaccctaatgagggattcaaaggaaaacttgattaaaaacccaggaagagtcccaggagtcccaggcaaaactaccctggcgatgcctgggggaggcttgaagttttaggntggaggacagganttgagggnggacacaccttgagggntggttttcnttttncttgcntccttttacccttgncccccggntgg

SEQ ID NO: 15023 - DNA, 1566 bp, Homo sapiens
gaatgatctcatccattcggttcgaggagatgaatttctgggcgggaacgtgtcgctgactgctcctggctctgttggccctcctgatgagtctcacccagggagttctgacagctctggtctcagtccagtgtgaaaaaagccagtattaaaatactgaaaaattttgatgaagcgataattgtggatgcggcaagtctggatccagaatctttatatcaacggacatatgccgggaagatgacatttggaagagtcagtgacttggggcaattcatccgggaatctgagcctgaacctgatgtaaggaaatcaaaaggatccatgttctcacaagctatgaagaaatgggtgcaaggaaatactgatgaggcccaggaagagctagcttggaagattgctaaaatgatagtcagtgacattatgcagcaggctcagtatgatcaaccgttagagaaatctacaaagttatgactcaaaacttgagataaaggaaatctgcttgtgaaaaataagagaacttttttcccttggttggattcttcaacacagccaatgaaaacagcactatatttctgatctgtcactgttgtttccaggagagaatgggagacaatcctagacttccaccataatgcagttacctgtaggcataattgatgcacatgatgtttcacacagtgagagtcttaaagatacaaaatggtattgtttacattactagaaaattattagttttccaatggcaataacccatttatgagagtgttttagcctactggaatagacagggaccacatcctctgggaagcagataagcatagaactgatacttgatgcacactcgtagtggtaactcatccctaatcagcattgtaaagcaggtgccagaggtggtttgctttgtccttccaaagcaggtgagtcagccccaccgagagccaggcagctttgagtggcagcgtggtgctagcagcttcagcggaacagggtgagagttaattatgcagtcttcttgacagcggcattaatttggaaggaaactgacaagtcatgggtcaagtttcagtgacttcctccttcctctgatggcagtatatagttttcacattttaattcctcctcctgagatgcactatacttaaaaccattctctcccctgctaacagaagggtgtgaatctggtttactttgagcattaggatttgcccctttggaattctgcactccagttacttaactttcccttcagaatacatgtggaaagaaagaaagaaatagcgatgactccacttttgcccctgtggcaccttgaacaaagcagttcttcccaaattatactttttttttttttaaataaggtgagcaggatgactggggagagagaaacatttgactttgactgcctcccccaattctttgctgtgagctggaaagtgtgcagttggtcgtctttcttctcctttctttaggatagtaagagactcactcactgcacttctgctcagttggcttctgccatcgggatcacacagccatcagcaggactgcccagttggtgagcac

SEQ ID NO: 15024 - DNA, 2149 bp, Homo sapiens
tttttttttttttttttaacttttctcaagccgtttttattacacttagtgtattaagacaagtacaaaataaccttgtaattaagatactgtatcagtcaaaaaagaagtcactattgtatgaagagatttacaaatgactaaaatatacaggctgtgacagaattaacagtttgaaagagggttgcttttttcttttagaaatgctaaattttcttaacaagacaaaaatacagtgctctaaatatgcattaccatgaaaacgttaaagaaaagcagtcttaacacttaactactattaacagcctttgccaacacatgcctgcctactccctttcctaactttaaagaactgtttcctctaaggaatactagtgcagcataacccttaaataatttcatttatttttaaagttacaacctacagagaaattaacatcttgtcaatctaataacagtggcaaccattcttcacatgcacttctcttagaataaatccccttggctggcaggataaggcttatgctgtagaaccttctcccccacagccacaaatccccttctataagtccctcctaccctcatccccccgcatccccactggcattcacctttcccaccccaaaaagtgcagctcatggtagccttctagaaaatggttttaatgggtatcccagcatacacgcttttttaaaagccccctctgaacaccagaggtggtgaaaatgaattgtgttcttggatttttttttttttaagcctccactgggtcaaaaatatgtgctcttaatacttgagtttttgctttgtgtgtgggttttctttctttttcatttagatatcgtgggataaagtggagaggacatctccattttcccatacaaactgagggtgagaagagaaagagaagcaagctgttgcccccactttggccctgggcttcccagccatcttcccagctctggttctttcataggaactagttattgcttccacaatgccgttatacggaatgttccacaaaggctgtgaacctagtcacagtctacccacaacaagaactctgctctgaaaaaccagcccaagagctcttacccagaagaacaatctttagccctcaaggtcactgaaacttcattagagcagtttagagtagacgtgtaagatttgggcatatattaaatgattattggcacaatgttctccagttccatgtataaatgttgatatgcacatcggccagggcccaggatgaatcagccaatctgcaccatttttatgtcagcaataattccatctcttccctttgagcactgtagggagagctgcttcatccggttctccaaggcctggccctcaggggaggtgctgctttggctcttactgctgccaccactgccactgctactgctgaggccccggttgttgttggctttgtcacttgttttattctctgccccttctgccctgtctcctcgttctacttcacattcaggggaggaggccccgctgcattcacttcgagggcccaacactgggaacatcatcccaaactctgacagggacacagggctgggcagatccaggctgccaggcctcacaaccgcagggaactggtcaggcatctcagacgggcttgttggtcctgaactaaagctggacacggactgggtttccgagtcatcttcagacacaaagttgctacagctgtcatcttcaaaggcctccgaggccacagaaatggcatcaggctcaggtttgctccctggcagatcctccacagatgtgctgctgccctcagcaccaacaccgcatccccgaggccccatggcactggagcgccgccgctcgtggatctcatctgagatcatctccaggttcttcagggccatcttgtactcgccttttgccagggtcagtttggcctgcaggtcatccacagtctttttcagttgctcgagctgcacatagtactttgccttgagttcaaaataaggcttggacttgttgatggctctcttgagtttcttctcccagtgtcgcatgcgcccatggcggcattgtacctggctgccgtctccttatgcaccagctcgctcctggtcttggtctgccgcctccatgaccctctgagtggcgtgattcagca

SEQ ID NO: 15025 - DNA, 2153 bp, Homo sapiens
  misc_feature (1)...(2153): n = a,t,c or g
gcagaggaggaggcccgggctggttggtcttgaaggcccttttccatgccgacatcatgtcactctaggcctggggttcagtttcctgtggctggtgatgctgtggttaagtttgcttgaccccagcagcccgagggactgtctgagtcacagcacagcccctattgcgtggctgctggtgtgtggggtcagttccagcagatgaatgtgtcatgtggcacaccttgtcccttcccgcagcatttcctgggttccccccagacccttgagcgctctttggggacccagaaggagtccttgcacagggaaggcttgaggtgagaagccgcttcccagactgtcagggccaggcctgggtctagaattcttgctgctgctttgcagagtcaacagcccatcagcccatgttttagaggggacactttggtcctcggttcccaccctcagcaagcaggcctccagcccgaggaaggcctctgccgtagtgacgttgccgtgtggggctgcgtggctgttccccttgggctggagcattcagccaaccccagcgtcccccctgaggcgttcattggcagccccctaggactgcacgctggccccacggtaaccccccctcccccaccaacatcctgcagggatggggtcagtggttccaccttcacaggccactttgaagggtggattctttgaggcccctgccagtcggctccctgctcagctgctggcccgggcgacctgggactcagcaccaacggctgaagtttctcagctgggctctgacctggggtctggggcagggaacgaacatggtggctttgggctgagaggatgagggaggtctttcccaggtcaaattactttcctttggcctctgcctgaggtcgatttgcctctctggtccaatgggactgacactgttgtacaacctgacctgtggctgagggtgtctgggcttaagcatgtggaccccttcggtgtgtctggccttcctccatcgtcctgccctttggccttttggtttgaagccacaggtgtggcttctgggccttagcagatggtatgcttgcggaccgcagcccagcatgccggtgggcccacagcccgagccagcccagagctgccgggaagggccgcccttccccggccctggcggggtgctggacactggccattttcactagagtttgcctggcagggaccgatctctgccccctcctctccccaggcctctggctggcagtgatgccgcagaatcctgagccagggtgcctcctgagcagcccgtgcgcctctccacagcgggcgtttgcacccaatgcggctcgcttcagatgctctgatgcagagggcatgcccagtagtccctctgcagagcctcgcactggggccagggcaggcaccagccccaggcggccagtcggccacggcctgtcctcttcctcgtagcgtctgctcctcactttgtgttgatggtgacttaggagaatgttccgattttccatgatctaagcaggccacgtttaaaataacatcaaggcaagcgtacgtgtcaccctctgtactgacatctcctcccctgaaatgcttttcagtttgacagcccgtttcctagacaagtgcacctggggtttcaggaactttgtgttttttcggagggggttggtggggaggtcgggatgcctgggatcccttcctggagaggcaggctgtctctggaaaaagcctccattgcccacccgccaggcggaaagtcaccctgttcccagcgcggtttcagcatttaattttaagggagcctaaggaagcgcggccgcgccccctggtggtggtaagccgccaacgcacctgggggctgcaaccccaccggacgggtggtccggagggaggctggagcggggaggcgaggagggggctgtgagtcctcagaggccctgggccaccacatttctggcagcgtttcccagacacccctctgctaggccatccctggatagcaagtgaattaacttaagggcactgtgatgggaagccttgcccccctctttttttttttttttttaatatctgcggaataaacccaatggttaatttttgaatgaataaaaggcttttgttgaataaaaaaaaagggggangaantgctncggtgcgca

SEQ ID NO: 15026 - DNA, 468 bp, Homo sapiens
  misc_feature (1)...(468): n = a,t,c or g
gcccagctgcctacatcaaggccccaggacatgcagaaccttcctctagaacccgacccaccaccatgaggtcctgcctgtggagatgcaggcacctgagccaaggcgtccagtggtccttgcttctggctgtcctggtcttctttctcttcgccttgccctcttttattaaggagcctcaaacaaagccttccaggatggtatcaagggctccaggacatctgatgcggtgccaaggcatgggagtgggacgctgacccttcgctattgagtagctgctgaaacagccattgttcctgccccttggctctttcaggtccacctggcttatgtgtgagagactttttttgggttttttttgttctgtttttttgaaaagccagtaccaaaagcttacataattggatgaatgcattcaaatacattcttgaaatgntaaattttnaaatttnnnaaaaaaaaaaaaaa

SEQ ID NO: 15027 - DNA, 1199 bp, Homo sapiens
ctcagaaacctctggttctcccccttccccctcccccaggctgccctggcacccaaattgctgccatgctggcatctgtagctcggtggcttgacattctccccagggacttcccggttcctagttctttgccagctcctccccactctgtgcgacctttccaagccttccctcaccctccccgccagcaccctctttggggagcaggaacttaatctgctgacagagctacacctttcataacaggctcagatcactcagctccctgtgacctttgtattcacccagggttccttctcagtagctctagctgggggaggtgtcagctggggcccctcctgtgctatctccccagaggacatccctgactccaccctttcttcctcccaaactctgcacctcttcctcagctgctccagaccggccagggtaaccagctaaccatgcctgggcatctggaagccagcaggccagagggtggcccaaaggctgatgaacggtagggaagggtgagcagattcctatgttggtgggcaccaatattccaagggcagctctctttgctgaatgagggccttctcgtgaggtactgacaacaccagcaactcgagagctgggaaactcaaggaggaggaagaaaatcaaaaccaccctactccctggggtgaggaaagaacaggaggggaggaggaggagtgtgctctgcacttgccttgctccaggatggggtggcagcagaggaatgtcacaggtcagcagcctaggcctccagctataaatagtccggagggcccgagaggctcccgcccgtccagcagggctgtcagcttcctgtgtggcagcacctggcaacaactggctctggccagcattatgctaaaaccctgttactctccaatgaacccagggaggcgggctcctctctgcgcctatcccttgagaattctgtcttaccagtgaagggtggggctgcccagatcaggcagcaggagtgaggggcacagtcaccccaggccttgctgagcccaggtctgggtactgagtgtccagagctgcctccccaggaggttaaggtgggggcaaaggggaagcttcaagcactttgcctacttttgttcactccccagtgcactgtgactcaggccttcccatcaggcctatttgtctacccaataaagcgtgttttttccagaaacaag

SEQ ID NO: 15028 - DNA, 1041 bp, Homo sapiens
tttttttttttttttttttacaaagcccagaactggcactgtttatacagaaagggagatccatcagtagcatgactctttaatcattgttatttacaatttatcatctgacagacttacagagaataaataaagaaaagaaaatatacaattggtatcacgtttctttttctaatacagagaaattttacatattctatttggaacgtctatgatagttttaagcagaaattaaatccatttgccctttaccccttgacaagacacatcatcttccaaagcctgcagaagggggcccagatgtttcctcatcacaggaagagtgcaccacatcgctgcagaaactcagtcctcagaaaaagttaccaggcaacaaggtagaagaataggatatcatgaataataaaggacatataatggataggctagattacagactcttggtgtgtttgcagggaagccagctttcaattgtgtccaagcctgttttcaagaaaacagtttttcactgaaagtgattaccttatcccattgtgcttcccttgagtctctgcaaattcttcccttgacatgttcattgtgattgtggatgagcacaggctagcttgggactcagattattttcctgcaaggcacctgacactgttgcatgttgttgacaaggtgtctgcaggagaaactagatagcttgtttcaaataggctgggtatgaggccagagtctggtctctccttttgattcggtgtcctgtggagaactacctttcattgctgtctaaatgcctcaaaaaattaagcagttctatagatcaatttctccatcaaaaagtatacaaacagagaatgcacttcaccaggaacaagtctgagtaatttttttctctttcctcacttgaaaataaactctccatgttacaagcaaaacaattctccctacattcactctagttaactggatgagaagtttttgtttctatcttatgttcattcaaaaaaacaacattcagcaaatatttatcaagtgctcacaatgacctagaaa

SEQ ID NO: 15029 - DNA, 910 bp, Homo sapiens
cgggagcccgttcggttgcgggtgtctctggccctgcggtcagccctgggaacgtcccggagagctagattcctagaggcccgattccgctagcccggaacagacaaagccagcgctcccgcccgctccccgacttaggatccgatgccggcagcgtcctggggcccccgtagcggggctggaccatgagcctgctggacgggcttcgtttcctcgccgcgggctccgctgcagtccagcaaggccaggatgaaaaagctcccgaagaagagccagaatgagaagtaccggctgaagtaccatgcggctgcgcaaagcggccaaggccacggtgtttgtgagtctgacccacgttcagccggtcccctcctggagactccctcacaaaatctttccccaagctgttcccccttcccagtgtgacagtattaatacagtgttggcttttccgtatacgttactacttgttagccttgtgtccttggacaaattacgtaatttctctgtgtcctcatctgtaaatgagctagtaactgtcttgcagaataatgaatattaaatgagtaaagaaaagtgcttggtgcgtaaaagacataccaataaattttagtcatcgttgttactgcaggactctaggaaatgtgtttgattctcgagatacagccctgagaattaggcattatttgtaaaatgagaacactgaagcccagagagatgatttgcccaagggtactgtgtcagagccctgacctccaacttagataaacctgattccgttttatgacttccagtacacagactattttctgagcacctcaaatccccataactggaccccttgcccaaagagggtacatgaaactggtcagtaatttcccccctctaacctttgagtgttccaagtgtttct

SEQ ID NO: 15030 - DNA, 449 bp, Homo sapiens
  misc_feature (1)...(449): n = a,t,c or g
atgtgtccaaaaaaactccagtgtggttctaggatgagataataaaaacaggttgtctagggtagtgtggaaggtcctttcagtcttcctgtgcctatcagtgatcctcattgccatgttcccttctggtgctcaaccggaggctccctgacagatgagtcctctgccagaggaaggctaagatgtagaggacaaatcgtgtcaaggaaaagaagcttgaaggagctaagaatgcttagcttagagaagacaagaggaaacaggacatggctttgggaagttcaaggatggtccagtgaaatacatactatacttttgcaccccaggctaagctgacccatgatcagtaagtaggaaataaaaggccaatttctggctactcttgcccccaaccccatttcagtgaactatgaacctctattagatatngcaaggccgggtgctaaaat

SEQ ID NO: 15031 - DNA, 1522 bp, Homo sapiens
tttttttttttttttaagcagtctggattcgtgtttattgaagccagtaattagagacatctttttttcccaggactagaaagcaaggttccacatgactgcatactgcacccggacagagccacacccctggactaaggctggtgggggataatctgcagtcttacttttaagttagaaacaccaataaatttagtatacagacgacagtgaactttcacttacagcattaacattgttaaggtcatgatgtacagagcagtcactttcaactttgttaaattaataaaacatgacaatgtcttcagtttaaataccgattttaaaatgccaatcaaaaaaaagtgcaaacaaaataacaatctagcagcattatctgttgcatttttaggaaagaccaattcttggctgttatcttcagccacggtattcaaaggtgggcttttctctgatttttttttttattttaaagacaaaaagcagatgtaaccattataatgtgcataaatagtcataaaattgtctttaacagtctaccatacaagtgtactctgcaaataaaatgaattttactttaaaaactaaaggctgtttattatttggcctttggttccaatgcttgaaaaccccaaaataacaaaactcatctcccttcctcccacctcccaaaaagaaccctgcagctccccaaagttggtagactttggcaaccactgagcacatgacactatgtatcagcttcttctgatactaggagcttccacttctcatgagtaaataaaagtggtctccaagaaaccttccttcacaagacatgtcttagcatttcatcagttttagtatattttatattgacacaaaaagtgcttatcagttcaaatgataaaaaataaagacaaattaaaattttgcattaaaatttaaaattataccatattcctcttcgggcatgtgcctttccaggaattcttgtttctgaggtcactcattttactcccggggactaagcgaccccacctttagtgaggccacaagctgtttggcatctattggtcactataccacaattatcattctacagtcagtttactgtcattacctagacaacctggtaactggaagccacaatacatttgtttttttaaaaaactgaattaaaaaaggaaaaaaatagtatatctcaacaataaaactggcacaagaaacatttctatcagaaaggcaagttgatactcagctttctccttaacagtgttcagacctttacgaaagcaattcaagaaagtcttcaaagagtcttgacacaacataggatattaagttatccccagtactacattagtggtcagtcaaatctggtatgtaaaagtaatgacgattagggaagttatgcttagacacagtacaacaaacattcatataaaaaaagtaaactccacatggtgaactgtggttttttcccttggtttgacaacattttatacattaaattcatggtagtgtttgcatttaaatgctgtca

SEQ ID NO: 15032 - DNA, 447 bp, Homo sapiens
  misc_feature (1)...(447): n = a,t,c or g
cggcacgaggggaagcggttctaggggagccgtgcgggcgccggggtccggcgacgagaggccaccttctggccttgcgatgaatcctcggtttccccttctcagatggggttttcgtgagggtacaacgtcggcattagacattccaggtgacgcccgtacgcggtgggcggttcgggccggagctctggaacgctggccctggaggcgtcgacccctcgttactgatgcagggacgcggtgcggaccaagtcaggcccagagctcgtccttagatgtgggttcgaatctctgccccgccaacttgtgatcgtatcgactcggcccagacgcaattttcttctctgcaaaatcgtcataagaataatcacttgtccagggtagctgcggggcatcccattcgttcccttccatcagcgccgggcatattggggcgtcanaaggctg

SEQ ID NO: 15033 - DNA, 381 bp, Homo sapiens
atttcaacatgtgggttcacagatttattctaaccttccaagtaaagttgttccactagtaaagttgttctggagtatattttttttaaaaaaaaacacttaaaatgttccacttctttcatgaggctaagtcaactctgatatcaaaccaaggggaaagaaatgaaattataggtgagtttacttagttatatacaaaaggaaattattagcctctgctgatggagaacagaggctgtgaataaatggagatccataacatgatcctacatgaatgtttcaatattgtaatcctgtaagttacttttacattgacagttctgaaattcatgttgagtgttaattaggcaggaatcagaagggaggttttgtagaaggtcc

SEQ ID NO: 15034 - DNA, 433 bp, Homo sapiens
ggcctcgtggaggacacagcagcatgggacagtcagggaggtcccggcaccagaagcgcgcccgcgcccaggcgcagctccgcaacctcgaggcctatgccgcgaacccgcactcgttcgtgttcacgcgaggctgcacgggtcgcaacatccggcagctcagcctggacgtgcggcgggtcatggagccgctcactgccagccgtctgcaggttcgtaagaagaactcgctgaaggactgcgtggcagtgtgcttgggccctcgggttcacacactttctgatcctgagcaaaacagagaccaatgtctactttaagctgatgcgcctcccaggaggcccaccttgaccttccaggtcaagaagtactcgctggtgcgtgatgtggtctcctcactgcgccggcaccgcatgcacgagcagcagtttgccca

SEQ ID NO: 15035 - DNA, 274 bp, Homo sapiens
  misc_feature (1)...(274): n = a,t,c or g
gtggaggcataactagcctgggcagaagccaactgtgaggggataccttttagggtctccacaggatggaaaaaggacatggtcaggaagagtaaagagctcagaaggggacaaaggaagttacaaaagccacttccnnnnnnnnnnnnnnnnnnnnnnnnnnnnnnnnnnnnnnnnnnnnnnnnnnnnnnnnnnnnnnnnnnnnnnnnnnnnnnnnnnnnnnnnnnnnnnnnnnnnnnnnnnaataaagaaagaaataattttttaaaaagcc

SEQ ID NO: 15036 - DNA, 1035 bp, Homo sapiens
agagagctagcaccatgagcttcaatacctgtatcagattaatcccctccaccccctattctcctaacctagactggaaggtcagatagaatgaaatggcagtcaggtgaggggacttcatttctccagatttagtccctgtcttttgttcaataattttgttctggctttcattttgttttccaaagaaaaagaaagaaaaaaaaaatcccatcagcaaatacccgtacccatctttaacaacacctggactgaaccaggccagctggctaacactcaagcttagtcctgatctcagctatggctgctgtctcatcatttttagaagggggttggccagatccatcaagggaccctcgggggctccaggcccacccctttgctctctcagctcctctctgccatgtgcatgttgctggtatggttcatgggcagtgaaacaagactcccaccagtttattaatataacagtagaatactacagatttttttttttttaatcattaccccaatagcctttcacctctggagagctggattcaatgcctgttaagatacaagtgaaaatgagtttggtggtctcatcctaaccctatcggacaagttattccttatacagaaaagccccaaaaacgaaacaaaataaaaccaaaaacaaaaacaaacaaaacactacacaatttggcacaaatggatggtctctacccaagcctgtgaattgctggtggagagaaagggggtgctgatcagatcaagggggcagcagtcaggatgggctcaaagaaatatcagcctaccctttgcctgacaagcatccccaaacctcacccccaaaccttccagggctttttttttcttttagaataactgaccccaaatgaaaaccacgttaacaaacacattacctccttgggcttagccatagtagacaggcaagtttaaaccagcaggatgctggaataaacgaagtttgttttaaacagatgtcaagctgagaccttgggactggcctctctcttgcactacaccttacag

SEQ ID NO: 15037 - DNA, 946 bp, Homo sapiens
ggatgcagtttcttaatatgtattacagaaatactactggtatttgcaaatatgtagtttaattgtattattgaactctcattttgggggcttgggcacattaacagattaatccatctgtatagggcttttgctgttggatagaatttaaattgtctacataaatatttgttttaggacccttagattttatctgaatacacagattaggctttaaaaacagatatatatgtcatttttggcttaaggagtttggctaagttagcttttcaactggcactgtatggcagcattttttggtatggttagcatggcacatggcgaaacataaagcattttactgtacaggtaaggaatgtgccatgttgttttacctatctctctttctctctcactcccatgcacacatcctgtgtgtattcagagaccttcagaaacattcatattcattttcatgagtcagcaaaagccctacgcttgattccaacagaatatttcctttacatactttcttctcttaatttttacaaaatttgtatggtaggtgtaaaagaaaatcatagtaactgtaccatattattaacccctaaatcaaactttttttgtcttgtgtatcttgatttttctgtgtgctttatagtgaagcagccgacacgagtcgttgttcataaaacagcttttgaaagttgagagcacacccctggagaaccgactgtgcttgcttacgtttggttcatgacttaaaaatcgagtacaggagttattcctgatgaagctaaagctttgtctctgttgggcacccagctaatgcagtggcaggtcttctgcctgggtgggtgggactcctgcctactcctaacccacttacccagattgggcgctgttccactgggctgctttggagggctcctactcttgaatccctgcccttgctggcaatttgggc

SEQ ID NO: 15038 - DNA, 727 bp, Homo sapiens
ttttttttttttgtccctaaatagcatgcgttcatgacgctggctcactttatttttggccccaggtcaggtctcccaaagggtttcccagcagtcacttcagagtctcctgcagagtcaccatcaagcagacctcttcctcgggaggccgtgtcgccaccccaacccttgacttctggtatcaccatctcctgtcacctgggctccagtctctgtccgatggcctcaacaggacatcaaagcatagctaccagtttgaaggtgccctcaggcttggcaggaaccacgtggacaaaagtcttgtagagcacagcacccttgggcagcctggtgatcagatccacagcctccgtgtttctgggatgaggcacgtagacctccttagtgtagcggactatcccctcttccagggcatacagacatttattcttcccaacacccacatgggcacctgggtgcccagcggaaatggcgctgtgttgcaatgatgttcccagcatgaacatagtgaccttccattttcttaatgccttggcgtctgcctgatgactttccaccgaggtttttggagctaccacccgacttcttggatgcgtatctgacagcaagagctgtagccggagtggggcttagcaaggatgtaacggctgtccgggtcctcagcgccaacaccaccgacggtcgagcggccgggaatttagtagtagtagtagtagtaggcggccgc

SEQ ID NO: 15039 - DNA, 923 bp, Homo sapiens
  misc_feature (1)...(923): n = a,t,c or g
tttttttttatgctttagaactttcaattttaggacaggaaagtaacattaaatgtagaaaacaaaaatggaacatttattcgcaactcaaatactacgcatatacggtaagagattaaatataaacacagcaagttccaccccagtcctatttgtccaaggctgcatggtcaaatggaatcttgaagagaacacctggacaacagaggacctgtcagcgacgtctccggtctggacttctgctgcgtcttcggccacctctcctcttgccttttggtggaccccgaacaaaacaccagtcaacgctgatgggctgtcccatcaaatcctggccattgagtccctccatagcagcctgggcttccttgtatgtttcatattcaactagagtataccccttcagatatcctgttcgcctgtcgaggttgagatgaatgtttttaatttccccatattctgcgaatttgtcgtgtatgtcttcttcggtggcttcctcatggactccagttacaaagagaatccagccttcaacagctgttgggggacggggggaagttgtatgagtacatgagagacactttaagcaggctcacaggaatagagtgagtgcggactcagattgtttaagctatctctgaacccattcctactgcgtttaactattttattggtttctaactactaccacagacacggatacctcacaggttccattattactcacagcgttgtggtccgggttcatcgccatcctgctccacgctgtcataatcctcacgcatccgcgctcgggacccctcttctataagggacatacacgagatcaccgaaaactcctctttctccattgatcctatgaggtgggtgnggactccaaacccntngctcctgncntactangncnctctacttttnctnttcag

SEQ ID NO: 15040 - DNA, 302 bp, Homo sapiens
gctgacccatttccccattcattggctccttcagtcggaatgtcagagcggggagaacaggaaagggaggctgagaggccacactcttaattctgctggagtttggggtggagttggtgtgaattttgatgagtcccacgcattgggtcagaccaaagatgagggatcattggaggcctctgtttgtccctgttcccctaactgagagctccccgaggaattttagttcagtgagatctttattcctacctctttaggatccaacttcgtttctgcccccggggaaaagcctttcgatttga

SEQ ID NO: 15041 - DNA, 1699 bp, Homo sapiens
ggctccagcgtgatgtcctgtgtctcctgcttcttcctgtcttttgggaacagtgagtcggccatgaactctctgctctgcctttttggcggggtcagcattgcatcctggaatgcgctggacgtgttgactgttgaactctacccctcagacaagaggaccacagcttttggcttcctgaatgccctgtgtaagctggcagctgtgctgggggatcagcatcttcacatccttcgtgggaatcaccaaggctgcacccatcctctttgcctcagctgccctgtcccttggcagctctctggccctgaagctgcctgagacccgggggcaggtgctgcagtgaaggggtctctagggctttgggattggcaggcacactgtgagaccaacaactccttccttcccctccctggccctggccatcctgacctccagagccctcactccccactccccgtgtttggtgtcttagctgtgtgtgcgtgtgcgtgtgcatgtgtgtaaaccccgtgggcagggactacagggaaggctccttcatcccagttttgagatgaagctgtactccccatttcccactgcccttgactttgcacaagagaaggctgagccccatccttctccccctgttagagagggggcccttgcttccctgttccaggggttccagaataggcttcctgccttccccatcattccctctgcctaggccctggtgaaaccacaggtatgcaattatgctaggggctggggctctggtgtagaccatggaccaaaagaacttcttagagtctgaagagtgggcctcgggtgccctctcacatctcctgttggatgctgggggagaagcaataaacctcagccctctggcctccactttcctctcaatttgggctgcaaatatgaagcctgaattttatgaaattagctttctgattcttatttattaatagattaagttctgaggcagctccgcaggactgtgtgtgaatgtgtatgtatacttacatatgtgtgtgcatgtgccatggggcggggggtatcactatactgtcctcaaatataagccaagggtaatttcagcggatgcacacacaaccctgcctcccacagttcctcccctaatctggtttctgtgttgagcctgggatggaggagccctaggccaggcctgggataagagtcccacagtctagggagatctgagggcatccgacaaggcccatctccttccctcctcaagaagcagaggcctcctctggagtgagaggctccacccactacagcacaggcgggaatagcacagctgccctcccatgctccctacctgtcccctcacagggaggggagcaggggagggaaagaaaccaggcatctggtcaaaccagcagatcaaaaagcacaaagagctggggcagaggcaggaagcaggggccctcctggcagctcctctgagtggggagaggttgggcagtgagtgagggacccctaatgcagggactagaagcctcagtttccccattttacccttccacacaatagcctctgtaggttaggctgccccatcccaccctactctgtgtggctgctttctttggtgccctcccctcaccccactgtagctgtgacgtgttgtagtttttagatgtttgtaaaatgtttaaaaaaatgttaaaaggaaaaaagtgaaaataacaaa

SEQ ID NO: 15042 - DNA, 1547 bp, Homo sapiens
  misc_feature (1)...(1547): n = a,t,c or g
gatgggaagctctcatttgaggaattccagaattactttgccgatggggttctcagcctgggggagctgcaggaactgttcagcggcattgatgggcatctcaccgacaatttagaaacagaaaaactgtgtgactacttctcagagcacctgggtgtctaccggccggtgctggctgcattggaatcgctgaaccgtgcagtgctcgctgccatggctggcggtcagatgcagagagcgtggaggcgcagagcaggctctgcggcagccggcgggcaggacgccgagccctgaggagtgtcagccggtcatccacctggtcccccggctcttctgacacagggcgcagctcagaggccgagatgcagtggcggctccaggtgaaccgcctccaggagctcatcgaccagctcgagtgcaaggccccccggctggaacccctgcgtgaagaggacctggccaaggggcctgacttgcacatcctcatggcccagaggcaggtccaggtggcagaggaaggcctgcaggacttccaccgagccctgcgctgctatgtggacttcacagggggcccagagccattgtctgcatgtgtccgcccagaagatgctggacggtgcctccttcaccctgtatgagttctggcaggatgaggcctcctggagaaggcaccagcagtcgcctggcagcaaggccttccagcgcatcctcatcgacncactgcgggccccggacaccctcaccactgtgttcttcccagcctcctggtggataatgaataacaactgagccagacctgcacacgccgagggccccgggaccctgcctgcctccctctggagccttctggactggccagcccagcgcaaagaccagggcttgtctcctcctggacttgggcctggtggaagggctctcagcccagggatcagggactgggctgcttgctttctatttattattgatttatttatccctgtattttattgtttgtcacttcagcctccaagctactttggcttctgcctggctcaggagacctggattctggtccctgctgtccctgcctggctgagcgacccagggcaggtcccgtccctgtctgggtgggcctcaggccatctggccgcctagcgagggtcctgctttcttcctgctgtcttgggaccaggcttctgctcctcctcagccagcggcagaagcagggctgatgctcagggaccccccaaccctcaaaccttgcctccgaggctgggcctgagctgggtgccccgtcgccctcccaggccactaggctctgactcttccagcacccatggatgtgccagagcgctctgggttggtttgcatgtcatttgcatatcgtttgcatgccctcatcccacccattctcagggcagtatgggaagccccaaggtgacctggccaagtagcaataatttgggtccagggtcacctattgcccccagaggcctctgaaccccaggctgggaccccagcacagaggcaataaaggcagtggtcccttccaaaaaaaaaagtcgacg

SEQ ID NO: 15043 - DNA, 1129 bp, Homo sapiens
tttttttttttttttttttcattctgcttttctttattgtctggctaacttacaaagatgcagatgtctagggtagtctctaccctaccacttacactatcctgatgacacagatagcaaaatgtgtctgtttacatagtgcatgatatgaaaaaaaagtttttcttcctctacggtccttgactataaggagggaaaaattaatttcatgccaacatttttggggaactttaacaatcatcccatttctgctactaaaataacaaaactggtattacactttaaaatataaagacctaacagtttttacaaatatgcaaataatctactacttagacataaaaaaaagttgatttcttttaaatcacaaagtaaggcaccattggattaaacatttctcctggcttttactaaataaaatgcatagtgaaataaatactgaacactgagttttaatactgtaatacatttcaatataaaataagaggtgaatgttaaaatactgtattacatgttgaatacatttatctgaaaatgttataaaaaaacacacatgtaagctctgatttcagggaagaaaaattcatttttgtaattttccatagtttaagattttaccacagaacttattcatagttttagatgcaattaggttgcaaactttcaaagaaagggtgtaggtgtattaatgaaacagtcacttaaacactacattctaaaacaatctattctggatgaatggcaactttgagctatcaccctgtttcagatttagaacggtacctgccaagttcagatatgcaaaggaattgtccaattcttactaccccttataaaattcagactcactttctctgagtcagacttttctccgtcattacttttctaggaaggggcaaattccatcttttgtgaaatgggtcattaggctttatcataggggatgtttttcactgttgaaatcagataaaagaatcccaaataaatgatgctgctaaattaccaaactgctagagattaaaaaaatttttttttaaaaagccaacactttgccaagcttgttatatcttattatttcttgattctctttgagtaaaaagcccaaatgactgtatggaagagagatgaa

SEQ ID NO: 15044 - DNA, 768 bp, Homo sapiens
gaattgcacttcctggaaaaaattaaaaagtagttagtttaattattctgtaaattatttaattttgtcaagatgtaagtatttatattcacagcctcttatgttaacgtttgctatttatttaacatttttatttattaattttatactatttcaactagaccccacaccagggcaccctaagaggggaaaaaagtgaattcaaagcaaaaataactatttgactataatataggccacaaaaaatcttgatataactcctagttataattttgatgcaaccaagttattttttatatattttgttatttattcttttaataatggaatttttttaaaaagtattttgtaactgaggaattttgataatttggggattttgttttcccttggtctaatggagagaaagacattttggttttctttttccattttgggttccttttgtttcaggcacggataacagcaaatggaattctgtatttattattatttaagtgtagcgcagatgtgtgtgcttgggcgtgtttctcgtgtcgcgtttgcgtgtcggctcttgcggtggagtcctgttgctgtgagggagtgctggccgcaggcagcctcgagtcaccgccaggctcacaggctgtgccacccgtccctccgacagctccaatactgtgaccctccttcctcaggaaggcgcgttgaacccacagcactccgtggtgtgtttgcagggtgatttcctaataaaagtccactctgactgtgaaaaaaaaaaaa

SEQ ID NO: 15045 - DNA, 1055 bp, Homo sapiens
cccgggccgcggtagggtgggaacccaagcgggagagccgcgggatttgcggccgccgccatgcccgtcgtccccgctgcgggtggcggtggtgtgctcgagcaaccagaaccggagcatggaggcgcacaacatcctcagcaaacggggattcagcgtccgatcctttggaacagggactcacgtgaagcttccaggaccagctcccgacaagcccaatgtttatgatttcaaaaccacatatgaccagatgtacaatgatcttcttaggaaagacaaagaactctatacacagaatgggattttacatatgctggacagaaataagagaatcaagccccggccagaaagattccagaactgcaaagacctgtttgatctgatcctcacttgcgaagagagagtgtatgaccaggtggtggaagatctgaattccagagaacaggagacctgcccagcccgtgcacgtggtcaatgtggacatccaggacaaccacgaggaggccaccctgggggcgtttctcatctgtgagctctgccagtgtatccagcacacggaagacatggagaacgagatcgacgagctgctgcaggagttcgaggagaagagtggccgcacctttctgcacaccgtctgcttctactgagcccagcgcccgcatggagccgcctctggagcttcctgttgttcatactttttccttcctgacatttgtttttacttacaggtgttctgctggtgacggtagcattacccaaataaactgtgcatatgaaatgggagaggagatgccaaaacgccagatgaaagcaatcaagtttcttcttttccacttttacttatgagcaggatattgattacaaagtttttcttctttaaccaaaaaggaaagacaacggtttgtgtgcacttcccgacatacctgtgtcttcgtgtgcctgccttccctccctcctccccaccgggccggactgtacagagccctgctgcggcgtgttaggaatgacctggaattgtcaataaacagatgctgctgtcaaaaaaaaaaaaaaaa

SEQ ID NO: 15046 - DNA, 2277 bp, Homo sapiens
ggtgcgggtttcggttggaggactcgttggggaggtggcctgcgcttgtagagactgcatccccgagacgatggcggagggagataatcgcagcaccaacctgctggctgcagagactgcaagtctggaagaacagctgcaaggatggggagaagtgatgctgatggctgataaagtcctccgatgggaaagagcctggtttccacctgccatcatgggtgtggtttctttggtgtttctgattatctactatctagatccatctgttctgtccggcgtttcctgttttgttatgtttttgtgcttggctgactaccttgttcccattctagcgcctagaatttttggctccaataaatggaccactgaacaacagcaaagattccatgaaatttgcagcaatctagtaaaaactcgacgcagagctgtgggttggtggaaacgcctcttcacactaaaggaagaaaaacctaagatgtacttcatgaccatgatcgtttcccttgctgcggttgcttgggtgggacaacaagtccacaacctgcttctcacctacctgatagtgacttccttactattgcttcctggactaaaccaacatggaatcattttgaagtacattggaatggccaagagggagataaacaaacttctcaaacaaaaagaaaagaaaaacgaatgattcatctgctttaatcagtgtgattaatgcagcacccattgccccgggaaccgtttctgctgtactatctggatactaaaatgttacggaagtagctctttgttctccctcactctgcccttagttaatagaaattcagactcgccaagtaaggcttcgtgcatagtgtcttcatgtcgcgtatagttgagcgcgttcttagcagttggcttcatggacaactcattagtgttttgacttttcttacccagcgttaattgaattcttgcttttagacaacttcctttttgtagtggtgaaccttgccctttagtacagttcaagtgaatctggataattgttcatctttgctttagcttagataccatgtagtggtctgtggctacaggaagctggttctgtctgcttccacagtctgcttaaaaaactgtctgacttcgtgaatatagagaccaagtttaccacttctgatgaagagaccaattaagattcattcctcattctgtttctttccagtgggagaagagtccccatgaaataagatgaaactgattccatgcactagtacatgtaggcttctcccttgtgccaaagcttaggcaatttgtaggaaactttgatctttttgtccaagaaaaggaatgtctgacagggcttaaggctttcgtccccttgcacttagactcgaagttagtaaatccttaaaggctttttaatagcagacttccaaaagattgcatttaggatttctagcatgcttttaatttcagattttcagctgacattagctatagtatacagtaggttaagactcatgtctatgactttcactctaagactggcaaaaggacagcagtcttctatgtttagtcaatattcatttcagtagaagataatcttatctaatttttgagaccagaataagccttttaaggtaaacctcaaaattatcattttatggtaatactgaccattttagtcccctaggtttgacatgggagatagtgactacactggtgtctgacttttttcctagagatttctccctgaaaaatacaagggctgttggtgagagcagacttgaggtgatgatagttggcctctggtctacaaagatttcataactccttggaaagcttcttataatcattcttaacttcttggtagctagaaatttagagtagttgaaatctttaggaatgaacttctgagggccaaaaaatgtgactgacgggaacaattcttaaactgattaactagctgtaatatagttttgtgaatttattgcactgatgttgtaccttgtggtatatctgtccctattaaataagtgttgttttctcctctttaatattgctgtgaacagtggtgcccattgtagcatatgtttgatttttttttattatttcataagaaaactacgttaattttaccttactttcattgtaaataagcctgtcttcctatctggattttttgtgtgcatacatattctactgattaactacttttgcagttttaatcctgtattatttcttctactttgttttgtgtaaaaggggaaaaaataaaaaaagctggaatcttcatgtctc

SEQ ID NO: 15047 - DNA, 502 bp, Homo sapiens
  misc_feature (1)...(502): n = a,t,c or g
gtttgtagataggagtcttgccacattgcacaggcttctcataccctttacatactgaacaagtaatgccttatatgacaaaaggtgattaaggatcttgaagaaaagacttatcctggattagccaactgggccctaaatccaatggacatatgtccttataagagggcacacagagcacacacactgaggagaggcggcggcataggaaggaggcactgtggccatggaagcaggttttggagtgatgccacaagtcaagggacaccaacaaccactgaaagaatggactgtcccctacagcctcgggatggagccttgtccctcactatgacacactagaacactataccctcacctcacacatggttgcaattccctcatctcaacatgctctttgagataattatagattcacatgcggtttaagaactatggccgagtacagtgctggganacttgcaacctgggattctgagccactcctatatcctcataacac

SEQ ID NO: 15048 - DNA, 1429 bp, Homo sapiens
  misc_feature (1)...(1429): n = a,t,c or g
tttttctactcaaactataagcttttattattgtattttacagatcattcattcaggacatgctgcatctggggttggcatcatttcccttttgaatgacagaatgtgcataaaagtctcttgcccacgctgaactcacacgtgcccggcaggaaggagctctcacgaagtgcccagctggatgtgagcttgctctggcaagcagcagtgctgtccttgtttctgagctgccacctattcactggagttaggtgggtcaaagctgaaatttagcttggaatttaagtttctaattttatacttttcattgtggtctggtcagattttagtctgcttcaaaatcaaaaggtcactcagtcactctaatatgatcattttgaatatggaaatttgttatttacatgctgtacctcaaatcaaagaaaaagccacgcgtcaatatcacgcgtaggaaaaacctagaaaattggttcctttttccattttgccacccctgctcagttttcctcataaacggttccagcttggaaaacacagagcttcccctctcagacagatgcagcagcgggaggaagggctttggtcttaaactagaagctgcagctgaaactctccccgtctaatcctgctgtgtgtatggctcacaccatctttcctgagtggggaaaaccgcctggcactgaatagctgaaaggccccgcctgaaatctgtgcttcaagaacgagttaaagacaatacaataaaacacatagacactgaaggggttcaactaatgtccatcacttattctgctaatgtcagtgcctttcaataaacttctcaacatctgtgttggtaaacttctcaatatttgttctagcccaaccacggtgacaaagctcccttgcccaaagatcgtgagcctagacaaaggtggataagaaatatgaagtctaaagctatagaatatagcagttagtgaagtaaattaaacatgcccctcgcctgcatgctgatcagagtgttgaaactgaagacgacattggcaaaatgactcagacccacagcacagatttgatcaagggcacagctcataaaaatagcaacaatttcgaattctcctatccaacgtttaggaaacaatccaatggcaagaaatgagaggagttcaatgccaacagtttgacctgtgggcaatcaacctataagtcctcaaaagaaaatttccttgctttccctgggaccaacagagatggggaaaaaaataaaacaaagaggctgcagggttaggggcataggaatcaacacagaggaggttggagagctatgaattcaacaagagaattcagcagagacctggacattttctcgtgccnnnnnnnnnnnnnnnnnnnnnnnnnnnnnnnnnnnnnnnnnnnnnnnnnnnnnnnnnnnnnnnnnnnnnatggg

SEQ ID NO: 15049 - DNA, 371 bp, Homo sapiens
ggaaactgcaagttaaggaacttccatgtatactttgaagttcattctcttaaataaggaagctatattgccttccactgccttgcatttttgttttcagccctgtccttcaaaaccttactgtgtttgtgtaaattctgtcttcccatgttccttctcccccactcccttgtcccatttggttttctggtccttctctgttgcatgaattctatttccctccttttattgcctgaggtctttctggcacactgattctctgagcctgttcgtcgacgcggccgcgaattccagatctatgaatcgtagatctgaaaaaccccgaagttcacttcaactggcatcggcaccatctcaatttctttcattaa

SEQ ID NO: 15050 - DNA, 1841 bp, Homo sapiens
gtgggcatccacgggcgccgagcctccgtccgtgtctctatccctcccgggcctttgtcagcgcgcccgctgggagcggggccgagagcgccggttccagtcagacagccccgcaggtcagcggccgggccgagggcgccagagggggccatgtcgtaccagggcaagaagagcatcccgcacatcacgagtgaccgactcctcatcaaaggtggacggatcatcaacgatgaccaatccctttatgctgacgtctacctggaggatggacttatcaaacaaataggagagaacttaatcgttcctggtggagtgaagaccattgaagccaacgggcggatggttattcccggaggtattgatgtcaacacgtacctgcagaagccctcccaggggatgactgcggctgatgacttcttccaagggaccagggcggcactggtgggcgggaccacgatgatcattgaccatgttgttcctgaacctgggtccagcctactgacctctttcgagaagtggcacgaagcagctgacaccaaatcctgctgtgattactccctccacgtggacatcacaagctggtacgatggcgttcgggaggagctggaggtgctggtgcaggacaaaggcgtcaattccttccaagtctacatggcctataaggatgtctaccaaatgtccgacagccagctctatgaagcctttaccttccttaagggcctgggagctgtgatcttggtccatgcagaaaatggagatttgatagctcaggaacaaaagcggatcctggagatgggcatcacgggtcccgagggccatgccctgagcagacctgaagagctggaggccgaggcggtgttccgggccatcaccattgcgggccggatcaactgccctgtgtacatcaccaaggtcatgagcaagagtgcagccgacatcatcgctctggccaggaagaaagggcccctagtttttggagagcccattgccgccagcctggggaccgatggcacacattactggagcaagaactgggccaaggctgcggcgttcgtgacttcccctcccctgagcccggaccctaccacgcccgactacttgacctccctactggcctgtggggacttgcaggtcacaggcagcggccactgtccctacagcactgcccagaaggcggtgggcaaggacaactttaccctgatccccgagggtgtcaacgggatagaggagcggatgaccgtcgtctgggacaaggcggtggctactggcaaaatggatgagaaccagtttgtcgctgtcaccagcaccaatgcagccaagatctttaacctgtacccaaggaaagggcggattgccgtgggctcggatgccgacgtggtcatctgggaccccgacaagttgaagaccataacagccaaaagtcacaagtcggcggtggagtacaacatcttcgagggtatggagtgccacgggttccccactagtggtcatcagccagggcaagatcgtctttgaagacggaaacatcaacgtcaacaagggcatgggccgcttcattccgcggaaggcgttcccggagcaacctgtaccagcgcgtcaaaatcaggaataaggtttttggattgcaaggggtttccaggggcatgtatgacggtcctgtgtacgaggtaccagctacacccaaatatgcaactcccgttccttcagccaaatcttcgccttctaaacaccagcccccacccatcagaaacctccaccagtccaacttcagcttatcaggtgcccagatagatgacaacaatcccaggcgcaccgggccaccgcatcgtggcgccccctgg

SEQ ID NO: 15051 - DNA, 382 bp, Homo sapiens
  misc_feature (1)...(382): n = a,t,c or g
gcgcgtcgccatggccgcggttcccgagttgctgcagcagcaggaggaggaccgcagcaagctgagatctgtatctgtggacctgaatgttgatccctcgcttcagattgacatacctgatgcgctcagtgagagagacaaagtcaaatttacagtgcacacaaagattccacctgctcctacgaagcccgactttgatggtcctcgagagaagatgcagaaactgggagaaggtgaagggtctatgaccaaagaagaatttgccaagatgaaacaagaactggaagctgagtatcctgctgtgtttaagaagactgtgtcctcccatgaagtctttcttcancggctttcttctcaccctgttctcagtaaagatcgcaac

SEQ ID NO: 15052 - DNA, 745 bp, Homo sapiens
tttaaaacagggatggtatttctggatggtttaatcatgaatggcggtaggcagtgtaagaaaaaagttcctagagcatgataaaccttggtttctggcacaggataaacctttcatttcatggtgtacatttcacaatattaaaaaaaccccagcctggttttcatgattaaagccgtggggaaaggacaatgtttccagggagcaacgactcgcaagcacacccctggggctgtgcggttggccgtcgcggggccagcttcaaagtccaacccacaaggcacaggttttcaaatctttacctctgtgtacaagaacgtacatgaactttaaaaacgtgtgtttcctcgtctgtgtttaacaccctaacgatgatcagtttgggggagacgtacccctccctaatcacaggtaggaccacttcccaaatcaatgaaacgaccgtcctcttttgtgtcttgacttcaggtgtccggccgaacgacggagtcttttcctttcttgtcgatgcagtttctcagcctcctgttgcttcttctgctgttcagacctctttaacgtgaatgtcaattgtttgctgccaacggtggtgtcggatacactcaatgtcccattttttgcttcaattttcaaacgatcttcaagggttttgttcatcagtttctgctttgtggcagaatctttgaagcttctaaattcttctcctgctttgatctcataaaactggggctttaggactgtctgc

SEQ ID NO: 15053 - DNA, 794 bp, Homo sapiens
gaggagccgcagtctgtgttgcagcttcctacttcaattgctgctggaggggaaggacttacggatgtctccccagaaacaaccaccccggagcccccgtcttccgctgcagtttccccgggaacagaggaacctgctggcgacaccaagaaaaaaattgacattttgctaaaggctgtgggagacactcctattatgaaaacaaagaagtgggcagtagagcgaacacgaaccatccaaggactcattgacttcatcaaaaagtttcttaaacttgtggcctcagaacagttgtttatttatgtgaatcagtcctttgctccttccccagaccaagaagttggaactctctatgagtgttttggcagtgatggtaaactggttttacattactgcaagtctcaggcgtggggatgaaccacaaagaaaatcaacttgctactacatgaaatggattttcacggaagagacagctctgaaaagttttgatgcttgtggcaagagacttaacagatgtgatctatttagtatgtgtctactctatgtttatgcataagaaaacatccatagcatgaatggactcagaaaaatgtgatttgtattaatgcaccagtcatcataaaagatggtcatgatagtacacccattgctcctacttgttactattattgctgcagatctgcctccaaggttgaaaaggagactaagactgtataaacatcttcattgtcagttctcaaaatgactgaaattgttttcatggtaaaagttaatatactaaagggttccttttt

SEQ ID NO: 15054 - DNA, 1512 bp, Homo sapiens
  misc_feature (1)...(1512): n = a,t,c or g
gggagagtgtccgttgcttcccgtccgtgtcgcggccctgcggttggcggcctcctcgtggagcggagaaggccaggcggcccctgctcgagtcccgcgtcgccatggccgcggttcccgagttgctgcagcagcaggaggaggaccgcagcaagctgagatctgtatctgtggacctgaatgttgatccctcgcttcagattgacatacctgatgcgctcagtgagagagacaaagtcaaatttacagtgcacacaaagaccacactgcccacgtttcagagcccagagttttctgttacaaggcaacatgaagactttgtgtggctacatgacactcttattgaaacaacagactatgctgggcttattattccacctgctcctacgaagcccgactttgatggtcctcgagagaagatgcagaaactgggagaaggtgaagggtctatgaccaaagaagaatttgccaagatgaaacaagaactggaagctgagtatctcgctgtgtttaagaagactgtgtcctcccatgaagtctttcttcagcggctttcttctcaccctgttctcagtaaagatcgcaactttcatgttttcctggaatatgatcaggatctaagtgttaggcggaaaaatactaaagagatgtttggtggcttcttcaaaagtgtggtgaaaagtgctgatgaagtcctttttactggagttaaggaggtagatgacttctttgagcaagagaagaacttccttattaactattacaataggatcaaagattcttgtgtgaaagctgacaaaatgaccagatctcataaaaatgttgccgatgactatatccacaccgcagcctgcttacatagcctggctttagaagagcccacagtcatcaaaaagtacctattgaaggttgctgagctatttgaaaaactaaggaaagtagagggtcgagtttcatcagatgaagatttgaagctaacagagctcctccgatactacatgctcaacattgaagctgctaaggatctcttatacagacgcaccaaagccctcattgactatgagaactcaaacaaagctctggataaggcccggttaaagagcaaagacgtcaagttggctgaggcacaccagcaggagtgctgccagaaatttgaacaactttccgaatctgcaaaagaagaactgataaatttcaaacggaagagagtggcagcatttagaaagaatctaattgaaatgtctgaactggaaataaaacatgccaggaacaatgtctcccttttgcagagctgtattgacttgttcaagaataactgatatgccttcactcagaagaaaagaaatgaatgtgaaagaaagccaagcatcacttgcacttaaatcattaccacggaagatatattagcttcaactttagtttaaaattatgtgaataaatattttgatttctacaaatcttaacatttaaccatgttggtttaaaaatattattgcttgctacttggncatt

SEQ ID NO: 15055 - DNA, 1718 bp, Homo sapiens
gcccccatggtatcatgggcctgggtgccttctgcaacttcagcacagaggccacagaagtgagcaagaagttcccaggcatacggccttacctggctacactggcaggcaacttccgaatgcctgtgttgagggagtacctgatgtctggaggtatctgccctgtcagccgggacaccatagactatttgctttcaaagaatgggagtggcaatgctatcatcatcgtggtcgggggtgcggctgagtctctgagctccatgcctggcaagaatgcagtcaccctgcggaaccgcaagggctttgtgaaactgggccctgcgtcatggagctgacctggttcccatctactcctttggagagaatgaagtgtacaagcaggtgatcttcgaggagggctcctggggccgatgggtccagaagaagttccagaaatacattggtttcgccccatgcatcttccatggtcgaggcctcttctcctccgacacctggggggctggtgccctactccaagcccatcaccactgttgtgggagagcccatcaccatccccaagctggagcacccaacccagcaagacatcgacctgtaccacaccatgtacatggaggccctggtgaagctcttcgacaagcacaagaccaagttcggcctcccggagactgaggtcctggaggtgaactgagccagccttcggggccaattccctggaggaaccagctgcaaatcacttttttgctctgtaaatttggaagtgtcatgggtgtctgtgggttatttaaaagaaattataacaattttgctaaaccattacaatgttaggtcttttttaagaaggaaaaagtcagtatttcaagttctttcacttccagcttgccctgttctaggtggtggctaaatctgggcctaatctgggtgggctcagctaacctctcttcttcccttcctgaagtgacaaaggaaactcagtcttcttggggaagaaggattgccattagtgacttggaccagttagatgattcactttttgcccctaggggatgagaggcgaaacactttctcatacaagcccctttattgccactaccccacgctcgtctagtcctgaaactgcaggaccagtttctctgccaaggggaggagttggagagcacagttgccccgttgtgtgagggcagtagtaggcatctggaatgctccagtttgatctcccttctgccacccctacctcacccctagtcactcatatcggagcctggactgccctccaggatgaggatgggggtggcattgacaacctgcaggggaaaggactgccccccatgcaccattgcagggaggatgccgccaccatgagctaggtggagtaactggtttttcttgggtggctgatgacatggatgcagcacagactcagccttggccccggagcacatgccttactggtggccctcagtttaccttcccccagatccctagattctggatgtgaggaagagatccctcttccagaaggggccctggccttctgagcagcagattagttccaaagcaggtggcccccgaacccaagcctcacttttctgtgccttcctgagggggttgggccggggaggaaacccaaccctctcctgtgtgttctgttatctcttgatgagatcattgcaccatgtcagacttttgtatatgccttgaaaataaatgaaagtgagaat

SEQ ID NO: 15056 - DNA, 793 bp, Homo sapiens
  misc_feature (1)...(793): n = a,t,c or g
atacgattttgcaacattaaattagaacactagaaactaaaaaattatgtttcagtgaatgctacaactaagcatttttttttttaagaaaaacaattgtattatgttttgttgccttgccactttgagtatcttatctgaaaatctgttccttgccatgtttttctcctgttaacataaactatgtgccctgtgaatttctggggactgaatttgaaattgctcctgccaaccgtttgtggcctggcgtgtatctgaatgcctgaatatctccccgctgaatgaatttcgtattctgccctgaattcactcgggtatattgattggctggatgatcttggtgccgcccacttgacgtttccagaagagtcaccgaaggaaaagaaccaggagtgtagaggatgatgaggagggtcacctgatctgtcagagtggagacgtactaagtgcaagatgtatagaatatttttcaacacttattaacttttcagataacataatctatatatagattaagctttcagggatttggaaatctttttttctttctcttttttgtttttgttttatttttccatttcttttggtgggggggattgtatttttgctttctttagaaatgtaatgtttgttatataggaacttccagaacagtaatcaaattaatgaaattagacctaataattatgttttttgatggtgttgaccaataaaatacctagtggataagggaaatttngtaggcatcaactaggatnaatccacattgttggcctttttttgtggataaggt

SEQ ID NO: 15057 - DNA, 1849 bp, Homo sapiens
  misc_feature (1)...(1849): n = a,t,c or g
ttttttttttttttttcagattgaatttacattttacttaaaaaaaggggggtgggggaagtacatacacaaggaggaaaatggggtgaggaacaataaagatctgaaatggatttctatgattttcccctacaatgatcgattttgtctgttgggcagtatttttcctgctggcgtacaactgtttacagtattaacaaggttgtagacaaaggaactgccaaagtttaggcccggatggaaaggacagtaagttatcatatacaatttaagtttacaatacacagcattttctttaaatgatgtaacgcatcggcaaaaagaagttaacaatactaacacgagaataatcaaatttttgttgttatccatgtgcagcaactaactggctttacaaaaaagcaaaataatacaatatatcatcacatatatttacagtatagtaaatatactttttttgtcaaattttaccccaacctattacagggtgaatatactgcattaaaaaaaattgtgtggctgacactaagaatgaatttttgcctaaatccattgcataacattgagtaagacatgcctcattatgcctgggagtcggggaaggatgtagaaacaaaaacaaaaaacaaaaaacccaaacaaaactgaaaacccctaaaccctacaaccccggggnggggttgctgggctgggcactctgtctccccgactaggacacaggaatagaagctgactgtttaggatgtgtcctgggcaccctggctcagtcatgaacaggtgttgagtgaatggaagacagagctgtagcccactttgccccaaatctactgaactgcatctccatctgggcaactaagggcatgccccctcggatgggaagtacgggccataacaggtagattatccaggacaaaaacatgacctgaagttccccggtttccctccttttaacaagtccaggggaaacatcctacaaaccgaaacgaattactttataatatttttaacagaacttatgtcaattacgcagaaatgggcaacttggtctaaacttcagaatttcttttatagattacaagtatgaagactaaaaaagtgttgcatttctcaagggacacatagtggtgagaggtttatctcatgtacattttagttacttggaaagctagattttcctcaaaagtcagaagttctttaaacaaggtaaattttaaaccttagttaagttttcaaactcctaggatgtacttactagtcaaaggtatttttgcatttcaaaggcggctgaattttgatttgtgccaatgctgatcatttcaggcggtatgaaatactacacccttggtaaacccgtttatggaaatatcagtatttttaacagtaaacctctggaagtttctttattttgatgggaagagcaaaatagcataacacccactatcatatgcaccaaaccaacaaacaaaaacaagaaaaacatcgaactaaagttatcaaaggcttacactgcctgctattccagggcctagaaactgtgaaacttaccccagaaacactgggttgtgggagagccaagaccatggtggcaggcttgggcatccttggcactgggttactgatctatttctaaacacagttctaatttcagcttttttatatagtcatagttgctctgtcattataaacattttcttctaatgcagcctctacaatagtttaaaaacaaaagtttagtaaattgcacctgtcttcaggtatttccaacaattctatggtaaactcattaataatactaaggttttctttcctcttattttggcaaataattcttacttttcccaggactgta

SEQ ID NO: 15058 - DNA, 1909 bp, Homo sapiens
agaacattgcggatcgggtcggcgccattttgggactgagactggttgtgggggagggaaaagcggcaaaaggggattattcaaagtaccgaaaaccttctcccgggatcaggcgcggcggcacccccaggccaggggcacctctggtggggcagaaggtgattgaattactcagatatgaagatcatcatctaggttttgtgtaaaaggccctggatattttaagtggccattttggatttacagtgtttttggataattttgccccagaagtttattaaaattggcaagaatcgtctgtgaagtgaattgatagtagtgaacaattcagcaagctacttaaaaagagacccaggcagcatttcttcagtattttggttcaaacggattatataactggttacagtatttcagctggtggtaatttttgcctccccttcccccaccccgttgttggggttcttcagccgaaactgagagacgttgatttgtgtactgagtagtttcagcagtttcaaatgactgagtattgctgaagtttcatggcagtttatttttacctttattgaaagttttaggaatttttgacttcagctctttcatgtcacaatgggacactttttctgaatgaagagattgaaagaatacagagtttttttccttttatcttttatttacgtggaaatttaagatgttgcagttttccggcagcatggtagtattgagatagctatgtgtgtctctgtatatgctgatgtttaggaatgctcttcagatgtgaaattttctttttgtttttgctttttggctcgtaaattggatatttcatctggagtggacaagtacaacagtggcaagtacatggaataataaagaagactttgatcttaaatctaaagaacttggctaattcgggagatagccatatgaaaactttaaaacagaagtatgggtagctgacttgaagtaactctatgtcaaatagtcgtaggttaagtatcttcaaagaacttcgatattatttcagaggatacaaaataaaaatacaaactggaaaataaagattacagagaaaaaaccaacaccttcctgtgcagtcctgttggaatttggacttgccatgaggtgttgaagccttgtttcactgagttggagagactggacctaaatggcgcagcatgactttgctccagcctggcttaatttccctactccaccatcatcaacaaagtcgtcattgaattttgagaagcattctgaaaactttgcatggacagagaatcgttatgatgtgaaccgtcgacgacacaactcttcagatggctttgattctgctattggacgtcctaatggaggtaactttggaaggaaagaaaaaaatggatggcgtacacatggaagaaatggtacagaaaacataaatcatcgaggtggataccatggtggaagttcccgttctcgtagcagtattttccatgcaggaaaaagccaaggactacatgaaaacaacatacctgacaatgaaaccgggaggaaagaagacaagagagaacgcaaacagtttgaagctgaggattttccgtctttaaatcctgagtatgagagagaaccaaatcacaataagtctttagctgcaggtgtgtgggcctacacgcccagacacacacatacccaaccaaaaaaatctcccaagctcctctcttagaatatcctccgaatcctaaatctagagctccaaggatgctggtcattaagaaaggtaatacaaaagacttacagctatctggattcccagtagtaggaaatcttccgtcacagccagttaagaatggaactggtccaagtgtttataaaggtttagtccctaaacctgctgctccacctacaaaacctacacaatggaaaagcc

SEQ ID NO: 15059 - DNA, 1062 bp, Homo sapiens
  misc_feature (1)...(1062): n = a,t,c or g
gcctactgcaccgccgaccacaacgtgagccccaacatcttcgcctgggtctacagggagatcaatgatgacctgtcctaccagatggactgccacgccgtggagtgcgagagcaagctcgaggccaagaaactggcccacgccatgatggaggccttcaggaagactttccacagtatgaagagcgacgggcggatccacagcaacagctcctccgaagaggtttcccaggaattggaatccgatgatggctgaatgaacttgagacgcttcagcaaaggcagcattggtcacggagttcaagggaatagatgagtaagcaacgtttcaaatttgggatgaaaagactgccaaactattggctgaccaaggtttttaaattcagaagagcaattctaaatctaaagaaatgtatcattaaagtaattacgttacattgaaacctgctgctgctgtgactgtgaggagggtgggagtgtggatggggaggaaggttctaggctctcttcttatttttctcatttcccaatgcctctctgtgggagagctccatgccagttttcaccacgctcaggcaaatactctgcagctgttattggatgggccattccgatctgccttatgaaattccacaagaatgttaggggcacctatgggatctctagtggggtgggcagggtgctgatggggacgctggccgcagggaggaaggaacatctcgggagggccctctgttcctctcccacgggcagatgccctcctctgtatgcaaatcagcacagcctttattgagctttacaactaacaacctgatagttggcagttaattcatagttacagataatgcttttatttacataaatataccaagtagtaccctcttattgtattcacttcatctattttcttagaatacttgcaattactaatgaccccttccctttcctcctgctgccctgtccaacctctttcccttctaacatccttagagggatgaaatccaacatatgttgcangacaccaaaaggaagaaacatcaagcantaaattaacatcaaacaa

SEQ ID NO: 15060 - DNA, 3459 bp, Homo sapiens
tccaagatggcggaactgcagctggacccggcgatggcggggctgggagggggcggcgggagtggggtgggcgacgggggtggcccagtccgcgggccccccagcccacgcccggctggccccacgccccgcgggcacggccgcccggctgccgccgtcgcgcagcgattggagccgggtcccggaccacccgagcgggcagggggcggcggcgcggcccgctgggtcaggctgaacgtgggaggcacctacttcgtgaccaccagacagaccttaggccgggagcccaagtcatttctctgccgcctctgctgccaggaggacccggagctggactcagacaaggatgagacaggagcctatctgattgacagggaccccacctactttggtcctatcctcaactacctccgccacgggaaactcatcatcactaaggagttggcagaagaaggtgtgctggaggaagcggagttttacaacatcgcgtcccttgtgcggctggttaaggaaaggatacgggacaatgagaacagaacttcacaaggccccgtgaagcacgtgtacagagtcctgcagtgtcaggaagaagagctcacgcagatggtgtccacgatgtccgacggctggaaattcgaacagctcatcagcatcggatcttcctataactacggcaatgaggatcaggcagaattcctctgtgttgtctccagagaactaaataattctaccaatggcatcgtcatagagccgagcgaaaaggcgaagattcttcaggagagaggatcgcggatgtaaactaagaccccgaaaactccagaccttcaggagagcagtcagcagagcccctctgtgaagtgaaaccttactcctgtccagtgaccgagccactgcaaagcacagctgatcctggccccctgtgaagaagtgttctggtcaaaactaaaggaactccctccccacctgcaggactccgaagacagtgcgacttctggctgcagaataccttttcagaaacctgctttcatttgcttagccagtattagaacagatctttacaacagcagctgggctgggttcccagtcggagcctttcggggatctgggggatgagggcggaaggcctagctccttggaaatggcctgtactttaaggacgctggagccaagaggattgttcccgtgccgtgccatggtttcaccctatgtgtgccacaatggacgttagcagctgcttcggaacaccgtccctcctatgcaccctccaagacctgcagcagatgcaaagggttctagctgcagtttgtcgaattgaggttttaggtaaagcatagagttgccagagtaccccgcattcccatgaatagagcctccaaggaaagggaggatggggtgtcctttgttgtggttggaggttggtgatcattgctctggatttggggctcccggctgccaccacatgcagctttgcctcagctttctccagcagccgggaccctctggagagcttgttttccctccaagaagaggtttgagacaggcggcatcctgcactgagtcagacaagtgggagctgtaggaactgcacctgcagcctcttcttactccccattgaccctgtcttccttccctggctttttcaactggaccaaagatgaaggcacttatggaccctttgatggcttggagtggggaaggctgtttctttgaaagttgccaaatgtgttacgttgtgtctcagagagagttatttctgtgactctcttggaaatgccttgactgaatgtgcaatatttgtgtctcttggtttctaaccttggcggacctgctcccctctgtactgtccccagtggtatgtatgtatgtgctaggcagtctggggaccccctgtgtctctgaccacccccctgacccccgccattactttcttttctggagtgccatgctggcgaggatccggatgcggcagcaccctctttcgggctgcatccacagagtttgtgtccacactttctctccgagcatgtgggtctcgctgagcagtcatggaatgcggtagagccaggggaccctgtctgccccgaataactttcagtagtatggcagatggcacagagaaagggaaggggctctggggacttctccttctatgaaagccgcctcgagcccaggtgctcctggggcaacttcagaagtgatgtcctgtgtgctccacagctcacctgcttgccaaggtacgtctgggtagtagtttctggaaatgactgcagactgtgccaaatgtcttttgagcttctgacctgaccatgcccagatggcataacttttccctagggaccctcagtctccttgtttctctgtatctgtagcatagcatagaacccggtatacaggggtttctgctgacacatcaacgtctacacacctatgcgccacattttacagctgtaaagtgttagatgaactgccgtcctcagtaaaagcagccaccccttcaagagtcacaggcatccatccagtcgtatctttcagagaaaaaaaaagttagatgtagccaaggaaagtagtgatcacgggaaggactgctctgagccgggtaggatggaggactttggaagaggcgctccttggccaggtccaatgagtaacatcagactgacagaggaaaagcagcttggtttgcggccttgtgcccagtctcgttgaggcgcttgtccctgtctgctttcctggggcatgcctgatcagcgtgggctggagctcctagaccaaccccagctttctcaccaggttcagcaaggaggcctgggggtcagacaccaatgttgagcacctcctgagggcgccgtttccttcattcctcttagattccatagttgccgccatgaaaagactgctcttgagccccaaggcacaggcacgtgctctgggaaatagacaggagtggtatttccgccctctcggagggctggtgttcaccaagtttccctcctcgctgcaacccaatgacacctgtattgttccagcgctccaggactctgggttcttaagatttctggggagcgttgttcacccaccccctttaagaaccaggctggtgttcttgcttgaaagcgttgtgccctctgagtgtctggctgatcacatcagagaggtctgcgtggcagtttggggctgtcacgtgaccagtgacccacactctctgctgcccagtactgccaagtggggagggtcctgcctttttctctgcccccaggtctgggacgcaggtgatgcccagcccaggccccaggagtgcccagcatcccccaactgatgacacagtagcactgattctgtcttttcctcagaatctggcctttttccatggcaatgaggtggggcccagccctcctctaaagtgactttgtttctacacaactctgtgtggcttttggacaaattaaagctagttttggt

SEQ ID NO: 15061 - DNA, 1057 bp, Homo sapiens
gaaacccctgctattagaccaccccctcatggcacaactgcccctcacaagaattcagcttcagtgcaaaattcatctgttgcagtcctcagtgtcaatcacattaaaagacctcacagtgttccctcttctgtccagctaccttcgaccttaagtacacaaagtgcttgtcagaattcagtacatccagcaaataagcctattgctcccaatttcagtgcccccttaccatttgggccctttagcacattgtttgaaaacagccctacttctgctcatgccttctggggaggatctgttgtttcatctcagtcaacaccagaatctatgctatcaggaaaatcctcatatttgccaaattcagatcctttacatcagtctgatacttccaaagctccaggttttagaccaccattacagagacctgctccaagtccctcaggtattgtcaatatggactcgccatatggttctgtaacaccttcttcaacacatttgggaaactttgcttcaaacatttcaggaggtcagatgtacggacctggggcaccccttggaggagcacccgcagctgctaactttaacagacaacatttttccccgcttagtttgttgactccgtgttcatcagcatcaaatgattcttctgcacagtcagtatcctcgggagttcgtgcaccatctcctgccccatcatcagtaccgttagggtcagaaaagcccagcaatgtgtctcaggacaggaaagttccagtccctattgggactgaacgttctgcacgtatcaggcaaactggaacgtcagctccatctgttattgggagcaatttgtctacatcagtaggacatagtggcatctggtcctttgaagggattggtggcaatcaagacaaagtagactggtgtaaccctgggatgggaaatcctatgatccacagaccgatgtctgacccaggagtattttcacaacatcaagcaatggagcgagatagtacaggaattgtaactccttctggtacattccatcagcatgttcctgcaggctacatggactttc

SEQ ID NO: 15062 - DNA, 686 bp, Homo sapiens
aaaccttccctacagttataaccacgtgtaattttgtggaaatgatataacagctattaatactactataacataggcataaatattttcgtgtttatatgcatatacaagttaaaataattagaaactatgactgcgcctagtaaagtcatctaggtttatagttcagtagcttaggcaaggcacacactgctcatctccgctttttagggtcagaggaacacaagctcatgttctgagtgaagggcgtacactggcacctggtgttgcctagatcccccatctcctccttccagccaggtctggaagtttcaacagcccaagcttaacttcatgtaaagtcttcactgccagtggggaacatctttggacacaacaagacactccaattgtgatttgagttgaggatctctgcctgccttcctgccgtccttccttcttccccgatccatggctacttttaggggctgcggagagcagcagcagagctgagtaatgatacagggcaccacggagagaaagtagaaccatttcactcctgggaagatggggtatttcccacttccagcaacgaaataacaaatgaaaagttgcatacttattgatgtattgtatgagccagtagcattttatgtacaaaacagaagtcaatgcaacagtatgtatgtgtgcctgtgtgtgtataa

SEQ ID NO: 15063 - DNA, 739 bp, Homo sapiens
actgcacctcctgaatgtcctctgcttctctgcttcagaggcccaggctcgccagttctctgacctctcccatatgtctgcttaggactctgctgcagctgtcctcaccagcctccggggaatcccactacccacagggcagggctgtgggctgggctgaaaaaccatctgcatggtccacaagaagcctggcactgggtttccccatgaataacaatgaaaattaatggatgcacaaccttcctggaacgtggaatttctctgggagattccatgcagaggccactggggaggtggcaggcatgcatgtgactgtaggtggctgcagtgttggaaggctcccagcagagcagagagggtgtcagtctcatcagggaacccacctgatggcttctcagccagcagtctcagaggaacatagacgactgctgagaaaggagggaggcagcagtggtcccagcacctgaggcatcctgctgtcatgggaaggtctccgcccaaatgtcagatgcatcagcctgtcacccgctggtccagagctttcagctgtactggtagggggtgggtggtggagtgctgattgaccttcacaggtgggcctttccagctctagggtcttacgggtgtcggtccacagaaccacggtttttaggttgtgtgtccggggctatgggaacctgtcccccatgatggatcttggtagagacacttccctctgtcaatcgtgcccaggaggaat

SEQ ID NO: 15064 - DNA, 479 bp, Homo sapiens
  misc_feature (1)...(479): n = a,t,c or g
gctggaaccctcattcactgctggcaggaatgttagatggcacagccaccataaaaacacagttcctcaaaggttgtcccacaatgagaccactgtagcttgacatgcaattgtaagaagtaacacagagactccgtgtacactttgcccagagcattaatctcctgcagttaccttaacaaagtatcataaattggttaacttaaaacaacctaaatttatttttatcttttcgcagttctggaggccagaagtgtgaaatccggctgctggcagggctgcgctctctctgaaggctctaggaaaggacactttcttgcctcttccagcttctggtgattaccagcaatccttagtnnnnnnnnnnnnnnnnnnnnnnnnnnnnnnnnnnnnnnnnnatcctccatggccacattctgaggtgctgggtggatatgaatatccaacacatttcaatctggtagtctttttctgccgcc

SEQ ID NO: 15065 - DNA, 1549 bp, Homo sapiens
ttttttttttttttaaattttaaatatacctttatttctcaaactcaaagctttatcaagttctaacacattttgcattgacaagtgattttatctgcatcaagtaaggttagtgaccaccacgaaagaggaatccccagacctcctaggcactaagaaatatttcaaagggctatggcaaatatagaacaaaaagctttcaatttagtctaattggtatctatttttcatctatattaatttggaaataagttgctaccttagaaaaattacatttttatccattaaaataaaacaccagataggttgagtttttttaaaaacacccacagatctgtatttagctacttcctctttagtagatggtcatctcaccttcctatgcaaacacacacaagaatttgcaccaactctcactagcccaggcaaaactccaagcattttatttagcttacacttcaattatttttttaaagtgataggtaaacaagatttaggcacttgaacacacacacgcgtacacacacgacacacggtgttttatttcctgatcttaaccttagagttctccacaaataatcctgaaaagttgccagatctttaaaaatacctctcctcaacaccgcccccctcccccacgacttggtcctctgattttaactggttgaattggaatatgttccaaagcgagctgtgaaattctagtctctgcaagattaaggatgtgaatctaaccttggaaactggattcttacaaagtccacccagaaggttttccctgacacagagccctggtccgacacccaggaaggaatggcctctatgagcgtcagggtctcgtctcaccattggataactactttgctctcaaaaagaggacatttgagctaagaatatagctgtatcccaatacaaggcaccaaccagtaccagaaagtaaactacaaaggagttattcctcaagttaggaagttgcttttgagtggcaccatttcccaaagtcaacaaagcagtactagttaaaatcctgacgtaccataagggtaaggggttagtgcagaggtgaagctgaagaataagcagattcagggttttagcaatttgattattaatgtgtcaccacaaaacacaagttcatacacagcttgctgtgactcaaaccccagtgaaaatcaaactggacaaaaactgaaatgccaaactacatctgtagcatctatcaggaactaagcatcatcttccttacccaactcaccccatctgccaggtcccccaggtgtgggccatcccacaggcatccccatcaggaactctgattggaaggcattagtaatagagttcagtttcagcattgaaattattgaatgaggaataatgtgttactgccaaggtaagatttaaaggggagactagagctcaaggtcaggcatctagtgcgtgctattctgccaatgtgagaggaaaaggtactgtcttcatctcactgatgctcaacctgactccaagcagcaggctaggagaacaggctgcagacatgccgaaagcatca

SEQ ID NO: 15066 - DNA, 459 bp, Homo sapiens
ggtggttcttccctcatgaatagatcaatgctattatcgtggaagtgggcttgttattgcaggagtaggttccttacaaaaggatgagttcagcctccttttgcctctttctctccctcattctctttttgcccttctttcatgggatgatgcagcaagaaggcccttgccagatgccagcaacttgatattgaacttctcatcctccagaatggtgatggccacagtggcagaacctaggaagccaagaagaaaccagagaatggagacacatggcagcaatggcaagtcatcagacccaggatttcccaaagaacactggtccaggaagatgctctgtgaaaaagtgttccctggtcggagaaatttgtgaaacactttgcataatacttaaaagaatgtatgggcacatcaaaggtaatatgcaataaaagaattcttttttttaaaaaaaaaaaa

SEQ ID NO: 15067 - DNA, 604 bp, Homo sapiens
gtctctttttgcccttctttcatgggatgatgcagcaagaaggcccttgccagatgccagcaacttgatattgaacttctcatcctccagaatggtttgtttttcctctctgtcatacctcaagaggaacacaaagagtgatggcctgtcactctgatgcctctctctactcaaatggcagaaaccaaccagttaggttctgtcaatagaagatactaaagaaagaaagccaggagaagaaaagggacttctttcttcaaggtctaagctgttctaatagcattattctgggaatggcatcttccactcctcctagtacaaagaacctgcttcctcataccccgtcaaggaactgcagcatccaggtgatggccacagtggcagaacctaggaagccaagaagaaaccagagaatggagacacatggcagcaatggcaagtcatcagacccaggatttcccaaagaacactggtccaggaagatgctctgtgaaaaagtgttccctggtcggagaaatttgtgaaacactttgcataatacttaaaagaatgtatggcacatcaaaggtaatatgcaataaaagaattcatttttttaaaacca

SEQ ID NO: 15068 - DNA, 599 bp, Homo sapiens
tttttaaaatcattctcaagtctttaattaaaatccatagagcatttaacatgaacagatgtttaaactctttcagtgactctcatattttaaaatcctttgcacagcatcgtgaggctaacttcatgctagaaatctacggataacgtaacaccacaaaaatacattcggagtccattccaatgcaagtttaaaacactttaattggcagacaatgtaaagatatttaaaatcaaaaattacaaaatgagcacataaaagtcttcccttttgaatttttaataaaatacttctctgtataagatctaatgaaaaattccagttacttataaaatagttgagaaatcaattaagatatgtatctatatatgtatgaattacacttttgtttaaatgaacaaaatgttgaacacttcaatgacagcaacagcatctattactcacattaaactagatgaaaatactacaagaagcagttggatacaggcaaaagagaatatgatacttaaagccaaaagacaaaaaaatccaaaaaacgaaaacaacctccccatcccccaccaaacccttaactgtaagggaaagaaaggaagagagaa

SEQ ID NO: 15069 - DNA, 775 bp, Homo sapiens
tttgacatttgaactgatgataggatgtttgaagtttgcttcaaaatataatattcagcatgaaagtggttagtgagaaatataataggaaacaagattgaccgtaaaccaaattgttacagctggctgacacacacgtcgtagttccttttgttcttcactgtattttggtatagttttgaaatttttcataataacaaaaggctattttcaatgcgtggtcctgagcaaggatatagaaagctccatctttgggtaggagtggttgagctgtagtgcacaaactggatgctgttgctttgattgttttgattgttcaagaccttttgactccagcagagctccttgatgagcttctctcagcgtctggaccagtgaccatgtgtcacgtgctggtgaacccctggccagggcccaataaatattgaatgagtaaatgaaagccagaagacctaaccgtgatccctttcttcttgtctttgcaagcggagcccagggagaatatgctggactggccactatccgagcctacttaaaccagaaaggagaggggcacagaacggtttgcctcattccgaaatcagcacatgggaccaacccagcaagtgcccacatggcaggcatgaagattcagcctgtggaggtggataaatatgggaatatcgatgcagttcacctcaaggccatggtacttgtcttctccttagcagatgggagaggccgggatggggagtgctggtggggatcagggacttgatggattatgtaaatgtct

SEQ ID NO: 15070 - DNA, 853 bp, Homo sapiens
cacgcgtccgcggcttcccttccacagcacggcgaccggggcttcccctcagcagctgccggcgcctcagtctccgcggccagcccagctccgccgcgtccgcggcccgccgccgccatgcagtttatgttgctttttagtcgtcagggaaagcttcgactgcaaaaatggtatgtcccactatcagacaaagagaagaaaaagatcacaagagaacttgttcagaccgttttagcacggaaacctaaaatgtgcagcttccttgagtggcgagatctgaagattgtttacaaaagatatgctagtctgtatttttgctgtgctattgaggatcaggacaatgaactaattaccctgggaaataattcatcgttatgtggaattacttgacaagtatttcggcagtgtctgtgaactagatatcatctttaattttgagaaggcttattttattttgggatgagtttctttttgggaggggaagttcaggaaacatccaagaaaaatgtccttaaagcaattgagcaggctgatctactgcaggaggaagctgaaaccccacgtagtgttcttgaagaaattggactgacataactctcctcccttgttgatgacttcttgtggcatttcacacactgtagatggtcactcccttcatgtccatgttagctcatggtgtaagatgatgtcttgtcagtattactgttttgctaagccgcttcattcatgcctacacaatttttttttaaaagggaactttagttaattaagtgataagggacttaaatatgaattagaatggtgcagaaagagataccttttctggatattttaaagtttaaaggtcagtttc

SEQ ID NO: 15071 - DNA, 878 bp, Homo sapiens
cagggtgtttgagatgcggtgtggcaggttgttgtagccgctatggtgaagttcgctttgtagcggccccggctagagagttggcctgttccctgcctttgtgacccggaggagcttttggggtgcgtcaagcccctggcctggaggcagcggtttacattccacttaggtggtggtatttctgtttcgtacagaactggtttgtggcctgtttgattcctgtcagaggtttgctgacccaagacagtatcgaaaatgcatattaagtcaattattctagagggattcaagtcctatgctcagaggaccgaagtcaatggttttgaccccctcttcaatgctatcactggcttaaatggtagtgggaaatccaacatattggactccatctgctttttgctgggcatcttccaacctgtctcaggttcgggcttctaatttacaagatttagtttacaaaaatgggcaggctgatattaccaaagcctctgtgtcaatcacttgtgataattctgacaaaaagcaaagtcctttaggatttgaggttcatgatgaaatcacagtaacaaggcaggtggttattggtggtagaaataaatatctaatcaatggagtcaatgccaacaacaccagagtacaggatctcttctgttctgttggccttaatgttaacaaccctcactttctcatcatgcagggccgaattacaaaagtattgaatatgaaacctccagagattttatccatgatagaagaagcagctggaaccaggatgtatgaatacaaaaaaatagctgcacagaaaactatagaaaaaaaggaggctaagctgaaagaaattaagacgatacttgaagaagagattactccaaccattc

SEQ ID NO: 15072 - DNA, 839 bp, Homo sapiens
gctagacttcttacgtggcgtcttgaggctgcaaagatgcatgtgccaagatagatagcactaagcagctgcagcctcacctgttatgacttagcctccaaagtcatgcagcatcacttcaccacattgtattgatggaggcagttacaaaggtgtgcgccattcagagggcaggacatcaactccatctgtctatggaggcgtgtcagctttacattgagcatgtaggatgggatatatcttgatgtggccatctttggaaaacaagggccaccataccatcagtgtgcccatcaatctgtctgactagctatctacctttccatgcatctctctctctacccactcacccattccatctttccacccttcagacgtctgtccttctgtgtgactgtctgttcttctgtctatcccaatcacctaacacattttgaggacctgtgtgccaggcacagctatgtgaattcaataatgagctcggagggagaatgagactaatgttgattgagaacctagtgaatgttagtcccttgatcttcaaaacaactccatgacttagaattatcatctttattttcctgggaagaaaccaagacacaagctaaataacttgcccagggtcattcagccaactaatgtcagggtcaggacttgaactccaggacttcctgactaccctgtctctgcgataggatacaggctctcttttggtttctgagtgttaaatgtctactaagagttagttctccacttccatttttttcccaagcgaaaatagtttttcttccctgactataaaaataacatgttcattacaaaaacattcaagcagtaca

SEQ ID NO: 15073 - DNA, 555 bp, Homo sapiens
ttgcaggcgccgagatggcgggccagggccgcactccggagactcgcggttgctacgcgcaccatggctggagcgcccacggtctcgcttcctgaactccgttcactcctagcctccggacgggcccggctcttcgacgtgcgctctcgcgaggaggcggcagctgggaccatcccaggggcgctcaacatcccggtgtccgagttggagagtgctctgcagatggagccagctgccttccaggctttatattctgctgagaagccaaagctggaagatgagcatctcgttttcttctgtcagatgggcaagcggggcctccaggccacgcagctggcccggagtcttggatacactggggctcgcaactacgctggagcctatagagaatggttggagaaagagagttaggcaggaggcagcttactgattgccaccccctggccccttaatggccaccttaactaagggtgtgaacgggctgacttggtgaattgggcaactccttatagtgttgtgcacacaaaagcatcaaataaagaacatttaatcaaa

SEQ ID NO: 15074 - DNA, 1461 bp, Homo sapiens
aaaccttagcaagatggcggctccctgggcgtcctgcgctggtcgccccatgtggaatgggcgtatcaggggcatccatcgcctgggtgcggcagtggccccagagggcaatcagaagaagaaaaggacaatactccagttcctgaccaactatttctacgatgtggaggctctgagggattacttgctccaaagggagatgtacaaggtgcatgagaaaaatcgatcttacacctggctggagaagcaacatggtccatacggcgcaggtgcctttttcatccctgaagcagggaggcgcagtcaagtttcgagacaaggagtggatcaggccagataagtatggccatttctctcaggagttctggaatttctgtgaagtgcctgtcgaagctgtggatgccggtgactgtgacatcaactacgagggcctggataacctcctccgcctgaaggagctccagtccttgtcgctgcagcgctgctcccacgtggacgactggtgtctcagccgcctctacccactggccgactcgttgcaggagctctcgctggccggttgcccccgcatctccgaacggggcctcgcctgcctccaccacctccagaacctccgcaggctggacatctcggacctccctgccgtgtccaaccctggcctcactcagatattggtggaggagatgctgcccaattgcgaggttgtgggagtcgactgggctgagggcctgaagtcagggccggaggagcagcctcgggacacagccagccctgtccctgcctagcctttagccctgtccccactcacgtggcttctcagcgggctgcatggaatgtctggtagctcaccacacttctggcttccatttgtcttcactcaacgtcagggtgggggagtggtgctggccaatcacaggagagagcgtgagttcccagtatttattcctggctgcccttggctaaaaggtcacagctcctgtcaccctgtcagggcagccctttccatgcccctgttcaggcctggggaggtaaaggctcaggctgttagtagccgcagagagccacactcaccttgtcaggagactcttctcaaactgtccttatgtgagtgcactgccatttcttgcagggaccctgactgacacaggggctactactgacactttacagggatggttctcccccgtgcagggccgctgtgcccactgcaggacatgcagcatccttcgccccactccactcactaaaggccagcgcaccccaggccccatagtattgctggttatggatttattgactttatgttccaaattcagctttttcagttggctgttttttgaaaggggataagctttgtcagtagagggcaccaaacaggcattataggaggaaaggcgcctccttcgtggttcttgttggttgtgcttctgccctctggacgccgcagtgcatgtggcttcc

SEQ ID NO: 15075 - DNA, 2107 bp, Homo sapiens
agtaaaaaaagagacaaatgaaataaattttagaacagtccagcaaattgctagtcagggtgaattgtgaaattgggtgaagagcttaggattctaatctcatgttttttccttttcacatttttaaaagaacaatgacaaacacccacttatttttcaaggttttaaaacagtctacattgagcatttgaaaggtgtgctagaacaaggtctcctgatccgtccgaggctgcttcccagaggagcagctctccccagggcatttgccaagggaggcggatttccctggtagtgtagctgtgtggctttccttcctgaagagtccgtggttgccctagaacctaacaccccctagcaaaactcacagagctttccgtttttttctttcctgtaaagaaacatttcctttgaacttgattgcctatggatcaaagaaattcagaacagcctgcctgtccccccgcactttttacatatatttgtttcatttctgcagatggaaagttgacatgggtggggtgtccccatccagcgagagagtttcaaaagcaaaacatctctgcagtttttcccaagtaccctgagatacttcccaaagcccttatgtttaatcagcgatgtatataagccagttcacttagacaactttacccttcttgtccaatgtacaggaagtagttctaaaaaaaatgcatattaatttcttcccccaaagccggattcttaattctctgcaacactttgaggacatttatgattgtccctctgggccaatgcttatacccagtgaggatgctgcagtgaggctgtaaagtggccccctgcggccctagcctgacccggaggaaaggatggtagattctgttaactcttgaagactccagtatgaaaatcagcatgcccgcctagttacctaccggagagttatcctgataaattaacctctcacagttagtgatcctgtccttttaacaccttttttgtggggttctctctgacctttcatcgtaaagtgctggggaccttaagtgatttgcctgtaattttggatgattaaaaaatgtgtatatatattagctaattagaaatattctacttctctgttgtcaaactgaaattcagagcaagttcctgagtgcgtggatctgggtcttagttctggttgattcactcaagagttcagtgctcatacgtatctgctcattttgacaaagtgcctcatgcaaccgggccctctctctgcggcagagtccttagtggaggggtttacctggaacattagtagttaccacagaatacggaagagcaggtgactgtggctgtgcagctctctaaatgggaattctcaggtaggaagcaacagcttcagaaagagctcaaaataaattggaaatgtgaatcgcagctgtgggttttaccaccgtctgtctcagagtcccaggaccttgagtgtcattagttactttattgaaggttttagacccatagcagctttgtctctgtcacatcagcaatttcagaaccaaaagggaggctctctgtaggcacagagctgcactatcacgagcctttgtttttctccacaaagtatctaacaaaaccaatgtgcagactgattggcctggtcattggtctccgagagaggaggtttgcctgtgatttcctaattatcgctagggccaaggtgggatttgtaaagctttacaataatcattctggatagagtcctgggaaggtccttggcagaactcagttaaatcctttggaagaatattttgtaagtttatcctaagaaagatagcattgggaggttgagggattcccaaaaacattttaattttttaaaatatcctgtgtaacacttggctcttggtacctgtgggttagcatcaagttctccccagggtagaattcaatcagagctccagtttgcatttggatgtgtaaattacagtaatcccatttcccaaacctaaaatctgtttttctcatcagactctgagtaactggttgctgtgtcataacttcatagatgcaggaggctcaggtgatctgtttgaggagagcaccctagggcagccctgccagggaataacatactggccgt

SEQ ID NO: 15076 - DNA, 1278 bp, Homo sapiens
  misc_feature (1)...(1278): n = a,t,c or g
gcggccgcgccctgcatgcgagttgggccgcgggcggtgttggagcctactcggggcgactgcgatggacgccttagaaggagagagctttgcgctgtctttctcctccgcctctgatgcagaatttgatgctgtggttggatatttagaggacattatcatggatgacgagttccagttattacagagaaatttcatggacaagtactacctggagtttgaagacacagaagagaataaactcatctacacacctatttttaatgaatacatttctttggtagaaaaatacattgaagaacagctgctgcagcggattcctgagttcaacatggcagccttcaccacaacattacaccatctgttcccgtttgcaggcaccataaggatgaagtggctggtgacatattcgacatgctgctcaccttcacagattttctggcttttaaagaaatgtttttggactacagagcagaaaaagaaggccgaggactggacttaagcagtggcttagtggtgacttcattgtgcaaatcatcttctctggccagcttcccagaacaatctgcggcactaggtcctacctccagccaatgaatgggatcattctggatgtcaccagcccaatagggttcagctcatgatgacagaacacatcttgggaaagactgactctgttatgtaactcttcatttatgttaagtattaataggtcaaaaccaaaatgacctaaccctcctggacctatttatcctgaaacaccttcttgtattcattaaccatagtactcctccccacctcaagtagacacctctctcaggagcttctgagtcagacgcctctggagcgagccctatgtcaggcactccacctggggggcccttccccagcatacctgctggtgtgtaagtgtggactaacccgccgccaccaccctctgttccagcaggctctgcatgaatctttgtgcacttgcacctctttttcacatgggccacagtttcagtacttcagcctcagtggggttcctgatgtttatctagggtgttactcaagcccagtttgagattttgggagtctcctgtgatcacatcttgtgttcgggtgtagggattcaacaggaggagacgtcctctacataaaaagctccatgtggaaaagctactcctagtctttaacatttggcagtccttgtgttcactgtcttctgggtccnggatgtagtcccactgttttctaggaagtctctttttaaggcattatttttggaaaaaaaaa

SEQ ID NO: 15077 - DNA, 357 bp, Homo sapiens
cgatgtcttctgggtatttggcaccaatgtgatggtgacagtggccaagtccttcgaggcaccaataaaatggatcttcattgccttgctgctgcgctttgacatcagcttgaagaagaatacccacacctacttctacaccagctttgcagcctacatcttcggcctgggccttaccatcttcatcatgcacatcttcaagcatgctcagcctgccctcctatacctggtccccgcctgcatcggttttcctgtcctggtggcgctggccaagggagaagtgacagagatgttcagttatgaggagtcaaatcctaaggatccagcggcagtgacagaatccaaagagggaacagg

SEQ ID NO: 15078 - DNA, 557 bp, Homo sapiens
acaaggcccattgactcatctgatgcttgttttgttaatttctttaatatttttatcacggggcagtgggagggcttgggcttttagccacagctgttttaagacttctgatctcctgccctgcaggaataggtgggaagtcattgaatttttacactatagtaatttgcattcccacataagtttgagtgttacgaaaacattcctttaaagggatctgtgctacacaaaatatgccaggacctcacagacaaagccattgctagaaaatgtcattccaatgatcagatctggaaacaggctgccataaccacttttccttcttgtagactcagctcacctgtatatttaaactgttcttggcatcttgaaacacctatttctactcaggtactcattgtcctgttactgattcacctttctgatccttttcaaccagttttcccccaaggggggaaattttacttaacctctagtatttgaacaactcaatatttgaattgttgccccatttgcttttacctgtactgtattcttggtcatctcaaatggcgtct

SEQ ID NO: 15079 - DNA, 892 bp, Homo sapiens
aatgtatcaagtaattctgaaattcttggggtccggccatctaatgtttccagtagttctgggattattgcagcccaaccaccaaatattctaaataactctggaatattgggaatacagccacccagtgtgtcaaatagttctggacttttgggagtgctacccccaaatatacctaacaattctggacttgtaggagtacagccaccaaatgttccaaatactcctggacttctgggaacacagccaccagctggacctcaaaacttaccccctttaagtatccctaatcaaaggatgcccacaatgccaatgttaggacattcgtccgggactaataccacaggcacctgggccaagattccctttaatacagcctgggaattccaccccaacggggaatcccacccccatcggtacttgattcagctcttcatccaccaccccgtgggaccttttcctccaggagatatttttagtcaaccagaaagaccttttttagctcctggaagacaaagcgtagacaatgttactaacccagaaaaaaggataccacttgggaatgataacattcaacaggaaggagatagagattaccggtttcctcctatagaaaccagggaaagcattagtagacctccccctgtggatgttagagatgtggttgggcggcctatagatccaagagaaggtcctggacggcctccactagatggtagggatcattttggaagacctcctgtagatataagagagaatcttgtgaggccaggtatagatcatcttggtcgaagagaccactttggctttaatccagagaagccctgggggcatagaggagattttgatgagagagagcatcgggttctaccggtctatggtggccaaaagg

SEQ ID NO: 15080 - DNA, 793 bp, Homo sapiens
ggctgacaataccctgtggatactgtgtcctcctcccagtcagcctctacagaccatcactgtagcagcctcaggtttcccagctcatggaactggcttcccagagggaacaactctcacactgttacctgagtatagacaacacgtctttgtcatctcaacatctcctgtatcatctgacacagtgtttaacacacaggagataataaataagaaaaaataaagaaacgatagaaggaaggaaacaaaaacagactataactgtctctccccttcctcctggatactcacttctccttctgtaggttctcaatctgctcagtcagtactctctcctcctgctgcatagctgcttgctgctggttctgtgatgtcagtctccatggctgcctcactagtcaaggtctcctctgagacatcagacacaggaagggcaccggaactacaaccaggagacgatggacctggatagtttcctcgacgaatacgccccttttccctgcagagaaaaattccatgttagaaagtaaattgagtgactgccatcagttttacattgctcttttaggataacaagtgtatttcccatcacacccaggtgaatgataagaataaatggaaaacacctgcgaggcctaggatatttagtgagacatattcatacaacacatttaagttaaaatatttcttgcaggagtactggaaaacggatactttggtaggtgggagtgtaagaacccattgtgtactgagatgagtttcttcttttaatataagctgcatccattccaaa

SEQ ID NO: 15081 - DNA, 436 bp, Homo sapiens
gaggaggtacaggtggaccagatgacggcctctgcctgtgaaatccaaattccagtgttcccagccattttctctttttagagtgcacatcctgtgggtggtttgcagttcaggctgccacagtaccccaaaaggcccccctaactcttaatctggagtcagcgtttccctcaggtgcactccctgtgggatccctcaagggtggaaacaggaccaagaaataccaggatgctagagtccctctgatagtgccagggacatctgatccttccatttgggctggggcaatgttgtcagacatgtcatcattcaaggaagtgacttcccttcctggactggatggctgaggctgaaatgtctgaggcatttcaaggggtagtaccacaggatatgggtaatgtttatagtatacagtgtgatggttttggatatttgt

SEQ ID NO: 15082 - DNA, 711 bp, Homo sapiens
tctgctttcatcagggctgcagcccccaggcagcagtactgggagcccctctcatctccgagaataaactctgaagccagcgaccctgcggacctgaatcatcagggagcctgtcagaggaggggcagtgactctgcgggacaagcaagcaggctatataagtttcagaaggctgggctccactcagatcttttccagcagctgctgcctgccagagaggcgccttcagagacccagcgcttacacaatacccaccatgtcccaggctggtgctcaggaagcccctatcaagaagaagcgcccccctgtgaaggaggaggacctgaagggggcccgaggaaacctgaccaagaaccaggaaatcaagtccaagacctaccaggtcatgcgagagtgtgagcaagctggctcggccgccccgtcggtgttcagccgcacccgcacaggtaccgagactgtctttgagaagcccaaagccggacccaccaagagtgtcttcggctgagaagtgtgcgccactccccttgctgcccgaatgctcggaaacaggagccttacccaggaactctttttttatgccagaacgcttcctctcccctgctgtctctggggctgccaccctcccccacagtccaggcccttcagccaagggctctgcaccagcaccttggaagcaccaataaagaggatgcccacgtggccccagcaatc

SEQ ID NO: 15083 - DNA, 4848 bp, Homo sapiens
  misc_feature (1)...(4848): n = a,t,c or g
gcggaccggccgggtggaggccacacgctaccccgaggctgcgtaggccgcgcgaagggggacgccgtgccgtgggcctggggtcgggggagcagcagaccgggaagcaccgtgaggaccgaggatttggggtggaaggcaggcatggtcaaacccatttcactgacaggagagcagagacaggacgtgtctctctccacgtcttccagccagtaaaagaagccaagctggagcccaaagccaggtgttctgactcccagcgtgggggtccctgcaccaaccatgagccgcctgctctggaggaaggtggccggcgccaccgtcgggccagggccggttccagctccggggcgctgggtctccagctccgtccccgcgtccgaccccagcgacgggcagcggcggcggcagcagcagcagcagcagcagcagcagcagcaacagcagcctcagcagccgcaagtgctatcctcggagggcgggcagctgcggcacaacccattggacatccagatgctctcgagagggctgcacgagcaaatcttcgggcaaggaggggagatgcctggcgaggccgcggtgcgccgcagcgtcgagcacctgcagaagcacgggctctgggggcagccagccgtgcccttgcccgacgtggagctgcgcctgccgcccctctacggggacaacctggaccagcacttccgcctcctggcccagaagcagagcctgccctacctggaggcggccaacttgctgttgcaggcccagctgcccccgaagcccccggcttgggcctgggcggagggctggacccggtacggccccgagggggaggccgtacccgtggccatccccgaggagcgggccctggtgttcgacgtggaggtctgcttggcagagggaacttgccccacattggcggtggccatatccccctcggcctggtattcctggtgcagccagcggctggtggaagagcgttactcttggaccagccagctgtcgccggctgacctcatccccctggaggtccctactggtgccagcagccccacccagagagactggcaggagcagttagtggtggggcacaatgtttcctttgaccgagctcatatcagggagcagtacctgatccagggttcccgcatgcgtttcctggacaccatgagcatgcacatggccatctcagggctaagcagcttccagcgcagtctgtggatagcagccaagcagggcaaacacaaggtccagccccccacaaaggcaaggccagaagtcccagaggaaagccagaagagggcccagcgatctcatcctgggactggctggacatcagcagtgtcaacagtctggcagaggtgcacagactttatgtaggggggcctcccttagagaaggagcctcgagaactgtttgtgaagggcaccatgaaggacattcgtgagaacttccaggacctgatgcagtactgtgcccaggacgtgtgggccacccatgaggttttccagcagcagctaccgctcttcttggagaggtgtccccacccagtgactctggccggcatgctggagatgggtgtctcctacctgcctgtcaaccagaactgggagcgttacctggcagaggcacagggcacttatgaggagctccagcgggagatgaagaagtcgttgatggatctggccaatgatgcctgccagctgctctcaggagagaggtacaaagaagacccctggctctgggacctggagtgggacctgcaagaatttaagcagaagaaagctaagaaggtgaagaaggaaccagccacagccagcaagttgcccatcgagggggctggggcccctggtgatcccatggatcaggaagacctcggcccctgcagtgaggaggaggagtttcaacaagatgtcatggcccgcgcctgcttgcagaagctgaaggggaccacagagctcctgcccaagcggccccagcaccttcctggacaccctggatggtaccggaagctctgcccccggctagacgaccctgcatggaccccgggccccagcctcctcagcctgcagatgcgggtcacacctaaactcatggcacttacctgggatggcttccctctgcactactcagagcgtcatggctggggctacttggtgcctgggcggcgggacaacctggccaagctgccgacaggtaccaccctggagtcagctggggtggtctgcccctacagagccatcgagtccctgtacaggaagcactgtctcgaacaggggaagcagcagctgatgccccaggaggccggcctggcggaggagttcctgctcactgacaatagtgccatatggcaaacggtagaagaactggattacttagaagtggaggctgaggccaagatggagaacttgcgagctgcagtgccaggtcaacccctagctctgactgcccgtggtggccccaaggacacccagcccagctatcaccatggcaatggaccttacaacgacgtggacatccctggctgctggtttttcaagctgcctcacaaggatggtaatagctgtaatgtgggaagcccctttgccaaggacttcctgcccaagatggaggatggcaccctgcaggctggcccaggaggtgccagtgggccccgtgctctggaaatcaacaaaatgatttctttctggaggaacgcccataaacgtatcagctcccagatggtggtgtggctgcccaggtcagctctgccccgtgctgtgatcagggcaccccgactatgatgaggaaggcctctatggggccatcctgccccaagtggtgactgccggcaccatcactcgccgggctgtggagcccacatgggttnaccgccagcaatgcccggcctgaccgagtaggcagtgagttgaaagccatggtgcaggccccacctggctacacccttgtgggtgctgatgtggactcccaagagctgtggattgcagctgtgcttggagacgcccactttgccggcatgcatggctgcacagcctttgggtggatgacactgcagggcaggaagagcaggggcactgatctacacagtaagacagccactactgtgggcatcagccgtgagcatgccaaaatcttcaactacggccgcatctatggtgctgggcagccctttgctgagcgcttactaatgcagtttaaccaccggctcacacagcaggaggcagctgagaaggcccagcagatgtacgctgccaccaagggcctccgctggtatcggctgtcggatgagggcgagtggctggtgagggagttgaacctcccagtggacaggactgagggtggctggatttccctggcaggatctgcgcaaggtccagagagaaactgcaaggaagtcacagtggaagaagtgggaggtggttgctgaacgggcatggaaggggggcacagagtcagaaatgttcaataagcttgagagcattgctacgtctgacataccacgtaccccggtgctgggctgctgcatcagccgagccctggagccctcggctgtccaggaagagtttatgaccagccgtgtgaattgggtggtacagagctctgctgttgactacttacacctcatgcttgtggccatgaagtggctgtttgaagagtttgccatagatgggcgcttctgcatcagcatccatgacgaggttcgctacctggtgcgggaggaggaccgctaccgcgctgccctggccttgcagatcaccaacctcttgaccaggtgcatgtttgcctacaagctgggtctgaatgacttgccccagtcagtcgcctttttcagtgcagtcgatattgaccggtgcctcaggaaggaagtgaccatggattgtaaaaccccttccaacccaactgggatggaaaggagatacgggattccccaggggtgaagcgctggatatttaccagataattgaactcaccaaaggctccttggaaaaacgaagccagcctggaccatagcactggcctggaggctctgtatttgctcccgtggagccttcatcggggtggtgcaggctcccaaactcagggctttcaggctgtgcctttttgcaaaagggccttgcctaaggcccagcccatttttcagtagcaggacctgcccaagaagattccttctaactgaaggtgcagttgaattcagtgggttcagaacccaagatgccaacatcggtgtggactacaggacaaggggcattgttgccttgttgggtaaaaatgaagcagaagccccaaagttcacattaactcaggcatttcatttattttttccttttcttcttggctggttctttgttctgtcccccatgctctgatgcagtgccctcttcattttcatcttcaccatcctctcgaagaaccatgtctaggatgtttcctttgatcttgaagtctcgtgaggtgctgagcttcatgtgctgcatcaggttcaccttggacttcttagaaaggtggatgagaaatttttcatactgttctatggcaaagatgaggttagggattggcttggtttcccgaagaactctggccatggctgtggcaacggcagcaggtttctcctttttctctcccgtatagttcaggctcttactcttattctgtacgtaagaaatgaaagaataacacaggggggtcagatgagaaccagacagcttcaccagcttttccatattttttggaattcctccggagctctgacacacctggagatactgataaggtttcttggctcacttgtcccttaagcttggtgattagccagtccacttcttctagaaccttctcggctgactcagaaca

SEQ ID NO: 15084 - DNA, 691 bp, Homo sapiens
  misc_feature (1)...(691): n = a,t,c or g
tttatagtaaaggtgaatgacatgagttccactttacacgataatgaaaaaactcaatgaggactccatcagccaagcggtttatatggcagatgagctgctacaaatctgttgtgtgctcgccgcgtgactcagctaatgctaccggggttggagcgcacaccgagcccagccaccttttccatacctgggcagagggaagggagtggaaggaccagaagggagtaagattcaggaaaggaacagtttattgaaaggacccagagcccaacctaggaaggccagtggccccatcctgaaatctctcatcttgggtccacagcatcttgtggagtcctgagaggccacggggacagggaagggcatccctgctcttggcttcttcctccaccatctcattccgagtggcatggtgggacaggctctcagtgccagggagactttgccacctctcttgcttctaaccccaagggatgcagatttaaagaggcctgacacttggaagagtgaagggtggcctgggatggaaaactgtgatgcctctgccttgcatggaagtgggtgcagacagggtcaggagaactctggacatccttgttgctgggagaccaccctgcctctgcanttgctactcatcccttctctgatccncggagaagtagacaccatgtancggctgtctctcccaact

SEQ ID NO: 15085 - DNA, 424 bp, Homo sapiens
cccatatgggagttaaaaatgaactggctcccctccctgcccttgacctgtcatttgagtctacctaattataaaacaaacagggttttaagttttgaacctattccctgtcatggtgggtagaaaatcaatcactacacctgtatttataaaacaatcagaacagaggaaaagacacaattttgaattccagccacacattaaaacaacccatatttataaaacaatcagaacagaggaaaagacatgattttgaattccagccatgcattaattgtgtgcatttaggcacatcacttaagcctgttaaaattcattttatccaccgaaagcactttatatacttaaacgaactatgctcatttacagggttctgtgcatgatcctgcatccgtaaaactgagaaaccaacagaatgaggaca

SEQ ID NO: 15086 - DNA, 516 bp, Homo sapiens
gagctgggggagctgcttctgtcactgaattatctcccaagtgctggcagactgaatgttgatgtcattcgagccaagcaacttcttcagacagatgtgagccaaggttcagacccctttgtgaaaatccagctggtgccatggactcaaacttgtgaaaacccaagaaagacgtcccttccttaaggggccacaattgatcctttctacaatgaatccttcagcttcaaagttccccaagaagaactggaaaatgccagcctagtgtttacagttttcggccacaacatgaagagcagcaatgacttcatcgggaggatcgtcattggccagtactcttcaggcccctctgagaccaaccactggaggcgcatgctcaacacgcaccgcacagccgtggagcagtggcatagcctgaggtcccgagctgagtgtgaccgcgtgtctcctgcctccctggaggtgacctgagggctgcagggaaggcagctttcatttgtttaaaaaaaaaaaaaa

SEQ ID NO: 15087 - DNA, 1892 bp, Homo sapiens
gcttagaattgggtttctagggaagaaaagcccctgcattaaaagacagcccatttaaaaaagaaaaattcaaagttctgatgaattccgggaaaaaagcaaccccaaagtggtaaaagattacaaatatctactttacaatttgtcttctcaccaagataattttatacaagtttacaatcttcatcttcttatgctcttcaaaaggccttgagaattttcctttctgattaagaaaaaatagcactgcaatatttttaaagtcaattttacactgtacacattagatacaaatggtttgatatatcagattttttatcctatacattgcgaaagtcaacccccccttcaactggtggtacagagaacaaaattatccatttacaagttatttctctgctttcacattcccaccacacaactttttttttaatataatgttttaaactttagattatttcaagaaaaatacttttacaaaatcatatcaattattacatttttccttttttgttaataaccaggacatggaagtctcttggaagaacttttaaaatttgcatgattctctccacagatgacaagagctcaaaggcctggtcacagtggctcccgggaggccagtacacacccactgtcctcagacagaaacacacaacacaagggttagaaacagggtttcaaagacaaccctctgggccaggaatgaggagtcataaaatacttcaattagccattaatgctttaaaaaggcatttttttaaaaagtcccaccacaaaggctcaacttcaagtactaatttaatggttaagttgtaatatttctttgaaataatattcctatggtccagaaaaaattcaccatatttataactgatttcatgagcaaacactttcaattgttgtatgtacataagtcccttttgatctaatgagaggagagacctggcttccaataagaattcactagaaaatatatttccgttgtgactatataaaactaattaaggtacttgcctccatggctctgagttgagcttgactgccttctgtataaaaatgttatccttcatgaaatgctggccacttaacatggcagaacttttaaaatccagtttgttgttaacaaaacctactgctgggtggttttgaatatattacttttaggcatgatctccccaatgtgtttttactccttttccggcttcctaggacagaggtatgtagtcaaagaatcctatggtggatctgaattgggtttcagctactgtacctggtccttgtgaattaaaaaaataaagtcacaaaaaccatatgacaaaacaaattaaaataaataaacaaaatgaagctgtctccagaccttctgcattgacacacaggtttgaagtcaaccaaagcactcatgctaatctggatgggaacactagggagacagaaaccccagtatgaaaccatgtacttgagctggttcttaattttaaaaaagtcccccgatttatggagttcaggtaacccacaggcccatacaccagtaactaagaggatttcatccaaagggctagactgccctcaattgtatacagaggctgaaaacacagactcttgtgcaaaaggacactgtctcttctgtttcccgctgaaaagcccatcaaccaccaccacttcctggggaccagtggttggggctacacacaccaccgcactggctgaaagtcaccacttatggaagtttccaggtccatgagagaagtgtcaaggagtcactctggtaatgaacactgcagaattgacatgtgcctgctgagaaggaatcacagtgcaggactgtggagagtggtctgaagaaaaggatgtgggttatttgcagagtgtagcaggttccttggact

SEQ ID NO: 15088 - DNA, 2518 bp, Homo sapiens
gggtgaagtggaggtttggggaaaggcgaggaagtcggtctggagcaagcaagcaaagtgcggaagctgtactgggattcttctagaaagtggggtgggaaaggaggtagggagggcgtgtgcagggacgagatctgtgtcagaacgtgcgtgtgagcggatacaaaacccgagagaggcgtgagcagcgctgtgtttgcgagcgggagcgaggggcgccggctggggtgtgtgctcctgagctcttcagaaaccaggctgctttcaggaacattgctgtggattcccagggcctattccgctagaagcaagatggctgaactcaatactcatgtgaatgtcaaggaaaagatctatgcagttagatcagttgttcccaacaaaagcaataatgaaatagtcctggtgctccaacagtttgattttaatgtggataaagccgtgcaagcctttgtggatggcagtgcaattcaagttctaaaagaatggaatatgacaggaaaaaagaagaacaataaaagaaaaagaagcaagtccaagcagcatcaaggcaacaaagatgctaaagacaaggtggagaggcctgaggcagggcccctgcagccgcagccaccacagattcaaaacggccccatgaatggctgcgagaaggacagctcgtccacagattctgctaacgaaaaaccagcccttatccctcgtgagaaaaagatctcgatacttgaggaaccttcaaaggcacttcgtgggggtcacagaaggcaacagactactgcaacagaaactatccttagatggggaaccccaaacctatacatggaacaacagagaggtcagatggcctacagtggtcagctgagcagccttgtaacccaagcaagcctaaggcaaaaacatctcctgttaagtccaatacccctgcagctcatcttgaaataaagccagatgagttggcaaagaaaagaggcccaaatattgagaaatcagtgaaggatttgcaacgctggcaccgtttctctaactagatatcgcgtcatgattaaggaagaagtggatagttccgtgaagaagatcaaagctgcctttgctgaattacacaactgcatcattgacaaagaagtttcattaatggcagaaatggataaagttaaagaagaagccatggaaatcctgactgctcgtcagaagaaagcagaagaactaaagagactcactgaccttgccagtcagatggcagagatgcagcctggccgaactcagggcagaaattaagcactttgtcagcgagcgtaaatatgacgaggagctcgggaaagctgcccggttttcctgtgacatcgaacagctgaaggcccaaatcatgctctgcggagaaattacacatccaaagaacaactattcctcaagaactccctgcagctccctgctgcctctgctgaatgcgcacgcagcaacctctgggaaacagagtaacttttcccgaaaatcatccactcacaataagccctctgaaggcaaagcggcaaacgcccaaaatggtgagcagtctccccagcaccgccgacccctctcaccagaccatgccggccaacaagcagaatggatcttctaaccaaagacggagatttaatccacagtatcataacaacaggctaaatgggcctgccaagtcgcagggcagtgggaatgaagccgagccactgggaaagggcaacagccgccacgaacacagaagacagccgcacaacggcttccggcccaaaaacaaagggcggtgccaaaaatcaagaggcttccttggggatgaagacccccgagggccccggcccattctgaaaaggccccggcgataggcaggcacgctgcaggacacctcggagggccaggccttccggggtagtgtcggtagggtttcacagtgcaatctctgccccacgagaatagaagtttccacagatgcagcagttctctcagtcccggctgtgacgttggtggcctgagctaggaggaaaaagagcagttttcactcagttttggttccctgcccgaggtgctgacccaattcgctgccaaaagagtgtcaatcagaatatacaaatcccgtatggttgtgtcatcctctcttaatcatttttactaattctaataatcagctctagcttgcttcataattttcatggctttgcttgatctgttgatgctttctctcatcaagactttgcagcattttagccaggcagtatttactcattattaggaaaatcaagatgtggctgaagatcagaggctcagttagcaacctgtgttgtagcagtgatgtcagtccattgattgtctttagagagttaatgttacaaaaaagaattcttaataatcagacaaacatgatctgctgaggacacatgcgcttttgtagaatttaacatctggtgtttttctgaaaaaatatatatacatatattgctttatttgaaacaaattaaaatatgctgcatttgaaaaaaaaaaaaaaaaaaaa

SEQ ID NO: 15089 - DNA, 384 bp, Homo sapiens
gcggcacgaggggcaagatttggttttccagatacactcatgggatttgtctcctgaaggaaggttcacggggtccaatgacaaggggtaccgccctaagtgcatttcaggaaggggtgtgctctggcagctgcattagagtgggatgtgtatcccagcagcctctgcctcacctaggggtccccacagacttggaacacctctgagccagggggccagcccccagcagaggctcagctgggttttgtgtatttagctggttgataggcacattcctattcctgttgcataaccggttctagccgcagagccctgcgggaggccaggtgctaatcacacacctcgctgttctgttctcggtatacagtgttggcaagcaaccgt

SEQ ID NO: 15090 - DNA, 577 bp, Homo sapiens
gctggaagtttcataatgcagctagagtgttcgtcttcctgctaaacgctctcaaatctttaggtctgagtcttacttttatcaatcccatatccaccaatttttaaaaaatcagacttgagggctagtaagtatagaaataataactataatagtagccaagtactcaacacccactaatgttggcactgtgctgggcacttcttacatggtaactcagcactcctgctacattcattcaggtcttgaaccaaatagcacaaaacaaataggtcatggtgaacattttccccagaaagcccacctctgagtagccacagttctggggatgatgggcacttacatgctcagctaaatgactgtatatgcctgggctttcatgggcatcctcagtttgaacagaagggacgccccaatttgaatggtctccaccccctcagcctcccagccccacagccagtgcttagaattgatctctcatgttttgagacactttcatatgactccagacctgtggcccttcccctcctatcttctttctcatccctgcctcccttaccacgctactcctacctat

SEQ ID NO: 15091 - DNA, 1703 bp, Homo sapiens
  misc_feature (1)...(1703): n = a,t,c or g
aaaaaatccactcatataaaaggtgagctcagctcactgggtccatttctcagtggcttctccatcctcatttgcaaacctcagagggataaggcagttgaacctgatgagcaagaattataacagcaaggaaacattaatgcttagaattctgagatccagcacaactcagtctgtggggagctcagctcgctgcccaggggataggtatgacctatgtctgccttaggctgctgggagatgccattctccagtttcagaagcagggcaggggcaaaggtcaagactgtggtattggggtcttttggctctgaaggatcctgggaaccacttgattttgggtttattccctccagggttttaaagaggaacaagaggtgctagctcttaccaaaacagatggtagagagagttgctggctatttaaaaagctctttcatcttttaattcacctcttcttttcacctctttaaccactcctcaggaacagaacacttctaggactgggggtcttttagctccataagcaagtgagcagatgggacaagttagtcttttctccctagaaacaaaggggatgcccagtggtttccctttgcttcccaacctaaaatttcaagtttaataaaatagcaattagcagaagtgaccaaattgggagataattatcagtcatgaggaaagacacagatttcggtcataaagaatgtaagggctataagtagaaactttctataacctaaatgatgttatagaattatttttgagcaggagcagaaagattaaatatgatcacttcatacttctaaatcagaaataggaagattaaaaccacagaacagtttgtgatttctattgctgtagctaggtatcttactctgtccactcttgttcaagtatctaactcttctgggaaacccaaataggctttagaagagattatcctatattcctatcagtataatactaaaatgtaactttttaatcatctggtttttaaaagataaacagtttagcccatctctccagagaggcaaacatagggaatatgactcaggagcctcctagggcttatcatcagccctcacacccgcttccccctccaacccacaggcctttgcttccgggtgggcagggattactactttgcctcttcaggcagcatctactctaggggcatattgatcattttagacactgggagaagagaacctcaaactaggaggaaaagacagagcctccacttagttttgggaggggatggcagacagtcaaggagatgagcgtcctaaggcatgttgggatagggtcagatgcaccacccatggagaggtttgtcaacacaaagacatggaaggttagaggtttgtcaacaaaaagacatggaaggttaggtttgtcaacacaaagacatggaagattagaggtttgtcaacacaaagacacaggaagaatgggctgcagaagatttagatgttttccatttgggcacattttacttagctggagaactaggtttaaaacagcctgggtaggaaaattagaagcaagctggannnnnnnnnnnnnnnnnnnnnnnnnnnnnnnnnnnnnnnnnnnnnnnnnnnnnnnnnnngcccaggaggtcaagccnnnnnnnnnnnnnnnnnnnnnnnnnnnnnnnnnnnnnnnnnntgatagaacaagccctgtctcaaaaaaaa

SEQ ID NO: 15092 - DNA, 357 bp, Homo sapiens
gagaacctaccggaagatcatccctaagcggaaccgcaatcagctgtgaagccagcaccacctcagagacactgttccctgctccagggtagacctgagatgaacctccctggaggagacttatttcaatgagtccaccatgacggatgaggcacctcctttccctgctgaaggacaaaccttgtttccctgtggccctcattcttgtgctccctgaagctttcctaatattgctgtgctccccaccacccccatggcagtccctccgcagccccagtccctggccacgcccaagggaagagggaggtgaggacttgactttcctcccagagctcagcccatgtcaccctccaggcc

SEQ ID NO: 15093 - DNA, 2391 bp, Homo sapiens
tatagactcctgctgtcttcaagtacctgataaaactttaaccagggaagcattaaacacagtgcagcagcttttgcccaggcttctaagttcctgccggcagcatttatcaatgtaagaactaggatgcttcctgcagtggcactaccttcccctagagctggagcatgctgcttggccttaagccccagcatgatgaggcttccctcctgccaggtcagtaaaagttagagagctcagaattgggtcttgcctgggtgcaggtggcagggtttgctgaaacccctaaagagaagtcaccaagggaggcaggtaatgaatgtttccagaatcagtcggatactcatagcaatttctggctatctttcaaatgttgaatttctggatgctgagagggactttgatttgatatcattaaatccaggacagtcccaagaagtgcctggagtctcggctctgacagcccaagaagggaaataacttgtattaaggaacaactatgagccaggccctgagctgtctcttagataataaaaacagatggggagtggaagagtcatttgcttcaagttatacagctaggaaatactcaagccaaatcttgaacgcagctccccctaattctgtggacaggcactttgtaccacacaccatggtccacctaaaaacagaaggataaaaagacttcaggttttcccactgtgtgctgaccatcccaatttatgaatcttcttcaaaatgacatttcacagttatagttagggctcagaaatggcattgaggtagccttatttctcccctttagcagatgctttaagtacacattgctgacttgagcccacccccaggagttaggagaacatttcctttttcatgccatcttccataaataaggtgtttcttggccttcaaagatatagaactttgcagcagtagtaaaagtgaagggtgttctgctctctactcaactttatttgaaaatgtctgcagcttcactcctgtagaaaaggaaatcttcatattttagtaaacttagccgccagtgtactctgtgaggatgtggcaattcaaagtccagtgaatctggactctcttactgattcctggttttagtgtgtgtgtcgggggagtgtgtacctatatataaaggacaagtgtgatatgtgtgtatatgtatatacatacatacatgtccacacacacacacacaatatttgagagctaaggaaaactcaaagcagccccttcattatcttgcgtactacttcaaagatttctgtcagccctaattacaagtgtcaccatatagttgggggcttaggtacttgcttacaggaagagcaattccctagcaaaggtcattagctcctaaggcactgagtcaaagtgacagccctgaaggaaattgcactccagccctcctccaggatgtctaataagatgggaaacttggatgcccagcccattttggtgacctgagagtcttaactactccagttagacctaagggcacaaatgcagaattcatgaccttgtagttgtggcagggtctaggaagtcctctctcccgaagtagaaaatattctcttgccattcctgaaattccacattcatataatggctgtgcaatacatgcttctcaataagaaaattaactgcatgtttactgtgtgctgatcacatcagatttttatgtttaaaaaaatctcattatgggattgagtccagcccagctctaagagaaaaagaaggcccatatgggagacttcagtctcattattattgcctttatccagcagtgcttatgaagccccctaccctgtcccattccagaaaccataagactcaggcagttcttgattctggaggccctgccctggtaagataagatagtataatttggaactgagaacataccagaaacagcagaacgagggccagagcagaaaaatgaaaataagtggagacacttatggatacattggtgcaaaaaaagccacgggaacccatactgggcttgatatgactttgaggggaccagcagattaatacttaatgagggttaaacctgaccagtctttctacagtgacaggccacactgcatgaatggggagaaccaatgaatccattgtcctctgcctattttcctgtgcacagtcacattccctccttaggaatcttccccttccaccctttacattaaacaagggaacactgaatctttcaagggaattacacgtttgggttaatgtttcagtatatcattttcatactgtaaattattttgtaagagagatttactgctatcccaggatgttcggacttggtgcccctgtgcatttggaaatcaataaactattactggaaatgccaaaaaaaaaaaaaaaaaa

SEQ ID NO: 15094 - DNA, 846 bp, Homo sapiens
  misc_feature (1)...(846): n = a,t,c or g
tcagctgaagctggggaaagccaatttaagttcctcttccccaccccgtagtaccagtatccaggtcctcaaagggattccatgctaccccagccccaaagcataccatgtcccaggacactatctggggaagccaggaaattcctcagcctctgtccatcaaaccccagacagttcaagtgctggcatggagcactggggcttaagcaagcgcttgggtccctgccacagacagggagagtcatgctgcacacatggcccccgaacggcacttagggatttggcacaaaaaggactcctctccctccttttgctaccacaccccatcccactcctgtgcaacctgggcatctctctacatcccctgaagtaggaaaccctgctttattcccagaagacagaggcccacaggagagaggcaacctggggtggagagctgaggagcaggagcacaaggactcacatagacctggaaaacagatatgcacacaaagaccaacatgcacacacagttacacaaacacacgggccctccccaacaccagagacttgggagggcaggtttgggatcagggtcacctttctccatgccctgacccttttctatttggcaacagaagaggaagagatgctccatgcccccttgtcagcagacagcaagagagcactggggcagagtgacctgatcntgaccccgacggggtcctcagatcagagtctggcactgccccagccctggccggcctgctctttggcacctgcaggtgaacttccagctcctgacctgacatccccacacacaggcttgctctctgagcatttttcacagtaccagtgaggccagac

SEQ ID NO: 15095 - DNA, 652 bp, Homo sapiens
ttttttacaaagatattcttacatttcttaatttatttttaataagtaaaaaatactcattgaaactgtacaaaaatcaaatcattaatttttgcacctggtatttcagtcatcaacagcaatctcatggtacagaaataaaataatgggaattatcattaacttcaccctggctttctagcttagtagaaccaaacagaagaaatcatggcaataaccattaactatagaaaaaaagtaatggaaaaatggttgcaggtttaatcacaaaatgaacttaatttttgttgattttgttttatctgctaaaacactaatatctataaatatgaactgacagcatcgttctaaatttacttctgaagagctgtcgagacttcaataaaatataagcaagttactggatcatatttatggactgctgaattaactacccgaaaagtatcagttactttcaaagaacacaaaacaaagtgaacgtggaaaaaagccttctttgcaaaagtccttttattagtcctatcctctaaaattccaagccacagagccttgatattcctggattctgttttaagtaaccttagttttaaatatgacacttgggatatgcacaatgggaaagggtaggatatgtgaacaaaatttaatttct

SEQ ID NO: 15096 - DNA, 1506 bp, Homo sapiens
tgacggctgcgtgcggcgggaatcatggctgctcgcagcgtgcttgcacttcgtattcaaagtgggaaaccgcttccagacggcgcgtttctatcgggacgtcctggggatgaaggttgctgcggcatgaggaatttgaagaaggctgcaaagctgcctgtaatgggccttatgatgggaaatggagtaaaacaatggtgggatttgggcctgaggatgatcattttgtcgcagaactgacttacaattatggcgtcggagactacaagcttggcaatgactttatgggaatcacgctcgcttctagccaggctgtcagcaacgccaggaagctggagtggccactgacggaagttgcagaaggtgtttttgaaaccgaggccccgggaggatataagttctatttgcagaatcgcagtctgcctcagtcagatcctgtattaaaagtaactctagcagtgtctgatcttcaaaagtccttgaactactggtgtaatctactgggaatgaaaatttatgaaaaagatgaagaaaagcaaagggctttgctgggctatgctgataaccagtgtaagctggagctacagggcgtcaagggtggggtggaccatgcagcagcttttggaagaattgccttctcttgcccccagaaagagttgccagacttagaagacttgatgaaaagggagaaccagaagattctgactcccctggtgagcctggacaccccagggaaagcaacagtacaggtggtcattctggccgaccctgacggacatgaaatttgctttgtcggggatgaagcatttcgagaactttctaagatggatccagagggaagcaaattgttggatgatgcaatggcagcagataaaagtgacgagtggtttgccaaacacaataaacccaaagcttcaggttaacggaagacatgatgccagagcaaggcctctgtgattcctgccccagcacctgtgaggcctgacgtgtcagttcccaataaatgctcttctgatttgtttcccgtacaggccaaggaggcttgggtagttgcagatttgtgtatttcaatctttgaaagctctgatgtaatttagaaatgaaatccaatcatgagtccaggtagagaacgcctgctgtaatctacactgttgctgggactgcgcattctgtatataactgtgttggatgagtgacagatgattgtccagactaggacagcggcatgaacatgactttggttgggattgcggatagttagggttacctctgaatcgtgtagcttttatgagagcagctgtgcaagtgaatccacattaatgccttgtcgtggtgccattcccagcgcctgacgatacgctcttctattgtcttattctggcaggttttgacgttttaaattttttaaagaaattttattccttggaccaaaaggtttggttaaccacccccctcttacttgctttcacattttgagtgtccagaggaaacagaaaggaatgagtg

SEQ ID NO: 15097 - DNA, 863 bp, Homo sapiens
tttttttttttttcattactcatatcttgtattttatttcttatgaaaatggctacccaaagaagtcattgtagcaggctactattttaaggcagcaactgtataacttaaatgctaagactcactccataagacagaaaacccttccccagggctgtaatgggcatttaagtttcccaaacccagggacaactaatttttattacctattgaatagaaacaaatggattttaatagttcccctcccctatagctgaaaaactccacaaacaataattgactctatctacatgatctgttgactcacgccagaaatagttactaaaacacttagaattgtgatgttcaaactggcctctggctacttctggggggttatttggtgttacgcaatgacatattgccagcgacatggtgaatatactgtctttatagtcagcaatgtttagttgaggctaatcacgtatttattttttcaaaaggttaaatgtaagcttttcccaactgaaatatatagaaaaccccaatgtatgaaacaagttttaggcattggtgttggcagcggtagtgggctgatgtgtcctccctgcacacagctgggggcatgtagccccttccctcgctgggtgaaccctggggaaatcttggcaccctcagcctcactgccttccaatctcagctcaaagactgggcatcctgcctgggaccacggcccccccccccaatgtccctcaagggagtacaagagtcaccagcatgactgcccatcctgcgtgtcctcctttcaggtaaataagaggtagcatagctgggatttcgcgtgccgaagtctaggtctttatatctagactttggggcttttc

SEQ ID NO: 15098 - DNA, 414 bp, Homo sapiens
  misc_feature (1)...(414): n = a,t,c or g
gcggcacgagccacagtgggaattgtgatatgccacgtgacatagctcctatgtgatgtgactcctcttcattcttgacttcttccaactgggttgattggaatataaagctgaacccagcacctaggctatgtctctcctcttgtctatgagccctacccacaagagacattgtgacatgtctctaggcttctcacctaggtaatgtgacttgtttgcctaggccatcccctcaggggtattgtgaaatactgctggaccaagaacctaggtgatgtgactctctgctactgcttggggtgtgcttaaggggaaattgtgatgtgcatttaggtgcgtccatcagctacatgctgtactctcctctcctgcctgagctctgcatgcatcatgnatttcttttaattaattaac

SEQ ID NO: 15099 - DNA, 1362 bp, Homo sapiens
gtcgtatttccaaggactccaaagcgaggccggggactgaaggtgtgggtgtcgagccctctggcagagggttaacctgggtcaaatgcacggattctcacctcgtacagttacgctctcccgcggcacgtccgcgaggacttgaagtcctgagcgctcaagtttgtccgtaggtcgagagaaggccatggaggtgccgccaccggcaccgcgggagctttctctgtagagcattgtgcctatttccccgagtctttgcttgccgaagctgtgactgccgattcggaagtccttgaggagcgtcagaagcggcttccctacgtcccagagccctattacccggaatctggatggggaccgcctccgggagctgtttgggcaaagatgaacagcagagaatttcaaaggaccttgctaatatctgtaagacggcagctacagcaggcatcattggctgggtgtatgggggaataccagcttttattcatgctaaacaacaatacattgagcagagccaggcagaaatttatcataaccggtttgatgctgtgcaatctgcacatcgtgctgccacacgaggcttcattcgttatggctggcgctggggttggagaactgcagtgtttgtcactatattcaacacagtgaacactagtctgaatgtataccgaaataaagatgccttaagccattttgtaattgcaggagctgtcacgggaagtctttttaggataaacgtaggcctgcgtggcctggtggctggtggcataattggagccttgctgggcactcctgtaggaggcctgctgatggcatttcagaagtactctggtgagactgttcaggaaagaaaacagaaggatcgaaaggcactccatgagctaaaactggaagagtggaaaggcagactacaagttactgagcacctccctgagaaaattgaaagtagtttacaggaagatgaacctgagaatgatgctaagaaaattgaagcactgctaaaccttcctagaaacccttcagtaatagataaacaagacaaggactgaaagtgctctgaacttgaaactcactggagagctgaagggagctgccatgtccgatgaatgccaacagacaggccactctttggtcagcctgctgacaaatttaagtgctggtacctgtggtggcagtggcttgctcttgtctttttcttttctttttaactaagaatggggctgttgtactctcactttacttatccttaaatttaaatacatacttatgtttgtattaatctatcaatatatgcatacatgaatatatccacccacctagattttaagcagtaaataaaacatttcgcaaaagaaaaaaaaa

SEQ ID NO: 15100 - DNA, 435 bp, Homo sapiens
  misc_feature (1)...(435): n = a,t,c or g
ccacctgctacatggccagcaagaactcctcccaggagacgtgcaccccgggcctagagaggtttgcccaagcangattggaagccaccacatcagtctcaacatcgatccagccgtgaaggccgtcatgggcatcttcagcctggtgacggggaagagccctctgtttgcagctcatggaggaagcagcagggaaaacctggcgctgcaaaatgtgcaggctcgaatacggatggtcctcgcctatctgtttgctcagttgagcctctggtctcggggtgtccacggtgggctcctcgtgctgggatccgccaacgtggatgagagtctcctgggctacctgaccaagtacgactgctccagtgcggacatcaaccccataggcgggatcagcaagacggacctcagggccttcgtccagttctgcatccagcg

SEQ ID NO: 15101 - DNA, 1942 bp, Homo sapiens
  misc_feature (1)...(1942): n = a,t,c or g
tttttttttgtaagtacaagtacacattccttgccaaactttattgtgattaaaattccagagacagtaccagctccacatacctctagccctgtctttgccctagttcccgagtgtccttcacccccatcttccaaatcatctctgggtttcacggggaagaaaaaacctagggctgctgtgaatgtgccctctcaggtccctgaggttggccccagggtagagctgtaagagatcaggaagagggcctccctggcctgacggcgatgatcctggaggcaacgtgtggagcagaaagagaagtcgaggtagtgaaagggagtcaggccttggagggatgccccacaactccagcagcgtcgagtattgacgattgcagagtccaggattggagaggtagggggctcccaactgggcagcgagtcggcgctctgcagccagagctctcttctctcggtcactgagggcggcaaatcgccgctgctcttctcgttcacgctcctcctgctcctgctgcctctgctgctgttcctcccgttgccgccgggctgccttctgctcccttttccgtgtagcctgccgtgcctccatttctggtgtcaatggtcctggcacctgagccttgttgtaatcgtaggcatctggattcttctccatgaaccttcggaactcattacgtgttgatttgtcagccgcaacagtataaggtggccgggcccgagagtcctgcacagtggggtcagcaacctnttccagcagcagacgaaccactgagcctcttccagctgcagctgctgcatgcaggagagtaaagccaccggagcccaagggggcactgagcagagacagaactctagggtctgcagggctgggagctagctgcagctttagcactccaacatctccagctcggcaagcagcaagcagtgcattccagagctctggctgaccaggggctttggcctcatccagcaaagggcccaagggggcagcaactgcctgggatgactgtgtggaaggctcctcttcttgagtttgctggagaagagtccgatgtgccccagcctcctggtctcggcttttctccttcttattcctttttctcctcctccgcttgggcaatacttcagnctcncaaagatccagagtccccacagtcaactccactagctccaactctacctgaaagccatcttctccctccgaccctgaacctagggaaaaacctgacatgtgaaatccatctagggagtactcagagggtagaagcagatgcataagaatgaaagcctgaaatgaaattgtttttattttgtcacccagataaaagtagcacatcaagagctgagtcccattatatcacatgcagaaatgagctctcagcccagacaagaacaagtccctggactctccgtatgagtagccttagggtgccgcacaatagaggaaagcatggaagcagccctcagcctcaaaccacagcatccaatcaaagataaactatgtgagatccatgcaacacatccacgcatctgctccacacaaagattttcttagctctgggaaacatccataacaaaagagataatagatttggaaaggtcactaaacatgtctcagtaattgctaagatagacactgtgggtgtgtgtttaaataaggaaatgggtcagttatgagagtagggaatttgccagtgcatttttaggacagaaactcagatctgacagttgccagatagtaatcaaaccctgtttgggagattcctcattctgccccagcgcttccttttcatccctgcagatctttcttatttcttcctcagtaggcttctttctctcctctcttactgttttccagtgtgtctgaggtgagtgcagtctgactgcttcccgaggggtcttcttcatagacatgcaaagtggtcagcttatggagcaca

SEQ ID NO: 15102 - DNA, 523 bp, Homo sapiens
agaatggtttaaaaattgaggcatttcgcatcgaaatcaggatttctggcttcccttaggcatttgggagcaccagcagaatggggtcactattgttgcatgaagacaacacctctgcacccctggatgtggccacggcagtccctaccccattgacttgcgcccagcccacattacacatcctcatgacctgcgtggcaggagtctcactgacatggctctgtcagcagtggctggtacccttgtctcctggccttgcttagagttggggctcatctctgctgcagtaactgagccaaggggtggttttgtggccacaagaatcatctttatgcaggctcagcaatgcagggccaggaaacttatatctacgccagcctcaaccccaaacccaaggaagagagaaagtgtcatcttttcagatacatccttcttcctgctgggagagagccttgcccaccttcctgttggctctctgtccgcttctcaggtatctgaacaaaatagattgctttgcactctg

SEQ ID NO: 15103 - DNA, 143 bp, Homo sapiens
  misc_feature (1)...(143): n = a,t,c or g
atacngatacccttattanatgaccnnnnnnnnnnnnnnnnnnnnnnnnnnnnnnnnnnnnnnnnnnnnnnnnnnnnnggcacgaggaaccttctattgtcctgaagagaggtgatgacttaaaaatcatgctcaataggatt

SEQ ID NO: 15104 - DNA, 604 bp, Homo sapiens
aagttttttttttctttttaatacccaaaccatccattttcaaagctttttttttaaaaaaattgttttttgattaaaaaaaaaaaaacaaaaaactaaaactgccacaaatactgaagaggcaagctccaggcctggcctttccagctggaggcctgctctcccgtggaccgcaccgcagagcccagcccggcactgctgggtgaccgtcccatggctggttcgccccggaccactctgctgaagtccaggtgggtgttaaatgcccggcggcatcgctaaataaggacaaggggaaaaggcagcccacctttccctgaacaccttccatctgggctgaactttcttgggaatgtataagttatctggatgaaggaggtgggagatggagaaaaataaataccaagaactaaagtgagggtcccaggacctctggtggcagctcagcccctggggcagagctggcctccagggaggagaccctgattatccaaatactgcgctcttgagacttgctctcctccacaagcacttgccctgggggacgtgagtctcagagggagaaaaggggccagccccacagataactgtcctcctcgctctg

SEQ ID NO: 15105 - DNA, 1108 bp, Homo sapiens
atcccggacttcccagagcctgcctggagcgcgtactcagcggctctcgggtcccagcgtcccagccgcggcccgcgctcctccgccccgctcctcctcctcctcttcctcctcctcctcctctctaggcacccccgtcccctccttccagcggctgcagcccccagccccaactctccgcgcttactcctgggacgcgcgtcctcgccccatcctttgcttccttccttccttccttcttccttcctcccctggctcccgccctccctctccaggtcgccctcccggggcccgattgtctcggttccccgctgccggcccgcgccctgccccgtctctcccttgcacttcctgagtcgcccgccgccgccgtcgcagactcgccgcgggagccccagcccaacccgagcccgacagccactgccccggctccagctccagccccacagcccgcggcgcccgcccgagggagccccggcgcccggggaaggctccagtgggctagcgcgccctcgcccagccccgcgccccagccctgcccggcccggcgaggaaggaccgggaagatgaacaacggcggcaaagccgagaaggagaacaccccgagcgaggccaaccttcaggaggaggaggtccggacccctatttgtcagtggccttcctctggatatcaaacctcgggagctctatctgcttttcagaccatttaagggctatgagggttctcttataaagctcacatctaaacagcctgtaggttttgtcagttttgacagtcgctcagaagcagaggctgcaaagaatgctttgaatggcatccgcttcgatcctgaaattccgcaaacactacgactagagtttgctaaggcaaacacgaagatggccaagaacaaactcgtagggactccaaaccccagtactcctctgcccaacactgtacctcagttcattgccagagagccattaggtggagctaatgaacatggagagaggcagtgaagtgcagaagtgaagggtctggactcatgatcttgattgattcacatcctggctctgtgagagtcgttgggctggatatttaacctcgctgtgtctcagctttctcata

SEQ ID NO: 15106 - DNA, 1640 bp, Homo sapiens
  misc_feature (1)...(1640): n = a,t,c or g
gcggccgcagttgtgactcccgtgcggtgcggcccagcagccacaaagctcccgctgccattgctccctgtactcccgccgtcactgccgctgtccaacccctcccccggggcttgcgcggcggctcccacacccctcggcccgtgtacgcgctctgcacctgcctgcccgaaaacatgttgcagacaccagagagcagggggctcccggtcccgcaggccgagggggagaaggatggcggccatgatggtgagacccgggccccgaccgcctcgcaggagcgccccaaggaggagcttggcgccgggagggaggagggggctgcggacccgcccttcacccggaaaggcgcgagggccttggcggccaaatccttggcaaggcgcagggcctaccgccggctgaatcggacggtggcggagttggtgcagttcctcctggtgaaagacaagaagaagagtcccatcacacgctcggagatggtgaaatacgttattggagacttgaagattctgttcccggacatcatcgcaagggccgcagagcatctggtcagtgtctttggttttgagctgaaacagtttgaccgcaagcaccacacttacatcctgatcaacaaactaaaacctctggangaagangaggaggaggaggatctgggaggagatggccccagattgggtctgttaatgatgatcctgggccttatctatatgagaggtaatagcgccagggaggcccaggtctgggagatgctgcgtcggttgggggtgcaaccctcaaagtatcatttcctctttgggtatccgaagaggcttattatggaagattttgtgcagcagcgatatctcagttacaggcgggtgcctcacaccaatccaccagaatatgaattctcttggggtccccgaagcaacctggaaatcagcaagatggaagtcctggggttcgtggccaaactgcataagaaggaaccgccagcactggccagtgcagtaccgtgaggccctagcagacgaggccgacagggccagagccaaggccagagctgaagccagtatgagggccagggccagtgctagggccggcatccacctctggtgagggttggtgaaaagttggccagtgggtccccgtgaggacgaactactgtcctgagtcataagtaatatgggtggggcgagggtcttatttctgtagaaatcgtgtgactttaaggatttagattttgtatcttatgttttgtaacatttaataattactgttaaaatgctgtttgtaaatgagattggtctactttttcctgtaggattttattgtagagttttgctggttttgtaaaatggatggaagaactttgtatttatactgtgattttgaacagattatgcaacattggaaggaaggctgtactttgatggtttgaaggaactcagcagtatgatgatctggttccaggggaaaaaaatagctggttggtgtctagccccccaacacttttgtctgttgtgtataaaagaagaaagactggcatgtaccttcatttgcttagctatttgagtatctagagaaaaattaaaatgcaatgagttagcagtataccctggcacacttaataaattaaacatttgtggagcaaa

SEQ ID NO: 15107 - DNA, 620 bp, Homo sapiens
gagcttttatggttccctttatgccagtgaggaaacagccagagaggttgagtaacttgtccagggttatatggttaataagtggttaggattagtaactaggccagacccttctatggcctgtttttatctctaagatgatccccagtatgttagacttgaaactatggatggagtgaaaaatattctctgcaaatacatcaacactctgaaagccattgttttctctgtttagaaagtagttgaaaaagtagtgagaaactagagctttctcttttctggtgtaagtttcagcttcctaccttgaagggaaccttaaggcccaaaccttctattttacatttgaggattctaagtccatgcatctcggaaactatggagacgggaacttcttgtgtgagttggagagcagttgtagaccgttatcattccatcggtgcggatgctctttgggtggtggtggcatagaagatctgttttggttacctttattgacaagctctactgtgtgacctggcagttcagttcagcagataggtttccagcactaatcttaggcactgtgatagattcccgagatgcaaaactgaagaaaataccttgagacaagtcagtgcccg

SEQ ID NO: 15108 - DNA, 1409 bp, Homo sapiens
gcttgtgaaggtttatgaagattgggattgtttcaaagtaaatgacattcttgagctatatggcatactgtctgtggatcctgtgctgagtatactgaataatgatgaaagggatgcctctgcactgctggatccgatggagtgcacagacacagcagaggagcagagagtacacagtcctcctgcttcattagtgccgagaattcatgtgatcttagcccagaagttgcaacacatcaacccattattgcctgcctgccttaacaaagaggagagcaaaacctgtaagtttgtttcaagtttcatgtccgaattgtctccagtcagagcagaacttcttgggttccttactcatgcccttctgggggatagtttggctgctgaataccttatattacatctcatctccacagtattattacaagaagagatgtccttccactagggaaaattttacagttaacttgagtggttgcccacggaatagtaccttcacagaacacttgtatcgaattattcaacatcttgttccagcatcttttcgtctgcagatgactatagagaacatgaaccatttgaaattcattccccacaaagactacacagccaatcgcttggtcagtgggctcctccagctgcccagcaatacttcccttgtaatcgatgagactctcctggaacaggggcagctggataccccaggtgttcataatgtgacagccctgagcaacctcataacgtggcagaaggtggattatgacttcagctaccatcagatggaattcccctgcaatattaacgttttcattacttcggaggggaggtcactcctcccggcagactgccagattcacttacagccccagctaattccaccaaacatggaggagtacatgaacagccttctctcagcggtgctgccttccgtgctgaacaaattccgcatttatctaactcttttgagattcttggaatatagcatatctgatgaaataaccaaggcagttgaagatgactttgtggaaatgcggaagaacgaccctcagagcatcactgctgatgatcttcaccagctgctcgtggtggctcggtgtctgtctctcagtgctggtcagacaacgctgtcaagagaacgatggctgagagcaaagcagctagagtctttaagaagaacgaggcttcagcagcaaaaatgtgttgaatggaaatgaactttaaagatgtaatacctatgaagagtaatgggcaaactgtagccacataattgtaaaattcagatattcatttataccacattgttttataggtaatttctatcacaaaccagtgacatttcctgaaatcaagcctggtaacacctgatgtttatatgatattcagtaaggacttttaccttactgatttcatgg

SEQ ID NO: 15109 - DNA, 443 bp, Homo sapiens
gcattgctttccttggtcagaatgagaggaatgtagccattttcactgctggacaggaatctcccattattcttcgagatggaaatggtaccatctacccaatggccaaagattgcatgggaggaataagggatcccgattggctggatcttccacctattagtagtcttggaatgggtgtgcattctttaataaatcttcctgccaattcaacaatcaaaaagaaagctgctgttatcatcatggctgtagagaaacaaaccttaatgcaacacattctgcgctgtgactatgaggcctgtcgacaatatctaatgaatcttgagcaagcggttgttttagagcagaatctacagatgctgcagacattcatcagccacagatgtgatggaaatcgaaatattttgcatgcttgtgtatcagtttgctttccaaccagcaat

SEQ ID NO: 15110 - DNA, 75 bp, Homo sapiens
agagaacaatgagcacttgaagatttttttatacaaaaggccacagtgaggccaccttgagtcaagccgactaag

SEQ ID NO: 15111 - DNA, 447 bp, Homo sapiens
ggagatgattcaataccctgaacaagaataacttgatccctgatgacagagccaacttctacccattgcagcagaccaatgtgtacacgactacttactacccaagccccctgaacaaacacagcttccggcccgaggcctcacctggacaacggtgcttccccaacagctgataccgtcgtcctggggacttgggcttcttgccttcataaggcacagagcagatggagatgggacagtggagccagtttggttttctccctctgcactaggccaagaacttgctgccttgcctgtggggggtcccatccggcttcagagagctctggctggcattgaccatgggggaaagggctggtttcaggctgacatatggccgcaggtccagttcagcccaggtctctcatggttatcttccaacccactgtcacgctgacactatgctgc

SEQ ID NO: 15112 - DNA, 488 bp, Homo sapiens
  misc_feature (1)...(488): n = a,t,c or g
ctggggacatcctttagcctctgtaggctcaaaactattccctgaggcttgtgacacacaggacaccacaaaggctgttcaacatggcagcacatggtctgtgtcacagaactgcaggtttcagagaattcagtggtgggaagattgctctttgagagagataaaggggtgaattatatctgtttcctttcaaatctggtatgccgtgctagctagagatctgcactgcaaaaatcctgaacacaaacttaaccaacaaaagcaggaaaagacaattttaaacacgggagtggaaagggtaagcacttcttaaaagaccagagacagcctctgaagcgacctaccacttgaaaagtccctgtttaagggcctgtaggcaagttgagcacagacaaaacaaaggttcaattactaccgtcttccaaacctactgnctagataatcaagagcagaagtttcagaatcaaagaaaaggncttgatactggc

SEQ ID NO: 15113 - DNA, 1628 bp, Homo sapiens
ctctttcctcttaaatatttgtgtaaaattacaaatatttattacatttcttgggttcactgaggacaagtcagtatatgaattgaaaggctgttactttgttcctgttacacaagcatataaagatgcttagttcaaaatatcttagatttaatattattttcacattttgacttattttagaacaaatataaagggtcaaaatattaccatagatatttgaatattcccatgaaatatgtcacacccactgaggaattaaacaagttcactaaagaatatcaaattaaatcatttcctcctataaatattttctttttatttgtgtttagaagttgcaattttaggtactattaacagaaaatacataacaaaagcttcctaacaagtgaaaaaaataattataaatgctggaaaaattggcctcattaacatatttacagacttttacttaatacatacgcctttggaaattaattatctgacatttatacaagcatcaaaatttccaaatcactgagtagtgagcacttcagttctttattgtctatacccaaatttgaaagtcatttagtttctgaaagtagaaatgacaagtaacagaaatggtcaatctgagatactattgacatattgttctgttccttcgcctaaaggtgcttctgttgagtaagtgtccttatgctttcttttctctttgctctgatcttcctgtagcttcagaattatgtttcggatttcttctctttttgttctcattcttggtggaggaaaccagtttgccaaattcataggtagttcaaaactgagaattggattctcaaaaaagctctctacatactgcaatacatatacaccacagtcactgaagttgttttgctgtggtacttttggattagagcccttcataacatctttggaaaaacttcttttgcttccttttttaacttcccattccacttctaaatactctcttaaaattttgacaacatttgaccgagaagggcctcggagtgagtccataagtaggatacaaggttgtttacagatagtaggctttaaatgccactgtcctatttctgaactgcagttgtcatcagcgaggaatccatcgtcactgctatcatcctggtttatcctgatcttctgagaagtcgacgagttcatcttcaagcattttaccagcttcaggtgattcatcgctatagtttagtctgattttgcttaagccatctgtatgatgtgtggaacttaaactttcattctgtaggccattctcacttttagtcctatcagcaactttctgggatgtagattctcctttattgaattcttcattttcactcgcagtatgatttatttttttcacactgtattttacactgcatatgtttctcttataacgagggtcactttcttcctgcccaggattggaatcaattacagctatgcaatgttttttgtttagcatcttcttaattacaggcttggcagaagagttttgtgaacaactctccatttcactggctgaagaagaaatacaactgtcctctacagttgaacatttctgtatgacagcattttcatggtaatgaggattaggttcatactttggtttttccaaaccg

SEQ ID NO: 15114 - DNA, 656 bp, Homo sapiens
ctgtgcattcaaattgaaggcaggatcgccagcaaggaacacagggcttgccaggatcacagaaaacccttggagttgttttgacacacccactgatgccaagtgtctgggtgcttgtaggatgacctgccactcagtccaggggcaggagcaacggggagatcccacaagcaaagtgaactgggggatgggttgaaggggctccaggcaactgagccctactcgcaggtcctcagccttggcccaaacaggaatgaggggcacagagtgcccgggtaaccgctcctgggagcagtggggaactgtcggatacttgaactctcaagagctgggctctgagcgtcctcgtccagctgccaacttggccaaaggctaagccagcagattgttctgttgccgggcgacgcgacttctaaacctgagggagtgggcacgtgagcacataatggcaccagtgacagagcgaccataatggattaataagcgcagccaggtacccgcgcaaggcacttgctggcaatggcaggaggcggacgtggggggtcgtgcagtaggtactggagggagagacgtgggcacaaaggtcgcgggaggaacaggtgcccacaatggctgcagatctgcccgtggatcactgaagattcctgctctcctgc

SEQ ID NO: 15115 - DNA, 567 bp, Homo sapiens
  misc_feature (1)...(567): n = a,t,c or g
tgtnnntnattgaancctacnnaacccttgaatgacccnnnnnnnnnnnnnnnnnnnnnnnnnnnnnnnnnnnnnnnnnnnnnnnnnnnggcacgagggtgtctcttcgctgtgttgactnnnnnnnnnnnnnnnnnnnnnnnnnnnnnnnnnnnnnnnnnnnnnnnnnnnnnnnnnnnnnnnnnnnnntgtgtttgcggggctaaggccaaaaatcatcacccaggtcaatgtcaagaagctttttccctatattttcttctaggagttttacagtttcagtcttatggtatagtctttaatccattttgagttgatttttggacttgagataagggtctaatttcattcttctgcatgcggatatcattttcctggtcccattcattgaagaggctgcctttaccccattgtgtgtcnttggcaccttgtcaaagaccagttgaccataaatgtattctgcgccattttgttccattggactttatgtccattnttgtggcaataccatgctggnttgnctaccatagctntgtngtatattnttgagancaggnncatgatgcc

SEQ ID NO: 15116 - DNA, 843 bp, Homo sapiens
ctcgaccgctacccgcaccctaaatcccagaggttggccccctgaggtgtgagtgaaatgagcttttgctttattttccaagtttctctctcaccttcaggggcattcttcgggggtgcatcagagggagggcagagcctgaggatctaagcgaaggcttccccgggtgtaatttcctgggctgtttgtgaggagagatcgaattcgcctcctgctctcaggcctctctgctcctgtcttttgtttggatgccggcgctgctgcctgtggcctcccgccttttgttgctaccccgagtcttgctgaccatggcctctggaagccctccgacccagccctcgccggcctcggattccggctctggctacgttccgggctcggtctctgcagcctttgttacttgccccaacgagaaggtcgccaaggagatcgccagggccgtggtggagaagcgcctagcagcctgcgtcaacctcatccctcaagattacatccatctatgagtggaaagggaagatcgaggaagacagtgaggtgctgatgatgattaaaacccaaagttccttggtcccagctttgacagattttgttcgttctgtgcacccttacgaagtggccgaggtaattgcattgcctgtggaacaggggaactttccgtacctgcagtgggtgcgccaggtcacagagtcagtttctgactctatcacagtcctgccatgatgagccctgttcctgctcatcatgaagatccccgcgatacttcaacgccttctgacttccaggtgatgactgggcccccaataaatcccgtctttgggtcaaaaaaaaaaaaaaaagtcgacg

SEQ ID NO: 15117 - DNA, 664 bp, Homo sapiens
gggagggacgtgggcattttggacaccaggggaaatggaaatgctgctttcaaaacttagtttcctttccatttcttcctagtctggcctttgacacaaatctggtagaaagaagcctgataaattgagggcacttgtaccctccctgtgcccccagaaggttcttggagagaagtgcaagaatttgtgaacacggcggtggagggcgggtggatggccatgggctgggcctccgtatcaggcctgctcaccttgctgggagctttattctgatctcattttgaatgttccagagggagcatcataagagcccagagctccgatttccaaagagtgatattgacatttatggagattggtgttgtaacatattttgataaatactaacttattttgttggggttttggttgtctcttgtcttaggacctggtagttatttgcttgatttttttttccgttattttctacataggcaaagagaattcgagggatagacagtctccaagaaaagtgaagtggtgggagagaattgcttttttcttttttttcttttctctagtttttctttctggctgagatttccgtgcaagacagcacccaatagactatttagagttgacatttgacattttaatgggcgccatggctcattttgtaggttga

SEQ ID NO: 15118 - DNA, 2864 bp, Homo sapiens
ggcgaccttttttctttctctgctgttaccctgttcccgttcgtcttgttcacttccagttttattttgcctcttgcatggtcttttacagttcgttttctacaggaactgagctctgatccaaacaatcactaaaaatgtaattccacccttaatattcataaccaggaaatagcatagcacttcatgatcctagagtgatgaaagcaagaccagggcatctgttttcacagtcacctgtgaccagaccagccaacatggattacttaaaagccaagataaaaccaaaagcaaacttgctaaaaaatcctgaattccatgaggttaactctgaaatcctccaaacaaaatgctagaattgtccactagtgttaagacgagaaaactgaggaaaactcagctgtcttactatctggtaagagtcttcccttcatctcaagccctcaaaaatgcaaacttggttccagctttacaacataccatatccttctatcggttaaaggtttctaacctaaaaaccttctctcctttcttctcacctatttagtgcatactcaaaggctttggttggaagtcactaggtaccactaggtacaatgctttagggctctctcaaagcccacaatggtggagttctgtgaaagaaaacttaagtttctttctctttacccctctcccctcactcagctcaaagttaaacagctgatgcaaaactacagagaagcaagataacaaaatactgttatcaatctatggagaaatcagccagccatgatgaaaaaatgagtcctgccgactatctgccagcttcatgctcagaacccttaaaaacacagaatctaaattaaaatacatgaagctttcacaatccggttaaaggaaaaaggtaactgtaaataactggttaaagtgtgctcattcgttcagaaattagatacaaacatgcaagaattaaagactctgatttaataaaatcagtagtaacaggtcttgagattaaacaactgacctgagggcaaatgggaccaatcagtccctgaaccctacctgacatgtcaaatccaacatttcacatgctgacctaatattgaggttaatttccagaagtaactgcacttttcaacagattaagtcctacaaaattaggctctcgtaccccaaatggtcatggcctacgcctaggtgggaggcactttaaaaataataaaacttcaaaaagaacaaaaacaaccccaaacccaaagacaaaagtaaagaaaatccacttttcactggtttacattattcaaagtgccattctgaaccaacaccctttcatttatagaggaaaaaaatttacaaaaacagtaaacacaaaggatagtcaggttacagctagtttatatacaaagaaatttacaagtttgtcaattgtaggcttttgcccacaaacaaatgcacatttgtccctacaaagtacaacatgcctgaaccaacagtcattacaggagacaattggccacggctttacaaaaagcagaataactgccccaaattgaaattatttattcagcttaaactaatgccacaaccatcccacttggaatcactccaccctgacacttctgaaacccactctttctttctttcatctctgccatgtcccctaagactgagaggcatttcattcaataaaccaaggaagatgacagatgttatcttgattactctcaggtgagaaacgcaaccacactggatgcagaaaatagtgctgactacatttattgaagactctctccctgtataagcccatgtaaaaggtctcagcacctaacacaagactcaaaaaggaagcccacatctctctttcatacaggatttgctgcaatactatattcttccaaccagtgagtagtctcaaagtgtgatgggtgagttttacatagtcttctttgtttcgaatccaattggctgatttgttaccattctagaggctgaactgtatgaagacctcaactaccattcacaaggtgcagttaagagacttttggacagttcacagtgtcaacaaatgtcacaggctccgaccaagtataaccacatcctttggaaatccttccatttttgcaatttcaaaacatcctaacttgctgtaaaattccagaattcttttatcatctggtctcacttcacagaaagctccccgggagccattagccttcagtgaagacaggaggcaagccatcatgcttttggccacacttgggtcagttacttttttgtgaatgtccatctttatcagagaagggaaattagcaaggaaagtttctggcagtacttcctgttcttcatggaaactcaacattattttctcagcctcagagagttccttgtcaccatttggcttggtatacttctcctgcatgaaggggatccaggaaattttacattttttaataaagggggtcacatctacagtgcccaaggcataaccacatatgccatcttcatcttctaggacaaagcagtaatccaggctgagggaaagcagccctcctactaacctgctcagaaggaaagaggccacagtaaacttttcagttgctaatataaaattcagacttcagtgatccaagacccactgtacttgcatgaacttacggaacctacatttggtgtaagaaactagaaatgcacacatattcagattttactaaagccaaagtgggatttaaaataaataaatatatttccagtcatcacctcccctcaacctgataagcctcactatgaaaggtctactctcaaatccaaatacttatcacatacttgtctccaataagatcaggctgactttgaaagggtaaacccactccatcgtcata

SEQ ID NO: 15119 - DNA, 379 bp, Homo sapiens
atttttcactcctggaaaacctaaaacaaccaatgttctaggagctgttaacaagccactttcatcagcaggcaagcaatctcagaccaaatcatcacgaatggaaactgtaagcaatgcaagcagcagctcaaatccaagctctcctggaagaataaaggggaggcttgatagttctgaaatggatcacagtgaaaatgaagattacacaatgtcttcacctttgccggggaaaaaaagtgacaagagagacgactctgatcttgtaaggtctgaattggagaagcctagaggcaggaaaaaaacgcccgtcacagaacaggaggagaaattaggtatggatgacttgactaagttggtacaggaacagaaacctaaa

SEQ ID NO: 15120 - DNA, 1090 bp, Homo sapiens
gctggggagcagccagccctctgcccctgcccagggctccccaactataggcctgggacccccgcccagcttggggggctgctcgtacgagtgtagacactgggcccattggacgtgctgttaactactatcttcatttcccacttcccctctctgattgggggtgtatattttacatctttttttctttttattttcgaaggctttgttttggtttcttaggttaagatgctctcgagcgttgagcaggcacagctctgtcgaggtccctggtcccccacctgtggttctggcctctgaggttgggggactacttgtttcccaccccagggttcctccaggccaagtcatggggtgatgaggagttggggccctgtctgtcctaggcctggagagtgcctgtctgggaaaaggtcactggacctggaagggtccccagggtcccctgactcccgtctccatctgtcacgtggttcaccatcatcaggcaccaggcgcaaactgcttcccgctgttggccatcccttccccagccacaggtgtcccctgcccccaggacagtccagggccaggggcttctgtgagaggcagagggggaccctcaccaaatcttggtggaagagcccaggggctggtcccagaacaggcagtctcacaagcacgcagcacactggagtggacgcctgtgcccacccgagcctggagcatggccaagagccagcttgcaccacccacctgggaggccgaggaggaggtcccctgggcacagggcctctttgggacttcagaggaaatctcccagtcccactctcggagggttaagagaaggcctcctgcagctgtgccgtccacacctctaggtcgccagagccctggcccccagcccccagcaagcctgagcccgggaagaaccagaggccctcccgagagacccagtcacacgtctctgctttaagccttagccagctagtgacgagtacaacgagataacgcccatgtgttttggaacatttatgtaagattgtcatatgaaatgtatttgggaactacattaaacttttaactaaaaaaaaaaaaaaaaaaaagattt

SEQ ID NO: 15121 - DNA, 1142 bp, Homo sapiens
agatggcggcgcaacagcgggactgcgggggtgctgcgcacgtggcggggccggcggcggaggctgaccccctaggacgcttcacgtgtcccgtgtgcttagaggtgtacgagaagccggtacaggtgccctgcggacacgtcttttgctctgcatgcctgcaggaatgtctgaagccgaagaagcctgtctgtggggtgtgtcgcagcgctctggcacctggcgtccgagccgtggagctcgagcggcagatcgagagcacagagacttcttgccatggctgccgtaagaatttcttcctgtccaagatccggtcccacgtggctacttgttccaaataccagaattacatcatggaaggtgtgaaggccaccattaaggatgcatctcttcagccaaggaatgttccaaaccgttacacctttccttgtccttactgtcctgagaagaactttgatcaggaaggacttgtggaacactgcaaattattccatagcacggataccaaatctgtggtttgtccgatatgtgcctcgatgccctggggagaccccaactaccgcagcgccaacttcagagagcacatccagcgccggcaccggttttcttatgacacttttgtggattatgatgttgatgaagaggacatgatgaatcaggtgttgcagcgctccatcatcgaccagtgagcagagtccgtgcttgctatctgtctcatgttacagagcttccattacatattaaacgtgaaatctatgactcctgtaccttacctgttcaacagacctgaaaatgaggccatggcattgggacagggtcacttctgacaggggaagtggggtccccagggtcagcccttctcttccctttggggttcttgcccaaagctgtcttcccctactgttaaccttgtttgtcacacggtcgagttcgtattggttctcggctacttcctgggagcttctgccgcctcctgtggaagataatctagcttctccacctcttgtttcacactcattcctcccatccagtgtttgtctctcgggtccttcaagccagccaggaccttttctgggtcatgaatagcacaatgaagcaagtgtctcctttcccttgtccccaaggtgtgcagactttggcag

SEQ ID NO: 15122 - DNA, 698 bp, Homo sapiens
  misc_feature (1)...(698): n = a,t,c or g
ggacacagaccactgatctcaagcatgtccagtttttagcattaaagacttttctattctttgctgatggcagctacaccgctgaaaaaggaggggcagcctggcgtgttctcaggacccccggaggatcccatattgggtgcttttctttccctggctctatgcagaggggcctgagttggtgtgtatgcctgagtgtttgccttgcgaggcacagtgggtggctgtcttgcctttgttttcgaacctaaaaccattttcagccttttagatatgtcatgtgctgctgcttcccgaagtggtcttgctttctgtttcgtaagatgtcttgtttacacactgtatcagggatttggtgatacttgaaaattcctttggagaaaaaaacaaatttaattgccacactgcctgtcccacatgagggctgttaatttgggaacccaagtttgaacccaacttgtgatggacccgcaggtaaccacagagcttcctttttgaaggcatatggttgggagaggaaccattttcccagctctcggttccggaaggattccacgtcttggggagggctgtgtttcaccactaggaactttaattaactacccgggggaggggaggaagctcgtttgaaaggggaggacaaaggtttttaaacagtttccccaccctttttttnccaccacatactttacaggggg

SEQ ID NO: 15123 - DNA, 711 bp, Homo sapiens
  misc_feature (1)...(711): n = a,t,c or g
tttttttttttttttggctattcaaaaagactttgattttattttgtgatctgtgtcaaactgcctcattctcagtgcaggtgatccctcctccccagaaacaagaactgacaggtagggtctttgtgaagtcatggcttccacaaggccccagggaaaccccacacagttctgagagttgatgggaatcccagcaaagatggggtgggtgggagacagtgacaagaaggggtggtggtcaccacgtcaagaggctgggggttggaaaaccctgtctttggccttgctcagctttggggctgccatgttcatgatggagatgggggactgaaatttcccctgacctggaagtaccccttcggccaggcatggctttgattctctgctaagggctcagctgagagaggagcaggaaaatgtcatgggctggcttcttcacaaggcattgctgctgatgctccggagtccaacaccacgggcaaattgctccagcaggcccccgatggcaccggaaggactgggggctactgcccgaagccccactgtgctgctgtacgcagccaagaaggctgagcgcacctcctgcagccgagtctctcgatcactcagggctgcaagcagacaactgttagggagctcatccgggaagctgaaagggagagaggagtctgtgtgnaggacagcccgctcctgaatactgccacagcccgt

SEQ ID NO: 15124 - DNA, 885 bp, Homo sapiens
ggcacgaggttcttggatctgcgggttatggccggtcccttgcagggcggtggggcccgggccctggacctactccggggcctgccgcgtgtgagcctggccaacttaaagccgaatcccggctccaagaaaccggagagaagaccaagaggtcggagaagaggtagaaaatgtggcagaggccataaaggagaaaggcaaagaggaacccggccccgcttgggctttgagggaggccagactccattttacatccgaatcccaaaatacgggttttaacgaaggacatagtttcagacgccagtataagccttttgagtctcaatagactgcagtatcttattgatttgggtcgtgttgatcctagtcaacctattgacttaacccagcttgtcaatgggagaggtgtgaccatccagccacttaaaagggattatggtgtccagctggttgaggagggtgctgacacctttacggcaaaagttaatattgaagtacagttggcttcagaactagctattgctgccattgaaaaaaatggtggtgttgttactacagccttctatgatccaagaagtctggacattgtatgcaaacctgttccattctttcttcgtggacaacccattccaaaaagaatgcttccaccagaagaactggtaccatattacactgatgcaaagaaccgtgggtacctggcggatcctgccaaatttcctgaagcacgacttgaactcgccaggaagtatggttatatcttacctgatatcactaaagatgaactcttcaaaatgctctgtactaggaaggatccaaggcagattttctttggtcttgctccaggatgggtggtgaatatggccgataagaaaatcctaaaaccta

SEQ ID NO: 15125 - DNA, 966 bp, Homo sapiens
tactttgaagatttgaaatgttcatacctgagcaaagtctacacaggagtaatggactgtttaacaagtttcccaaaacagcattttcctgctccttcgtatgtaggtgagaaacttagctggaaagacatacaaatttagactctcgttgacattgtcgttttaaaagggaagttgctaaggcgatcaatctcaatattagtcttgtttacttcttctttaatgtcaaaattaacatttacaacatcccaattattaaaagtaatgctttatgtttatacactgctatggtacttgtcaaatggggttcccacattcttatcacatctgagccttaccaggtagagaaggtactaaatacactttagaagtaaaaatatgaagtaccgagaggctaaacccactggcctaagatctcaccaaagttcatgaaaaccaggactaggacccacggctcccaaagcccgttcttgctgtgttgtgctgcctccatatccgtcaggaagagcctttccagaatgattctgggcatatactaagaagagcaggtatggaaagatctattgtcagggaatcttagaattccctacacgagtgggagaaagatgtccaaattccttacgcagtggtattcatgatggtgccctatctaagtccaggactgttttcctacagcgtgcctcaaaagtgttgtagagggcaggattctacattcacagcctgttccatctacgagattttccagatgctacttgtggtagacattcctaactcatggtacttagccaccagagatcatgatggaatgagtgggtggcttttctacctgccattccctcagaattcatgaggggtgggggacagggggaccggaattgtcttagcaccccaatgttatgacaaaactatgctactttagaaacgcagtctgtttttcaccaattgacataactactgatctgaagt

SEQ ID NO: 15126 - DNA, 822 bp, Homo sapiens
  misc_feature (1)...(822): n = a,t,c or g
aaagaaaaggttttatatgaaaggttccattttgtttctgtataaaggcttttatcctgtaaggaaaaaaaaaaaaacacaaaaccctagacataataaatgcctgttttctacaaaaacaatgtctaactctgggtggactgatctcttctcaacagccctcccaacctcccttccagggggcttaccagcaaagccatattcggctaggaatttggaattcacaacctttattaacccctggcaaaacttcccgtttgcatgtcaaatcacattgaagcctgaagattagcttttcttactggtttttccaataagtaatagcaaagcccacttatcatacttaaactacagtaaagaaaagaggtggttctctgcagtgatcgtttagtgtggccctcaaacattaaatatcccgaggtctccttggtgggtggcaggatttaaattcaatcaaatcctgtcctagtgtgtgcagtgtcttcggccctgtggacacaggtgaatgagggaccagccctgccctgggctgttgagaagagatcagtccacccagagttagacattgtttttgtagaaaacaggcatttattatgtctagggttttgtgtttttttttttttccttacaggataaaagcctttatacagaaacaaaatggaacctttcatataaaaccttttctttaaaggctgtgtggttcgtatcatgaatgcccatcacgaggcaggattcgggcacatacctgtacttctgctccagagtgtgcggttccccaaatcccctgngtaaacctcttctgggactgctgctcagacaact

SEQ ID NO: 15127 - DNA, 427 bp, Homo sapiens
  misc_feature (1)...(427): n = a,t,c or g
gcggcacgaggaggctctgagacatgccgcctcccatggcgcctgaaagcgggtgcctctcatcctcccctggagtccatgcatgtaagtccaaggcagtgagaagagacttcattttagctacagtcaattcagagtgagggaatgagttctttagttcctagaggaagagaatattgggagtctaggatctgagaaactgaggctgtttctgccttgaagctttcagaacaaatagccttcatcctgttttccatcggtttccttccattattctatttctgttttaaacaccttcctagggaatcgctgtgtgaaaggagattctctcagcctaaaaggagaaactgtcaatgactgccatgcagaaataatctcccggagaggcttcatcaggtgagcgaggtcaganctgtggcccggctgc

SEQ ID NO: 15128 - DNA, 626 bp, Homo sapiens
ttttttttttttttttccagagaatagtgtgttttatttcattttgaaaaacagactcacacagattgattcttcaggtcccccgacttggacctggcacaggaagaagtccaaacaactctgcgtagttacattagtcgttttctggtgctgcagtcgctggatgcgggtagcagtgaaacattcccaagacaatcactaaacatgcagaatgccagccagaagcatgaatcactttcaggggtcttgctgcagggagcatgaggttgtattctgtgtgcattgacaactgtataggataagccagctgtgtccaagggagcaaagcaccccatattcttctgaacctaaaggggtttcctcctcaaagaagcatgttttcaatccctaaactttggggccagatacagctccaagtggcatttattgctctttggagagtcaaagccaagccaccatgagcacgaaagctgtctgagaccctcctcccctcctccccagcatggagagaataattgccatttcaccctacaaatccgaaagagtctcccccttccgtgggtttaagcatggacacaagccaagcaagcctcagatacccaggcctgtttgattgtagctatgtt

SEQ ID NO: 15129 - DNA, 1631 bp, Homo sapiens
gcggcagccgtgcgaacaggatttggcccagctcatgaattcgagcggctctcataaagatctggctggcaagtatcgtcagatcctggaaaaagccattcagttatctggagcagaacaactagaagctttgaaagcttttgtggaagcaatggtaaatgagaatgtcagtctccgtgatctcgcggcagttgctgactgatttttgcacacatcttcctaacttgcctgatagcacagccaaagaaatctatcacttcaccttggaaaagatccagcctagagtcatttcatttgaggagcaggttgcttccataagacagcatcttgcatctatatatgagaaagaagaagattggagaaatgcagcccaagtgttggtgggaattcctttggaaacaggacaaaaacagtacaatgtagattataaactggagacttacttgaagattgctaggctatatctggaggatgatgatccagtccaggcagaggcttacataaatcgagcatcgttgcttcagaatgaatcaaccaatgaacaattacagatacattataaggtatgctatgcacgtgttcttgattatagaagaaaattcattgaagctgcacaaaggtacaatgagctctcttacaagacaatagtccacgaaagtgaaagactagaggccttaaaacatgctttgcacctgtacgatcttagcatcagcagggcagcagcgttctcggatgctagctacccctttttaaaggatgaaaggtgccagcaaccttgctgcctatgggatcctagagaaaatgtatctagataggatcatcagaggaaatcaacttcaagaatttgctgccatgctgatgcctcaccaaaaagcaactacagctgatggttccagcatcttggacagagctgttattgaacacaatttgttgtctgcaagcaaattatataataatattaccttcgaagaacttggagctcttttagagatccctgcagctaaggcggaaaagatagcatctcaaatgataaccgaaggacgtatgaatggatttattgaccagattgatggaatagttcattttgaaacacgagaagccctgccaacgtgggataagcagatccaatcactttgtttccaagtgaataaccttttggagaaaattagtcaaacagcaccagaatggacagcacaagccatggaagcccagatggctcagtgaatccttgcagaacttctgtgcacatgacatctttttccatgttgtgcagatcagtttcactatctccaaagcatttgcatcatgaccttatacatttcaatcccttttatgctggattccgtttaaagaagacattattagagcaggaagtacaagcatttaaaatatgtagttcccatatatttcagggtctctgtgtattaagctaactcagatgttttgaaagctttttctttaaacagaggtgaaatatctgtggctaaaaagtttgagatttgtgataactttgtagtcatgtaaaacttaagtgcttcatgcctctccaaatgtggttattctaataaatggagaaatgagccaaataaaagtagtactttgtttttagttaaaaaaaaaaaaaaaaaaaa

SEQ ID NO: 15130 - DNA, 1433 bp, Homo sapiens
ctgcggtcagcgcacgtgcccgcgagacctgcaaacttgtgccaccggctctgcccgtccccggggagcccgaacgccccgcagccctcacccctcccgccagtctccagccatgggctgctttgaatgctgcatcaagtgtctgggaggagtcccctacgcctccctggtggccaccatcctctgcttctccggggtggccttattctgcggctgtgggcatgtggctctcgcaggcaccgtggcgattcttgagcaacacttctccaccaacgccagtgaccatgccttgctgagcgaggtgatacaactgatgcagtatgtcatctatggaattgcgtcctttttcttcttgtatgggatcattctgttggcagaaggcttttacaccacaagtgcagtgaaagaactgcacggtgagtttaaaacaaccgcttgtggccgatgcatcagtggaatgttcgttttcctcacctatgtgcttggagtggcctggctgggtgtgtttggtttctcagcggtgcccgtgtttatgttctacaacatatggtcaacttgtgaagtcatcaagtcaccgcagaccaacgggaccacgggtgtggagcagatctgtgtggatatccgacaatacggtatcattccttgggaatgctttccccggaaaaatatgtgggctctgccctggagaacatctgcaacacaaacgagttctacatgtcctatcacctgttcattgtggcctgtgcaggagctggtgccaccgtcattgccctgctgatctacatgatggctactacatataactatgcggttttgaagtttaagagtcgggaagattgctgcactaaattctaaattgcataaggagttttagagagctatgctctgtagcatgaaatatcactgacactccagactaaagcagagtctaggtttctgcaattttgttacagtaatttgtaaatagctttagtaaactcaccttgcatggtagattaataagatgacttactgtacatgaattacacaataatgagatctggtggctatttccacattttgaaaaggattcagttatttactgacagtggtgagcatcctttttaaaataatgttctcatacttaaacattagagagcagtatctttaaatgaattattaacactttggaatacttacattttctgttatttttgattgcctgataaccagtttcaatgatgaaaatgaaaacaagtgctgaagatgaaatggaagagaaccgttttaatctggattttgttttgtcacacctggaaaatactttgcaaatatgttctaaattgaaaacaatttttttatgatcacatggttcactaccaaatgaccctcaaataagccagatgaaaatttgaagaaaaaggtcacccagttctctggaaaaaaaaaaaaaa

SEQ ID NO: 15131 - DNA, 880 bp, Homo sapiens
ttttttttttttttttcaggaaaacattctcttactttatttgcatctcagcaaaggttctcatgtggcacctgactggcatcaaaccaaagttcgtaggccaacaaagatgggccactcacaagcttcccatttgtagatctcagtgcctatgagtatctgacacctgttcctctcttcagtctcttagggaggcttaaatctgtctcaggtgtgctaagagtgccagcccaaggtggtcaaaaagtccacaaaactgcagtctttgctgggatagtaagccaagcagtgcctggacagcagagttcttttcttgggcaacagataaccagacaggactctaatcgtgctcttattcaacattcttctgtctctgcctagactggaataaaaagccaatctctctcgtggcacagggaaggagatacaagctcgtttacatgtgatagatctaacaaaggcatctaccgaagtctggtctggatagacggcacagggagctcttaggtcagcgctgctggttggaggacattcctgagtccagctttgcagcctttgtgcaacagtactttcccaggatccacaggaaatactcagagtccacctggaccattttacttatattcagtttccaagtgtcagaggggttcaggactgtctggcctggggggcctcctcatgacctcaattcaggattatctactcaaagcattaaacaaaaggaaatacattttcaggatgaaggctgctcttttaagccctgctgaagaaaccatttcaaacaggattggaatagggaaacccggcactcagctcggcgcaagccgcggtgccttcagactagagagcctctctccggtcgctgcaagtagggcctcgg

SEQ ID NO: 15132 - DNA, 471 bp, Homo sapiens
ttcctaaaatctccttccctggccttgcccttcataaaccctgttctgccataactggttaatttgataaccaagaaacaacaagtcttaaaataagtgttagtgaagcaatgatcagtgcatgggtgacctgaggggccgacttcggttacctaaaggctgccagaccacccattatctactgaccaccactcgagaccgtttcccaccctccctccgagactgtgcgtggctggggtggcctctcaccatcgccacgtcctaaggtggcaacgagactcaggccaagaacacacagcgcgaccaaaggcactgccatttcccgcaggaatcagaggcgggtgctttgtttggctgtttttgttttgttcttttttgtgtttttaataggagcggagaaatcagaagcaggaaggagcatctgggttttttcctgcttctgctccagggaccccatgaaacctcagagtc

SEQ ID NO: 15133 - DNA, 1611 bp, Homo sapiens
taagaagctacagtccactgaaaaggaagtattatggtttttctgagaagaaaagttgctaaatactgcagcaaactcaggcttttcctgagaaaagccacaaacaaaatcatctctgaaattttttaagcaacaacttcctgaagcgtggaatttatggggccagtgagacactaaaatttcacaactctcacatacattatctatctaggactcagtgaagatgttcttcagatttttatttaagttaaattggtaaaatacaaaaagaaaatctggattgagtttcaaatcatcttaaatagcaatcctatgaacaattataactgcaatttcaaacactaagacttaaatatacaacttgatcatacaattatctcaaaacatatgatcaaaaactttggtcaagagcttctttcatgaattcttcaaggacagctatcacatttttggcttcaggcatttcttcatgttccactttaacaatcttcaaaagtatatctccactaccacagttctttaggaacatgtaacatttaaacaaagcataatgattcatttctgcctgtcggataaatctcttcaaattgtttgtgtcttgtatggcctttagtttaaagttctccagtacttgtcggaaaagaaaagggttacctcctttggcaccatttaaaaaagcttgcatccaatcctcacaaaaccggttacttcctgcattgcagaactgaggctgggagctgctgcaatcgatgaccacagacttatgctgctcctctgtcatggccatgcacaaagaagtcatggtgccttcatgaataagtccttgaagactggccacactcagaaacctgttaatgtctctctttgttttttcatctgattctttaacttcaacaggagtgtaactcaaagcagcatgtagcagaaaggtaagcttttcctgaaagagaagaacaaccctttggattgggcatacaacatcctcaaaccagctgctcagataggattttatgtgactctccaggccccttgcctcacaattcatgttatttttcagcccttgaatgtacttgtccaattcaagcctgaaaagctcaagtcctttttcagaccctcctaaaaaacagaccacatattctgaagggttacgttcagagtctatcgttactgtttcaggaagcagtttttcattttggaaaaggcagtaataacaaccaactcggtaacctggaatttttagctcccacagatgcaacattacccagcccttcaaagactgcacctcttgaaagacgccttagcaatgaaactgcgcaagctctggctccacttcggatggtagattagtatctgccaaggagaggctgaaatcatcaccagagggagtttctgcatttgtgccacttgggcttccgtcctcactgtcccctcgttgctgtgccaatctgcttccgcgatagctgtaaagacagtagtggctgctggacggcggctcgagtctccgctcctcggctgagcctccctcttcgctgctctctagttccttttcatctccatccatcgactcctgcaaagaggggagcattgcggcggcctctgagcggccctgtg

SEQ ID NO: 15134 - DNA, 2343 bp, Homo sapiens
aactttgagctgcacgttgcacaaggcgaccactttatcaagttcttcgctccgtggtgtggtcactgcaaagccctggctccaacctgggagcagctggctctgggccttgaacattccgaaactgtcaagattggcaaggttgattgtacacagcactatgaactctgctccggaaaccaggttcgtggctatcccactcttctctggttccgagatgggaaaaaggtggatcagtacaagggaaagcgggatttggagtcactgagggagtacgtggagtcgcagctgcagcgcacagagactggagcgacggagaccgtcacgccctcagaggccccggtgctggcagctgagcccgaggctgacaagggcactgtgttggcactcactgaaaataacttcgatgacaccattgcagaaggaataaccttcatcaagttttatgctccatggtgtggtcattgtaagactctggctcctacttgggaggaactctctaaaaaggaattccctggtctggcgggggtcaagatcgccgaagtagactgcactgctgaacggaatatctgcagcaagtattcggtacgaggctaccccacgttattgcttttccgaggagggaagaaagtcagtgagcacagtggaggcagagaccttgactcgttacaccgctttgtcctgagccaagcgaaagacgaactttaggaacacagttggaggtcacctctcctgcccagctccccgcaccctgcgtttaggagttcagtcccacagaggccactgggttcccagtggtggctgttcagaaagcagaacatactaagcgtgaggtatcttctttgtgtgtgtgttttccaagccaacacactctacagattctttattaagttaagtttctctaagtaaatgtgtaactcatggtcactgtgtaaacattttcagtggcgatatatcccctttgaccttctcttgatgaaatttacatggtttcctttgagactaaaatagcgttgagggaaatgaaattgctggactatttgtggctcctgagttgagtgattttggtgaaagaaagcacatccaaagcatagtttacctgcccacgagttctggaaaggtggccttgtggcagtattgacgttcctctgatcttaaggtcacagttgactcaatactgtgttggtccgtaggcatggagcagattgaaatgcaaaaacccacacctctggaagataccttcacggccgctgctggagcttctgttgctgtgaatacttctctcagtgtgagaggttagccgtgatgaaagcagcgttacttctgaccgtgcctgagtaagagaatgctgatgccataactttatgtgtcgatacttgtcaaatcagttactgttcaggggatccttctgtttctcacggggtgaaacatgtctttagttcctcatgttaacacgaagccagagcccacatgaactgttggatgtcttccttagaaagggtaggcatggaaaattccacgaggctcattctcagtatctcattaactcattgaaagattccagttgtatttgtcacctggggtgacaagaccagacaggctttcccaggcctgggtatccagggaggctctgcagccctgctgaagggccctaactagagttctagagtttctgattctgtttctcagtagtccttttagaggcttgctatacttggtctgcttcaaggaggtcgaccttctaatgtatgaagaatgggatgcatttgatctcaagaccaaagacagatgtcagtgggctgctctggccctggtgtgcacggctgtggcagctgttgatgccagtgtcctctaactcatgctgtccttgtgattaaacacctctatctcccttgggaataagcacatacaggcttaagctctaagatagataggtgtttggcccttttaccatcgagctacttcccataataaccactttgcatccaacactcttcacccacctcccatacgcaaggggatgtggatacttggcccaaagtaactggtggtaggaatcttagaaacaagaccacttatactgtctgtctgaggcagaagataacagcagcatctcgaccaggcctctgcccttaaaggaaatctttattaatcacgtatggttcacagataattctttttttaaaaaaacccaacctcctagagaagcacaactgtcaagagtcttgtacacacaacttcagctttgcatcacgagtcttgtattccaagaaaatcaaagtggtacaattcgtttggtttacactatgatactttctatataaactttttttctaaaataat

SEQ ID NO: 15135 - DNA, 639 bp, Homo sapiens
gaagcactgaaatgtttctcagttttagcttttgaaaacccccaggtatcgatgaccctgggtaaatgttttggttgatggagaattgttaccacagatttttgtgaagatgttacagagggataagcctattgaggatgcagctcacatcaggcaaaatgttttaacttacatgtgtagagctggagcaatttcgggacagatggataactgtattgtattaaagacattaccttgtttggttcgaatgtgcagtaaggagagattactagaggagagagttgaaggagctgagacacttgcctatctgattgaaccagatgttgagctacagagaatcgctagcataactgatcacctcattgccatgcttgctgattatttcaagtatcccagctcagtgagtgccatcactgatattaaaaggcttgatcatgatttaaaacatgctcacgaactccgccaggcttgcattcaagctctatgcctctcttggagcaaatgatgaagacatccggaagaaggtgagtctgggagaaggggcgtcccccagtcctgacagccagcaggcagggagtgacgtcaacctgaaagtcgtgggtgaagagcactaacagtgactgtttgaatataataaag

SEQ ID NO: 15136 - DNA, 709 bp, Homo sapiens
tttctcctgcttctgtcaccctgtgctgtcgaatggcatctcctcactatctgggtccaggcccgggtcctccctgcagactccctcccctccagcccacaaggactccagcctgctggctggtgaagaagcttggaatgaagcagtaagaagttaacgccaggtcaagcctcggggcccaagggttccctgggcacaggctgacactaggagctgctctccttggccggggacagctccagcagctcaggctccagccctccagtgagccgcctctcctggagagtagcaaagaatggagaaaggcctggcttgagaggaaatggagaaaacattgcctggtagctgcagattcaaacccaccacacacaccacggggctagagtgactcacctgggctcacaccaacttctggccaatgcagggaccatgctctgcagacagcagtcctctagcatggccccagcattcagccagtcggtcacctgtgggccatccccatgtgtgaggaagcaggagtcagccaccaagtgtctccacatcggagcttgcgggtcagacctgtgggccaggggatgggagcagggctgagggtaggggctgaatgtgtggctctgtccctgtgttgccttccacagaggagcaaggcctcaggctgaggaaggaggggcacgctggaacagcctagtctcctccccgtggattcccc

SEQ ID NO: 15137 - DNA, 1715 bp, Homo sapiens
cttgggtcaaagcttcctcaagcctggtctgctccttctttcacgtccctgttttctgaggtttggtcatagcttagaaaggatcttggggcttgttttctctaggcccaacctccagagtagccaggactgatggttttctggtctggatgtctgtcacaggcggagagattaacagatgacagggttgaggaagcaagcctttgttatgaattttactaatacagttcaagtgaaattttcgttcatgattctattggcactagaattagaatttcagtactgtagtgctcacagggcttcctggagaacatttgcccgtatactagtcccttctctgctgcctagaaaacagaccgggtctcacccctgtgaaatcttggtggtttacgaagtcctctggatttcttgatattatcagggatattcataagcatatatcaaaaatggacctattttgatattctgttatgaaaatgttattagaaccccaataaattattatttttcccccttgaatctgctaaagaaaacagatcctgacttagcttacttgaaataagcagggcagggagccctgttttggaagagacagactgtggaagagattacaaacaaggcccgaggctgcacgaatgatgagttttgtgtatataatgttaatgtccaccgccacttccctaacgactatgagatcttttttttgaagatcctcatggaaggttgtacagagccccacatttgaggggaagtcctttcagttgatatgagatctctttaacacccctcagtctatgtaggaaatgccttgtgatacatagagaaccctcagcttctctctgcctctggagggaccaaggtctttcctgacagtcggagacacaccttgatgtatgttaataaaagcatttcaggctgtggggccaccatgtatattaatactccttatgtgtccagcatctgtgtattcattcgagtgcccaatccctggatgagatgaactaggccttataaaaagtcaaagcctcaaagaaatggcacaaccatgttcttcggcactcaggctcctaattgcagatcctcacgaagggtggtatgtggagctggaaggtcttgtggccacaggacatgctggtgagccctgagctggccttgtgcagagggctccgttcaaaggctcggggtgtctttgaggttgtttatcaagctggggaactcttccaagtctgacaatgtttcgaaccctttttgcaaggtttgcactattagtataccatcatgtccggaaaacttttaatcttctcaaatatctgatgtaactaccagaaagtcccttacttcctatgaccaatcaggaccaagtcttggaggtgatgtgttacattacgtgcagcacaatagtacccgatcagttaactcagcgctgaagggcttgttttatgaaaggtactattccttctttcacattaactggaaacctctttttttacctgttgttcacaactagttttcttattgactgtattggactgtctcttcttgtagagactgattttggccaacatattaatgcatgttttatgcaaaacacaaatatgatattagttgcttttaaggagttctggcattgtatgtgcatttttgtagaaattgttactggacttataattacatacttaactctgatcaggtttctgtaaaatttaaataaaacc

SEQ ID NO: 15138 - DNA, 1351 bp, Homo sapiens
tttttttttttttaaaactgtaaacattctttttttttttttattaagaaagcatgcaaaaaaacaatgacaacaacttgtgagaccatatacccccttcccaggatgcagcaatgcaaagcattatgggtggtggcacaaaggactcaccaaaccagaaacatgaggagcagggactgaggagagaaaggttgggatgggtggatctataccaaataattactccttttgtccctctcctccactttctctcttatttcctcttataggcagtgagcttctgcagttttgcacacatcacccaatacaacaataatgactacactttgtgtccagcaatgctagaccaacaagaaaaagtagtattcttttcatttcatgaaggggaggggaaactgaggcccaaagggagtcaggtttgccctgtgccacgtagcaagactgggcttggtggaagggagctggaatctcaggaggcctaatggccaatctccagtcccagacccaaacttcagctaccctggctgcacgccagaattcttcatgagactagtttgcagaagacacagatgaacaaggggcatttgcatgtatgatcctacccttgcaaatcctgtatggatctgaacaggaaaagggtttagaaaagagaagtgatcatttacaaatggggaatattgaggagaactgatgggaagttttgtataggacacaccctgactggaaggaataaggaaggaaaagatgcctaaaatagggacactgggcaaaggcattttgccaccctctaagagaaattctcctttccccaatgggaaatattatgtcatacttcaaccccactaagtgccctccaacatcatgggagattcaagccactcgcacccccatttctttcttagaaaggcttcaaagaaataaagtgctctttagttaactgccctatcttgcccctttacttcagcctcactggacttcttcaatgaactctcatatataacccccttccaaaaaaaggaaaggggtggatgaaagaaaaaagcaggagagcggaacgccaaacctcttggaaattatgggtaaataaaataatatgcatgaaaagcagaaatcacaaagaaagtggccttgtctattccatacattttgtcccacagcttttcagcaagtgaaataaggacagaagtaaaattgttcttccctctcgtaactaaaattcaacaatcaacattaaatatacactgagtactttgcaacagtaagtcatggccaccccttgtaaaagagatgagttagctccatacctttttctgggggtcccccttggccctcactgaactcttcctcgtgc

SEQ ID NO: 15139 - DNA, 610 bp, Homo sapiens
acccgattgtggaatgaggatactttcacttgaaaggctgcagacaactctttcaagaaatcactatgagagagtgaggttgcgaaaccacttgagagagagtgaggttgcttgagggagatatgtaggcaagaaggttgattttaaaaggtgagagacacttaagcttatttaaaagctgatgaacaggaatcagttgagaaagagattgtaaatagtagaaaaaaattgtaggtaatttatcagttgatgtctcaaaagaggcaggaaaggatggaattcgaagtgtagatgtagactttattattagataagagagaccctcttttggccagttgaaaaaaaagatactggaggacagtgacatctttgtaggtagaagcttctgttttctctcatgtagaaagttttgacggtgacaagagaaatgtaatatctgtttttttgctacttattgtttcagattgtgagaacagtgaaacagcaacaaaagagggcatctcagaagaaaaatcacagggactccctcaggaaccttcatttcgaggaattagtgagcatgaaagcaatttagtgtggaagcaaggaagtgctacaggggagaaactaa

SEQ ID NO: 15140 - DNA, 1365 bp, Homo sapiens
ttgtaggtagtagaagattcttttattttaaaaaaaattacacgtggttctacaataatttttccttttaaaaagcttcaagatatacagggagatgcactagtccaagaaatccagcttgtcctttaacaaattatacagtttaactttcttcacatattgccacaatagttaattcacagtataatcttatttgtatttggaaaagaagaaataaatatacaataattgaaataggttcaagaatcaagctcgatttgtttccaagacttggaagaacttcttttgtactgttccagttccagatccttctgaattctcatctcatccgacttcattttcagcatactggaggatctctcgcagggtccttggatatctttcagcgtgttaatactctttggtggaaagagcttttcatacaccttttttccacaactccataggtgagtggggcatgaagctttccaatgtcattttcaggaacaggaggagatcctatttgaccgaaagaatccaatcctgctgtgataaacagcggtttattctgatccacacatattgatttgcttttgtcaatgccaaatgccaactggttgataactccacgtatttttagtaatagagcttctgatttactggtaaacattaatgatgctccataataatgtgcaacaaatcgaagtgtcttgcatattacctttctcttctcagactcaaaatcctgaaaaacatcatatttacttccaattatgaccagaggtaccggaaatgggtcaattaattcatgatcctgaggatgatcttcggcatattattccagatcttctgtctcatttcagaaactgctttagcatttgtctttcccagtttcattatcactttgtctacatggctttttgtggcttgcaagagattttccatggtgggccagagatcattaggttttgaaagatccagaacgagaacaagagaaaacgtccgtaagggtgtcacctgtgatgggtatgctgattaagtccaataaagaggttcctccaccgagttcccaaaagtgagcgatatcttttggtgtgttgtgcccttttgctcttcttccatatgtatattccaaagctaaggttggttttggtggttcatctctgtcaagacaccttagaataatagtagtctttcccccatttttactgccaatgaagaaaacaaatttttctgcaatttcagctccatcaccttcacttccattaattccccttttttccacttcagcttttgcaatttcccagagagtttcactgggcatcgtcgacggcctggctgccgcaaacgtcacaggctcggagtagtgaccagcctagaatcagg

SEQ ID NO: 15141 - DNA, 785 bp, Homo sapiens
gcaatttacacattccatggggaaagaagagccatatttccttaaaaaaaaacattaataaagcttgttattgagaaaaattgtagtgaaaagccttaagtaccaaattttaaagcagcagtaacttaatttttatatcagtgtttttgttttgcacaaactaaatgcagtggtaggtgggtttatgagtatattaattgcctttatccatttgtgaagttaagttgatgagggcaaggtttttgtttgtttaatttgtatatgtctaaaggtatttggaactttttacaggaattaaacatatatgcaaatttgtatataaaaatagcatggccatcatttgaatgcttgtaaatgaaaggattatcttttttgagatctatatataaatagaaatagaaaatccagctggactgattaggattcttttttaattcatttgtgtataacatttttattacaattacacatcagttttgacacagtcatagcaacattaatattttcccatgatgcagatcctttttgtaatgggcttgttctttgagatctctgtaaagaaccctgtgaactagaaaacataactcacagagatacttttttaaaaaatttatttactggaactgaaagttccagttggggatgaagcatttcatctcacttcataacacctctttgactgcacttcagtgaattgttcttatgtgcactgtgtagcaacttacattataacaaagcagataagggcggtagctgctgcttatgttgaaaagtgggttcctcag

SEQ ID NO: 15142 - DNA, 2080 bp, Homo sapiens
agagatggcattttttagttgattatttttaaccaagtgccattaacattcatcccccacatcccttttctaaacaagcttagtgttacttggggaatgtgttgggatggacgatcacatgtaaggcaggaagaataggtcaaaggttgaaggccaaaggtaagaccagagggtttgcgaatgtgggtttgtaggatactgagaaagtgaataaagaggagaaaaaaccatggtattacacatcttgctgagaaaggaaagcattcggatctgctgcaaaaacacatatatccataaaagactcatgttattcagaaaacagattgtgaacacaatcacattcgcatgaatcctttaaaaggaagaagaccttaaagtatctgcaaatctgaatttctatttattccttcactgaatatagaaacaatggttatctgattattagagatattattttggatatgttacttattaacttgctatggctggtaaccatgataaagtctgttattaataacaacataattctttttttaaagaagaaaagcttatttttcattgacagtgtatagatttatctacttagttgtgttttgctattagtgttttaattttttttttaagttgagtgtttgataaattttaagaccctggtccccaccttggttttgagtcctgtgttgactacaggtatatagctcaatttaaaaatcctaaagcaaaagaattttatttataaaagaatcaaacagttgcatgcatgaggctgtgaagtcagatatttagtaataaaagcagcagtgcctttttttgtatttacccattgacccccaccaaatgcaactgttttatattaagaaaatagtaacaattttaaaatctcagagtaaaatctatttcactacatgcttttccccccttgttctgatttaagcagtgtgtacttggcatctctacattgtcctagggacagtggtgttctacaatattatcatgtatgatgttttattggtgctttttattcatagtggcttcttaccagaaacagtaggaagaaacacatgaactgtgtacaagacatgaaacattgctgctgatatgttgttttttcacatgcttttgagttttcactttttaaacgagagccagcaaggcaaaatagatgtggctgggtctgcctgtccgggcggctctttgcaccgagctctcaaatcctgtgtattgagggttcctttttggtactcaggattggagctacagctgggccccccctctctcccattcgtttgaagagacactgagggaaacaagggtttcttttgaggtgtccttggctgccttttacgggatggggagccttctccggatcttttgttcttctgcacctcttgtaggctacttgccggtgcaaggttgtagatgttattccccagggagcctgggctggggggctgagctgggctgaatgcaaaagcatgcaaccagaaggcgggcaaggggaggaaaagcaggcctggcctcattggtcccctggagatgtctgtagcagtcagctccagcttgggcctggggaagcagcctgaccaaggcgctcaggtgtgcctgttacaagaagaacctgcagaaggataatttgcacatggagctgtgataacactaatgttgattttttttttttttacaagtcatcagagatgtttgcaaagtgagttttatttttttgtaattcctttatctttacttaaaggtgaatgtgtattcctctgggaggaataggaagaaaacaggaatgttaataatgtcgaacagaaaacttcctcccttattaatatataatcctcatgtatttatgcctaatgtaagctgacttttaaaaagctttcttttgttgcatgccctgtgcaggcatctgtattgtacatgcatgcctttcgtcctgttttcctgtataaagttagtgaacaaagaaatatttttgcctagttcatgttgccaagcaatgcatattttttaaatttgtcatatatggaaagagcatgtttgttacatgtaaaagctttactgatatacagatatacta

SEQ ID NO: 15143 - DNA, 1178 bp, Homo sapiens
gcggccgcggcgtctcctcccgggcgctgaggggcccgaggagaccgtgaggctctggcctgcagctcgcgccgccatggacgctgccgaggtcgaattcctcgccgagaaggagctggttaccattatccccaacttcagtctggacaagatctacctcatcgggggggacctggggccttttaaccctggtttacccgtggaagtgcccctgtggctgggcgattaacctgaaacaaagacagaaatgtcgcctgctccctccagagtggatggatgtagaaaagttggagaagatgagggatcatgaacgaaaggaagaaacttttaccccaatgcccagcccttactacatgggaacttacgaagctcctgtttaaatcatgctttcagacaacatcccgaagggcagacgaaatccggaccctggtcaaggatatgtgggacactcgtatagccaaactccgagtgtctgctgacagctttgtgagacagcaggaggcacatgccaagctggataacttgaccttgatggagatcaacaccagcgggactttcctcacacaagcgctcaaccacatgtacaaactccgcacgaacctccagcctctggagagtactcagtctcaggacttctagagaaaggcctggtgcaggcggcttgctgggggatgtgagcgctcaggacgtgatgaggtactcgtggttctggagctctagaaacacttctgatgcatgaaaaatgtgtgatggtgcaaggaatggattcaggatgttgttggagaaacaagtttgtgattagtccttaaaacttagctccctgggacattcttcaattccacatctgtttctagaaaccagccctttttccccccacttttgagaaataaaaaagccttaggtaaataagtcattctccctagcagagccacttgggtctcctgcatggaagccatcacacttgggcaggtgttcagtgactggtaggtgtagatacagcaggagtggccatgtggtccacggctttttaccccttcttgatcctcatttcttgggctgaatttagactctctcacagaggtggctcacagagaaggatggcagatggtgcagccaacaatgctgaccggtgcttatcctctaagccctgatccacaataaaaatggacccaactcaa

SEQ ID NO: 15144 - DNA, 1038 bp, Homo sapiens
ttttttttttttttttttagagtaaaaaaggagtttatatatttataaatgccaaataaataccagaggccacccaacgccccctcccagacagggctgtctcccccagccctaggcttctagggtgtgagacatcttggccccaagctatagcccaagagcagctgtcagtctgtgctaccagggaactgagtgaggatgatctgtccagccaagtttcactccccctgtgtgaggggcccccatagccacaggcctgggtccctgtataggaccctaagggtgaaagactcagggggagaaggtggccatctcgagtgagacccgctgccacagctccttggtctgtttgctgcgcttgaggttctgtaggatgtcgttgaactgcatcatgcccatgggcgtcaggcagaaggcgctgcgggcactccggatcgcattcacaaagtcgtcgtagtccgcaggagtcaggtgaatcaagcggtggtggatgtactgcatgtatgcctgctggccagcagctgcaccagttggtggaaggccggggcacgcaggtggttgtgggcatgagcgggactcagccgctgcagcgtctccatgacgatctcctgcagcacaaacgggctcagcacccccttggctgcccccacacagaactggtgcacgtagttcactcctggggggcagggggaggggcatgagacgggggtggccacctctgccctagggacccaacttacagatctcagctctggcctggcagagagcctccctccaccccaggagctgaggtaaccctccgccccccgcgcacgcacacatacccgaccaaggcctcaactttgagcaagagctaggaaggaggtctgggataaggaaggtggggagagcaggtggggggggggcaatggtcctagggaggggaggtgttacccagctttgctgccagccccagcaaccatttgacatcatcagtgtaggggggggagcgggagaagttgttggggtgatcgttgtgtgcccggcgacccagcatct

SEQ ID NO: 15145 - DNA, 1788 bp, Homo sapiens
  misc_feature (1)...(1788): n = a,t,c or g
gaatccatgtctgcacacacatctttaatgacaagttgctgtatcactcaacagcggcactactatgatcttttacttacacttcagccagcagagacattcagcagtgtgagattttttaaagtttttccagcctaatgtgtatgtttccaagtgtaataataaagtaacttatcctttaaagatagttaagtagcttttcatttcctagctttaaaacctgtttttttttttttcccagtagtggcatacctgcattaaaaaataatgccttaccaaaaaaagcactctgaatgattggtttcaaaatgatgccacaacataggtggcaccaacactattcaagatcattccattcccatctctaaaaaaatttttggctgggtatgcgtggctcacgcctattaactcaacattttgagaggcccaaagcaagatcactcagggctaggagttgaagactagcctgagcaacatggcaagatcctgtctcaaaattctttttaaaatttttttaaaagcccannnnnnnnnnnnnnnnnnnnnnnnnnnnnnnnnnnnnnnnnnnnnnnnnnnnnnnnnnnnnngaacccaggagtttcaggctgtagttccacctatgatggcagcctgtgaatagccctgggcaacacagcaagacctcatctccaaaaaaagacaaaagaactaaattattctactgcagaacatgattaggtaaatatctccaaagcagaaagacaggtttcatattttcgttagtttgagtcagtccttccaaatcaaatcttgttttttattagtatacagatggtatagccagtaagtaaatgagaagcagtctttttaagccgatccattcttaaatgaaaaaatatataaatattttagaataaatttattaaattctaaagttgtagaatttttaaatttggatattttgggaaaatatttaaaccactattgcaaacaaaacaacaaaatgtacttatgtttatacttaggcacaaagaaaactacagtattttaaagtaaccattacacaatattgaggttgcaaagattactgaaggcataacctaaaaaatgagttgatttctaaaaatgggaaaaaggaaaaaaataatttctaaaaacaagtatgcatacctaaacctacctaatgacaccttagaaaattcaagtatagcaccattcattaacatcaatgaggatgtcatcacacatcatgtagcctctgcacaccgtgagaataaatgaaaaagacaggcatcttgctatcatgacaatagttttgacctcgcagacctctctgtgttacgcaacggataaagccataagaactgtcctgccctcaaggagcaacctaaagtaggaaaaaaaaaacaaaattacacaattattatttacaattgtgagaagagctcttgacaacattcaaatggaggatacagtgtagtaagggtgagggtatcaaggcttccttgagaagtgatgttttgaggccattctttcttctcaataactggtatttggttcctgaatcctttaacttccttaccattgtcactcctaagccaaatctcattacgtcatgtctagactactgttaagagaaccacttaagtggtctctgcagccctcaatttattggtgttatctatgggaaaattgctcaaactctaagccttagtttcctaccctataaaatggggttttatatacaaggaacatactaaatacacaggtatacctcagaaacacggcaggctcaattccagagcacta

SEQ ID NO: 15146 - DNA, 762 bp, Homo sapiens
ggcgagcctgaggcgaacaatggcggagctgggcgaagccgatgaagcggagttgcagcgcctggtggccgccgagcagcagaaggcgcagtttactgcacaggccacgtgcccgtagaaaagatactcatccactgtgggttttggtttcgccgtcaccccactgcctcactggattgtgaggatcatatgcgacaatgtatttgaaaacgactagaacattatcggaggaaggtggactctgaagtagtcgctgtagactatggatgtagaacaagggtttggagcccttcggacatggttctaacgcggcctgacttcttgctggctacatgaccttggactacataatcacgcctcttaaatgggaggtgatgacagctatccttgaggaccttagagagaactgatttcttagtacccagcctcacaaatagtgcatcacttcatggagttatgttgggataaatgtgtggagaagccagggaatcgcctagactctcgcactgaaaattgtctctccagctgtgtagaccgcttcattgacaccactcttgccatcaccagtcggtttgcccagattgtacagaaaggagggcagtaggccatcccccaggagaatgacagaagcaaaggacttgttactaagcagatttaagggtcagtgggggaaggctatcaacccattgtcagatcagcatcaggctgttatcaagtctgttggtgctaaaaagtaaaagatgaaatgttcaaaaaaaaaag

SEQ ID NO: 15147 - DNA, 677 bp, Homo sapiens
tttttttttttgtagtgttttggtcttttattcatggtcagcagagttagaaaaataaaacagaacgaaaacatcaccaccccagtgggccggtgagtctggccaaaatggggaaactgaggtagcccagagtcacagaggaggcctggcccctagcatcaaggcaccagtgaagggaggctgcggactccctcccctgcacggtggggacagccacccagagttagtgtgctggggtccctctgccaaaggaggtgggcgtgatgcccaagcccaggatccccttcaaacctcccctgggctccacgtcccaagggcagggccacgggccacagtggcctcctcttcctcctcctccaaggatcaggataggccgcctgcctgggccctctctacctagccctggaggcaggggcatcacagatcagtgcaggtgactggagtgaccccatgaaccagcagcgtggggcccaggtctcgggttagagtctccagtagcgccaggtagcgggggtatcgggcgggatcggctggcggccgaggcaagtacaggaaggtgagggctgtgatggggccctcagcatccccaccctccggcccacccggccctcctcctgtgccgcgcccctgctgggcccgaaccagggcgttggcgctgcgtgccagggcctctgccc

SEQ ID NO: 15148 - DNA, 504 bp, Homo sapiens
gcatcaagatggactgaaacccacattggtctcttgctgcctttcaaggaacttccatgatggaggcgacttccaggagaagccgactgcccttctccatggaactcagcctgcatctgcccaggagtcagaggaggtgagggaggagatctgggaagggctggacaggcccatctgcttcctgccccctcagcctgctggtgagccagcagataacccacaaaagcctcaacagcccctggccccccatcaactttcaaaggcaccaatgcaaaagactatagctactgcttcagttccttcttccaaatgtcatatgaaatgcctcttaggggtctatactaacccagaactgtgcaggagagagaaatctgggaaacacagttccagcttagctaggttgacttgctataagtcaacacacctagtctcactaagcccatttgtcatgtgtggcccactcagactgaaagaaatctttgttggttcactgttttataaggg

SEQ ID NO: 15149 - DNA, 1159 bp, Homo sapiens
ccgcaacgggcggggcggggccgggcaagtttgttccccgagttcggagcctaggagccccccgcggctgcggcgcaggtgccctcggcctgagtcgggatggagctgcctgctgtgaacctgaaggtgattctcctaggtcactggctgctgacaacctggggctgcattgtattctcaggctcctatgcctgggccaacttcaccatcctggccttgggcgtgtgggctgtggctcagcgggactccatcgacgccataagcatgtttctgggtggcttgctggccaccatcttcctggacatcgtgcacatcagcatcttctacccgcgggtcagcctcacggacacgggccgctttggcgtggggcatggccatcctcagcttgctgctcaagccgctctcctgctgcttcgtctaccacatgtaccgggagcgcgggggtgagctcctggtccacactggtttccttgggtcttctcaggaccgtagtgcctaccagacgattgactcagcagaggcgcccgcagatccctttgcagtcccagaggcaggagtcaagatgcccgagggtactgaagccagccacgctgcgcccggccctgccccgggccttcctcgtgcctgggaggtcgttctagggatgctcctgacctccgtctcttggacctaagatggaatgtgtccccagctcagggattgcctgaaccaagaggccaggagcccccatgggccgcccagtaccatgcacactcctgtcccgaactccctgaggcctcccctcccttcaagggcacccactggttcccaggctgggaaccagggtctctctttacctcctaccccatggtggcaaccacagaggccctcagccgaggtcctgcctgagtgttgcaagctcaggcctttaaggactgctgatgccccctcaggcctcccccaagtttgctgggctttggtggaagccctgagagcttcaggtcctgctcagcccgaggagcagtctgacatgggagtgaggccctgtccttctcactgcctggtcacatggtgcctagggatgcagggctggaggccagaggtgtcagcaacactgtgacccaccacaacctccagcctcccttttcagagcacagcattaaagtttggggaattctgt

SEQ ID NO: 15150 - DNA, 549 bp, Homo sapiens
  misc_feature (1)...(549): n = a,t,c or g
ggaagaatccgagatttcaccacctgactcccctcaaaaccaagcacatcgctcactggtgccgctgtcatggctacaccccaccggaccctgagagcctgaggaatgacggggactccatcgaggacgtgctgacccagatcgacagcgagcccgagtgcccatcatcattctcctctgctgacaacctctgccgcaaactggaggacctgcaacagttccagaaaagggaacccgagaatgaggaggaggtggacatcctcagcctctccgagccagtgaagataaacatcaagaaggagcaggaagagaaacaagaggaagtcaagttctacctgccaccaaccccagggtctgaatttattggggatgtcacacagaagattgggatcaccctgcagcccgtggcactccacaggaacgtgtatgcgtccgtggtggaggacatgatcctgaaggcacagcgaattaaatctgnagggaccctgcttgcttngggaaggaggtggtttncagtgtgactcggcatgtcatgggttacccaacttt

SEQ ID NO: 15151 - DNA, 819 bp, Homo sapiens
gagcagcggcagttcggtacgggaggagcaagaaaaaaaaaagcaggaagagagcagtctcaaacagcaggtagaacaatccagtgcttcccagacaggaatcaagcagctcccttctgctagcaccggcatacctactgcttctaccacttcagcttcagtttctacacaagtagaacctgaagaacctgaggcagatcaacatcaacaactacagtaccagcaacccagtatatctgtgttatctgatgggacggttgacagtggtcagggatcctctgtcttcacagaatctcgagtgagcagccaacagacagtttcatatgggttcccaacatgaacaggcacattctacaggcacagtcccagggcatataccttctactgtccaagcacagtctcagccccatggggtatatccaccctcaagtgtgcagcagggaatacagcagacagcccctcctcaacagacagtgcagtattcactttcacagacatcaacctccagtgaggccactactgcacagccagtgagtcagcctcaagctccacaagtcttgcctcaagtatcagctggaaaacagagtactcagggagtctctcaggttgctcctgcagagccagttgcagtagcacagccccaagctacccagccgaccactttggcttcctctgtagacagtgcacattcagatgttgcttcaggtatgagtgatggcaatgagaacgtcccatcttccagtggaaggcatgaaggaagaactacaaaacggcattaccgaaaatctgtaaggagtcgctctcgacatgaaaaaaaaa

SEQ ID NO: 15152 - DNA, 1258 bp, Homo sapiens
tgacggacgcttcggccgtaacgatgatcggagacatcctgctgttcgggacgttgctgatgaatgccggggcggtgctgaactttaagctgaaaaagaaggacacgcagggctttggggaggagtccagggagcccagcacaggtgacaacatccgggaattcttgctgagcctcagatactttcgaatcttcatcgccctgtggaacatcttcatgatgttctgcatgattgtgctgttcggctcttgaatcccagcgatgaaaccaggaactcactttcccgggatgccgagtctccattcctccattcctgatgacttcaagaatgtttttgaccagaaaaccgacaaccttcccagaaagtccaagctcgtggtgggtggaaaagtgttcgccgaggtgtgcatggtttcccagccacgtccctgttttcaaagatagtttcactttggtctctgaattgaaatgctgtctactgaaagggtttcaggagcgtttatgtaaggggctgtgatgaaattgcattccccatagataaaagaaaaatcatttctatccagagatctgagcagaaggattggcttgttagtttaacacagccgtatttttggacagttcagtgttactttgctgagtctgacagcctctgggccccgggcaaggggccctggtttaacaaacctgctttccacatcccaacaggggtctgcttggccactcagtgcagctgcgattaaccctaaaggctttaaggaacgggccacctgtaacagagacaccagccttcctgtatagacactaaattgttagcaagagtgttgagctagttcctggtgaagtgtttccacagaagacatgtggagcagttgtggggatattaagggaaactttcctctgccttgacccctttgttaaataaaatgactttgggagccattcattgtacagttgcaggaatgagagtgattttatgatgtggtaacattgggaccatgttctaaaaccttgggtttctgagtctgctttttgagtaggtgattttgacggttgaaaaaccaggggccttcatctaggaaatacagcattttccacgaagcttctttgaaagggaatcctggttttgttgccaaaatgaaacgcccggggttggcgctgaatcccacaactgtgtgatttgcttgttgagttttttgttgtctggtttttttgtttgtttgtttataccaataagaatgagcctgaatgttgggtggttt

SEQ ID NO: 15153 - DNA, 493 bp, Homo sapiens
  misc_feature (1)...(493): n = a,t,c or g
gctcatttcatgcttgcttcggctgctaaactgaatttttgttacttagaatattataaagtgtggatgctttctataatgctattggtctaagtgtgattaaatttcattaaggtgtataagcctctaattattacataactggcacgtctgacttttgctatcatttgaggattctactgtatataagtttcatctaacattggcattaataaccacaggtatattccaactaattgttacttcttgtaattgccagactacttcaagagttctcgtaagttttagattttcagagacccatcttcaatactttgaactcattctggtaaacttccttctacctatgtgcaggtccctgtactccagccaacacaggctcagtaactggaaatgaattggctaaaatggtagcaccattgggtttcttaatggagctttaggagttctttatggaaaaaagcacagaactaaattcctcaaaanacaaaca

SEQ ID NO: 15154 - DNA, 929 bp, Homo sapiens
ggcctagatgccaaaaccaggccccagtgacttcatagggcaggcagttgggaaaataccaggcggagggcaaggtcctggtctcaagctggccagcctctgctgtctgccaatcccaggggaggtggccaaagtcccaaactgtgagccaggccccacattcactgggcctcctccagggtcctgtatgccatggaacccttggacatggggctatgaaggaaggtgggtgttgctaagcccaggagcatgggcccctaaccttggccctgtgccccaggtgaggctggtgccaaagttcattgaggtatctaaagaggcccggaagcggttcctgggccccctgcacccctccttcaacctggtaaagatcatccgcagtttcctgctgaaggtcctgcctgctgataagccatgagcatgccagtggggcctggggcatctccctgacccgcgtgtcagacggcgagaatgtcattatatcccacttcaactccaaggacgagctcatccaggccaatgtctgcagcggtttcatccccgtgtactgtgggctcatccctccctccctccagggggtgcgctacgtggatggtggcatttcagacaacctgccactctatgagcttaagaacaccatcacagtgtcccccttctcgggcgagagtgacatctgtccgcaggacagctccaccaacatccacgagctgcgggtcaccaacaccagcatccagttcaacctgcgcaacctctaccgcctctccaaggccctcttcccgccggagcccctggtgctgcgagagatgtgcaagcagggataccgggatggcctgcgctttctgcagcggaacggcctcctgaaccggcccaacccctttgctggcgttgcccccgccgccccacggccaagaggcaaggccaggcagtgg

SEQ ID NO: 15155 - DNA, 180 bp, Homo sapiens
ggcacgagagaattaggatagctcccttaggtttaatgttttggtgagcaggaatatcagttacccctccagatcttaattctagttttttatcactttttcatgaggtgatctcatcctcatctcctagcatgtctggcaattttgatttctgaactctgtgctacctcagggggcagc

SEQ ID NO: 15156 - DNA, 774 bp, Homo sapiens
cagaaagacccaaaacctttattgtccctaccagggagccagtgcttccagcccacaccccacaccccaggagcttcagcaaggtctctgcttgggaggatgctgcccagaactgcagccagggccaccggtgccacctgcaggcttcctcccattccagctaggcagtggccaggctgccccctgaccagccccactgggaaggcagcaggatggcagtggccagtggggtcaggctgggccatctccctctcagacctcagcacctgggtcctcggggctgctgctcttgttccggaagtggtctcgactccgcttcctgctgccatggaagccaacagtttccaccggcgggagacctggcacagacccactgtggacagaccctgacagtgcctccacctcctgcaggcctccatgggggctgccccactcctcagcctctgggctcccgggcctggccagatgggcaggctccacagggccctcgcccctgtctgtggcaggattcccaaggccgcccctgcctggctctcccaccttccccaggaccctcttcctctcgtgtctggcttcgacccctcggactggtttggtgaagatgaccctcccctccccacagctggagggatcctggttgaaggaggacacgcagtcagtgggggcagccaggctctgggagcccaggaaggccagggcggtggcctgattgctctgctcgctgacctcggtcacatcttccaggctgtacttggtccagcgctcggggtgtgc

SEQ ID NO: 15157 - DNA, 1846 bp, Homo sapiens
acacacatacagtatattctttcctcaaaagggttaagatgtctaaaatagggacctagaagcttaacactatttaagtaaatacagtagaagctcacaaatagatttctttgcacaatgattttttgcaaaattttacagtaataataatcccaaggcaaatctctcctgaactgctttccattccataatttgtagtataattcttggattccactgttttctttggggaatggaagttctgaattaaaagcccactgtggagatgctgtggttcatggaatctcttccagtgtaattcagaatcattggcctagaaagtctctgatatttggaggggaacaaaaatcactcacaagcaatccatgatctatacacataagcataatttcctttagttctagttagtcatcagagaacagtcatgtatgcaagttttgtgactgagaaatttctgtgcttccaatccacaatgagatgcatgattttgttttcatcccatttcccccaagcccctgtaaatcagggaaaatgcgcaactgatcgcctaggagagggcctcgtagtggcacagctggagatagtttcaaagtctaaaccaccagcccatcctgaggaaagcctcctatgggaatgtaaagtgcaatcatttcttcagatataagactttccccaacaatgtgattgggattcctttatgggcaaaatcgagagaagctgccatccacctggcttatgcatttatctcttttgtggacttgtctggaccaccttctattttgcccaggagttttgctcaattcccaggacagtgccccctggatggggacacctgtaatgtaacccacacagcggtttgcagagaatgttagccatgacttgggctttctgaaagttggctataatttctctatccctacccacaaccctgggaagttggagcaagaggggcatactattgggctgggaggatttgacagcatttccccagttgccctttaagttcttctatttcaaacgttaattttgcttctctttctaaaaaaaaaaaaaaaaaagaaagagaagaaagaagtgattcctacccctacctccagagttgttgaaagctgaaaagcatacaagattcttccttttaacttggatttctcgttccagaaattgtgggataatctgtattcttgctttagaaaacaattcttagagagggtactagcttactgatgatgtgttaggattgctactgatgctgtcatgtggaaactatttaaaggcactattataaatttatcctataagatgacaatgtttactcaaagtctaacatattcaatgcaagtaagactttctgaaaacacttgatgatgtggaaatgctgcaggattaaataacttgaagagcctttatagattatatgaatgcctatttgtgtctagaaccagttatttaacctgtaaaatgtcaatagcaaatgaaggatgaagtatatctctagatgcaaatacattgagtttaaaagtgcctcaaaataattgagatcacatttcaggacatttggaaatcaggtcgatttgtggtaactgtagtcatcttaaatttcaaaccatttaccatctgaaagttttgatttgaatgtaaaacaggaaattggaattcctttgtccaggagaaacctcacaaaccttctttaaggcatagttttgttgtttgtttgcttgtttgttgcaggctgtaaggcatggctgcttgtttacaaagcatctcattcatattacctgtggagttgcatatccaaaccttagtgagttttgaagctttaagcaaatgcttttaacaaattcttgta

SEQ ID NO: 15158 - DNA, 347 bp, Homo sapiens
gcacgtcactcgatgttctttctttcataagagttgaagaactaggtatatctgcttatattatggcatctatagtagcttagctgctcatatttgggtctctttagaaccagtgtctttcaaagagggttttaactatgctggtgtaaattttaagaatagatacattcaaagaagaattcaacattcatgtgacattcatactttggaactttgggaaagtataggaatgaccatagattggcttagggatagtcaatttacctgtctgtaaatgggatccaatttagtattgttcctggtatttttctaagaccaaccacttgtgtcattcacagttaaatata

SEQ ID NO: 15159 - DNA, 293 bp, Homo sapiens
gatctttttctattttattttttaattgaaaaggcaataaggatttctacttctagtaatgacaggctaagctatttgaatcaactttccattcaaaagaactaaacatgctgaataagatattttttaaaaaatccttaaaagaacctaagaactgagatgatatcaaggaactagtagggataaaatctaaggagaagggaatttctacttccaggctttgatgaggataacagggaataggaatttaccctccaggcctttaaacaacttaaaaattggaattaaaatat

SEQ ID NO: 15160 - DNA, 437 bp, Homo sapiens
aactactgggaagtatgttacagtcttagccaggatgcatgagagatgttatttgggagacttgagatgctttggctgatatttacatgttttcgataagaaagggatcgctgattgagttattgagatagtttttccagagctggaggtcacgtttctaaaactcacctacgaaagatagcattaaaggaacaggggctctctgaggatggccactgatgtgtgtttgtggatacctgggcatcgacccagcctgcaggtgagctctgggccatgttgccttgacacagtcacagtgtagaggctgcaggtgcacacgtgggctccagtgggacttgcgctctggggagacttgctccctgggcatcggtcctgcggaggtgggaaagttccgagaggaggagctatttgcgaaggaagccctgtgggcaatagag

SEQ ID NO: 15161 - DNA, 438 bp, Homo sapiens
gaaaagtaaagatagcatgtccctcaatgagtttataattgatagggacacaaggagctctcactatcaggcaggggttatctaagacagtgaataatgcccagagaagggttataggaattggaggaggatgagaatctctggagaaatcacagcctttggaaaaggccacaaagaggggcagaacccgggggcacccggtggagaactgagcaggtgtggtgtttagaatttaggtaacgggagagtatggtgatgggcagtcttggaaatggactttctgggaagcatttgggtggagatcttggactagactggtgactatggtgtagtgggttgatggtgaccctccaaaatggtacatacatgtcccaactctcagaacctgtaaatgtgaccttattcagaaaaaggtcaatttgcagacagatgtgatta

SEQ ID NO: 15162 - DNA, 432 bp, Homo sapiens
gcaagaacctccctaggctctgtctcatggctttcccagccagatcccatgtctctcttaaccattacttcctcagaatttctgagcttcttgttgctgcacaggcgtctttgaggcacaaaagcagaatgcttgcggtggccaacttggctccggttgctgagttcaaatcctaactccgccacttctctgctatgtgaccttgggcaagttttttaacctctctggccctgttttccacttgtaaaataaggataagtagaacacctgacttataaagttgctgtgagggttaagtgggtgaacacttgtaaaatgcttagagcagtgcccagcacctcctaaatgctattgattcctgtcttttctttttttcttttgttcctccaccagtgcctctaactgcttgtcccatgggcatcaaactagagg

SEQ ID NO: 15163 - DNA, 1151 bp, Homo sapiens
cagcccggactccatcgactcccccggctcttagactaaaatcatgcccaagttcaaacaacgaagacgaaagctaaaagccaaagccgaaagattattcaaaaaaaaagaagcctctcactttcagtccaagctaattacacctcctcctccaccaccctcaccagaaagagtcggtatttcttcaatagatatatctcaaagcagaagctggctaacatcatcctggaacttcaattttcctaacatcagagatgcaataaaactttggacaaatagagtatggtctatatacagctggtgccagaactgcataacccagagtttagaagtattgaaagacaccatctttccatctcgtatctgccaccgagaactttacagtgtaaaacaacagttttgcattttggaaagtaaattatgcaagctccaggaagcactgaagaccatctcagaaagttcttcctgtccaagctgtggtcaaacatgtcacatgagtggtaaacttacaaatgtgcctgcctgcgttctgatcacccctggagactccaaagctgtgcttcctcccacactgccacagccagccagccattttcctcctcctcctccacctccacctctgccacctcctccaccaccactagcacctgtgttgctcagaaaacccagtctcgctaaagcacttcaggctggaccattaaaaaaagatggacccatgcagataacagttaaagatctgctgactgtaaaattaaagaagacacagagtttagatgaaaagaggaagcttataccatcgccgaaagcacggaatccactagttaccgtctctgacttgcagcatgttaccctgaaacctaactccaaagtgttatcgactcaagttacaaacgtcttaatcactcctggaaaaagtcagatggatctgcggaaactgcttagaaaagtcgatgtagagaggagcccaggtggaacccctcttaccaataaggaaaatatggaaacaggaacaggactgactccagtgatgacgcaggccttaaggagaaagtttcagctggctcaccctagaagcccaactccaactctgccactttctacaagcagctttgatgaacaaaactgatgccaactctgcctcactccatgag

SEQ ID NO: 15164 - DNA, 626 bp, Homo sapiens
  misc_feature (1)...(626): n = a,t,c or g
caaggcgggcgccgaggtttgcaaaggctcgcagcggccagaaacccggctccgagcggcggcggcccggcttccgctgcccgtnagctaaggacggtccgctccctctagccagctccgaatcctgatccaggcgggggccaggggcccctcgcctcccctctgaggaccgaagatgagcttcctcttcagcagccgctcttctaaaacattcaaaccaaagaagaatatccctgaaggatctcatcagtatgaactcttaaaacatgcagaagcaactctaggaagtgggaatctgagacaagctgttatgttgcctgagggagaggatctcaatgaatggattgctgtgaacactgtggatttctttaaccagatcaacatgttatatggaactattacagaattctgcactgaagcaagctgtccagtcatgtctgcaggtccgagatatgaatatcactgggcagatggtactaatattaaaaagccaatcaaatgttctgcaccaaaatacattgactatttgatgacttgggttcaagatcagcttgatgatgaaactctttttccttctaagattggtgtcccatttcccaaaaactttatgtctgtggcaaagacta

SEQ ID NO: 15165 - DNA, 506 bp, Homo sapiens
ggacactttttgcttccttaaagtaggatcaaatctagatcctctagcctgggcagtagaggaagaaatgctagcctggaagctcggcatttggtttcactaagggccatgtggttccctgcagcctcatgcctggccccttgacacatccaaagcaaagggagtcctgccccctccccccacttcctttctaccctgcctgtgcacagtgggtgggttggtgtgtctggacactgaggacttcctccccctttgcctgtccttccctcggccctgtgtgcctcagggcagatatagcaagctctttcgaccatagttgatggtaggacattttagactttgtttctcagctctgtacaaacacaaatacacacccccacaaaactaaaatcaaagtttcactacataacactgggccttactgcatgtggttcattctagcatttctgttctgtgctgtgctaagctatactactgtatgttctttcagtaaaaaaaaaaaaaaa

SEQ ID NO: 15166 - DNA, 2156 bp, Homo sapiens
gaattccgctaagggatcagaaaactcgctggttaatgagtggccaagaacatatcagcttaagtttgggaaaaacacacaacagggcattgtgtcagagggtgaccaaagtgactccccagcagatggaccagggaacgaacaggtgacctttgaactgaggccggagtggaagcagcgagggtgtgaagggccgggtgagggtcaaaggcagaagcaagcaggtggggagggttagcgtcatgcctgctaaggagcagtggacgggtcctagcacgtcctgtgagccacccgctgtccagggagcggttacctctgtcttgccagcttcgtggggacagatagttcagctcatcatttatgagacagagaatgggaatttggagggtctgtggctggcctcgtcctgggtgcgcagggggtcacctgaggtgtggtctgaggcctccggggaagggcatttctttgcaggacgcagtttccaggctcaagagcgtggagggaattcctaagggtcgctcttcaccaagagcgcagagccctggtagacctcagcatcgtcacagagaaagctgtgggtgcagaggccttggggacaaggcggggacggaatttcgtatttcagatgaccaaggccaatggccaagtgtgagttcttcaacgcgggcgggagcgtgaaggaccgcatcagcctgcggatgattgaggatgctgagcgcgacgggacgctgaagcccggggacacgattatcgagccgacatccgggaacaccgggatcgggctggccctggctgcggcagtgaggggctatcgctgcatcatcgtgatgccagagaagatgagctccgagaaggtggacgtcctgcgggcactggggcctgagattgtgaggacgcccaccaatgccaggttcgactccccggagtcacacgtgggggtgtcctgccgtctgaagaacgaaatccccaattctcacatcctagaccagtaccgcaacgccagcaaccccctggctcactatgacaccaccgctgatgagatcctgcagcagtgtgatgggaagctggacatgctggtggcttcagtgggcacgggcggcaccatcacgggcattgccaggaagctgaaggagaagtgtcctggatgcaggatcattggggtggatcccgaagggtccatcctcgcagagccggaggagctgaaccagacggagcagacaacctacgaggtggaagggatcggctacgacttcatcaccacggtgctggacaggacggtggtggacaagtggttcaagagcaacgatgaggaggcgttcacctttgcccgcatgctgatcgcgcaagaggggctgctgtgcggtggcagtgctgacagcacggtggcggtggccgtgaaggctgcgcaggagctgcaggagggccagcgctgcgtggtcattctgcccgactcagtgcggaactacatgaccaagttcctgagcgacaggtggatgctgcagaagggctttctgaaggaggaggacctcacggagaagaagccctggtggtggcacctccgtgttcaggagctgggcctgtcagccccgctgaccgtgctcccgaccatcacctgtgggcacaccatcgagatcctccgggagaagggcttcgaccaggcgcccgtggtggatgaggcgggggtaatcctgggaatggtgacgcttgggaacatgctctcgtccctgcttgccgggaaggtgcagccgtcagaccaagttggcaaagtcatctacaagcagttcaaacagatccgcctcacggacacgctgggcaggctctcgcacatcctggagatggaccacttcgccctggtggtgcacgagcagatccagtaccacagcaccgggaagtccagtcagcggcagatggtgttcggggtggtcaccgccattgacttgctgaacttcgtggccgcccaggagcgggaccagaagtgaagtccggagcgctggggcggttgcggacggggccccgccacccttgcccacttctccttcgctttcctgagccctaaacacacgcgtgattggtaactgcctggcctggcacccgttatccctgcacacggcacagagcatccgtctcccctcgttaacacatggcttcctaaatgg

SEQ ID NO: 15167 - DNA, 1060 bp, Homo sapiens
  misc_feature (1)...(1060): n = a,t,c or g
tttttttttttttacaaaacaaaagcttttttttttttagtttgtttcacagtatctaaaatggcagagatttcaggaaagtctaatcacacttgaccatgagtgttgagttgcttttccttcctctgaggccaagagttacttatatccaagaccgtgaagaactctttttgacctgttggatatgatcttgtgactgggtcgaggaaaatgaactcccagggttgttggagtagagctgtttccaccaaaagacagaactgtatgcagctaataagagctccagcacagtgaagatgagcatcaccactaggacacctgttaaacctnccactggtcagggagacaatctttgatttcatatattgggataatagtactcccgaataagggcaatgagggataggataatcccatttctgagccacaatgttgaggagggcagtcctccagggctaccatgctgtcagcaaggaggaagaggcctgctcctgcagtaacagaactcactgcatttgaggtcaagctgctcaggtcaaagggcttagttgattgttttccagagataattgagagggatccagtaatgccaaaacacagagctccctaaaaatgggtaccccagacatccaaagtggtggaaattgcctggattgaaagtgggaggggtagggagcaaaaaccaagatggcccccagacttgaaatcaacaggcaacacaggatctggacagtcccaagaacggtggtttctgttggcagcccgttctgcaggtaatcttcgttttggtacatgtgtccaggtttctctctttgagggatagtgatgccctttggtgtaaagctgtgagaaacccccatggtttgggattgtaatagcatgatgctgatgatgctgttctcgcagcctggtcctgtgtgctgtggctggggatcagctcacctctggggagcgctcagctggaacctcccactggctgttcctgccagaacgatcttggtgctctgctctccagcctctgagacttcctgtccctttcttagagcagtatttatgattc

SEQ ID NO: 15168 - DNA, 918 bp, Homo sapiens
ttttttttttttttttcactaagaaagccagtaactttactgaattgtctgcaaaatacaaattataccttatttccagcaggagaaacttttgaaaatttcccacttttattcactacagacagctgaattaagtcccttgagatacacagatgtggtttaacttagttataacatcttgtcatctagtggcgacaaagtccagcttatgccgctgtgagcctctatttgaatatttgttgcaaatgcttgtatgccctcatttacaagcgattttaattactctcatttaatggaaacaagtccccaggaaaagaaaaagaagaaaaatgatacagcaaaccatctgaagcaatccaagtcctatgcctacagtgacccaggtctactttgctcgaagagaacactggtactgcattcaaaccacaacagaatccgtcacttaactgacctctctgaattaaactgaggtatgaatcaatttgaggtatgaacagggaaggcaaaatgcaataccagattatgaaaataaccaaaatggaaaaatttgatgtagaagatatgtggcttggattgctccacatctttggttaaaacatattaagaaaagcctttaattacatctgtagtctgaagcattctaacagacaccagtattccagcaatcttcaaaagatctgtagtggcaggaaattaacgccataaaagtgacgacatcacggcagatggcacaaatgagaacagatgaagtatgccatgcttaggcaacagcctttattgagggttcaagtggcttcttcttctttaaaaaaaatgttttttaaagaaagaactacaaagcgtttactctctggagaaacaaacaacaaaataaagagggcaaaaaatgctatctctaagttaaaagatgggtatgta

SEQ ID NO: 15169 - DNA, 636 bp, Homo sapiens
ttagatgctgttttagaatacctcccaaatccatctgaagtccagaactatgctattctcaataaagaggatgactcaaaagagaaaaccaaaatcctaatgaactccagtagagacaattcccacccatttgtaggcctggcttttaaactggaggtaggtcgatttggacaattaacttatgttcgcagttatcagggagagctaaagaagggtgacaccatctataacacaaggacaagaaagaaagtacggttgcaacggctgggctcgcatgcatgccgacatgatggaggatgttgaggaagtatatgccggagacatctgtgcattgtttggcattgactgtgctagtggagacacattcacagacaaagccaacagcggcctttctatggagtcaattcatgttcctgatcctgtcatttcaatagcaatgaagccttctaacaagaacgatctggaaaaattttcaaaaggtattggcaggtttacaagagaagatcccacatttaaagtatactttgacactgagaacaaagagacagttatatctggaatgggagaattacacctggaaatctatgctcagaggctggaaagagagtatggctgtccttgtatcacaggaaagcc

SEQ ID NO: 15170 - DNA, 1230 bp, Homo sapiens
aacaccattttatgagtcgttttccatatgtcttaaaagaaataaccaagcacaaaaggaaagagccaaataaaagcatcaagcattgcacagttctctccaataacatagatcatctcttactgaatttaacactgtctgatatcatggtctccctggcaaatgcgtcaactttgcagaaggattgcagttggatagaaatgataaggaaatttgtaacagagacccttgaagatggctctaggctaaatagtaagcaactgaacagattgctgggagtatcctggaggttaatgcaaatacagccaaacagagaggacacagagactcttattaaggcagtttatacattatatcagcagaggggccttatccttccagttcggactttgttattgaagtttttcagtaaaatctatcagacagaagaactgagatcttgtagattcagatatcgtagtaaagtgttatcccgttggctggctggcttaccattgcaacttgctcatcttggctcccgaaatcctgagctctctacacagcttatcgatatcattcataccgctgcagcacgagcaaataaagaattactaaaaagtttacaagctactgccctccgaatttatgatccacaagaaggtgctgtggtggttctccctgcagactctcagcagcgtttggttcagcttgtatatttcctacccagtctgccggctgatttgctttctcggttaagtcgttgctgtattatgggaagactcagttcaagtttggctgccatgcttatcgggatactgcacatgagatcatcattttctgggtggaagtattcagctaaagactggttgatgagtgatgtagactatttcagcttcttattttccacacttacagggttttcgaaagaggagttgacttgggcttcagagccttcgagggagttcctcatgtcatccagacacagctttcccctgtgcttctctaccttacagatttggatcaatttttacaccactgggatgtaacagaggcagtttttcacagtttattggttattcctgcccgaagtcagaactttgacatcttgcaaagtgccatcagtaagcatttggttgggttgactgtaattcctgacagcacggctggctgtggtttttggtgttatctgtaagctcctgggatccatacttgtgtagttagtgagactctactgccattttctggcttctt

SEQ ID NO: 15171 - DNA, 607 bp, Homo sapiens
gtgtttgacccagttcctgtcaagcaagaggccatggaccctgtctcagtgtcatacccatctaattacatggaatccatgaagcctaacaagtatggggtcatctactccacaccattgcctgagaagttctttcagaccccagaaggtctgtcgcacggaatacagatggagccagtggacctcacggtgaacaagcggagttcacccccttcggctgggaattcgccctcctctctgaagttcccgtcctcacaccggagagcctcgcctgggttgagcatgccttcttccagcccaccgataaaaaaatactcacccccttctccaggcgtgcagcccttcggcgtgccgctgtccatgccaccagtgatggcagctgccctctcgcggcatggaatacggagcccggggatcctgcccgtcatccagccggtggtggtgcagcccgtcccctttatgtacacaagtcacctccagcagcctctcatggtctccttatcggaggagatggaaaattccagtagtagcatgcaagtacctgtaattgaatcatatgagaagcctatatcacagaaaaaaattaaaatagaacctgggatcgaac

SEQ ID NO: 15172 - DNA, 1272 bp, Homo sapiens
actcgcagcatttgcagatgctttggaatttgctgatgaagaaaaagagagtccagttgagttcactggacataaactgataggtgtttatacagactttgcattcagaataactccaagaaatagagagtcacataacaaaattcttcgagatctgtccatcttgagttaccttagccagctgcagcccccgatgcccaaaccactttctcctttacatagcctgacaccctatcaggtccctttcaatgcagtcgcactccggattacccactctgatgtcgcccctacccatatactatatgctgtaaacgccagctgggttggtctttgcaagatccaggatgacgtcagaggatacacgaatgggcccatcctgcttgcccagactccaatctgtgactgcttgggctttggcatctgtagaggcattgacatggagaagcggctgtaccacatcctcacccctgtgcccccggaagagctaaggaccgtgaattgtctgctcgttggagctattgcccattccacattgtgtccttaagtgccagcgtgggatcgaagggacagtaccttatgtcacaacggattacaattttaaacttcctggagcatcagagaaaattggagcaagagaacctgaggaggcacataaagagaaaccataccgaagacctaagttctgtcgaaaaatgaagtgatgctcgcgtttttaataagggaagaaactttcctaccagaaagctttgtctcaagcctgaccacaagagacatgatggagtttcatggccatgaatggtgcccttattaacaacagtgttttttgtgtaattcgtgaatgtcatatagtagtcttaagtttctcttttaaagctgcatgagctagaatttgttctagtcttctgtgtgatactcatacttgctgtccagagggagtaaaacagcagagaacagtttgtgtgccattaaaacagagattcctcagaaagttcttcagggacctggttattagaatcaggataaaaataaggaaactggggccattacaatgtaccgagaaggaaggaagaaggccaacctgcaggatctcaagcataatggatacaagggctcccacgggccttgcctgagccatgtgcagagctggggtccagcggtctgcttccttggagccagtgtggatggttacagcccatccatttggtgcagttgtacttggtctgttatattcaatcaaggtttaatagatagggctgggcatggtggctcatg

SEQ ID NO: 15173 - DNA, 634 bp, Homo sapiens
ctctgttcaccttaatataaatctataaagctttagtttttaattacttacacataattgattagaaacattaaattagaaggtgaccacaagaagagtcagctatttcttctggtagacaggagaaaggtaatggcagataatttacgttctttttaagtagccctctgccactaggcttaaatgactagagggttacctaagccactgcagttaggcttttacacagctgaactaaacacgtgtcaataggaaggatgttaggtgtgtgggggggttgggagtgggagcagggaggggaaatttaatggaactggaagttgtgttgtggccccctagatacccctgtagacagtttctctcgcagagggatggtgatgagggaagaataaatcatggaagctggggaagaatgcagaatttgaagtaatctgcgaaagggagatttaggagaaattggtctgagttggtctccttcctttctctttcctgctccggttgtagttttcatcattctctgctctgggtaacttgcagtgcagaggaaggattgcctctcactcttagctgaattagcccttggacatcattttccagtctgtcttggttcttaacagcgctgccattttgtact

SEQ ID NO: 15174 - DNA, 802 bp, Homo sapiens
tttttttttttttccaggtagataaaaaacatttattttaatgcacaactatagcattcatatgcctcagcccagggcaggggttgggagttaggtaagaagggatgcatttagtttgccctgtccccaaagagcgggtaaatagctaagccactcttcactcccagcacagaccttcagaagccccagatatcaggatgtaatggtagggctcactgctctaaaacagctcaaacaacctgctcccaggaaggcaagccttctgctccttggtctcctgcctaccattaggacacaatgttcttcgtctggccagacatctgttgaaaggctggatacaggacaacgtacccatctttccatctatatcaactatcctaggtctctgataccccattttggagcactgttgaagtcagtctctggaggtagtgctgacgcagagggggcaactgagaatagagctcaaagccctctgggagcgtggaattgggaagcttatagtgcaggaggtgctgccggagaccctcatctgccagcagccatgttttctgcagcatactcctgcgggcagctttgacctcatctgagctctgtgggtcctgagagaagatgaagctattgacatgagccacagccacagcatagagcacggggcaccaacgtgggcggagcgcaccagtaaccagggtccggaagtagagctgaaggagggccaggttgtcttcaggaggcactgtgtaacactccagggacacaggcaactgggtcagaggcaggctcagagctcgcaaggctcccc

SEQ ID NO: 15175 - DNA, 2355 bp, Homo sapiens
cataacctaagagaggaatttataggcttcctgccttatgaagccgatgcagaaattttggctgtgaaatttcacactatgataactgagaagtggggattaaatatggagtattgtcgtggccaggcttacattgtctctagtggattttcttccaaaatgaaagttgttgcttctagacttttagagaaatatccccaagctatctacacactctgctcttcctgtgccttaaatatgtggttggcaaaatcagtacctgttatgggagtatctgttgcattaggaacaattgaggaagtttgttcttttttccatccgatcaccacaactgcttttagaacttgacaacgtaatttctgttctttttcagaacagtaaagaaaggggtaaagaactgaaggaaatctgccattctcagtggacaggcaggcatgatgcttttgaaattttagtggaactcctgcaagcacttgttttatgtttagatggtataaatagtgacacaaatattagatggaataactatatagctggccgagcatttgtactctgcagtgcagtgtcagattttgatttcattgttactattgttgttcttaaaaatgtcctatcttttacaagagcctttgggaaaaacctccaggggcaaacctctgatgtcttctttgcggccggtagcttgactgcagtactgcattcactcaacgaagtgattggaaaatattgaagtttatcatgaattttggtttgaggaagccacaaatttggcaaccaaacttgatattcaaatgaaactccctggggaaattccgcagagctcaccagggtaacttggaatctcagctaacctctgagagttactataaagaaaccctaagtgtcccaacagtgggggcacattattcaggaacttaaagatatattctcagaacagcacctcaaagctcttaaatgcttatctctggtaccctcagtcatgggacaactcaaattcaatacgtcggaggaacaccatgctgacatgtatagaagtgacttacccaatcctgacacgctgtcagctgagcttcattgttggagaatcaaatggaaacacagggggaaagatatagagcttccgtccaccatctatgaagccctccacctgcctgacatcaagttttttcctaatgtgtatgcattgctgaaggtcctgtgtattcttcctgtgatgaaggttgagaatgagcggtatgaaaatgggacgaaagcgtcttaaagcatatttgaggaacactttgacagaccaaaggcaaagtaacttgggctttgcttaacataaattttgatataaaacacgacctggatttaatgggtggacacatatattaaactctatacaagtaagtcagagcttcctacagataattccgaaactgtggaaaatacctaagagacttttaaaaataggctttcttatatttgatatttggaagaaaaagccgtaaggtgtatgtagaccacttaatcactaaatatctttgcctataggactccattgaatacattagccattgataatctacctgtttaaatggcccctgtttgaactctcaagctttgaagacctacctgttcttccagaagagaacgttgaaagtgccatgtttccttttgcgtgatctctgttgatggcactctggaattgtttcagttaagtcattttagacatagcatttattatcactgtggatctctacttgttgggtgttatgaattctttgaagaaatatattttgaagaggtgtgggaggaaggaatacattttataaaatgttgtagtgaagcccacaattgacctttgactaatagggagttttaagtatgttaaaaatctatactggacagttacaagaaattaccggagaaaagcttgtgagctcaccaaacaaggatttcagtgtagattttgtctttcttgaacttaaagaaacaaatgacaaagtttgaatggaaaagcctgctgttgttccacatctcgttgctgtttacattcctttgtggagcctacatcttcctaagctttttagcaggtatatgttgaacacttctgtttcatggttgagacagaatcagaggccatggatactgacaactgatttgtctgttttttttctctgtctttttccatgactcttatatactgcctcatcttgatttataagcaaaacctggaaaacctacaaaataagtgttgtggtttatctagaaaaatatggaaaatattgctgttatttttggtgaagaaaatcaattttgtatagtttatttcaatctaaataaaatgtgaattttgtttaaaaaaaaaaaaaa

SEQ ID NO: 15176 - DNA, 806 bp, Homo sapiens
gggcgataatggcggcgtcgaggctggagctaaacctggtgcggctgctatcccgctgcgaggcgatggcagcggagaaacgggacccggacgagtggcgcctggagaagtacgtgggagccctagaggacatgttgcaggccctgaaggtccacgcgagcaaaccggcctctgaggtgatcaatgaatattcctggaaggtggattttctgaaggggatgctgcaagccgagaagctgacctcctcctcagagaaagcactggccaaccagttcctggcccctggcgttgtgccaaccacagccagagagcgagtgcccgccacaaagacggtgcatctgcagtcacgggcgcggtacaccagcgagatgcggagtgagctactaggcacggactctgcagagcctgagatggacgtaaggaagagaactggagtggcagggtcccagccagtgagtgagaagcagtcggcagctgagctagacctcgtcctgcagcgacatcagaacctccaggaaaagctggcggaagagatgcttaggactggcccggagccttcaagaccaatacccctggccgcccagagtgtcatcaagaaggacaaccagaccctgttcacattcattgaaaatggcggaccagaacctggagaaactgaagacggagtcagagcgtctggagcagcacacgcagaagtcagtcaactggctgctctgggccatgctcattatcgtctgcttcatcttcattagcatgatcctcttcattcgaatcatgcctaaactcaaataaagacccccgcccac

SEQ ID NO: 15177 - DNA, 1624 bp, Homo sapiens
ttttttttttgcacagccaaactaccttgttttattggattttgagtaaaaacatgaaccatgtcaaagtttccaggcagactcctaaaaagcattagcagatctggacccaggcaggccagggacagggaggtccctctatcaggttttgaggcgggttgagcgccgaggtagtgggggctgggagggtcgagccgtcaccttgctgggtgttttgtcctgggtgttgggctgggagggtgggcggccgctggaggtgaacagggctgtcaaagcgttccgggcgttgattgcgcaccggcggctcacaggtcgggtggtggggctggggttcttggccgccttgtatttctgcaggttctcaaagtggcccagggacttgcagtgggagagctgtgcccctgagttgctgtgatagaacttgtggcagatgcggcagatatagcccatcacgggcaccaggaagtccacaccatatgcagtattggggctgtaggtctccgagcccttccactcctctctggatatatctctggacctcacctgcttgcagagttcctcctcaacctcgatctcttcttcatcctcatcatcctcttcctcttcttcatcaccctcgaagcaacccacagcgtccactgtaatgaagtggtcctcatcttggccagcaatttctttctcaagcgacttcagctccttggctttgtccttatgcccctgggacttcacgtgctccacaaacttgcgaggggttttgaagtagcggttgcaaacggtgcagaagggtcgcaaggattgtttggcaatcttgtggtcctgtgtcctgcggtgttggatcaggtcccccatgtagtagagctggcaggtgttgcacccagcgccttggtggaggctcctcatcctctgtctccaggacgtcccggggcacgggcagcagggacaggaggcaggcttggctcatgtgctggatctcccctagccgctgctggtgctgaggctccgacatgtggtcctggaactcctgctggctggagcagctggcccttgcagatgtagcagaagaactggagggcctgcttagagggagtgctggtagccgcaggggtggaggagacggagtcactggggcgggggacaggtgtcaggggtacagtgctaaaggcccggctgtcactgctctgcagaatggtgaccttcagggagcccccggcgccccatacccctggcatctctctcgctctgttttcacattctcccacatctaggccacaggccgactcattctgaatctcttccatgctgacttgggtgcccacaggctctggcaaggtcttttccatgcctccaccagcttctactgcatcaggtggcatctccagcccgcagacatgaaccacaactggtgtttgctctggagccagcaacgaacactgcggctgggtgtgaggctgctcatgggtctgctctggtggctgtactgacacctgggctggaggatgctcctgtggctggacgcttgctgtgcctgtgtgtggacctgtggatatgtctgtgtctggacctgcttcctggctgcagctgcacctgccttgggggctgtgaatgtgctgggctgcacctgtgc

SEQ ID NO: 15178 - DNA, 1237 bp, Homo sapiens
gacatcacagggtgggcctcggcccctcccacacccaaagctgagcctgcagggaagccccacatgtccagcaccttgtgcctggggtgttagtggcaccgcctccccacctccaggctttcccacttcccaccctgcccctcagagactgaaattacgggtacctgaagatgggagcctttaccttttatgcaaaaggtttattccggaaactagtgtacatttctataaatagatgctgtgtatatggtatatatacatatatatatataacatatatggaagaggaaaaggctggtacaacggaggcctgcgaccctggggggcacaggaggcaggcatggccctgggcggggcgtgggggggcgtggagggaggccccagggggtctcacccatgcaagcagaggaccagggctttttctgggcaccgcagttttgttttaaaactggacctgtatatttgtaaagctatttatgggcccctggcactcttgttcccacaccccaacacttccagcatttagctggccacatggcggagagttttaatttttaacttattgacaaccgagaaggtttatcccgccgatagagggacggccaagaatgtacgtccagcctgccccggagctggaggatcccctccaagcctaaaaggttgttaatagttggaggtgattccagtgaagatattttatttcctttgtcctttttcaggagaattagatttctataggatttttctttaggagatttattttttggacttcaaagcaagctggtattttcatacaaattcttctaattgctgtgtgtcccaggcagggagacggtttccagggaggggccggccctgtgtgcaggttccgatgttattagatgttacaagtttatatatatctatatatataatttattgagtttttacaagatgtatttgttgtagacttaacacttcttacgcaatgcttctagagttttatagcctggactgctacctttcaaagcttggagggaagccgtgaattcagttggttcgttctgtactgttactgggccctgagtctgggcagctgtcccttgcttgcctgcagggccatggctcagggtggtctcttcttggggcccagtgcatggtggccagaggtgtcacccaaaccggcaggtgcgattttgttaacccagcgacgaactttccgaaaaataaagacacctggttgctaaaaaaaaaaaaa

SEQ ID NO: 15179 - DNA, 940 bp, Homo sapiens
ttttttttttttttatgtttaaaatagtgatgtaacagtttttattttaaaataccaatatttacacgacaccagcaaatacatactttgtcaactatttaacttcccatgaaaaattttagataccaacttagataaaattttagatatcaacttagatgggtgagggtatacatgatttttcaaaatacttttgggggcacatgagcagaatactttgtggactactgctttaaaacacgatttctccaagtacagttgagggacaacttacagaatcacctgggaagggcagatgactttttaaaaatgcatattcctgggccccatccccaaatttgggttattaggtttggggtagaccccaaataagttttcaacatgtaccccaggtggctctcatgcaaaccatttaggaagcactacttaaaaaaataaataaaaactagcattttccggtattgtagccgtggctgaagagggaaacaacctcacatatgtttctggactgaggttagaactgaaataaaagctaaacaggagccggagctcacaaaatagcagcacctgtggaggagcctagacataggaaaaggtcaccagggcaggaatgcactttcctggaattcctagcacggtcaaagaagagaaatggaagggcctaggcaggctaagcccaccgtgggctctccactgtggttgcactttggaagaaaacagaagaaagtccttttccgtcttgaaccagcctgaggaaagtccgtgtttaggagggccaaccgtcacaccaaaataaaacatgcgctaatggaagccgattgcaaagcaggtgacagagcacactttgggaagcactgctggagtgggggcagaggggtacttgccatgaaaatgccctggggaccctctgacgacacctgttgggatggctgaggcacct

SEQ ID NO: 15180 - DNA, 771 bp, Homo sapiens
gggttctcaaattttagtgtgcatcagaatcttaacaatgaggggctaagacacaaattcctgccctcctccctgccgcccccctccagagtttcagattcataggtctcggttgggtctgagaatttgcattcccaagcaagttaacaggtgatgctgatgtttctcaggggataacgggcaaatggtgaaacccagaaagttttgtttctagatatgagatcccattgtctttgccaatgaagctgtgctgtaactccatcttaacaagtaaccccaaattatacccacctgaaagacctttgtgggttgtggaaaacctggaagatggctgagagacagtaccctcgaagtagttctgaggagattgttctgcttgtattcccatgcagcgccatcactgcctgacttccttatgtgtgtctgatttgaggcagttctctaggaaccagttcctggtgctgcaagtccactggcagcttcccagggcttccagaaccctagtggcatggtgggaactcctgttcctcacccgacctctccacagccctggacctgtaaggtttcttccaggctacatggaattagatttccacttttccttggtgaatggtgatgctgattatttggaagctttagcaccaaagtttgaaattcccctaagtgaatggttttggcgatccccttcctttagttatactattggctttctctcatgttcatttaggttgccaaatcttctgtataatcctcatcccccatcaaaaaaga

SEQ ID NO: 15181 - DNA, 1415 bp, Homo sapiens
tttgaaattttgacttttttttttatttggaaaagagacagttgaatcccttttctttaccagcataaggcagtcaggcaaacctaagagttgcttatttcggcaacataaggcggggtcattgcatgacagcaagaaggcacgaggtcccctcatctgtcctttcccagctcgcaggccttggaaccccgcccagggccccgctgagggaggcacaggcacagtcctaccgactcctgcctgggcagctggaggagcccaggttccagcacaaaggagtctgtggacaggcaggggcagaatcctggagggagcgcctgagccaccatcccatgtggcagctgctgggcgtagcagtgcctcgggctggcatcgttttggaagcaagtgggttcagtgaagtgtgttgccacgaatagcacccgctgcttttggctttattaacgtggcaaggagaaattcaaaattaagtatgtctcgaattctgtttgtggcagatggtgcggctctggagctcagccctcggcggcctgattcccaggggtccaagccaccctcattctctgagtcagggttgggcagccacttgtgtcctgagaaggtgccagaaggcctgaagcccaggcaaagggaacgggcagtgcctgtgcctcgggggtaccttccagcatggcctggagcacatccagccatccccttccccccaaactccagccctttctcagaggggctctgggggtcattcaagggggacttctagcttctctctggaaccctttgtccagagcaaagccaggtttccaaggtccccacggcaaggctgttgggtgctggcagcaagaggtacacagcagttctcccagctcacagcagtgacctcagatctccagcagcaagggccgcactctcgtgcccacaagggccttgcagaaatgctccggtccctgggcctcccccggcaggaggggcggggctcctgcctgcagtgaggccacagcactaagcggcttcagtcacatgcttttcaggtgaatcactccaaattcagtgaggagggccacgacaaggaagttcaggtagaagaggagcaggcagaagccatagactctgctgagctggaagcactgcaatgggactgagaccagggagaagacgaggctgagccccagggcgcctgccaggacccacaccagcagtccgtctggctccagcttcacttctgtgtggcttcgggagatctggagcaggcagcccagccccacacccacgaggatgttgaagatgatgcgccaaagcaggcggagaacgccatccgtgggtagccctggcgagccagtgtgaaatccgagaaggcatctccaatgctgttcccccaggccagcagcgtgagccccagcacagtgttgctcagccgg

SEQ ID NO: 15182 - DNA, 1036 bp, Homo sapiens
gtagtttataattgccgaaaataatttaaagacactttttttttctctgtgtgtgcaaatgtgtgtttgtgatccatttttttttttttttttaggacacctgtttactagctagctttacaatatgccaaaaaaggatttctccctgaccccatccgtggttcaccctcttttccccccatgctttttgccctagtttataacaaaggaatgatgatgatttaaaaagtagttctgtatcttcagtatcttggtcttccagaaccctctggttgggaaggggatcattttttactggtcatttccctttggagtgtagctactttaacagatggaaagaacctcattggccatggaaacagccgaggtgttggagccccagcagtgcatgggcaccgttcggcatctggcttgattggtctggctgccgtcattgtcagcacagtgccatggacatgggaagacttgactgcacagccaatggttttcatgatgattacagcatacacagtgatcacataaacgatgacagctatggggcacacaggccatttgcttacatgcctcgtatcatgattgattactgctttgttagaacacagaagagaccctattttatttaaggcagaaccccgaagatacgtatttccaatacagaaaagaatttttaataaaaactataacatacacaaaaattggttttaaagttgactccacttcctctaactccagtggattgttggccatgtctccccaactccacaatatctctatcatgggaaacacctggggtttttgcgctacataggagaaagatctggaaactatttgggttttgttttcaacttttcatttggatgtttggcgttgcacacacacatccaccggtggaagagacgcccggtgaaaacacctgtctgctttctaagccagtgaggttgaggtgagaggtttgccagagtttgtctacctctggggtatccctttgtctgggataaaaaaaatcaaaccagaaggcgggatggaatggatgcac

SEQ ID NO: 15183 - DNA, 443 bp, Homo sapiens
ctcccgccggctctaacccgcgcttggctaaggtccgcgggaacccgtgagccaccgagagagcagagaactcggcgccgccaaacagcccagctcgcgcttcagcgtcccggcgccgtcgcgccactcctccgatggccacagatgtctttaattccaaaaacctggccgttcaggcacaaaagaagatcttgggtaaaatggtgtccaaatccatcgccaccaccttaatagacgacacaagtagtgaggtgctggatgagctctacagagtgaccagggagtacacccaaaacaagaaggaggcagagaagatcatcaagaacctcatcaagacagtcatcaagctggccattctttataggaataatcagtttaatcaagatgagctagcattgatggagaaatttaagaagaaagttcatcagcttgcttatgaccgt

SEQ ID NO: 15184 - DNA, 730 bp, Homo sapiens
gagatagtttccagaggcgggaactctcatggaggtaaaaaagggaatgaagagaaaatgaaagaggggcttgaggatgagaaaagagaagagaaagccctgaagaatgacatagaggagcgaagcctgcgaggagatgtgtttttccctaaggtgaatgaagcaggtgaattcggcctgattctggtccaaaggaaagcgctaacttccaaactggaacataaagcagatttaaatatctcggttgactgcagcttcaatcatgggatctgtgactgggaaacaggatagagaagatgattttgactggaatcctgctgatcgagataatgctattggcttctatatggcagttccggccttggcaggtcacaagaaagacattggccgattgaaacttctcctacctgacctgcaaccccaaagcaacttctgtttgctctttgattaccggctggccggaggacaaagtcggggaaacttcgagtgtttgtgaaaaacagtaacaatgccctggcatgggagaagaccacgagtgaggatgaaaagtgggaagacagggaaaattcagttgtatcaaggaactgatgctaccaaaagcatcatttttgaagcagaacgtgggcaagggcaaaaccggcgaaatcgcagtggatggcgtcttgcttgtttcaggcttatgtccagatagccttttatctgtggatgactgaatgttactatctttata

SEQ ID NO: 15185 - DNA, 699 bp, Homo sapiens
gtcctattctcagcaaggctatggttgcgaatcaaagttgtatagccttgaccatggccatgagaaaccacaagacaaaaaaaagagaacctctggtcttgccaccctcaaaaagaagtttattaagcgtcggaaatctaataggtctgccgatcatgccaagcagatgcgagaactcctctctgggtgggatgttagagatgtcaatgcattagtggaggaatatgagggaacatcagcattaaaggagctttctctacaagccagtttggctagaccagaagcccggacattgcagaaagatatggctgatctttatgagtacaagtattgtactgatgtagacttaatatttcaagaaacttgttttcctgttcatcgtgccattttggcagcaaggtgtccattttttaaaacactgctttcttcctcaccagagtatggggcagagataataatggacatcaatacagctggtattgatatgcccatgttttctgctttgttacactacctttatacaggagagtttgggaatgggaggactcaaggtttcaaaatgtcgatatccttgttcagcttagtgaagaatttggaacaccaaattcccttgatgtagatatgcgtggactctttgattacatgtgttattatgatgtcgtccttagtttttcttcagactctgaactggttgaagct

SEQ ID NO: 15186 - DNA, 613 bp, Homo sapiens
  misc_feature (1)...(613): n = a,t,c or g
ttggtgcagcgatgtttaatggcaattcgtataaaccaagcccatgcacaagtagaaagtgcccgtggagccggcaggaggcccccgccgcgctagagaaccacaagcccggccgtgcagccctccccgcggcgccttaaatagattcttcactatactctgtatgttacagtatgtacaagacccctcccctcgggggaccggggcggactccgcaacgcgttcctatgtacaccacctccccttcggccctgaggtcagtggccagagtcgggtgatggggtaagacagggccagagagggaggaaacagacgcaaacatgcggagtcgggtggggacacggtcagccctgaaacacgaggggcgtgcgcagcgaaggcagtggtgggaaccgaggcggatacattcagagacgcgtcgaacaaataaataaggcaagtcaggagggggccgagtcgggtgcaggcaggaggagctggggagcaggggcaggcagggctccgnaggtcacagcggaagatgcaggtatgtggggcgcgggttttctggagccaggaccaaaagagacggggcacgaccaggagggacgaggagaggggtgtgggagcaagc

SEQ ID NO: 15187 - DNA, 534 bp, Homo sapiens
gtgtgatttcagttgtacttccatcaaggaatatgtgggaagatatacatattgtcaaaatggttgggatgggatagttacaaaggacacttttgtatgttgtatgggatcacttgcctgatagtataaggaacattgtatgaaaagatgaaaagatacttcatttttagaaactgatcagagatgtcactggtctttaagtgatgtcttgaaaatccagtatgtatttgcccaaaagttttagcctacatctagctagcttacacttagcagccaaaccatcattgtgtaggttctgttttggaggaagctcatgggggatctgtgtatttcttaggtttctccctgttctccaatgttttatccatttcgtagcttttttactgtctccagaaagtagtgtgggacctgcacttaggggaataccagaatcatagcgtggttctgccttcttgatgagtgattgtgaaaaacacctgcataagggtgctaattggttgtgtattttttcatttatttgaaatcaaactgaga

SEQ ID NO: 15188 - DNA, 2237 bp, Homo sapiens
ttttttttttttttttcctccagaagatttttatttttaaatctaaaagaatgaatgtttagaataatcttcagctactgtcagcagatgggggaggtattttaaagcagaagagccgttacctaaggacctattagtcttcccaaagtagatgactgtctacttgtagggccagatcaacttctgaaatcaaagtttcactttaaagcagttttttctcagcacccaatggttcaaataaactctctgagacactttgttggtacagattttaaattacaagcttgatttgataccctcaaatacagttcttaaggaagattagttacaaatagttgtcagtactttcaaatgacagaaaaaattacattttagtaaaactggatgaatttttcatgtgtgaaataacaatcctttcaccaccaggtggaattactccagttcatgcaatagataactatgacatttttaaaaactgccctaatttttctagttgcgatttcatgcctattgtaagtcaaaacatcgttatgttcccgagctcacctcaccctccctgggaagtggcgaggacacccatggtttctctgagacaccactgggcccctgcttagcaagctattgtctcagtgctttcctcttgctgcgaaggtccccaggagatgttgggttcagaggaagtggctctggttgcctatgggcaaatactacaccagaggttacacaggatagagacccaagaggtgaacaggagggaagttttaacttattttgacataaaattggcaaaaataagcatcaccaaatttctgtaactagaaattgaggataaaacagaggaggtttgtctatgatgaggatgtccatcacagtagaacttgtgaatagcttttatagaaccacttaatatagtaccgtcaacattttacatattttacatacaatttgaatacaaattcttaaaatttataatagaacattaaaataatcttctaataaaatcagccttaagtataaggaatctaaatttcattatcttgtacatttctaaataaatatctttgatctataacccttgaaaatattacagtttatggtgacatgatagagacaagtcaaacagtattataagtgaaaatgaaacatcaatttaaaatgaacaagtgtaaaaacacgcggaactgaaattatagaaaatcaaaacactaaatacacagtaattaaatatctagcactggaatcaccaaatcatgcgcagtaacacactttcaactgatataaaaagccctttaagattcacataatctaaataaataagcagaaacacaaagggaggtactgtgccagccagtaacaactagaaagtaagttctccctttttctttcaaatgatcctaacagaagacaggagataaagatcacttgttaaaaactataattcatgtttggtttttctttgttgttttttttttaatgctgcccgataaagtcaaagcaaggcttcctaaatgttagaccactacacctcagataaggaaaggccacctaacggacagatttaaacaaaaatcagacatttgtctatggaaggtatgattgaattttcgcgtaatgaccccggcaataggatctaaatccaggccccacaaccaagaatgcaccattcaagcatctgaatgcatgatctgttaatactgaattctatatggtgatttcactcagcaaagtactggtttattctatataagaccaggattaaaacacctacagtgggaactgtatcttacttaagtttgcattctggttctcagaatctcagaacataataggtgtaagcgtttgccaaactgagtccagcattcatgatttcaggaagctttgcatccgtgacaaaactgttgcctgagactcaggggagctttttctttggtctctaggcctgtgattaatttctggctaatcaagttaattgacacagatctgtcacagtttctcattgcagggtcaagagttctagaattcatctattccacagttaagccttctccaaagatttgtgcctgcacatcatcatcaagttaaaagaagaaagatcatctttgtgatgttgggtatttgcttatgttaactgccggaagcacatgcgcacgcacacacacgcgaacacacaatcacttcataagtggagaacagaagtgaaataatacgcaaagcctaaattacacagctcccaagtt

SEQ ID NO: 15189 - DNA, 690 bp, Homo sapiens
gaagtcaacaaaatgactgtgctaataaggagaacattgtcaattcttttactgataaacaacaaacaccagaaaaattacctataccaatgatagcaaaaaaccttatgtgtgaactcgatgaagactgtgaaaagaatagtaagagggactacttaagttctagttttctatgttctgatgatgatagagcttctaaaaatatttctatgaactctgattcatcttttcctggaatttctataatggaaagtccattagaaagtcagcccttagattcagatagaagcattaaagaatccttttttgaagaatcaaatattgaagatccacttattgtaacaccagattgccaagaaaagacctcaccaaaaggtgtcgagaaccctgctgtacaagagagtaaccaaaaaatgttaggtcctcctttggaggtgctgaaaacgttagcctctaaaagaaatgctgttgcttttcgaagttttaacagtcatattaatgcatccaataactcagaaccatccagaatgaacatgacttctttagatgcaatggatatttcgtgtgcctacagtggttcatatcccatgggctataacccctactcaaaaaagaagatcctgtatgccacatcagaccccaaatcagatcaagtcggggaactccataccggaacttccgaaggagtgt

SEQ ID NO: 15190 - DNA, 515 bp, Homo sapiens
  misc_feature (1)...(515): n = a,t,c or g
gagctttccgggaacatccaaggcaagactggcacccagcacagcagtgactgaccacataccccactctccaggacccatggagtccttcagctcaaagagcctggcactgcaagcagagaagaagctactgagtaagatggcgggtcgctctgtggctcatctcttcatagatgagacaagcagtgaggtgctagatgagctctaccgtgtgtccaaggagtacacgcacagccggccccaggcccagcgcgtgatcaaggacctgatcaaagtggccatcaaggtggctgtgctggcaccgcaatggctcctttggccccagtgagctggccctggcttacccgcttttcgccagaagcttgcggcagggtgccattgaacggcactttagctttggtgaggtagactttcaccttcgaggctgctgttcttngctgggcttgttgaaccaattgcccggatgtgttgttagagtttngtgggancacaccttaacgtcccaagtnacatgg

SEQ ID NO: 15191 - DNA, 1937 bp, Homo sapiens
  misc_feature (1)...(1937): n = a,t,c or g
ttaaaaggcatgggtttcgagctgtctcaaaatattgcccaatagccataattttaccagcctttctgtcatatgctgctattacaaagtggaagctgttgaatgtttattggtgcccagggttttgctctccaatctaggttcagttgaaggaatattgtttctaagactgttttgagacatgtccagtacatcacaaaggagatcggggcgacccctgcagatgtggagccattagcccagttgaggatattctccaagttgtcctctctcctgctgatgggaaatggggaatgaagttaagtggtctgaaaaacttgaatcgttcacatttctcagctctggggggtcatttaccagtttgttgtaggaagaaataattcaggtaagttaaaagttcatttcccagagaagggtaaacccccacttacccatctctggcatggatttcagtgggganttgattatcactaatccccaactnggctagaataaatgtaaagtttgacctttttaaaacgaaaagagagacaaagtctcagcacattccaaggagtggtagaaacagagctgaaggtgtccccattgtagattagtctcttctcactaaaatttactttccaacgtagggcctaaaggaaacctttcttaaagacaggctgaaaccccttcaaaggcagatgaggaggtacagacacgtgaccttttggtgcacactggagctacttggacaagaccagcatggccttgctgcacgtgtgtgtatttcactgctgagaacatcctttaacttggtgtgcaatttgaaaggatgtgaatcatggatggaaggccatttgtacatgtcctttggcaaaattctttctggtgtctcctaacttcagagacagggactctttttggatctctattgacaagtaataaaagtctggccctcataacttgtttccgaactagaaaagtctgtgagacccctacatcattctggtttttttgcttgagtaagaacaatccttttttatttttcttctgtacagtctaaagctacagagaaaaaaaaatgcactcttcccttgccggctcctggtaccattggtctgaacagctgtagttggtctactccttacttagcacttgattgtgtggggaaacaaaggtgggaggggtggggaatactggaaataatcagggcaatttttttctttcccataattggactagataccttggtactgttgaccttctcagcatctcccttttgccttagatggcaacaccctccagtctgtagcagagcagtccaacccagattagtgcagcccggaggcttagggtgcagcctccctggtcttcctccacacagttgttcaccaacagaccagacctcctttaaccacagtgtcaacatagtatcggaaagagagccatttcttaggggaataaaacagtttcgcttctttagctcatctgtggtgtcagaatccttggagctgaagagagaaatcaaaagagcatgatgatggctgcctggtttcaggtggaacttaatgcattgatctttagaagctccttctgttggaagttgagtacctgtgatctaaaatgtcctggaggcagatgacatctaaaatatgtgctttccaaccagcacagctggcgctcttagctcctgattggttgtgtgttttattaaggatcagtgcagttaagtcgtattttaaagtgttacctcccctcctaacccttccccttcttggacactgaaggaaaaggccaactagggtgcttagccctctgcgaccaaggaaactaacagctttctcaaagcggtgaccactcaggccagcccagacaaatctgagggatggccagtgcactccaatgatgggacaggcctaacaacacatgtaagcttccccgagagctttcagctggtt

SEQ ID NO: 15192 - DNA, 567 bp, Homo sapiens
ggaagcaagctaagtttcaccaggaggagggaatatccactcacaagaattttagtgtctgtttttttagtatcatggtctaaaacaattgggtgaaatacagaggtcttgtttacttcttttctactaatttgctatggaatgtggatttcaaatttctgtgtgtagaaaatgtcttccatttgtcaaagctcattttaagtcccacgacctctaagaagtgttatggactaaatagctatattctcataattcccaaaacaaataaaaataaaaattcttccactccttgattttagtatgttgtgaatgaggagttaaaaattatttttataactggatctccttttgaaatcaatatgttgaaggattgttgagccaggagaagttagtgggagatttgatgtttgagaattgctgggtacatcagatcttctagagactaaatagtttataaaatcttacttggtcatcagatgtaggtcttttcatgctacagtgcgagaaataataccataatgtaatattctagcataaatatattaggccaaaaaccaaacccagtgg

SEQ ID NO: 15193 - DNA, 799 bp, Homo sapiens
gggaaggcgatggagtcatagacccagggatggagtacgtcccaccccctgctgggtcagtagcttctgggccagtggttgggggcagaaagaaggtcagaggccctgaacagataaagcaggaggtagagagtgaggaggaaaaacccgacaggatggatattgacagtgaagacacagattcaaacacatctttgcaaacaagggctagagaaaagaggaagcctcagctggagaaggacacaaagccgaaagagcccaggtatactcccgtgagcatctacgaggaaaagctgctgctcaagaggctggaagcttgtcccggtgctgttgccatgactccggaagctcggagactgaaacgcaaactgattgtcagacaagcgaaaagggataggggattaccactttttgacttggatcaagttgttaatgctgctcttttgttagttgacgggatttatggagccaaagaaggaggaatttccagacttccagctggacaagccacgtacagaaccacctgtcaggacttcagaatccttgaccgataccagacttccttgccgtccaggaagggatttcgacaccagaccaccaagtttttgtatcgcttggtaggatcagaagatatggctgtggaccagagtattgtcagcccttatacctctcggatcttgaaaccttatatcaggcgtgattatgaaacaaagccacccaaactgcagctcctgtcacagattcgttcccacctgcacaggagcgaccctcactggacgccggagcccgacgcaccttt

SEQ ID NO: 15194 - DNA, 2812 bp, Homo sapiens
agaaaattcccatcattgttggagattatggcccaatgtgggtttatcctacctctacttttgactgtgtggtagcagatcccaggaaaggctccaaaatgtatggtctaaagagctacatcgaatatcagctaacacctactaacactaatcgatctgtaaaccacaggtataagcactttgactggttatatgagcgtctcctggttaagtttgggtcagccattccaatcccttctcttccagacaaacaagtcacaggccgctttgaagaggaatttatcaaaatgcgcatggagagacttcaggcctggatgaccagggatgtgtcgccatccagtaatctcagaaagtgaagttttccagcagttcctaaatttccgagatgagaaggaatggaaaactggaaagaggaaggccgagagagatgagctggcgggagtcatgatattttccaccatggaaccagaggcacctgacttggacttagtagaaatagagcagaagtgcgaggctgtggggaagttcaccaaggccatggatgacggcgtgaaggagctgctgacggtggggcaggagcactggaagcgctgcacgggcccattacccaaggaatatcagaagataggaaaggccttgcagagtttggccacagtgttcagttccagtggctatcaaggtgaaacagatctcaatgatgcaataacagaagcaggaaagacttatgaagaaattgccagtctcgtggcagaacagccaaagaaagatctccatttcctgatggaatgtaatcacgagtataaaggttttcttggctgcttccctgacatcattggcactcacaagggagcaatagaaaaagtgaaagaaagtgacaaactagttgcaacaagtaaaatcaccctacaagacaaacagaacatggtgaagagagtcagcatcatgtcttacgcgttgcaagctgagatgaatcactttcacagtaaccggatctatgattacaacagtgtcatccgcctgtacctggagcagcaagtgcaattttacgaaacgattgcagaaaagctgaggcaggccctcagccgctttccagtgatgtaggacagaacgggccttgaagagaatgccgcgtgctttctcctgacttggggcaatgcaattcaaaactttttttcccctattattcagaaaaaaaaggaaacaaaaccaaaaagaaagagttgcaaaaaactgcatttattttattagccaccctaaatgcgtcagttatttagggatggtcttttgttcatttccgcatccattatttaaaccagtggaaattgtctctatttttggaaagtacttaaaagttaccagaattttcaatggaaaatgaggggtttctccccactgatattttacatagagtcataatttatatgtcttataaattataagtcttatataatttataagtctcccacaatcttccagttcttacccagtgtcagataattaattactaattactttcttaaaaacatgaactatgccagaataaaaaatatctatgtttgtatatttttataactcctttcagtcctctgggggctcctgtcattgaggggaagtcgttacggcctttcactgccacagttacagctcaagtgcttacacttcaagagggaggacgctgggggcccctgggggctgctagtgcccatcgtggtgtgtggcaggtgggccatcccatgtccctccaggggggacccccacaggcctgggcagatgagcagatacccctgggccacccatgtcctcagcgacatttctgatgtgctgctcttatgtgaggaccagtgctttctctctttgcacttccttcctaatcttggttaaggcatgttttatgccatgaagaatacattagaagaattgagggactttgtagagaattttgtggctttggtccgacgggtgagtgggctgtgcggaggcctgtgttcgggagggcctgggggaaggagggcacccagcaccccggcgtctctggccctttcttattctttggctcctcatccaccgtgatgagaagcgctgctgtggccacggcacactgcttggcttgggtggcgggttcatggccagttggtgtcatcagcaaagagaaaaagcacaggttagctccccattagatggaaaagtgtagggactgagaagggctgcagcctcagcagtgtacagagtccccggcgctctgaggttggagagaaagaacagaccagcgcccttcctgactacatccgaaacttcacacagggtgtttctgagcaccagcacttccagcgcttcacttaacggcataaagcaaaacaggaccttggcacaccgtcagctcgaactcaacactggcagccaccgtctcacccctgcggaggagcgctcccgtctcccacaggtgccttacccgcgttccctcccgctgctttcatttttctgacctaataattacgggaaatggaaagtctgggccagcatcaataaaatgacaccaaaaataagtagatgaaatcaaatgaatatgagaacatcttgttcttcaatatcacgggtttttgttaatgtttcataagtaattctccccacttgatttttcttctataaaatcccatagaacaatgtttatgctatagccatttaatatatgtacaaattgtaaagaatatgtataaatgttttacacgaatgtaagagcatgtagaagccaacatataaataaattgtttaaaaaaactgtacagtaaattctcaaagcactttttcaaaacac

SEQ ID NO: 15195 - DNA, 1265 bp, Homo sapiens
  misc_feature (1)...(1265): n = a,t,c or g
ttttttttaatttaatcagtaactttattataacaaaacctgtatattacccatttaaactcatgtgtaacattcagtgatgtgagctgtattaaacccaggtattagtgaaaatttgcattgtaaaacctggtaacagtagacatctatgggtggtcagtaattcaaggacaccttttattttaaacaattttatataattcatatcaatatgcaaaattaccataaaagatacaaggattaatacatatttacatttttagaaatagttactctgaggttgacagctgtcacttttctaaatatttacagaacaaactgaaagagacatttttcatagtcagaattgttcgttaagtcttgctttccagtaacaattatatagtgacttcttatgcccaacatgtgagagttaaagatcagtgggtgttnnnnnnnnnnnnnnnnnnnnnnnnnnnnnnnnnnnnnnnnnnnnnnnnnnnnnnnnnatgcgtgaactgaggagtatgagaccagnnnnnnnnnnnnnnnnnnnnnnnnnnnnnnnnnnnnnnnnnnnnnnnnnnnnnnnnnnnnggtgcatacctgtggtggtgtagtcccagctgcttgggaggctggagtaagatcacttgagcccaggcagtgagcttaagctgcnnnnnnnnnnnnnnnnnnnnnnnnnnnnnnnnnnnnnnnnnnnnnnnnnnnnnnnnnnnnnnnnnnnnnnnnaaccagtgggcatttaaaattgcattctcttagtatctcaaaattctaggtaacaagctgtagccccaagtttaaatgtaatatcaatcagcaaacatgctctaagctactggactgtaagaaagatatttactgaacatttaagacatcttggtaacccaagatcttgagtcaaacccattcttagatgcaaaatattatcagacagacactgggaatatcttcatgctttgtcaagtcaattccacagaataaacaaaatggactggtataattgttagcattaatattggggttcttgtgtgctctatggcataccagggagttcccactatgtatgttttgtttatggaactagagaaactcacctgaacactttgggactggattcaatataggacaaaggatttactcaaagtttgcttagtaaaacaaactggaagaagaacactttttctaaaatgtacctggacagtaatcaatcaatcagactgttgtaaattttagtaaaatgcagacttcagagaaaatac

SEQ ID NO: 15196 - DNA, 1925 bp, Homo sapiens
ctggcaggcaggactgggatcgaggcccagaaaacggagcagcgggcaccagggaggcctggaacggggcgagcgccatgagcaacaaatgcgacgtggtcgtggtggggggcggcatctcaggtatggcagcagccaaacttctgcatgactctggactgaatgtggttgttctggaagcccgggaccgtgtgggaggcaggacttacactcttaggaaccaaaaggttaaatatgtggaccttggaggatcctatgttggaccaacccagaatcgtatcttgagattagccaaggagctaggattggagacctacaaagtgaatgaggttgagcgtctgatccaccatgtaaagggcaaatcataccccttcagggggccattcccacctgtatggaatccaattacctacttagatcataacaacttttggaggacaatggatgacatggggcgagagattccgagtgatgccccatggaaggctccccttgcagaagagtgggacaacatgacaatgaaggagctactggacaagctctgctggactgaatctgcaaagcagcttgccactctctttgtgaacctgtgtgtcactgcagagacccatgaggtctctgctctctggttcctgtggtatgtgaagcagtgtggaggcacaacaagaatcatctcgacaacaaatggaggacaggagaggaaatttgtgggcggatctggtcaagtgagtgagcggataatggacctccttggagaccgagtgaagctggagaggcctgtgatctacattgaccagacaagagaaaatgtccttgtggagaccctaaaccatgagatgtatgaggctaaatatgtgattagtgctattcctcctactctgggcatgaagattcacttcaatccccctctgccaatgatgagaaaccagatgatcactcgtgtgcctttgggttcagtcatcaagtgtatagtttattataaagagcctttctggaggaaaaaggattactgtggaaccatgattattgatggagaagaagctccagttgcctacacgttggatgataccaaacctgaaggcaactatgctgccataatgggatttatcctggcccacaaagccagaaaactggcacgtcttaccaaagaggaaaggttgaagaaactttgtgaactctatgccaaggttctgggttccctagaagctctggagccagtgcattatgaagaaaagaactggtgtgaggagcagtactctgggggctgctacacaacttatttcccccctgggatcctgactcaatatggaagggttctacgccagccagtggacaggatttactttgcaggcaccgagactgccacacactggagcggctacatggagggggctgtagaggccggggagagagcagcccgagagatcctgcatgccatggggaagattccagaggatgaaatctggcagtcagaaccagagtctgtggatgtccctgcacagcccatcaccaccacctttttggagagacatttgccctccgtgccaggcctgctcaggctgattggattgaccaccatcttttcagcaacggctcttggcttcctggcccacaaaagggggctacttgtgagagtctaaagagagagggtgtctgtaatcacactctcttcttactgtatttgggatatgagtttggggaaagagttgcagtaaagttccatgaagacaaatagtgtggagtgaggcggggagcatgaagataaatccaactctgactgtaaaatacatggtatctctttctccgttgtgggcccctgcttagtgtcccttacctgggcttagcgttctgttttcaccagtttccaagtttattgccctcaaaatctttagaatagtttaaattgggcttgttttaaggttctt

SEQ ID NO: 15197 - DNA, 602 bp, Homo sapiens
atcaatgaagccgagtgaatgggggctgaatgtgcgagtccatagctgaagaggagcgccagatggtggaggaatacacttatttatgaaactgtcttgagttcttcttgaattgccagttttcagcctcctcatgcctccgtctcctttagacgacagggtagtagtggcactatctaggcccgtccgacctcaggatctcaacctttgtttagactctagttaccttggctctgccaacccaggcagtaacagccaccctcctgtcatcgccaccaccgttgtgtccctcaaggctgcgaatctgacgtatatgccctcatccagcggctctgcccgctcgctgaattgtggatgcagcagtgccagctgctgcacttgtgggcaaccttacggacaaggacaatcaggcccagacccaagccattgccgctggaccaccaccactgccatcggaacctctaccacctgccctgctaaccagatggtcaacaataatgagaatacaggctctctaagtccatcaagtggggtgggcagccctgtgtcagggacccccaagcagctagccagcatcaaaataatctaccccaatgacttgg

SEQ ID NO: 15198 - DNA, 1520 bp, Homo sapiens
cttattcctccaccccacttcttttagcaaggtctgaaagtttcaaagggagacctataggttaattgtttagttataggcagtgttaaattaggcagattttgacatatttatctttttaccccatccattctaccaaaacctgtgtatttcttgagtttttagtttgagaagctggaaagagagagaagggcctcacagtgatgggttcaggacgggtcaaaggcaaaggcctttgtgatgtgagcaaaggcaaccaaaacttagcctcactccacttttctaaagatggaaattcttttttgggccttggactgcttctagggtagcattttgtaggtcactcttctcctttgtactattttgtttctgccctgatgtcccttgggtctccatcctactgcctggctttcttggccctcatttctcagcttctgcatttccttccctgctcctaacaaatgaagaagcaggctgcagcctcaattgtggaagatctccagcctccttgtaggggataaggggatgtgtagcatctgtgtggattttcacggacaagttccagtaggtgggacagtgatgccgtcaaggcttagttatgatcatgtgtggtgataaagaccatccaccatcacccttttcccctttggttttgaagggccttgccctaagctacctgagggtttaggaggtctgaacacacacagtggagaggttaatctaggttgggaaactgagtaaaagtccagagcaggaatgagcctgctgtggcgtgggtttggaaaggctcacaggaaagaacctgcaggatcaggggtgggaggggaggcccctgaggtgctctccagggaagaggggctggggtttaaatagcatgcttggaggaagattttccttcaatttttcctaagtccttgaattcaccagtagatttttgtaaacaaaatgtaagtcgatgttttctctcaattatcctaggagtgacctttatatgtgtggaagattaatggtatatgctccttatgtcactgtttttgagtaaaatccatttcctttctctgtttcagcctatgacaaaattgatgtttacaggcctgctttttgcttataattgacaacatgtgcaaaaataccaaatttgtgtcctgtgcagtatgaagaattcagtgaatattcattaatgtattagcttgttttgctctctgttcatatatggctctattcttagaaatataatttgaatgtgatctttcaatagtctgaatattttacaaattatagctatgtcttgtgaaaataacctcaaaaagaaaaatacgactctgttgtcttacttgatatttcttgccctagtaatgtacttgacatttatgttcctaagcagtgtaagtaccagtagaatttctctgtcaaactcaatgatcatttagtacttttgtcttctcccatgtgcttgaaggaaaaataaagtgtcactaccgtatttcttgttttcatcaaaaaataaaaataatttagga

SEQ ID NO: 15199 - DNA, 1667 bp, Homo sapiens
gtcgcgagccatggaggaggaggcatcgtccccggggctgggctgcagcaagccgcacctggagaagctgaccctgggcatcacgcgcatcctagaatcttccccaggtgtgactgaggtgaccatcatagaaaagcctcctgctgaacgtcatatgatttcttcctgggaacaaaagaataactgtgtgatgcctgaagatgtgaagaacttttacctgatgaccaatggcttccacatgacatggagtgtgaagctggatgagcacatcattccactgggaagcatggcaattaacagcatctcaaaactgactcagctcacccagtcttccatgtattcacttcctaatgcacccactctgggcagacctgggaggacgatacacatgaagccagtgcatgatcagccagagaagcctcactttgactctcgcagtgtgatatttgagctggattcatgcaatggcagtgggaaagtttgccttgtctacaaaagtgggaaaccagcattagcagaagacactgagatctggttcctggacagagcgttatactggcattttctcacagacacctttactgcctattaccgcctgctcatcacccacctgggcctgccccagtggcaatatgccttcaccagctatggcattagcccacaggccaagcaatggttcagcatgtataaacctatcacctacaacacaaacctgctcacagaagagaccgactcctttgtgaataagctagatcccagcaaagtgtttaagagcaagaacaagatcgtaatcccaaaaaagaaagggcctgtgcagcctgcaggtggccagaaagggccctcagggaccctccggtccctccacttcctccacttctaaatcctcctctggctctggaaaccccacccggaagtgagcacccctccctccaactccctaccagctccagagtggtggtttccatgcacagatggccctaggggtgacctccagttttgcgtgtggaccgtaggcctctttctagttgaatgaccaaaattgtaaggcttttagtcccaccgacattagccagggttcgtagtgaggcctccagagcaggttgtgctgtcccctgcctctggaagcaatggggaatttggaatcttgtgtaagtgcccaaataagtctgagtgctttcctcttcttcaacactcaaccctcaatcccttagcactgattgattagagaggtcccccaaagaaaccactggttttgacccatgaagcattagaactgcattgttcattcaggagccactagtcacatatgactatttaaatttaaagtaaattgtatgaaaaattcatttcttcaattgcattagccacattttgagtattcatgtggctggtagattctgtattagcacaaagatatggaacatttcccatcacccacagaaagttctgttggacagcactgcattagaatattttcatactgctcttcctcaattaatttttgttgttaatgttgatgtcttcattggatgggtcataatgttccatgaaacctctcaagtacacaattgtatgttctttgtatcccttaccacaaatatctcgctctgctcatttcttttgcagcttcctataaagtttgtcttcctcatcaaaaaaaaaaaaaa

SEQ ID NO: 15200 - DNA, 898 bp, Homo sapiens
gcgctgtcctgttaatggcgggcagtagccgctgaggggattgcagataaccgcttcccgcacggggaaagtctaccctgcctgccactttctgctcgccgtcagcgccggagctcgccagcatgtctgtggtaccgcccaatcgctcgcagaccggctggccccggggggtcactcagttcggcaacaagtacatccagcagacgaagcccctcaccctggagcgcaccatcaacctgtaccctcttaccaattatacttttggtacaaaagagcccctctacgagaaggacagctctgttgcagccagatttcagcgcatgagggaagaatttgataaaattggaatgaggaggactgtagaaggggttctgattgtacatgagcaccggctaccccatgtgttactgctgcagctgggaacaactttcttcaaactacctggtggtgaacttaacccaggagaagatgaagttgaaggactaaaacgcttaatgacagagatactgggtcgtcaggatggagttttgcaagactgggtcattgacgattgcattggtaactggtggagaccaaattttgaacctcctcagtatccatatattcctgcacatattacaaagcctaaggaacataagaagttgtttctggttcagcttcaagaaaaagccttgtttgcagtccctaaaaattacaagctggtagctgcaccattgtttgaattgtatgacaatgcaccaggatatggacccatcatttctagtctccctcagctgttgagcaggttcaattttatttacaactgaattcctgcgcagtggagaagtaaaagaagccgcttgtctctgtgagcacagctatatacagtgtagaataaatgtggtagaaaagttaaaaa

SEQ ID NO: 15201 - DNA, 1114 bp, Homo sapiens
aattcggcagaggccttgcttgagttcttcggaaagtctcatccacccccacatcgcctctttaggaagtcacttaatgttgggcttcattattcccacatccctttccttactacttgcctgcacttcttgagaaaaagactgcagaaaggagaggtggggctttcagtagaaacaagcaaaccgcagtccctgtggggggactctccaggaagaagggtaatttcctgcctccttaaattggctgctactgtcagttattttgctcccaaccccagagcttcacttgctccttcacttcccaagttccgcaagaaccgtgggcgacagttatggagaagcgtctgcaggaggctcagctgtacaaggaggaagggaaccagcgctaccgggaagggaagtaccgagatgctgtgagtaggtaccatcgagctctgcttcagctgcggggtctggatccgagtctgccctctccgttacctaatctcggacctcagggcccggccctcacgcctgaacaagaaaacatattgcataccacccagacagactgctataacaatctagctgcttgtctccttcagatggagcccgtgaactacgaacgagtgagagaatatagtcagaaagtcctggaacgacagcctgataatgccaaggccttgtatcgggccggagtggcctttttccatctgcaggactatgaccaggcccgccactacctcctggctgccgtgaataggcagcctaaagatgctaacgtccggcggtacctccagctgacacagtcagaactcagcagctaccatagaaaagagaagcagctctacctgggcatgtttggttaacaaagaagaaagatgctcctccagttgaacttaggtggaccattaaacatgcatgaaggagaaatctgagcctcagcaagagaaattaaccctatacctctgacccaggtggatttttgtttctagttctgcacaaacttcactacttagacagtctgagtctttttctgtctatccatctgtttatttctatacctttcaatacatgttattgttgcagatatttggcttgagaaatatattctgaaaacataaaaaaaaaaaaa

SEQ ID NO: 15202 - DNA, 885 bp, Homo sapiens
  misc_feature (1)...(885): n = a,t,c or g
caggtcctggctgagagccgcgtgcagaggagcatccgcctggtgtccgtgctggagctgctgagagctccctacgtccgctggcaggtggtcaccgtgattgtcaccatggcctgctaccagctctgtggcctcaatgcaatttggttctataccaacagcatctttggaaaagctgggatccctccggcaaagatcccatacgtcaccttgagtacagggggcatcgagactttggctgccgtcttctctggtttggtcattgagcacctgggacggagacccctcctcattggtggctttgggctcatgggcctcttctttggggaccctcaccatcaccctgaccctgcaggaccacgccccctgggtcccctacctgagtatcgtgggcattctggccatcatcgcctctttctgcagtgggcangtggatcccgttcatcttgactggtgagttcttcaacaatctcagcggccggctgccttcatcaattgcaggaccgtcaactggtctcaactttgctgttgggctcctcttcccattcattcaggtgctatctacctgtattttgtgctgcctgagaccaaaaacagaacctatgcagaaatcagccaggcattttccaaaaggaacaaagcatacccaccagaagagaaaatcagactcagctgtcactgatggtaagataaatggaaggccttaacaagtttcctcctccccgttggacaattatgtcaaacacaggattgtctacatggatgatctcacttttcaggaaacttacaatttacccattattgggacgcttacaatgaaatgaagctaacacaatctcttaacttattaaatatttacaacgtaaacctgaacacacatctaca

SEQ ID NO: 15203 - DNA, 1495 bp, Homo sapiens
attcggcacaggatgtcgtggcgctttaggggaagaagttggtgtttcgctgggccctggtactgaagacgcggtccgggtcgcccctagctgtttcctactcacccaaagccccgcacccgccttttctctctctcctctggcaggatgaggcgtgcaggcctgggtgaaggagtacctcctggcaactatgggaactatggctatgctaatagtgggtatagtgcctgtgaagaagaaaatgagaggctcactgaaagtctgagaagcaaagtaactgctataaaatctctttccattgaaataggccatgaagttaaaacccagaataaattattagctgaaatggattcacaatttgattccacaactggatttctaggtaaaactatgggcaaactgaagattttatccagagggagccaaacaaagctgctgtgctatatgatgctgttttctttatttgtcttttttatcatttattggattattaaactgaggtgatgcatgtaattgtgaatttggaatttgttccaacttaatggcttgcagtaccactttgataaaaatcagcatcaaaacattcctagtgttcaaatactgtggcattttccattgaaaattgctgaattttgcttattttataaatcacattagttaatacagtggtctttgaatactgtttcttaatgactcattttagcccctattttcaggggtagtgagagggtgtggctccactaatttccagtttgtttttctattgtttgccaactgtcagattaaatagcattataatattttgttgtaatcataaatgcaggtttatgtcccatgtaaggaaacttagtgggagagtaacagaatgcctggagagcctgactctgagctcttgaagtagtcagccagtttgtggtaaaatggtaattgaattttcctaactgcatcaactgtaatgatatactcccttctcctcctttatttagttaaaattgtaggctgatttctttttacctacaatcttcctaataatttttgatgataatgacccctcatttctttctgcccaaagacctccattctttaaataaaacttggtaattttgggcatatttctggtagggcccattgcacatgtgtatccagtatagttattatttcatattaactttatgaattctcttgacttggcttataatagttttatgatttttactacataggtagcacatttatcatttgtgacagaataatgtgaagttaagtaattactgaactttaaatggaaatagtatgcaagaaactcaggcattgaacttgaagataagagtattattgctttaatccagtgtatttgtttatggaaagaaaaacacaaaggcagactgttgagtaaaaaatattaaatattgttaaatattctgtattttggaatttatccatttataggcttcaaaagtaaatttttaaataaaatatattagtcgactgtgtt

SEQ ID NO: 15204 - DNA, 992 bp, Homo sapiens
  misc_feature (1)...(992): n = a,t,c or g
gaggaggagggagtctacctgccacctcttctcttgcccctcttctgcccacacatccagcatccaaaatccattcatttaatgaattgataaagtgccgtgcaaactggtgcacaaacaggcccccagtccacgcagcctggctcctaggaaaagtggtgaccgggcgtggggggacatgccgcagccctgggacacagtcgggcaccttccccgcacccccaggccttggctgtgcctcaagtcagagagggtcagccttcaggccccggagacgagtgactggccgatcatttcacaataaaatcactcacttttggcaacttcactttttttaaggcacagtcagttcctttttttcatgtacctcacaaaagatgaagaccatgtagtactctttttggtaaagttacagtgttcatgttaaatatcacttttttctacattgtgtggtaaaaagaactacgttaatagctatatcttaaatactgtgatttgactttttgaaaaatatcctaatacaaatattttactaacttacaatcactcatttaataagaaacatttggattcttttgaaatcagtgttaattgactcatattcttaaaagcctggctcttgaccctattggaaacacaaaggaagctgaaatcaaacatctaaaatacactgcgtacacgtgtgcgtgcacaacaacacacacacacacacacacacagctcttcatttctcctgagccatgcagaatttactttcaatgtggaaatctgttccctttaccacactgtatatgcacagagcacaagagaggctatctctagtcacttccaccagcgaggccttagactccgtattagaggccaccgatttcatacaacagtgtttcgctaaagacccttcactattcttgtttaggtaaataggctgtctgctcttcaggggaactgtttacctatggggttatttaccaaaggaacggctgggcanttgg

SEQ ID NO: 15205 - DNA, 1165 bp, Homo sapiens
gcgagcagggtgcggcggcggcggggcgctccggggaggccaggacagctgatggttgtggcagaaacatctcaaggtagctggtccgcccccacttccccatctacctcttgtcctccccccaacaccaccaccaccctggctcccctccctcatgaccgcctggatcctcctgcctgtcagcctgtcagcgttctccatcactggcatatggactgtgtatgccatggctgtgatgaaccaccatgtatgccctgtggagaactggtcctacaacgagtcctgccctcctgaccctgctgagcaagggggtcccaagacctgctgcaccctggacgatgtccccctcattagcaagtgtggctcctatcccccagaaagctgcctcttcagcctcattggcaacatgggtgctttcatggtggccctgatctgcctcctgcgctacgggcagctcctggagcagagtcggcactcttgggttaacaccacggcactcatcacaggctgcaccaacgctgcgggcctcttggtggttggcaactttcaggtggatcatgccaggtctctgcactacgttggagctggcgtggccttccctgcggggctgctctttgttgctgcatgtgctctctcctacaaaggggccactgccccgctggacctggctgtggcctatctgcgaagtgtgctggctgtcatcgcctttatcaccctggtcctcagtggagtcttctttgtccatgagagttctcagctgcaacatggggcagccctgtgtgagtgggtgtgtgtcatcgatatcctcattttctatggcaccttcagctacgagtttggggcagtctcctcagacacactggtggctgcactgcactacccactgggccgggcctgcaagtcctccgggagcagcagcacctccacccacctcaactgtgcccccgagagcatcgctatgatctaaggtctggggagggtggctggcccggcctccacagcaccccaccccatatcttctttccatttatttcgtaccaaaaacaattttgagaaagtattctgttgggatctgggcttcctcacttctggagaagtggccatcccatgcccacctgtgccatggaggagtgggccctgccagctgccacagttgcatgacctg

SEQ ID NO: 15206 - DNA, 343 bp, Homo sapiens
gcatctacctagcacatcgtgtggcccaagcttgggaattggcccagttcatccaccacacatccaagaaggcagacgtggttctgttgtgtggagacctcaacatgcacccagaagacctgggctgctgcctgctgaaggagtggacagggcttcatgatgcctatcttgaaactcgggacttcaagggctctgaggaaggcaacacaatggtacccaagaactgctacgtcagccagcaggagctgaagccatttccctttggtgtccgcattgactacgtgctttacaaggcagtttctgggttttacatctcctgtaagagttttgaaaccactacagg

SEQ ID NO: 15207 - DNA, 1277 bp, Homo sapiens
tggaagaattcgcggccatgttggaggctccgggcccgagtgatggctgcgagctcagcaaccccagcgccagcagagtcagctgtgccgggcagatgctggaagtgcagccaggattgtatttcggtggggccgcggccgtcgcggagccagatcacctgagggaagcgggcatcacggccgtgctaacagtggactcggaggagcccagcttcaaggcggggccctggggtcgaggatctatggcgcctcttcgtgccagcgctggacaaacccgagacggacctactcagccatctggaccggtgcgtggccttcatcggtcaggcccgcgctgagggccgtgcggtgttggtgcactggtctctttttcagtcatgcaggagtcagtcgaagtgtggccataataactgcttttctcatgaagactgaccaacttccctttgaaaaagcctatgaaaagctccagattctcaaaccagaggctaagatgaatgaggggtttgagtggcaactgaaattataccaggcaatgggatacgaagggatacctctagtgcaatttataagcaatatcgtttacaaaaggttacagagaagtatccagaattgcagaatttacctcaagaactctttgctgttgacccaactactgtttcacaaggattgaaagatgaggttctctagaagtgtagaaagtgcaggcgatcattatttcgaagttctagtattctggatcaccgtgaaggaagtggacctatagcctttgcccacaagagaatgacaccatcttccatgcttaccacagggaggcaagctcaatgtacatcttatttcattgaacctgtacagtggatggaatctgctttgttgggagtgatggatggacagcttctttgcccaaaatgcagtgccaagttgggttccttcaactggtatggtgaacagtgctcttgtggtaggtggataacacctgcttttcaaatacataagaatagagtggatgaaatgaaaatattgcctgttttgggatcacaaacaggaaaaatatgaacatgatattttatagcttgggaagaaacttgcagatgatatgtgctgcctttgcttcttatcattcatggcagattgtttgtgctttcaacatttcatttgaaatgggagaagataaaatcacttgatgtaacctggaaactatgctttacatggcaatcaaagccttttgatcatgtacattttatttgatattaaaatcttttataaccagaaaaaaaaaa

SEQ ID NO: 15208 - DNA, 637 bp, Homo sapiens
ataattggaatcactttttagacttttcaagttaccttccttgggaagtttgtgcagtgttatagtttagtttagctcctcttacagggtaatggtttgctagtttaaaactgtaaccaaacgaactggtcagacaacatatatctaaaacacttaaaatgttaggaagtttgggaatgttataacctaaacgtttttgctggtaactttttgttatttatagatatttgtgtatttaacatacatacttcaggaaatatatgcctttcctaaaacttaaccatgcattcaataccatggcctatctatagaattgaatattttggaccatgttatctgtggcacagtcagtgctgtgtttgaggtaaatgcagtaacggttagttttctactttgtcttatagaaggtagaaaccatgtgtatgttatgtttgtctataaaagaaaaaatactaatattaaataatttcttacgactctgagtcactcacttatttttccaataattgatattgtacattcctagtgccattaggtatgtatgtatgtaacttttacagtttttcagctgaaagttgtaagtatttttttttttttggatcggggctctttaatctcattttaatttccctttgtt

SEQ ID NO: 15209 - DNA, 1735 bp, Homo sapiens
tcactgccaagccagaaagatacctcagaatatattattcaagcttacaaatatggtgcatttgagaagatcccagagtttatcgcttttaggaacaggctgaataattctcttcattttgcacaagtccgtactgaacggatgctgttagaccttctacttgaagcaaatatatcaaccagtttagcagaaagtataaagtcaatgaaccttaggccagaagaagatgacattccatgggaaggatttgcgagacaacagagacttaaatgtttttttcagctgggatccaaaagacagggacgtttctgaagaacataagaaactttccttagaggaggagaccttgtggttaagaatccgatccttaacattgaggctgataagtggacttccaagtctcaaccaccctgtggagccaaagaactcggagaagactgccgagaatggggtatcctcccggattgatattcttcgtttgctccttcaacagctggaggcaaccctggagacaggaaagcgatttattgagaaggatattcagtatcctttccttggtcctgtacctaccagaatgggtggattctttaattctggctgttctcagtgccagataagctctttttatcttgtcaatgatatttatgagctggataccagtggtttagaggatacaatggagattcaggaacgaatagaaaatagttttaagtctttactagaccagttaaaagatgtcttcagtaaatgtaaaggtgacctcttagaagttaaagatggtaacttgaaaacacatcctactcttttagaaaatctagttttctttgttgagactatttctgttatcctttgggtatccagttactgtgagagtgtcctacgaccatacaaactaaatttacagaaaaaaaaaaagaagaaaaaagaaaccagcatcatcatgccacctgtctttaccagtttccaaagactatgttactgggcttcagactttaatttccaatggttgtggatcatattaaagggcttgaaacacatctaattgcacttaaacttgaagaacttattttagaagacacttctctctcaccggaagagagaaaattttcaaagactgtgcaagggaaggtgcagagcagttatctgcactcacttctggaaatgggggagctgctgaaaaaaagacttgagaccacaaagaaactaaaaatttaaggaagtatctatcatgggcactgatgactctgcaacagaatatgacaccatcttcccaggcaaaagcaacatctggttgaccatgattttaatccagaacttcctcataaaatgcatgaaggactttgatcgtgaatttttttaggtgttaaatatatacaactgattaaattattgtatataaaccagaagcgggaccctcatctgggtttgaccactttttatacatgttcatatgcatatggcagcaacaagagaaccctacttttcttcttccctccccttcctaaaccaaggtataaaagttaatcaagccccttccttggggccgagagaattttgagcattagccgtctctaggtcgccggctaataaaagactcttaatttgtctcaaagtgtggcgtttttctaactcgcttgggtacaacaaggccaaggtggaaggatcacttgaagctaggagtttgagcaacctgtgcaacctagtgagacccccatctttttaatagaaaaaaaaa

SEQ ID NO: 15210 - DNA, 633 bp, Homo sapiens
tttggccctcgaggccaagaattcggcacgaggggagcatgccatggatctaagtaagtcctgtaggtcctccttgcctccctggcttgggtctggtgaggattctgtgatagggaatgggggctccaggcaaatcccatgtcctctgggcctggcgtggaggaagtaggatcaggaggtgcaggtgggtgacatgaaaagtaactgggcttaagctgcactggaatcagggcaaagtctgcaggataaatggaaattctctggtcctgggcattgagacagtgttttcaaggttgggtccacatttgactgtgtgtggttgggttaatgggcctttgatgctcgctgcagtggtatttgggtcactcgtgttgctgcctgcctctctagactggagagcccccgccccctttagcagctggctcgtgcttcctgctggctctcctgggccccaagctctcaaggctgtcacgaatcctaaaagagtccttcaaaccagtgtcactgtgacttaacatctatttcaaaagatgatctatggcacatttggaggacaatgcagaggggggtgtcacaaactcaagcacatttggataaggttattgacctggctttttcttagtttgctatgtg

SEQ ID NO: 15211 - DNA, 786 bp, Homo sapiens
  misc_feature (1)...(786): n = a,t,c or g
ttttaaaatgagaaacaagcatttgtgtttattaaccaaggagagggaagtcaaagcaatgcagactcctaaccagtccctcctatagtctgcccacctaggccagctgccaaggactaggaagagcagtggataggcccctccccactgccccgaccccagggtgagttctgctgggtaaggaagaggaagtcagcaaaggacagaggccaaggaaagaaggaggaaacagagccgctggggagacaggattgaggagatcccttggcccctcactcacagtggggagggcaaagcaccgcaaatgcagccccacaagaggaactaagcaggagtacactcatgtcaaaaaccttgtattgggggaggggaggagggggttctcaggtgtccaaagccaagaacaaaacccttggagagtcagtccttgcccaagaatgctggtccagcctctaagcctttgcctccataccaagttcacaacagggtggagcctctgacacggccgtctagagaatggatgcaagagaggtccagggaccacttgcctctgtaagatccgtcctgtggcgaattccaggcccagtggcgcctagccttcagctgccttggtctcccgagcctgccttagcccatacaaccacttgatcacgcgggcattgcgctccaccaccgacacgccatagggaacgcgctcccgggcccgctcctcaacagtcaccgagctgcggcgggagcagcccccttcagagctgcnccgccagcactgggcctgcccagggacac

SEQ ID NO: 15212 - DNA, 308 bp, Homo sapiens
taagtctctttaataaaaaacaaaacaaaatccaaaaaaactcctaacatggcaactcaggacattttaatccttttttttgttgttgggcttctgataggatccattttattgattccataaatatttagtagactttagacatattaatacattgtagtttgagttaatttgcattaaattctgtttttttccccttaggtatagattgtctgttggaaaaatatattgcttgtggatttcttggggagtgggaaggtgaattatacctgttgtctctacagtccactaccttccacaccctaggg

SEQ ID NO: 15213 - DNA, 563 bp, Homo sapiens
ggtgtgtggggggggttcccagatattcagggcaagggaccagtcggaagggattctggctattgggggagcccagagacaggggaaggcagcctgtccatctgtgcataaggagaggaaagttccagggtgtgtatgtttcaggggcttcacatggaggagctgcagatagatatgtgtttctgtgtatgtgtatgtctgcctttttttctaagtgggggcttctacaggcttttgggaagtagggtggatgtgggtagggctgggaggagggggccacagcttaggtttggagctctggatgtacatacataagtaggagcagtgggacgtgtttctgtcataatgcaggcatgaagggtggagtgaagtcaggtcataagtttcatgtttgcttttgttttgttttgtttttaatgtatgtagcagatgttacagtcttagggatccgggatgggagaccccactttagaaagggtcgtcactcctttaatcctctactcaacaatgtactcttttacttttatattaaaaaaaataaaataaatatgtgcctaaaaaaa

SEQ ID NO: 15214 - DNA, 685 bp, Homo sapiens
gaagaaataatcccccaatatttttactacgtgtgtgattttcctgttttatattgaaaaaacttttttgacactcccaagaccattcagggaaattttataaaaaatgcagatactgtcttgagcagatcgaaatgccgatgaagtggatgcaatttccttttgtgcaagcagtgcacgggtgcccccccctcgggtgtccgtgctgtgccttagcttccccaggtgccgggactcacacctgctaggggctgggcaaggccccggctctgctttctctgaagggcttgtccaagttcattgccctgttacaggtggtcaagacgtccggccgccttgacccagggctacccttagccaatatcctctgcccctggggtggctggtggctgggcctcagggtgggcaacgttaggggtttggcgaaacccggccccatgggattgagggacggggctgcactccaaccgtctgcacctgctcttcccccacccctgtgggacctcatcttcacgtgccatgtgtgctgaaggcccagggcccagccagggggcagtggcacctgttgacggaaaaggccgaggtgcttaccagtggaccttctggcccgcccctcccctgtcacttgtcgggcatccagggccccgacctgtgcctagccgccagggtgacagaaggcagaact

SEQ ID NO: 15215 - DNA, 978 bp, Homo sapiens
ccttttgcactatctcatcactattgtggaaaataagtaccccagtgttctcaatctaaatgaagaattgcgagatattcctcaagctgcgaaagtaaacatgactgagctggacaaagaaataagtaccttgagaagtggcttgaaagcagtagagacagagctggaatatcagaagtctcagcccccacagcccggagataagtttgtgtctgttgtcagccagttcatcacagtagccagcttcagcttctctgatgttgaagaccttctagcagaagctaaagacctgtttactaaagcagtgaagcactttggggaagaggctggcaaaatacaaccagatgagttctttggcatttttgatcaatttcttcaagctgtgtcagaagccaaacaagaaaacgaaaatatgagaaagaaaaaggaggaagaagaacgtcgagctcgcatggaagctcagctcaaagaacaacgtgaaagggaacgtaaaatgagaaaagctaaagagaatagtgaagaaagcggagagtttgatgaccttgtttcagctttacgctcaggagaagtgtttgacaaagacctttctaaattgaaacggaatcgcaaacgtattaccaaccagatgactgacagcagcagagagagaccaatcacaaaacttaatttctaattttccatgaatacttttttttagaaagctcattagcagccctctaaagtgactagaacgtttcattacactgccttgcaatccaaacagtggcaattttttccttcatctgtgagtgaatgtgtgaacgtgtgtatgtaaatgtatgtgtgtatatattaaaaaatgtatatagatgtctgagtgttgtctggagacctatacgtatggttaaaaagatttatgttaatgtatgtgctccaaaacctttcgtgtatgcattcacattgagtgtggctcattttctttccccgaacgccatgact

SEQ ID NO: 15216 - DNA, 613 bp, Homo sapiens
tttagaaaagaatatgacattttattttcacttatggacatacagtacatgaatttagaaataaaatcgtcgcaggattctgaaatactgataccttaagatctaacacactgatattagtccattccctacaaagcagccacattagcagttcagatttggtctttgttgtagctgttgacattaagttctttaagtgaaatgcccagcagcatttaaataatattttacagcagacatgaactaagtttcaatattccatctttggaacaaattatgcttatttacatgttaacaggtggctatatttacttaccctattgtgagtttaatgactgattttaaactacagagggttttccagctattatttcctttagtttctaaaagtaacgacttatattaatgttttataaaagatagtgatgaaaaaaaggtaatgctgaaataaaggcgcttttagaaatatttaaggacaacataaggtattaatattggaaaaaaactgtacatattttcaagcacaacactgaaatattgcagcagtgtttaactgaattatttaaaatagtggtaattatactaccttacataccgttctaatatttaaatc

SEQ ID NO: 15217 - DNA, 344 bp, Homo sapiens
attttctcagttttgctctaccgaagtctcatcctttgaatagtaacaccaacgtccctaacccttcgggaaaggataagcagatgtactatgaggagatttcaaagaggtcacatgtttgccctaaaatccttgaaatttgaggtgctgattaactttatttaacagggagttcagatttttgggggcaaaacttctgggattcaactaaaggatattaattgtttccctaaataaaaggataagaaaggaatttaagtcgttttttatcaattttacccatttatcgattcagtcactttgaaataaaaaagtaaattaaaatgctgcatttcaaaagctat

SEQ ID NO: 15218 - DNA, 413 bp, Homo sapiens
ataacgtagggacacctagggacaactgcattgggattcaggttgaaatagtgactgattttggtagctgcctaagcaagtgcgttgctcataacaccttttcccacttggggctggtctgttacaagcatatttagttaactagttccatcttacctgcgtttgatctgggagccatttagagggcaagcataaacttgggagtccatctctttcacattgtgttgaattggcataaaaatgaacaagtttttagaggtttagtttgtcgtgtagttatgagaggtttcacaggaaggtcggttatgtcacagtgttaaccttgagtccagtttagtaccttggcttttagaaaagtacaaactggtttgttcaaagggctcttcagtctagttagtccagagttgggcagg

SEQ ID NO: 15219 - DNA, 1621 bp, Homo sapiens
  misc_feature (1)...(1621): n = a,t,c or g
tttttttttggtttttacttctgtaaaccaatttcattaaaaattagctttggtgtaaattcaggagaaatcgccttattaattaatcaaaattatgttcacatcaacttaattttacaagtttattatagctcatacctgggaccgattaaggtgtcaacattttaaaattactcaagatattaaccagaaaagatgattatggcctttaaaactattggacaaactgatgctatttaacattgttcacagccatttaatttgaataacaaattttagattctaagtaggccataacttctttgcaaaacaattgatttataaaggtacagtttcagaaggtaacagcatgagactagtcttcctataggcacattttagtagactgctcttctcatccctggtcaaggagcttctctaactgatggttgatatttcgcagatggctttcggctcccagaagtgttcttgctttaaataacagagctggaaggctggatgaatcatacgtttcctttacgtttggttcttgagcttgaacatctgaataatcttgataaagctgttttaaattagataagaaatatgctgcattcctaagggaagactttctctctttaagttcatcatattttgtttgtagttgtttcagctgtggctctaaccttagcattcttccttttcagatttgtcaacatctggctttctttaagcattttgatgaattgttctttaacattaacataaaatgtggcgatggctgccttacaaactttagattctattctttgttgatgctctaggtgggttttctcaaattcaggcaaaacaatattcaactccttgatgtcactggttttcattccttctggacaccaaatgtgcacaatgtcagaagtatctgagcctatggctttacttcttgatttcttccttttgtcatgagatatcttcccttttttctgagttttcgattgactttctattgccaagttctctttttcaacagagggctgggcactaaggggtcctgtctttttagaagtgacagactcagctggtttctctgaaagttctgaagacgctgtggttcgaataacctcatgacgttgtgtacttattttctctgctgatttaacttttctccttgtatcactttcttcaatgctttcagagtcatcactaatgggcctgagctttcttcctggcttttttgcactaatttttacagattcgatttcacttgcttcatttccagaagtgtctgaacttctttttgcttcttttcctggaggagttgaagagagagacagtccacaatgtttggagaattcttcttcatcagcatatatagctgtgctatgtaaaggaggatcaaaggtctcataagtttcttcatctttctcattttcacccagcctgccaatgcttgagacatcagaattatcaggaaagtcgaacacgtcaataggcttgcacttttgaccagctttatctttcatggaatgtgttctttctaaagtgttctttgaacgtcttgcgccctcagacctgtgaggcnccggccgccgccgcccccgcggggccatggtgccgctctccgctctcgagcgactggaag

SEQ ID NO: 15220 - DNA, 1440 bp, Homo sapiens
ttttttttttttactgttttatccaaatttattctcagggaaaaagaaagtagtggctctacgcaactttttcattcaccaaccacctttccatgcatcagaacctatgctgtgattgttagctgaacttcaatagtttccacctacttaagagagatgcctcaaacaaattaactttattttcagacaacaggtccaagaagacttcacagctcaatcatgacgaacatgtggctgtttcctcacagccagggaaccctcgggtattagaagaaaactccaaccccccacaccatcatctagcctcttttctcactgtgaagaactgatgagacagaattcctgagaaggggaacatttaggtaatctgggatagaagggcatggaaggactggacaaaactaagcctccccctgaaggaagggaaaagaatattacaaaacagactaacagaaaacaagacccatcagtatcttcaggataaacaagaggccactctagatgctctgattaaaggttgtccatgcctacagaggcggaggataaatctaagaaacagaaatgtataaccagcccaatgcttccatactctgcattaggtcagtgtgaacatggctttgctcccaatggtcagacctgacatgggtccttctgaagatggtgggtcaggtatatcccagccaccctcaccagagaatacatctatgacaaacccaaattcctaatcctgaagtactttgagccactctacattgtggccactcaataatagaataaatttgtgaaaaagctgcatgttttaatttaggaaatgagtagaagttcacaagcaacccagaataggtgccagcagtttgctccagtgggccacaccacagcagcagctcaggctctgcagaatcactgtgtccagtgcttcctgagatgttctttcagctgaggaatggaaggcagcagctgctggcactcatgacaacgaaggggcagcttcaagagctcaggcatcccatctcggacagttactctaccagcctcttgtaccatctcgatcacagcttgtgattctaggaagtattctgtattgaaagaattccaatgttttttgtttttaaggcaaggagaatcaaaatcctggctgatcacatgaagatgtacatggctcatactcggaatggcgtggtagcccaatcggaagcggagtttgctggacccagcaaaatctacaatcaccttttcccccacagtgtgcatatgcttaaggagttcaaggtgttccctgccacagccttcagactggaaatggaggtccacggtaagaccagccaatggtaacgggcctttgggtatttatcctttatcaccaccacctgctcatctttgtaaacctgcattttggggtcctgcatagaaatcttcaagccttgactccagtggcccagg

SEQ ID NO: 15221 - DNA, 840 bp, Homo sapiens
ttactcataaaacttgtgtttattgaatttcagcctctgtggcttcttcaataaaatgttggctcccatgccttcaactcttctttgggcatgagaccagtgggttggaggatggggagtgtgggggttgggatgacatgcattgccctgcagggtgcctcggaggtagcagggccagccatgagaacaaaaagctctgttctttttgtcccttgggcctggcattggcagtcctagcaccacacagtggacagcatgcccaccagccccattggtaccagaagtctcatatgctagtcctttctttagcaccatctctagaagaagcagaagcaccttattcagtaactcatttgagcatggcaacagatcctatggtagggcctcccaagaggcttcattatccatttgggagatgaacagactgaggcccagagaagggaaagccacatgcccaaggttcacacagcaagttaatggtgaaggttttatcagagcccagggcagactcagtggcttcctatccagggctcttcccacagctcgtcaccactgccccaacccaaggggcacctttatttacagaatcctccccaaccgtgagaggggtgcccagcagcccactgcattctgggaagtcaactgttcctagaagccaaataatcaaggatggatgagcagagggagcgggtactggcagcaactccggccctaggcagagggttcgatactcccagcctgagttgcagggcctgcccttctgctctcccagcccctgctgcagagcttctgtggagggcctgcctccactcccacttagttctggacctgcttcatggc

SEQ ID NO: 15222 - DNA, 1956 bp, Homo sapiens
gtttatcttactacatggttatttttgtagactcttggatcttttatcctaagacacccacttcttgatttcatgcagcgccacatgaactatatattatacataaagaagaccaaaaaagggaatgcaggttataaccattggccctttaattgaagagtctaaaaactagaggtctgtaacagaatactaatcctgcagaacaagggacagaaaagtcaggcgaggcaagcttgtcttcgtaacctgggctctcaattggggtgctctcttacatttcaattgaatatctgtttttaaacctcccttcaacagtcagggtgtctgtctattttgtggcttccaaaattctaactgcaaaataaatgaccatcttatcatgttttcccatggctatcaggaggatatagcaattttatagattactacatggtcaagaatctacgcatcggatgtattcttttcttcttctttacttgatgcattcaaaagcaaccactggatttttttcaatgtaaaaaagaaaaatagatacccatgccaaaattcatgggtgtaaacagccaacagagccaaacttacaaagaaaatgaaagacttgtttctggacagtggttttattggtaaagatataagacatattggctctattaaaaactcaggtaataaagcactaagcttgatttttgtattgctacagtctctttcttctaaggggaagaaaatctccccaagaataggatgctacctgaggaattatgccgaataaagaaaaggaatggatggtcggcagtgaaattttcttcgggcatcaacatgcagaaagttgcgatgcctgctgtggcagctgccgcctctgttccctcttcattcacttccacaaatgacttgtggacaatttttgatataaaaatatctctggctcctgacatgccagacagatcagccttgctactgttaaagagatcctgcacacctaggcgggcgaggtcggagttgagagtgtaactctcttccagtttgaacctgggcaagctgacattaacttcaatgaaatcgagattctcaggtttagtccactcatgcaacttttccaaagtcaactgttcctcaatcttcttcaggcccgtggactcgtcctcaatgtcatccggcagcaggatgaccatgctgagctcctcgccttggtaaggcagttccagcacacggcacttaaggtcctcgatgtagccatatgcaaattttttcttctgatacatcattttcacagtttttctgtctttcttattcaatctgaatggtgcattcgtcgtggcttctttcatgaatttatccttccagtttcccttgaaatagatggcatttactagcacaagtttggtcatgttatcaaccatgcccgaagccaacagttccggaatttttccttctgtctgtcctttgacccactggtttatggtcttccttgcatcttcagaggcatgctgaaaatccacactggccaggtcagcaccatatgttttctgagtcgaaaccaagaactcaggaaggaaattgtaagttttctctccatataatctattagcaagtttcagaatataagacgctccacgtttgttgatatcagcattcagactctggaatcttgaatgaacctcttcaaccgtgttgaaatggaaagtcttggacagctgtgctgccgtgttacctctggtccccagaaaaaccatggccatagcagatgaaatgctgaagggagagatgaagatgtttccagccggattgttctcactcaacgccaggaacaggtccaaggcgaagcgggtgtttgctgagctcagctgctccatggtgaaaaccgacaggccgccgaggcacgctccgggctccgagctgggtgcgaggtcaggactgagcaccgaaggcgctgctcttatagcaggcgcctgtgccgaa

SEQ ID NO: 15223 - DNA, 672 bp, Homo sapiens
ttttttttttcaaggcaggtgcatttgtttctttatttaaaaaaatcatctgggggcatggtctgaggaggacacccctcccatggctttggggaggacgcaggttccaggagtcacagggcagaaacacgcggggtgggtgggggcgtggccggagtggggaggggctgtgcccccagcacctgggggtggctcccacggcaccaggtgggctagggcaacagtatgtacaggcgagcagtgctcctggacccggtcggggccggctggggccccattctgcggcaggggagctctggggcacagggtctgagtcccatcttgggctgcagggaccgcgagggccgtccagggaggctggacagcgggggcctttatctgggcccatcaggtggatgagaacggacactgcaaaccgctcaccacctgggccagggctaggcctatccggcaggggccgtccccacactgaatcctgcgtgcgcagaactcaagccggcatccaggcagtgggaacgccccgcaggctgggcttgggtggcctcgggcacgtgacaggtggggcccgtgtcctgataaacggacaggaacaaaaggaacgcaaggtctgggacccacggctctgggagcagcgccacccaggctggctcctggcagagaaatgggaatcgc

SEQ ID NO: 15224 - DNA, 418 bp, Homo sapiens
  misc_feature (1)...(418): n = a,t,c or g
gcagcggctgccaacagatcatgagccatcagctcctctggggccagctataggacaacagaactctcaccaaaggaccagacacagtgagcaccatgggacagtgtcggtcagccaacgcagaggatgctcaggaattcagtgatgtggagagggccattgagaccctcatcaagaactttcaccagtactccgtggagggtgggaaggagacgctgaccccttctgagctacgggacctggtcacccagcagctgccccatctcatgccgagcaactgtggcctggaagagaaaattgccaacctgggcagctgcaatgactctaaactggagttcaggagtttctgggagctgattggagaagcggccaagagtgtgaagctgganaggcctgtccgggggcacttgagaactcc

SEQ ID NO: 15225 - DNA, 725 bp, Homo sapiens
ggcacgaggctgcttcctagaaggtcgtgtcacgtggaacctcttaatctcagcatccggagctccaggaagggaaaatttcaagtcagatagaattctatatataccatttctttggaaccttcagccctcaagattccaacatcatgacctcagtttcaacacagttgtccttagtcctcatgtcactgcttttggtgctgcctgttgtggaagcagtagaagccggtgatgcaatcgcccttttgttaggtgtggttctcagcattacagggcatttgtgcctggcttggggggtatatgcacgaaaaagaaatggacagatgtgactttgaaaggcctactgagtcaaacctcaccctgaaaacctttgcgctttagaggctaaacctgagatttggtgtgtgaaaggttccaagaatcagtaaataagggagtttcacatttttcattgtttccatgaaatggcaacaaacatacatttataaattgaaaaaaaaatgttttctttacaacaaataatgcacagaaaaatgcagcctataatttgctagttaggtagtcaaagaagtaagatggctgaaatttacataagtaatatttcataatcttagaattctctcaaagcatgtgaaataggaagaaggaagttcttgcccagaatcttaggaaatcaccactgttcggttataatcactgcctcctgaatcgttgaggagtctttt

SEQ ID NO: 15226 - DNA, 608 bp, Homo sapiens
gcggcacgagggaggtttgaattttctcggagaaagacaggccggccacgaggaaaacagaaacaagccgcagcaacatctaagcccttgaaaggatcctgagagaggggggaaagggaaaacagcagccaccagcccaaccacttgtgtcttctgccccttcccacctatcttgcccaccccaccagcccacgctgcttgggacttgaaatctgtggccgaaggaccggtcactacataacttcaaaaataatcaaccaccctcccttcccaaaccacccaaattcactcatccagcgtttacttttttgaatccactcagaacttttttctgcgacccccctccctaaatggagttgggtgggggggaaatgaatactgagttggcctttattttttaaaagactttttgatccaatgaggccccctaaataattgagttttgggtcctggttggttgttttattttttttcctccaaaattttaccccctcccccctgagcccgaggtgctgacgtcgcaaaaaaattggataaaaccaccatcatgggttcgggtcccatagaccccaaagaacttctcaagggcctggacagcttccttaacg

SEQ ID NO: 15227 - DNA, 457 bp, Homo sapiens
  misc_feature (1)...(457): n = a,t,c or g
tgnnttntnnntntgataccctttnnnnnnnnnnnnnnnnnnnnnnnnnnnnnnnnnnnnnnnnnnnnnnnnnnnnnnnnnnnnnnnagcacgagccctgaagtcggtgtctgctgcgttcacggcaggattcggttaggaggaacagcacagcatgctgggctctggatttaaagctgagcgcttaagagtgaatttgagattagtcataaatcgccttaaactattggagaaaaagatgaacgagctcggatccgtgtggagcacattatccgggaagactacctcgtggaggccatggagatcctggagctgtactgtgacctgctgctggctcggtttggccttatccagtctatgaaggaactagattctggtctggctgaatctgtgtctacattgatctgggctgctcctcgactccagtcagaagtggctgagttgaaaatagttgctg

SEQ ID NO: 15228 - DNA, 841 bp, Homo sapiens
ttttttttagccattcacctttatttcagagtgttccttggttacagggaggggtgtgcaagaccctgggctctgggggaggggctgagctgcccagtcagagccggcctcagccccctcagccatccagggattcgaaagggtgcttggtctcaaactaggtgctgactctgagggctttcacggtcccttgaacttctgatcctccttttcctcaaaatcagtgctaggactcataagttatggagtccaagattaacaatgctaaatcctcaagctgactgaagaatgccgagtttgactgtgaaatagaaatgttaaaatacagaaacaacccttctattgtgactacctgttaaggtcctgcaattaatacaacgaaagtaccatttttgttgaaaagtaggtggttagggggcttccaaaagccctggggtagctgtgcccacaaaggaaaacgagtgtagacacgaaggggaagaaggctgtgctcaacttgttagaatatagggctgtttctcccgagattgaggtagcactacaacgcagaggaccaggcaggccagagtggccccacctgcccttgccccctctaggctaagtgaaacagctagagagagggcggcaagcgcagggacttgacctccagctctgtctagtcaaaacactttaagatgcgctctccaatcccaataaaatagaccccttgagcaatcccaaagagaggtgctatgaccagtgcccggcagccagcgcctttcatgaaggcagatggtccctcctgaatccagagtttcctggcacagtcggtgatcccactgtacatgtcctcgcccaggcc

SEQ ID NO: 15229 - DNA, 865 bp, Homo sapiens
ggcagcctccgccccctcaaccttcgcggggcgcgggccgcagcttttcggttcacagcgggcagggaaagccgcgggaagggtactccaggcgagaggcggacgcgagtcgtcgtggcaggaaaagtgactagctccccttcgttgtcagccagggacgagaacacagccacgctcccacccggctgccaacgatccctcggcggcgatgtcggccgccggtgcccgaggcctgcgggccacctaccaccggctcctcgataaagtggagctgatgctgcccgagaaattgaggccgttgtacaaccatccagcaggccccagaacagttttcttctgggctccaattatgaaatgggggttggtgtgtgctggattggctgatatggccagacctgcagaaaaacttagcacagctcaatctgctgttttgatggctacagggtttatttggtcaagatactcacttgtaattattccaaaaaattggagtctgtttgctgttaatttctttgtgggggcagcaggagcctctcagctttttcgtatttggagatataaccaagaactaaaagctaaagcacacaaataaaagagttcctgatcacctgaacaatctagatgtggacaaaaccattgggacctagtttattatttggttattgataaagcaaagctaactgtgtgtttagaaggcactgtaactggtagctagttcttgattcaatagaaaaatgcagcaaacttttaataacagtctctctacatgacttaaggaacttatctatggatattagtaacatttttctaccatttgtccgtaataaaccatacttgctcgtatataaaaaaaaaaaaaaaaaaa

SEQ ID NO: 15230 - DNA, 1146 bp, Homo sapiens
aaaggtttaatacagtcaatgaaacaagatggcccacacaaaggggaacccaatgtcagctgctatattactaccatcatcattagccttgaggtcaaatagtcctagaatcaaatctcagatccacctgtcactagccatatgacaccaggaaagtttttacaccatgctaagcttctgtcttttcatcagcaaaatggaaataatgcctacctgacagggttattgtgtggattaaatgagatacaggtaaagtattgagcacagggcctggcacatagaaagtgcacctcaacagtacctacctttttccatagatatgaaaaaagaggtaacacataaaacactaggacatggttactgactaattgtgggagagaaagaaaaaaagctaagtgcaaagaatcaagtctggtatgttagtttttaccaactgagatgcatccaagatgggattagacatacaagataatttatcagggaagacacctgtgagggaatgtggggcaggcatgaaggtagtatgggagaacccacagaccgctatgcagagctgattcctgtgaaaaagaaagagaaagaagttttaggtaccaatgcagttctaagagtttttgcaaggctgatgaggaatcctccaaccagtcacccattggagttaaagagagcctcggagaactagacttgctttcacacccttgctgggagcctgtgggaaagaagctttctctgtaaaggaggtagtgaatttgaaatgcgctgacctggggccttctgtcaatcaggtccctgccatggaaaccagacagagtctcattaatggctgccacaatagagacactgaggaaaaagaacaggttgataccttcatgaaattcaagacaaagaagaaaaaaactcaatgttattggactaataatcaaaaggataatgttttcataattttttattggaaaatgtgctgattcttggaatgttttattctccgagatttatgaactttttttcttcagcaattggtaaagtatacttttgtaaacaaaaattgaaacatttgcttttgctctctatctgagtgccccagaattgggaaactattcatgagtattcataggtttatggtaataaagttatttgcacaagttc

SEQ ID NO: 15231 - DNA, 1379 bp, Homo sapiens
tttttttttttttttttcaatatttattaaaatctttattcattttcttttttcagaattgaaacccatagaacacattagaaatttagatccatatctgtcttgtttggtatcttaccaagtacaatctctgtctgtgcaacagctctgagaggaaatccttggcagatcaaaagagagggtagtggctcccacactttccatttaagcaaataaatgagcttctgagtagttgttcccagtttcacccaacattttgtgtttatgagaaacaccttagttcctaaaaacctgtggtagtccagtacctagcccctaccttgtcaccacccagacttgaggaattgaagggaaaaaaactggccttcccctgtaggatgagtttcccaaggccagatgtgcctggctcactagtatgtctggcctgtgctggcacactagagttgctcagtagttattcgctgatgaatggtctttatgttaattagggtccactctcagagactgagaacctttcactaaggttctttctgaatccttcagaaagtcagtgttcccctttgtcaaaataaatatgtttttcttgctagaatacatatacgactatatacattacatatacttttactcatgtttcctgaagctcaaactcacaggatgaggcatataagatagcttactgatgatgctgttttaccatcattgaggtgtggtcatttactggtcaaagaatacacgggtgatcgagaagaaaggctgaagaaatatggcggatgggaagggaagggaaggcaaaagcattttttttttttagaaaaaaaagatcgatttctttggaagataatgctggcttcagatgacattgaaaaattgccacgtataggactcatctttcccaaaataatatgcaattaatgtacctgaattcttccatttccttcttaaatttcatttgacatattaaccctgagtgcaaacagggggcaatgccttattaatacattcttgaataatactctgagcaaatcagatcctatgaatttgttttacacagaaaattatttacatttcccccaaacccacaatgcagccttacactaaagaacagttttataacaaaacctttatactcaaatttatccattcgaactttagaataaacatgttttaacaagttggaggagggcaggaaatggccatgagttctgattttcctagttttgtagtattaaaatgtctccacgtctacctttggatgtttggtaggcatacctaacttacagctgatccaaaccctgcaacgacttgattgtaacagccttagattctaataaataaagtaggacagtgttacaaaacttaaaaaaaaattcacctcc

SEQ ID NO: 15232 - DNA, 663 bp, Homo sapiens
  misc_feature (1)...(663): n = a,t,c or g
atttgtggcagagctttggaaagatgtggaccgtatcgtgggtctggatcaagtcactggtatgactgagacagcttttggctccgcatataaaaccaagaagggcatgtttcgtaccgttgggcaactctacaaagaatctctcaccaagctgatggcaactctccgaaacaccaaccctaactttgttcgttgtatcattccaaatcacgagaagagggctggaaaattggatccacacctagtcctagatcagcttcgctgtaatggtgtccctggaagggatccgaatctgtcgccagggcttccctaaccgaatagttttccaggaattcagacagagatatgagatcctaactccaaatgctattcctaaaggttttatggatggtaaacaggcctgtgaacgaatgatccgggctttagaattggacccaaacttgtacagaattggacagagcaagatatttttcagagctggagttctggcacacttagaggaagaaagagatttaaaaatcaccgatatcattatcttcttccaggccgtttgcagaggttacctggccaaaaaggctttgncaanaancagcaacaactaantgccctaaaagncttncaannggaatgtgtcccgtancnnnaaattngggnangggattg

SEQ ID NO: 15233 - DNA, 402 bp, Homo sapiens
gttcctggttgagtgggtaactagatgcattgaatagaatgagtgaacacacggccatacgctgggctgaagaacttggagtaagaacatgtaagaacttctgagtgatgctctcaaattataaaagctggattttaagaaaaattgaaagactttgtcataattcacttgagagaattaagtatttaccaagagagatgagtgtacagaaaatgatccaaatttaactctgaggaattgaacagtgtctcatgctaaggaatttcttgtgtggctagtatttttatactcatttatttttttggctacgctcttaatcgtgggttttcttacaaggtgggattttggggaaaaaaatccacagtttttttagttaatgccattcggtgttaaatataactt

SEQ ID NO: 15234 - DNA, 821 bp, Homo sapiens
ctggagccgagtgccttctgtgcatttggatgtttccatttccttccctgagaagattttcttaggctacctagtgagagaacattgaaaatatttttaaaggacatctaagcattgttttggtcatgcatatgctttataattgtgtgttgtttcatagcatatacctctggtacaggtgggcaagtttttctttgaagaaatgggttattgactcatatgtcataaccttgagtgttactctcccggtgtccggaggtcacattcatgttgcggggttggtatgaaattaaatcttggtgatgtgaccctacattctcttctggtccctagaatcggcttctggtctcctgataactgaagtggagacagaagttgagcctgttgcccaggcaaactaaagctgcttttgttcttcggaatctgctttgcctccgtcagcctgcttccttccccacacatgctggccgcactgtccccactccagacctctgctgtgtgtcctggggcagggccgcgttttggcagtaccctttcaactcatcctaagcttcgtgtagattactttagtatatattttttataaaacataaagcctttcctctcgatggaaatcaaagcttaccatgtgagcactcgaacttctaagttgtgacaggaataacaaaactgcaaggagtggaaaagatggaaaagcctgtgggaaatccgaggccttttgaaagaagggagctgatgacttcacgaccagctcctggagcccctcctttctgctgaagccgcggcatttccctccgtggccacacgagggcacccttggc

SEQ ID NO: 15235 - DNA, 4710 bp, Homo sapiens
tccggaaacagtgggggtaggaaaactcggcctcaagttgcgccctctaggtagcacttgaaaacatgacaagggcccgtagttgtttggataagagaactccagcatagagccttatagcaactgacttcccagttaagtcccagtgtaagggttggtctttggttggcagaactgaacatggtggtttgcacttgggttctggtggcgcaggcgcaggagcagccagctgtggcagcgcattagttttggcgcaagcgagcctatgctgcagggtcacttttggctggtcagagaaggaataatgatatcaccttcttccccccctccccccaatcttttttttttccctttacaaattttcccctttccctttacctcctttccctcccatcttctttcattaacccctcctaaggcatgttatttgaaagcaattgagacgcaaccgaactttgcagtagcttggagtaatcttggctgtgttttcaatgcacaaggggaaatttggcttgcaattcatcactttgaaaaggctgtcacccttgacccaaactttctggatgcttatatcaatttaggaaatgtcttgaaagaggcacgcatttttgacagagctgtggcagcttatcttcgtgccctaagtttgagtccaaatcacgcagtggtgcacggcaacctggcttgtgtatactatgagcaaggcctgatagatctggcaatagacacctacaggcgggctatcgaactacaaccacatttccctgatgcttactgcaacctagccaatgctctcaaagagaagggcagtgttgctgaagcagaagattgttataatacagctctccgtctgtgtcccacccatgcagactctctgaataacctagccaatatcaaacgagaacagggaaacattgaagaggcagttcgcttgtatcgtaaagcattagaagtcttcccagagtttgctgctgcccattcaaatttagcaagtgtactgcagcagcagggaaaactgcaggaagctctgatgcattataaggaggctattcgaatcagtcctacctttgctgatgcctactctaatatgggaaacactctaaaggagatgcaggatgttcagggagccttgcagtgttatacgcgtgccatccaaattaatcctgcatttgcagatgcacatagcaatctggcttccattcataaggattcagggaatattccagaagccatagcttcttaccgcacggctctgaaacttaagcctgattttcctgatgcttattgtaacttggctcattgcctgcagattgtctgtgattggacagactatgatgagcgaatgaagaagttggtcagtattgtggctgaccagttagagaagaataggttgccttctgtgcatcctcatcatagtatgctatatcctctttctcatggcttcaggaaggctattgctgagaggcacggcaacctgtgcttagataagattaatgttcttcataaaccaccatatgaacatccaaaagacttgaagctcagtgatggtcggctgcgtgtaggatatgtgagttccgactttgggaatcatcctacttctcaccttatgcagtctattccaggcatgcacaatcctgataaatttgaggtgttctgttatgccctgagcccagacgatggcacaaacttccgagtgaaggtgatggcagaagccaatcatttcattgatctttctcagattccatgcaatggaaaagcagctgatcgcatccatcaggatggaattcatatccttgtaaatatgaatggctatactaagggcgctcgaaatgagctttttgctctcaggccagctcctattcaggcaatgtggctgggataccctgggacgagtggtgcgcttttcatggattatattatcactgatcaggaaacttcgccagctgaagttgctgagcagtattccgagaaattggcttatatgccccacactttttttattggtgatcatgctaatatgttccctcacctgaagaaaaaagcagtcatcgattttaagtccaatgggcacatttatgacaatcggatagttctgaatggcatcgacctcaaagcatttcttgatagtctaccagatgtgaaaattgtcaagatgaagtgtcctgatggaggagacaatgcagatagcagtaacacagctcttaatatgcctgttattcctatgaatactattgcagaagcagttattgaaatgattaaccgaggacagattcaaataacaattaatggattcagtattagcaatggactggcaactactcagatcaacaataaggctgcaactggagaggaggttccccgtaccattattgtaaccacccgttctcagtacgggttaccagaagatgccatcgtatactgtaactttaatcagttgtataaaattgacccttctactttgcagatgtgggcaaacattctgaagcgtgttcccaatagtgtactctggctgttgcgttttccagcagtaggagaacctaatattcaacagtatgcacaaaacatgggcctgccccagaaccgtatcattttttcacctgttgctcctaaagaggaacacgtcaggagaggccagctggctgatgtctgcttggacactccactctgtaatgggcacaccacagggatggatgtcctctgggcagggacccccatggtgactatgccaggagagactccttgcttctcgagttgcagcatcccagctcacttgcttaggttgtcttgagcttattgctaaaaacagacaagaatatgaagacatagctgtgaagctgggaactgatctagaatacctgaagaaagttcgtggcaaagtctggaagcaaagaatatctagccctctgttcaacaccaaacaatacacaatggaactagagcggctctatctacagatgtgggagcattatgcagctggcaacaaaccgtgaccacatgattaagcctgttgaagtcactgagtcagcataaataaagactgcacaggagaattacccctatacctgagcctcaaccttctgggggaaagggaactagataacatacttcttacttgtctgtacagtaccttgttgcagatgggtgatatataatggtaatagaatagcacagccagacttgcttcctgcatggtagggagagacacaaaagatgggaaactgcttttccacaaggaatctccgtagaattttgcggcgaccagatggtgcataggtctggaaggtctgatctcccttgggtcttccatgggatggttagtgtggaggggagatatagattgtccggccgctttgtgattccatggattgattcagtcttctggatttttttttctttatattttgggtactggagcttttaaaaatgtttggtttcaggtatttttattcatgtgaagtgtatatgattctcttgagataaggttttaagctaaaatgttactccctgttttagtttctgaactctgacagattgacagggactttgctggtgtagtctttttataggttttataaaccacttgagcctatatcagtcgttttagtgtctgacctaatatttggagctatcagtgctttgttgatttagatgatgactcaagattttttctggtccatttcccatttccttttcttccctgacccccataccctcacccttaaaattctcctgtaactcaactaacaaaatcaagcctgattcaaaacatcctagggtgttttaaacacaccatctggtgccaaatgaagatttttaggagtgattactaattatcaagggcacagttgtggtactgtcattgataataatatagtttttttttttttcctaattttgacctgtttcaccagtgttttacccttgactgccccttctatgctgcttccaaaagtgatagtgtgtgtaagatttttaccttcctttctaaagttttttttttttttttttaagtgagtcctgttcttcctatttctttcagcagaaatgaaatcccaggtaagtataagtattcaagtatttgatcagtaagtcacagttatctccagtgcattaaataaccttcatcaagaaataggttataggtaaaatctctgaaggatcatctatgtattcaagtaattattttttagataataactgtcttctggacttggtcttgaagtctgtacagattcagcctcagtagtagcgaactgcactgctgtttggtttggagtacaaattagacttatagtcctcctggaacttgagttattaaaatcataggaataaaattatgggatctcaacaaagggtcgagggtttgaggcttaaacaagcccaacatatgaatatatgttttgtctcgctatactgcacttacgctatccagttgcaggtaattttttgtctgctagtagtgttctagattatgtctttccaaagcgctgaggctgtgcacctattctgtagttgcagctgatgcctgaatgtatcctagctgacaaattattgattaataagaacttgaatttctggaagattcttactgttaaccaaattttgagcaaggagtctcaaaggtaattctgaaccagaattacatgttaatgaacagtgtaccttttaacagtgtaaatcacggaatatccgtgaagggatttcttaatt

SEQ ID NO: 15236 - DNA, 824 bp, Homo sapiens
  misc_feature (1)...(824): n = a,t,c or g
tttttttttcagatccaattccccaccacacccctttacctttgctcattttctttgaagttctctgaagaccacgtgctcctgaattatggttttgtcatcatcacttgaaggttgctgatttagggtgaagagtggaagagcagagcaaaggtgtgggagaagagaaagggaagaggagcaaggagcaagatggagacttgtttcatcacttttctgtcgtatttccggccaaagtattaaccacactttgctttcccggctcactgggcagtcactcagtatacagacccccaggggtccccagagaaatgtcattctcctcaaaatgtaatagccttcagcccagacaaaagcctgagtcagacaaatgataggctggtgagagagacttcgctggctctcagagcagactggagcaaggaggaggcagaaatgttacctggcaggcaagctctgagtttttcccctttctctaggagtgggtcaggtcacaggcctagtcaatgtgttaggttgcacaaagtagactttcaaaggccactattggcatcacaaatgccctgacatgctgtttgtcattctgcattgatgcacagccaactgcccctgtctatttcgatcagtaaatctgagaggacaccctttacagcatatgcaggagtcctctccaactttctttgaggttgaaaatagaagttgaccaacacagagtccccctactcaagggactcaaggtcaagaggaagaggtcaagacgagaaacagagaattacagccacataaaaagttatggtgaaggtttgaactgcgtgcangaaaac

SEQ ID NO: 15237 - DNA, 1168 bp, Homo sapiens
  misc_feature (1)...(1168): n = a,t,c or g
atgacaagtctggtgttggtgaaatccctcaagcttttgtttgtctgggaaagtctttttttctccttcatatttgatggatatttttgctggatatactattctagggtaaaaggttttttcccttcagcactttaaatatgtcatgccactctctcctggcctgtaaggtttccactgaaaagtctgctgccagatgtattggagctccttcatatgttatttgtttgttttctcttttgagatgcttttaggatcctttctttatatttggcttttgggagtttgattattaaatgccttgaggtaatctttgagttaaatctgtttggtgttctataaccttcttgtacttttatattgatatctttctctaggtttgggaagttctctgttattatccctttgaataaactttctaccccagtctctttctctacctcctctttaaggccaataactcttagatttgcccttttgagggtattttctagatcttgtaggtgcacttaatacttttttctgcttttctcctttgtttcctctgactgtgtattttcaaatagcctgtcttcaagctcactaattctttcttctgtttggtcagttctgctgttaagagactctaatgcattcttcagtatgccaattgcatttttcagctccagaatttctgcttgattctacttaatcgtttcaatctctttgttaaatttatctgaaaagattctgaattccttctctgtgttattttgaatttctttgactttcctcaaaaccgagttccttttgaattctctgtctgaaaggtcacatatctctgtttctccaggattggtccctggtgccttatttagttcatttggtgaggtcatgttttcctggatggtgttgatgcttgtggatgttcatcagtgtctgggcattgaagagttaggtatttattgtagtcttcacagtctgggcttgtttgtacctgtccttcttgggaaggcttttcaggtattcaaaaggacttgggtgttgtgatctaagctgtatcncctttagggggcacccaangcccagtaatgctgtgggttcttacagactcatagaggtacccgccctgatggtcttgancaagatctgggangaattctctgggattgtcaagcagagactcttg

SEQ ID NO: 15238 - DNA, 334 bp, Homo sapiens
ggcggagagtgtgcggctccaggtgggctcacgcggtcgtgatgtctcgggagtcggatgttgaggctcagcagtctcatggcagcagtgcctgttcacagccccatggcagcgttacccagtcccaaggctcctcctcacagtcccagggcatatccagctcctctaccagcacgatgccaaactccagccagtcctctcactccagctctgggacactgagctccttagagacagtgtccactcaggaactctattctattcctgaggaccaagaacctgaggaccaagaacctgaggagcctacccctgccccctgggctcgattatgggc

SEQ ID NO: 15239 - DNA, 1237 bp, Homo sapiens
aatcatgtctttgtagaatgtgtgtgtgtgaagtcctcagctgtaaggtgctattcagtcctgtgacccttattttggaatgctcttcattactgttgctctgttttgtgacttcctcgggaaaccgcctactttggtgtggtgtcaccttgagctgtgcacataggacaccagttttgacttaacctaacaggcagtttttatctctagctttttcaagccagggtattgagcagtttcttgggccaatggcctgagaaaccacctgtccctgtcaaggggtgattttattggttttaagtggggaagtaatcccatgtacttatttcttaaatacctaggaagttcttcttggtggctcctcttggccctcccctctttctcccccaacccaccatcctgcaaggcaaggaatggcctctccctccacagaggcaacggctgcagagggagcactgtggctgccatcccagttcctcttcaaagccaaacagacacgcgtgactcaaatcctacagtatggagggtggcgttgcattgaaattccaggcctgagtttgatagtggattttaatgtagttgttaaaggtatgaattcatgttttataactgtagaggcaagcaagtttttattttttaaaaagttttgagagaataatttataagtttctgtgcagcaaagtggctaattactcattaaatacaggaaaagaatgtagtatctaaatccagctttttcttacctctggtacacttcagattacttcacctaattacatattgagggcttttaacccttagttttatcaatttttctagttttattttatttttataaaataattgaaaaagaaccaaaaatgaattccagaagttccatagatggatttttgccccttcttaattttctcccacaaatgaaaacattttagaagacattttgaatcaaaatgtattatgaccattgaaagttctctattttctaagaagctgagcagctccaagggcctcgtttcaggtggtactctatgtattgtctgtgggcttgtttctacctgtacagtggaaccatgtgaccatgtcttgtgcttgcaatatagaaaccatgcagtgctgttttgtgaattggcagtttctgtataaactcttatttatatacattggcctctctgtatgattttccatttgctacatgaattgtaaaattaattataaaattatagtacctgctaaatac

SEQ ID NO: 15240 - DNA, 314 bp, Homo sapiens
  misc_feature (1)...(314): n = a,t,c or g
gtggccgtgcatgtgttcagaaaggctgctgatgacacctgggagccatttgcctntgggaaaaccagtgagtctggagagctgcatgggctcacaactgaggaggaatttgtagaagggatatacaaagtggaaatagacaccaaatcttactggaaggcacttggcatctccccattccatgagcatggaatgggatttcatgtaaccaagagtattccatttttactaaagcagtgttttcacctcatatgctatgttagaagtccaggcagagacantaaaccnttctgtgaangcaaaaaaaaaaaaaa

SEQ ID NO: 15241 - DNA, 974 bp, Homo sapiens
cgtcgactttttttttttttttcacgttaaaaaaagttttatttagggagctccagggaatgcggtgggaaaggagaggtgcagtgtcattgccgccctctcctcccacctagtgcattaatagtggatgggagcatctgacagaagtgagatcaggcagtgggtgtctgcaccccacagcgcatgttggctggaacagcaaagtctatctgctgaggtttaggcaagttcaggttgcccatgattttgacaaactcctcacagctgagggtgagccgagggttcagagtcctctcctcctccacggtggacactgtgaacccatggtaatcgtgagcagggtagatcagacagtctcctggaagtgtgaagatcttttcatggaccgagtggtacaaggtcttggcacagccttgctggaagtctgtccgcccacacccacggatcaacagggcatctccagtgaaggccatgctgtggtcattcaggacgaaggtgacacagcctggggtgtggccagggctggccctggtctccaacgcgaagcgcccgaagcggatggagtctccatcctcaatgtgtaagtcagcctgggccccactaaggcgggagatgacagactggcagccagggaggagggaacggagcagccccgagcctgtaatgtggtccgcgtggcagtgggtattcacagcatagagcagccgcagccccagctccttgatcagctgggcatcccgaggcgctgtttcccaggactgggtcgatcagaacggcctcccgggactctctgtcacccagcaggtacgtgaaggtgcagctcacaggctcgaacatctgccgcaggaggatgggggctccagacccgccgcgctggctcagctgccgccgggcgaccctcagtacagcctccgccatcgcgcccactgcggggtcaggaatgagcggaggccgagcgtctgcaggagccgggc

SEQ ID NO: 15242 - DNA, 653 bp, Homo sapiens
tcgaaatccagctgctattgacatgtttattataggtgctacttttactgactggtttacctcttatgtcaaaaatgttgtatcaggtggcttccccatcatcagagaccaaattttcagatatgttcacgatccagaatgtgtagcaacaactggggatattactgtgtcagtttccacatcgtttctgccagaacttagctctgtacatccaccccactatttcttcacataccgaatcaggattgaaatgtcaaaagatgcacttcctgagaaggcctgtcagttggacagtcgctactggaggataacaaacgctaaaggggatgtggaagaagtccagggacctggagtagtcggtgaatttccaattattagcccaggtcggatatatgaatacacaagctgtaccacattttctacaacatcaggctacatggaagggtattacaccttccattttctgtactttaaggacaaggtctttaatgttgccatcccccgattccacatggcatgtccaacattcagggtgtctatagctcgattggtaagttaattttttctcctagtgctggatatatgactttgttctaagaccaaccatctttgtttcggtagataagtagtttataatgatgtccctcctccaa

SEQ ID NO: 15243 - DNA, 738 bp, Homo sapiens
ttttttttttttttttgacgggctaaggtttatttacttacttaacatttaaaaataattcatttgcttcaacaacatggcagacaatcaagagtactattgaaacataattcagagagggtcaggacaggaaagatcacaacctcattcctgaggtggaatgaaagatctaagccaggcctccatcctaggccaggctcctccattaagcagagacaaccaaaagataagaaagccttggcctcatccccatcaggagatagcctgaactgctcacaaataagaaacaacttgaccagactgaggactggttcctgatgagtcaataggaaagtcagttggttctctcttcagtaggtgacttagcacccttctggagaacatagagtagtagtctggacctggaggctaaggcccacatccaacaaaggttaccttcttttcagtaacgctttgttccttttttcaacagcaagaaacctgaaatccagagaagtcatttaaaaaaaccccttctggctgcaacctgaaagcatctcccaagccagactgggggtagagatgatgactccaacttcagtgggcctcttcttcgataggggagcagccagagaagaagctggtgttgctggccagagcccgtttctttttcttccctggagccttgttttcttggtattctgttgctacatgtttcaactctgggaggtcaaaaggggagggagctcctctgccgaa

SEQ ID NO: 15244 - DNA, 1505 bp, Homo sapiens
  misc_feature (1)...(1505): n = a,t,c or g
tttgttttaactttttattaaaatgcttaggatacagattgactttctttcgtaaatgactgttttacttttcctgaagtaggacatatatgcactctgataaaacagaatgagaagtcataattcatgggaattcctatacaaggtgctgatcctgtgtttggagctgagctcctcacagcagcttctttcagctatcttataggaatagtgttccgtggggcaagaaatacattggttctaactgattttcaatcccctttctccagtggaataaaccactttcacaaagagctgccctatgtataacccacagatttctagcttgcaacaaagtgacaagggacaaataggggaaaaaaaaaattaagaaaactaacactgaagtaatcatacttctcatgtctccgaacagagaagtatgggggacctttaaccaaaggaaattaaaaatatgcaagttatattacctagttcattcactgttagctagatttgttcacttaaggctttaacccctttccaaaccaacaactttgtcttaatccagctatgtttgctaataaacgaaatgcatgcacttcccacatatatacttcactgagcctctgcattcagtacctggcagtgaaaaagtatgctttccccacaagtcagtactggagaataaaaatgagaactccaactaaagaacaatgcctcctttcaccccgggtaatgttatccacattttccctaccctcacattagaataaagacatcctcccaacttttcatctcctatctccaatctgttcataggagatatatcttttgatcttttattataagggtagaatatagattaagatcatcaaaatccaatttcacatgtggcactaggaaaatggaatgctataaaattaatccccatcacccaagtagggatgctggtgcttttatactgagtctttactgccaataagtgatgctgcctccaaaggaacagctctacagaaagtttttgggttagtgtttccctagcttatttctgcaatggagaaagacaatttcatatcaaaaaaaaaaaaanaaaacctggaaaagctacagatgttaacctttactttaaacaccaataaaataggtgtcaaaggagaaaaaatgtaaaaaaaagagctcccaaacagcctgagagaccaaattctgcaaatggaaattttaaagcccactgaatacatttttcatggatccaaacaaatgctacaatacttttaagtcctcaactcacagaattaagagcccttaagctgttaactttgtcctgtcttcctattcagaaaaatgtccccctagaatctgtgcaaaagtaactgatgcacctgcagtatgtgacacgagagatgttctcaactcttttatgaggtcaaagtcacttttgataactgaaaacgaaaaaggaaggtgctatagcncttnaattnaatttcacaaaagtataaangcaaagactggctanaatctgt

SEQ ID NO: 15245 - DNA, 456 bp, Homo sapiens
gaccacatagtggcatccagggttcccaccccagaccagcaaaatataaatatagttagccaaggaatttgcattttaagtacttcatatgaacaagaaaatagaagaatattaccacaagtaggcacacgtgaaaccacatgttagtattttgtctgttctatactgctgaaaatagaggaacctacttagtgctctgatgtcctattgtattggccccattttgattagttttgaaactgtgtcttcagctgaagcataaatttttgggctccttgagaagaaatgctaaatattcaaaaaatgttaagggtaaaatttaatttaaaacatgtagtcatttagttacaaaaaaaaatatgtgtatatgcttttaatcagcacctaaaacaactcaaagtctgtattagagatctaagaacctacccaaaaaatactcactcaaaagtcttctgt

SEQ ID NO: 15246 - DNA, 4927 bp, Homo sapiens
aggactacatcgagaagcactgcccgagcgccgtggtgccggtggagctgcagaagctggcccggggcagcctggtgggcggcgggcggcagcggcccccgcagaccccgctgcgcctgctggtggacgccgacaactgcctgcaccgcctctacggcggcttctacaccgactgggtcagcggcggccagtggaaccacatgcttggctacctggcggcgctggccaaggcctgcttcggcggcaacatcgagctcttcgtcttcttcaacggcgcgctcgagaaggcccggctgcacgagtgggtcaagcggcagggcaacgagcgccagacggcacagcagatcgtcagccatgtccagaacaagggcaccccgccgccaaaggtctggttcctgccgcccgtctgcatggcccactgcatccgcctggcgctcatccgcttccacgtcaaggttgcacagagcattgaggatcaccatcaggaagtgattggtttctgcagagagaatggtttccatggcttggttgcgtatgactctgattatgcactgtgcaacatcccctactatttcagtgcccatgccctaaaactgagccggaacgggaaaagtctcaccacaagccaatatctgatgcatgaagttgccaagcaactggacctgaatccaaatcgttttcctatttttgctgctctcttaggaaatcacattctgcctgatgaagatctggcttcctttcattggagtttacttggtccagaacatccactagcctcactaaaggtccgggcccaccagctggtcttgccaccttgcgacgtagtgatcaaagccgttgctgactatgtacgcaacattcaggacacctctgacttggatgccatagctaaagatgttttccagcattcacagtctagaacagatgacaaagttattcgatttaagagagcaattggatattattcagcgactagtaagcctatgtcatttcatccaccacattacttagcagccagacccggtccgtttggaatgcctgggatggtgccgccgcatgttcctcctcagatgctcaacattccgcagacctctctgcaagcaaagccggtggccccacaggtgcccagcccagggggcgccccgggccagggtccatacccgtacagcctctctgagccagcacctctcactttggacacgagcgggaagaatctgacggagcagaacagctacagcaacattcctcacgaagggaagcacacgccgctgtatgagcggtcctcgcccatcaacccggcccagagcggcagccccaaccacgtggattccgcctacttccctggctcttctacatcgtcatcttccgacaacgacgagggtagcggaggggcgacaaaccatatcagcgggaacaagattggctgggagaagacgggaagccactcagagcctcaggcacgaggagacccaggagaccaaacaaaggcagaaggctcgtccactgcctcttcaggaagccaactagccgaaggcaagggaagccagatgggcactgtccagccaatcccgtgcctcctgtcgatgcccaccaggaaccacatggacatcaccacacctcccctgccccccgtcgcacctgaggtgctgagagtggccgagcacaggcacaagaaggggctgatgtacccctacatcttccatgtcctgacgaagggtgaaatcaaaattgctgtttctattgaagatgaagccaacaaggacctgcctccggccgctctgctctataggccagttcgtcagtatgtttacggagtcctgtttagtttggcagaaagcagaaagaaaactgagagacttgcttttagaaagaacagacttccaccagaattttcaccagtgatcattaaagaatgggcagcttacaaaggaaagtctcctcaaaccccggaactggttgaagctcttgccttcagggagtggacctgccccaacctgaagaggctgtggttgggtaaggcggtagaggacaagaaccgcaggatgagggccttcctggcctgcatgaggtcggacaccccagccatgctcaaccctgccaacgtgcccactcacctcatggtgctctgctgcgtcttacggtacatggtgcagtggccgggagcacgcatccttcggcgtcaggagctagatgccttcctggctcaggcgctgtcccccaaactctacgagcctgatcagctccaggagctcaagattgagaacctagatccccgaggaattcagctatcagctctcttcatgagtggagtagacatggccttgtttgcaaatgatgcatgcggacagccaatcccctgggaacactgttgtccttggatgtattttgatgggaagctcttccaatccaaactcctcaaagccagccgggaaaagaccccactcattgacctctgtgatggtcaggctgatcaggctgccaaggtagagaagatgcgccagagcgtcctcgaggggctcagcttctccagggcagagccacacgctccctttcccgccgccacctggccctgcccttctaccctggcctctgcgtacccccgggcactttgggcctgtcccaccctctcaggggcaggggcagaggctttgcaggcgtctgtggctttgggaggcccctatggggaaacggtagcaacaggccctttaccgtgccttccgtgtggcggcagcatcgggacactgcggagccttctcaggcagtgacagcagcaggactagcaagtcccagggcggagtccaacctataccttctcagggaggcaaactagaaatagctggcactgtggttggcccattgggctgggagcaggcggggccgtgggggccgggggcctttccccctgcaggtggtttctgtcggaggaccagctagagggcgtccaagaggagttatttccaccccagtgattagaacatttggaagaggtggaaggtactatggcagaggttacaaaaaccaggcagcaattcagggcagacctccttatgctgcttcagcagaagaagtggccaaagaacttaagtcaaaatctggggaatcgaagtcctctgctatgtcttcagacgggtccctggctgaaaacggagtgatggccgaggagaagccggctccccagatgaacgggagcacgggtgacgccagggcccccagccactctgaaagtgccttgaataatgactcttaaaacgtggcattacaaatccctcattttaaatgcactaagtacagacaagcgcttgcccgcaggagaagctgctgctggaggcagctgtcttaaataaagaagagtaaacttattttttatagagggtgaaggatgctgggaagggtaaggatttaggaatatcttggagagaaagagagcctgcagttatgtacattttgtcctttccgtaagagaaaaatgaggactttggaaattcagatccctctttgatatcagagatttaaacaacacatttttagttttaaccagttgtagtcaaaatgctacaataaaacaaaaaagagaaagaaaatgaagagcatttgactcccgcacttaaaatgaagtacacataaagtttaaactggttatgacaaaagcctatagttgtgtttcttgaactataaagaaaacaaattttggcagtctttaagtatatatagcttaaaatataatttttagcatttggcaccatatgtatgccattatatttgattttgcattactgtttcacaatgaagctttctttaaggctttgatttttatgattatgaaagaaataaggcacaaccacagtttttctttcttaaatttcatcactgttgatgtggttcttttgtgttaaaaaaaaaaagtgcaactatcaaaactaaaaaattatagagtaatattgccgttctgctgattttaaatatacaatacatcatacatactttacaagcaagttaaatggagataaagttgaaatcatagaagatgcaaatgacctttcaaaatcaacacaatgtgttctgaaactttcgtgactaataccatgcatctgtgatcaatgaactatgtggttttgaatcggatgtagaccattagtactactacttgagctaaacttctgcatggttcataatttttaaagtgtgtagttaatatgcatgttatcgtcctttcttccattcttaacagtatgtgcccatttgcaaaacaaaaatgctaataatcagtaatagtcctataaaagatgttaactctgtttagtcattgactgatcttgctctaaccttaaaattttgtgattattgacctctgttgcatttattctaaagccccccaaaaattatctagccgtttcgaatatcaacattaccctggtgtattcactgctgtatgcattattgttctttgttgctgttttatgccttcatattagcaaatatgaaattctgtgaaaaaaaaccctttgatcttaaaaaaaaaaaaaaccaccccccccttctgtagcaggaaacaaattgcttgttcttgagaactttcccatcaagaatttagtagaagcaggtatacttctatcattttgatgtttttgttaatgtttccaaacaatgtactttgaaatcagaatcacttcttatcgttttccatatacttctgatgctcttcatcacattagtgatcagaaatgaggtgtaattccccaacccctgcccgcaagagctaagtaggatcttactgtaagttgaagggagttttgccctaactcatggattgtgcaagaatgaactgctgttgggtttgattgactgtcgatggattgtggtgtggtgtatctgaaggctattgaatgcaacttacaatgcttaataaaaatctttattcttttagtat

SEQ ID NO: 15247 - DNA, 621 bp, Homo sapiens
gagcaatggcagatgagtctggggaccagcgaagaccaccagcacttcacctgcaccatctggaggccccaggggaagtcctatctgtacttcacacagttcaaggcagaggtgcggggcgctgagattgagtacgccatggcctactctaaagccgcatttgaaagggaaagtgatgtccctctgaaaactgaggaatttgaagtgaccaaaacagcagtggctcacaggcccggggcattcaaagctgagctgtccaagctggtgattgtggccaaggcatcgcgcactgagctgtgaccagcagccctgttgcgggtggcaccttctcatctccggtgaagctgaaagggccctcctggctcccaacagcttctcagttcccacttcctgctgagctcttctggactcaggatcgcagatccggggcacaaagagggtggggaacatgggggctatgctggggaaagcagccatgctccccccgacctccagccgagcatccttcatgagcctgcagaactgctttcctatgtttacccaggggacctcctttcagatgaactgggaagagatgaaatgttttttcatatttaaataaataagaacattaaaaagcaa

SEQ ID NO: 15248 - DNA, 1044 bp, Homo sapiens
ggatttccgtctgtgtgtgaagctcaccagagaaatttttgcacaggaagccctggctccgttccgagggaaagagctccagccaggaagccacattcagtcagataaagagatagatgcctttgtgcgggcaaaagccgacagcgcctaccacccctcgtgcacctgtaagatgggccagccctccgatcccactgccgtggtggatccgcagacaagggtcctcggggtggaaaacctcagggtcgtcgatgcctccatcatgcctagcatggtcagcggcaacctgaacgcccccacaatcatgatcgcagagaaggcagctgacattatcaaggggcagcctgcactctgggacaaagatgtccctgtctacaagcccaggacgctggccacccagcgctaagacagttgctgctggaggatgaccagggaagccccctgataagccaagagggccagcacagcccttgctcccaggctcctgcctgaaactatctagcacactaggacccaggtggtaccctactcagtggctgagaattggataaagtcttgggaaatgagacaagtactgggcagtgaatccagctccttttccccagcctttccctgtgggccatttggggaaggccagcattcagcctgagatgtttccttccctgcctcctggagggacagaaggggaggatggttaactcctgccgcatcctttttcttgtgttcaccgtggcattctctacccagggcagtggttccttcccaggccatgcacagaggctgggtgcctgccagacccacggagggttcgcgaaggaaggggcatcctccttcttgagctgcaagctttagctgaggcagtaagtcacacagtagttagttcagcctgggctggcacataagtccccagtgtccctgttgagaggggaaagttgcctgctggttgaaaaactggcttttcctttctcgctgcctaatttcactctcagagtgaggcaggtaactggggctccactgggtcactctgagagggttgtggctctg

SEQ ID NO: 15249 - DNA, 1262 bp, Homo sapiens
tttttccattttttcctttcattttctttttcttaaaaaaacaaaatgaaaccaaaaaaaagcctgaatcaaaacctttttaggagtagttacagatattatagggatgggggcggggggcactaaaacaaaagagaaaagcaccagtgagatgtctttcccattttcttctctccgccacggaacacgcacaccaacagagcccaggccactttttgccctcttcccttgggaaaaaggaggaacagaagatttaagaattttgaaaggatttttttcttgtgtgaatgtgtgtaaaagtcaatgctataaatctaaaacgaggtctgtttttttaaaaaagttctaaaacaacaggaggaaaacacatggaaagaaaccccctcgcggaggacctgcttccttacagatggaggctcttttggaggagagtgtgaagggcagagggctccctggcgccggcagtacctgcccggccaccctccactcccctgccatcacccctcctctctccttttaaaaagcaaaaccccactcttgggactcgggtcgtcctccgatccctgctggaaagtgcggcggctacttggcgtcgagcttggccatctcctgcacgtagatgccgatgctctcgctgtcgaagagcaggaagtacacgttcttcagcgaggacgcgctcgagtcatcaaagtgggctgagatggctttgagggtcacctgggccgcagtctgtttgggaaagcagtttctgccgctggggaaaggcgggaacgcgacggactttagcttcttgtcctccgccgctgacaggcagtttttgatggtctcttcaagctgttcttcacatttgtcggagccccactgagggatgtgacagtggatgacaaatttggctgcgagtccactggattggctgacggcggcttcggcgacttccaaagggccttgggatttgcgaagctcctttaccgtttccaagaactcttttcccccagccttttccaaggctttacctatatcttctttgaggtcaatttcggctgtggttgggtggacaatgccctccactctcatggagccaatatggctgatgtcactctgggttaaggacagcttctgtcccagaacaaggctcttagaagacagaatggtgaatccatcccctggcccatcttcagaggtggaatttgaagttccttctttatcgctgtcctttggtttggactttttggacgtccgtggtttggcagccttggatttct

SEQ ID NO: 15250 - DNA, 749 bp, Homo sapiens
ccccaggaccagagcatatttaaattctttgataagatttttgtgaatcttcatgcagaaatcctccactgtggtcctggagtaaggaagcaccactggggatgtgtaatctggtaactggcctttgggtttggtgtaaattctcactagtttcagatagtcccagatcttttccaataggtcatcaaaattccagcggtgatgggcagagatgggtacacagtgaggcaccttatagatgatatccaattcctcaatggagatttggtcaatcttatttaacacatagatacaggggatataaactctgtttccttccaccacatcaatgaggtcatcagctgtagcatcactacgtagagtcacatcggcattatgaatcttgtattcagccagaatgctcttcacagtttcagcatccagctcactctgggggcaagtggctgtgagattaatgcctcccttgtccttcttcttaaagccaatgttggggggtttgctgttcaagcgaatgccaaagccttccagctcattttcaattatcttcttatgtcccaaaggtttcaggacatccagaacaatcaagatcaagttacaggttcgggccactgcaatgacttgacgacctctacctttcccatccttggcacctttcaatgatacctgggagatccaggagctggatcttggcacctttgtatctgatgacaccaggcacagtggtcagagtagtgaattcataggctgcc

SEQ ID NO: 15251 - DNA, 839 bp, Homo sapiens
gaacacccatttatatttatttctgtatatagaactaaaaaaaacagtagtgttaaaaatctttgttgtggtttgagcatctttgctgcttttggattgagatggcgaatcaaggcttcacttcctctctcttctgtctttagaaagctgtgatcgtgcgtgcaattatttgaaaggcaacatagtcaattaagaaacctgtagttgttaaggaagaaattgttggcaagatatccatactgcccatatctcgttggtgcaataattaaatagcaaaggaaatctgtattggcaactattataattcaataattcttttgtttactgcccttttctgttcaagaattttctggaaattactccctttcacatggttgaactcttaagttgaccagttctcatagctctatcactagaatggtttgcagataccccaaacatactatggataaaatcaaattgtgctaacttttggacccatgtaatttacctaaaagttgttaattgctgacagagtactgccttgaattttggtttaaaacctctctagtttcaatgacaagtaacaactcaaataattccatattgtttgaggaagaggccataatccttctgaattgttggcactaagtaatgggatttggcccagtaagtatgacggtcgtgtcgcctaaccaacgcagagcagtgctttttgtgtggctgaagcgatgtgctgacgaaaaaaggaaaattctaggacaatcgttggctaaaaatcaccttaggatgaaaaatttgaggcaaatttttttaaatgacagaaaaagataatcatctcacttgcttgaaacaggagc

SEQ ID NO: 15252 - DNA, 752 bp, Homo sapiens
tttttttttttttttttgatagccaaaagcaatttattatagtttagcctcaaaaaaataaaaataaaaaaattatccagtggttatgaggagtctaggaaaacctgtcccagtaatgccaacttggaggtgaagggctgactggggcagctgagaagtgggaccttctgtttggcaggcttcctctcccttgcctggtcatggttttctggtgagaagagtgttcctggccttgctggaggttcccatggccccgaactaacagtgtttttctgaaatttcgacctgctccgtttgagagagtagaattccctcatcaagtcctccacctcccactgctcttccttcagcctctggcagcagtgcagggcggcagggtcgatggggtgagcttctgtgttgaagatgtaccccccagcccccaggatgcactccccatagggggtgatcaccgcgtcgaaggtggacccattgttgtggatgaagttggttgggtcaaacaggaggtagaggtatttcacagtctcggccaggaagaacgactccatgcggttgtccagcttgtggtctcgcagatctttgattgttgcaaatccgcactccaccttgctgattttttcaatggattccacagcatctcttccgagttctaggagggtgggatcccccgtggcacggtagaggtacattgcgctttcaataagttctggccgaagtgggtagccctctcgcttctccactgtgtatccctg

SEQ ID NO: 15253 - DNA, 1016 bp, Homo sapiens
tgacagcgtgtacctgactttatacaatatttgttttacttccctacctattctgatatatagtcttttggaacagcatgtagaccctcatgtgttacaaaataagcccaccctttatcgagacattagtaaaaaccgcctcttaagtattaaaacatttctttattggaccatcctgggcttcagtcatgcctttattttcttttttggatcctatttactaatagggaaagatacatctctgcttggaaatggccagatgtttggaaactggacatttggcactttggtcttcacagtcatggttattacagtcacagtaaagatggctctggaaactcatttttggacttggatcaaccatctcgttacctggggatctattatattttattttgtattttccttgttttatggagggattctctggccatttttgggctcccagaatatgtattttgtgtttattcagctcctgtcaagtggttctgcttggtttgccataatcctcatggttgttacatgtctatttcttgatatcataaagaaggtctttgaccgacacctccaccctacaagtactgaaaaggcacagcttactgaaacaaatgcaggtatcaagtgcttggactccatgtgctgtttcccggaaggagaagcagcgtgtgcatctgttggaagaatgctggaacgagttataggaagatgtagtccaacccacatcagcagatcatggagtgcatcggatcctttctataccaacgacaggagcatcttgactctctccacaatggactcatctacttgttaaaggggcagtagtactttgtgggagccagttcacctcctttcctaaaattcagtgtgatcaccctgttaatggccacactagctctgaaattaatttccaaaatctttgtagtagttcatacccactcagagttataatggcaaacaaacagaaagcattagtacaagcccctcccaacacccttaatttgaatctgaacatgtta

SEQ ID NO: 15254 - DNA, 1024 bp, Homo sapiens
tttacttggcctaaaaatattttgatgtttactcaaaaagtacctcttcaggtcttgagaacatggaaaagaattgagtgcttttaaatactttttagaaagtaatcataaaagtaaattgaatttcaaacctatttggcttctgttttgtgaacctttgaactatatgtatgtgtataagggtatacacatacatatatggcatataacaagtgtacacatatacacataacaagtgtagaagtatatattacatacatacactcactctgtctggtataggctaattttgaaggactccccataagtttcctgctgcttctccccataactgctgccaccaccatcagaattcataatcaaacctaacctttttgtttggggcaccaaatctgaagacaaaattaatttgcaccagtaaacttcaagctgctttctttcttgaaaactaaacgtttaacgtataatgtctgtttggatactgttccaaattgttgattgcatgtggttaatgttgcattagagcactttgcaattgcataattcattaatgttttgtgagcttgcatttgtgagttattggatgatcagactgaattttgtcaagtatcacattgtacatcttgcctagatgtcgatgactgcaagtaataatacagtttataatgaaactatctacaattcttgttttagcacatctgttatccgtaaaacacctgtaactagcttttttaatttattatttgaattttaggatagcgaatcactaatttttagttgctgaggttggcattttagtgattattaagcacttctgtcagtctttgaaaaaagaacgtattttttgtgctttgaagatctctgaagaatttcttttataatagaatgggcatgtattgtaacagttttatgtcaaatgatctgtgctgtagaaaaacattaacccttgttcaaaaaagaaatggataaacttggcctttctaagtggtaaagaatgacctgtcactataatatactggtatgt

SEQ ID NO: 15255 - DNA, 1107 bp, Homo sapiens
gtgatggatctcatcccaaacttggccgtggaaacctggcttctcctggctgtcagcctgatactcctctatctatatggaacccgtacacatggactttttaagaagcttggaattccagggcccacacctctgccttttttgggaaatgctttgtccttccgtaagggctattggacgtttgacatggaatgttataaaaagtatagaaaagtctggggtatttatgactgtcaacagcctatgctggctatcacagatcccgacatgatcaaaacagtgctagtgaaagaatgttattctgtcttcacaaaccggaggcctttcgggccagtgggatttatgaaaaatgccatctctatagctgaggatgaagaatggaagagaatacgatcattgctgtctccaacattcaccagcggaaaactcaaggagatggtccctatcattgcccagtatggagatgtgttggtgagaaatctgaggcgggaagcagagacaggcaagcctgtcaccttgaaacacgtctttggggcctacagcatggatgtgatcactagcacatcatttggagtgagcatcgactctctcaacaatccacaagacccctttgtggaaaacaccaagaagcttttaagatttaatccattagatccattcgttctctcaataaaagtctttccattccttaccccaattcttgaagcattaaatatcactgtgtttccaagaaaagttataagttttctaacaaaatctgtaaaacagataaaagaaggtcgcctcaaagagacacaaaagcaccgagtgggatttccttcagctgatgattgactctcagaattcaaaagactctgagaccccacaaagctctgtctgatctggagctcatggcccaatcaattatctttatttttgctggctatgaaaccacgagcagtgttctctccttcattatatatgaactggccactcaccctgatgtccagcagaaagtgcagaaggaaattgatacagttttacccaataaggcaccacccacctatgatactgtgctacagttggagtatcttgacatggtggtgaatgaaacactcagattattcc

SEQ ID NO: 15256 - DNA, 1144 bp, Homo sapiens
actgcgctctggggccgggcagcccctgggtcaggcggccgaggagagcaactgctgcgcccgtctgtgctgtggcgcccgccggccgctgcgtgtccgcctggccgaccccggggaccgtgaggtgctgcgtttgctccgcccgctgcactgtggctgcagctgctgcccctgtggcctccaggagtgaccctgtctgcttcccactcccagatggaagtacaggctccaccaggcaccaccattggccacgtgctacagacctggcatcccttcctccccaagttctccatccaggatgccgatcgccagacagtcttgcgagtggtggggccctgctggacctgtggctgtggcacagacaccaactttgaggtgaagactcgggatgaatcccgcagtgtgggccgcatcagcaagcagtgggggggcctggtccgagaagccctcacagatgcagatgactttggcctacagttcccgctggacctggatgtgagggtgaaggctgtgctgctgggagccacattcctcattgactacatgttctttgagaagcgaggaggcgctgggccctctgccatcaccagttagaggccaccatggtgtgaggagaccatcacctcgaccagaactccagatggtcacctgccctggcccctcctctggggcagcccctttcctccatgtacactgcaggggacagaaggggggccccatccctaccctactccctggccgcctgcccctgtggttcccaaggaggggtatgtatgagagccgctctcctgctacctcccaccactgtcccagcagtccctcggcacacaggcatatcagctttcacactttccccatgcactctctcccacccccttccaggggcctctgctccaaaggagggcctctggaacccaggactctggggttttacaagagggctggggtgtggaagggcaagctgcaccaaagacggtggatatagccaccgcccccccgccgctgcctagcatctgcttggccaattaagttcagcctcagaccatggcactttgagggggtctctacctccccattcaacagctgcagggggaccccagtgccaacttcctctccactagggccctgctttcagctgggtggt

SEQ ID NO: 15257 - DNA, 1294 bp, Homo sapiens
gaaaccgttgggcagagtacatgaaaggaggcccgagtcagggtccagaggagactttgggccagaaggggagcgcacgttggcaccccctgatgccagcatcctcatcagcaatgtgtgcagcatcggggaccatgtggcccaggagctttttcagggctcagatttgggcatggcagaagaggcagagaggcctggggagaaagccggccagcacagccccctgcgagaggagcatgtgacctgcgtacagagcatcttggacgaattccttcaaacgtatggcagcctcatacccctcagcactgatgaggtagtagagaagctggaggacattttccagcaggagttttccaccccttccaggaagggcctggtgttgcagctgatccagtcttaccagcggatgccaggcaatgccatggtgaggggcttccgagtggcttataagcggcacgtgctgaccatggatgacttggggaccttgtatggacagaactggctcaatgaccaggtgatgaacatgtatggagacctggtcatggacacagtccctgaaaaggtgcatttcttcaatagtttcttctatgataaactccgtaccaagggttatgatggggtgaaaaggtggaccaaaaacgtggacatcttcaataaggagctactgctaatccccatccacctggaggtgcattggtccctcatctctgttgatgtgaggcgacgcaccatcacctattttgactcgcagcgtaccctaaaccgccgctgccctaagcatattgccaagtatctacaggcagaggcggtaaagaaagaccgactggatttccaccagggctggaaaggttacttcaaaatgaatgtggccaggcagaataatgacagtgactgtggtgcttttgtgttgcagtactgcaagcatctggccctgtctcagccattcagcttcacccagcaggacatgcccaaacttcgtcggcagatctacaaggagctgtgtcactgcaaactcactgtgtgagcctcgtaccccagaccccaagcccataaatgggaagggagacatgggagtcccttcccaagaaactccagttcctttcctctcttgcctcttcccactcacttccctttggtttttcatatttaaatgtttcaatttctgtatttttttttctttgagagaatacttgttgatttctgatgtgcagggggtggctacagaaaagcccctttcttcctctgtttgcaggggagtgtggccctgtggcctgggtggagcagtcctcgtgcc

SEQ ID NO: 15258 - DNA, 821 bp, Homo sapiens
  misc_feature (1)...(821): n = a,t,c or g
caaggccagtatgtttctttttttattatttttgtgtttgacttagatggttgaaatgttttcatttttcatttataagcattacattaatttccatgcaaaaacccaagatcgcatatgtctgatttcaattggccaaaatccaacccttgagtttggacattcaagaccaaaatgaacacgttacttgccctttctatgagtagacatcatgggtgtcctttgaaagatcagcaggcctcctgacctcttaaacaccagcttgccatgagtccacaccaaaacagggagccaataccttccagcacctaatcaggcaagtaacttcactcatgaaggacaggacacctctataccaaggctgccacccacagatatttcctgggtgctgctctatagcaatacctgcttttgaacagacgtggtatcttctatttggggattataagttcttcctgccagtttttctcaaaactctcaggaagagtagagattttacaaaaaagcttacctctatgaccccaaaagaaataaatacaaagacacctacttcatcaagtgtatattttccccagctttagatggggtcaacatgtataaagctttaacaacttctctcagtaagacaggaaccaggaatatcaaagagggcaaagcaggaccccacaactgaaggagaactaagcaaatgcaaagaatcatttcactgatagaaatgggcaaaatgaaaatgatctcgtgccnnnnnnnnnnnnnnnnnnnnnnnnnnnnnnnnnnnnnnnnnnnnnnnnnnnnnnnnnnnnnnnnnnnnngtnttcaaa

SEQ ID NO: 15259 - DNA, 964 bp, Homo sapiens
  misc_feature (1)...(964): n = a,t,c or g
aaaaatcttcctctgtgggaagattaaccatgtattgaactactgaaaagtatatatttttagatatacagaaggaatctacatggagcagcattcagacctatatagaagtcatagcattctgtataggaccaaaaaggaaataacattaaacacttaaacagacgttgttgggtagaaatacctttagatcttgcatttacttccaaaaagaaaaaatgccacagaagtttgctgaaaacttttgtcgtttgaattttctctgtcagtgtatttagcccaaatacaacagctttggggttagcacacacataagaatcaaaaaaacaaagctcactaaataaatcagtctggtttgccaatccagcttgactgaaataagtaaaccaatcacttgcaacatgaaaaactgtccaactcctctaaggttctgacaaaataaccttggctgatgtggggaagactcccactttgattactgacctgacagtgaagattcatgcttgacatgatttcagacttgacaatgtctgtttaaggagctatggtacagtttgctaattcaatcccagatacctgttgattacctgtgagatctagagtccaaagtagccagcagccatatccctgagtgctctgtgcccatcagatatcttaaagtaagcagggttgggacaggtcacagcttggatgattgacctcaggtgccgtagacagccccagattcaagaattgtatctgctttcttgggcagtcgtcactgaactaatgtcccatactgtgttacttactgtaggatgctctcttttagagggagggcccagagcacacatcctaatcgctagcgggtantcagagaggggggtgctaantctgntggccnggggncaatttccgtttaggggatgtngggtctttttcttgttcntctaattggnaattgtggcatcatttcccttttttg

SEQ ID NO: 15260 - DNA, 483 bp, Homo sapiens
caaatgagcaacaatataaagagtagaggtagttctcattgggtgtaacttcaacccattctgcttgtggttagaatttataattttgctaacgatgtaatttactaaggtttgaaatggtattctaacagtgagtccattgtcttgaggattaatctgatttataagtaatactgatagacatattttcgtacatctgagcagaaataaatgcatgtttctagcatatgtaatataaaaactccagaggataagtttacacttaacaagatgttgttttctatttttgaatttcttattatttccccctttttggtagtggagttgagagggggagcatactatttgtataaagaactgtcaccccagagtgacatttattttccaagatgaccctgaactcatgctgttggtttcatatggtgtttgtgtgctttgcctagattcaaggcctgaggatttgaggaaaatcgggattttttt

SEQ ID NO: 15261 - DNA, 318 bp, Homo sapiens
cggcagtgggattactcagtgttgagagaaacaacacggaaagcccagagcagaggagggagaaggccccattctctcagctttaatctactgcacctcggagggcagagctctaaccagacacgctgcaagcatcagaatcgggatgaacatcgaggtggggaacatttcttatacaggagccatcatctcctggtcgtcctcggagccctgcctggaggactattaccatattatgtacaggcccaactggaacagcatcttctctggctatcttcgctacagcttccaccacggaggagaaggtgcctcgtaacg

SEQ ID NO: 15262 - DNA, 1419 bp, Homo sapiens
tttttttttttttctctttgagtaactttattttggaggagttccataagcattaggaacatacataaaatgacacaccactgttgacaatgaaaaaaaaaacagcatttgatattttccagctttttaagttaaaaaatgattcagttaaaacaaaacaaaagtttagatattttagcaagaatcaccttgcaggaccataatcacatttaagccactgacttgtttgtttgttaatggaaaaaattcacactgcatctagttactatagtatttctaagcataatcaatcacagctgattgattgaatgcaatgtgattgattgattgattgatatataccaaaattcatatggatgtcacacagtgacagcattgtacaagtaacgttaatgacctcctacaaacacattttaaattagactggtcaagctaaaaggaatgttggagccaaaagaaatgtagtggaattcagattgtctattaagacttgaaactatacattagaatgatgtggaaccctaatactagcagcaactgttacagccctcttaaaagatttgtaagaatctagcaaataaagaaagataataccatttttgagagaatataaaacttctttatatacttcagcataacctacttgctttaaatcaatcaggcatttatttattttaaaactgggagtatattccagctattgcttttataaaggttctaaaatgaagcagatttaatgctggaatgcagaatcctaccgtgggtataaaaacccaaaagtgaactataaatatatcttggttcagaaatctagatagatagatagatatctaaatcacttgaagttggcagtactaaataaaatatcagcaccttttagctaggttgcttgaagggccaagcaatgagatgaggactgtcctaattcagtgcccaatgctgaaaattaattatatataaaacttctacttattataaggaggccatggagtaagtcagaaataatttttcagattcaagcataaattaaagaaataacacctaagctcccttgcttatagcatagcagaaaagacactggcaataatctataaatacctggatgcatgtgctgctctcaaagtatttatagattattgccagtgtcttttctgtatgctataagcaagggagcttaggtgttattatttctttaatttatgcttgaatctgaaaaattatttctgacttactccatggcctccttataataagtagaagttttatatataattaattttcagcattgggcactgaattaggacagtcctcatctcattgcttggcccttcaagcaacctagctaaaaggtgctgatattttatttagtactgccaacttcaagtgatttagatatctatctatctagatttctgaacc

SEQ ID NO: 15263 - DNA, 2084 bp, Homo sapiens
tgtccctcaattaaatgccttaagacctgacattccaagagaaaacaaaaaccatactttggtttctaaggatgtatgactgggtcctggccttcagaggatggcagacagatgggaacacaagtataagtagactagagtatcccataattgtcaactctggcaaggtaaagatgaagctgcttatgtggacgactcgtggggtacctaagtaaatctgggagccaggtacgtgcaaagtggtcagtggtagaagccctcatgaaggcaggaatgctgcaaacctccacttactgccttccaggaccacttaagtcatagtggtaagagctgctagaagtagtcgttaccaacttgattaccagcaatacacaatgatgtcaagaagacattccacatccttctgtcatcactagctctcatttcaaccactaaaataggtaacagctatagacaaaaaaaaaagggagacatgaaacattcatggctgttcaagttagaaaactatggcagcggctatattaacaaaaatacaaacgtgtacactaattacaacatttatctacagtcattttaccagttgtgcagcctaaactgccattatcttgtttagtcattcctaagatgcgttatttctgacatcgaaatatcctgaaattgggaaactattgacccaaccccaactgtgttagaactgcatgaacacctaagatgaaggaccagcatcacagcagcacatcaggccaacaaaggcagaagtccagcagcaggagagggcaatcgcacgaggacagcatcgtgaggtcagctcaccgacactctaggtgtgcaggcttatcctgatgacaagagccatggacctcaccatgtgtctgaaaaccgcaatgttgctacttaaatgctaagcctttaatggtgcattaatagatggttaagtagcatattagcagcttaaatctacataagtcagctgtgtactgactgtacctcacagtaacaaattcaccaaatctgtatcttttcttctttgtaacaatgttaaatattggtatatctcagttctcaggtgtgattccagcagctatggtgagaccattgctgctcctgaatctccactttcatttgccttcactggtgtcactgtcgctgtcactgctgctgtcagtatcactgtcactggtcaatgcagttagattacttagggcttccttttgttcctggttgattgcaaaatcactcattactctctgggtgaggccctcacaaataggtaagctgaaggcacttgccagctctactacttcaatggcctgggaagggctgttagacacttttgcactgtccataagctcattcagcaactcacttctaggaatcttattatgcttcctgaaaagccccaacattttccaggcttcctgagttctcccagcccttaaaaagaggatagctatacagttgagagaggtggctggccaatcctgagcagtctgtctgatgggttggctttcatacgcagatttgatatcagcagcacagtcagcaaatgccacctgaagctctggtgggtgcttgtcccttgccatgagcatcaggatctcttctctcaggtcactgcggaaagtatgaccatattctttactatctttcccaaattttaggaatcacttctagccgattggccacatccaatgcttggagaagatgtatcattgtttgggagtggggaaagtaggctgaaggtatcaggtcctcataccacttcaaggtaacatcaatttgttccattagacaaatcaaatcgaagaacttggaataatagaaattacgatgttgatcaggtccaatgaatttccagttgtctccggtttttaaaaggccatgtacttggtaggcaagttctagatctctgagagatgagcatatgctcatggctgactgaaaaaacttatcatcatccgggtcctttggagaaaatctctttcccattaattcattcattatatcataaatgatgaaggatgatctctttaaagggtctccaggttgatcaaacaggcgaataatatggtgatatgttgcaa

SEQ ID NO: 15264 - DNA, 748 bp, Homo sapiens
ggtcgacaaattaaactgagagcagaagtgacaaagccctgacataaaacagtgaagcagtgctcttgtttttaccacacaaaggccaattgttttaatctgctgacccacccatgggtgtaaaataagaaacattcactaaatcaagagccacatgcaaactgccaggagctctgctctgctcagggaagataccacatcctagagagcatttgtaagtagtgatttaaatttatggaaatctgcattcattttatagtgtatctggttttggtagaggccagataggttaagtggataggcatataaaaagactaccatcccctgcaactttcaagtgttttgtcatggtagtgatcaattccattccttggagaatgtgattattatttttcaatcattgttgccagtggaggagaatttcacaggcttccccttggttctgctctaataatgtccctgactctacaggtcaggaagaaagtgagagtcctgccagctgccatgtgtgtccattacacattcaagaagaggcaataacggcaaactgattagatccaccttgggatggacatgagtcaaaactctaggtagcatctgaccttcaaaactccctctgcaggctgggtatgatggctcatgcccgcagtcccctcacttttggaggcggaggtgggaatatctcttgaggcccagagttgcagaccaccttgggctacacagtgacagcctgtctgtacaaaaacta

SEQ ID NO: 15265 - DNA, 1334 bp, Homo sapiens
aaaacttaaaaagttgtttatttctgaaatttttcatttaggtattttcggtctgcagttggctatgagtaactgaaaccatgagtaacagaaacccatggatgggggaggatgactggagtctggagtatcctatcctacatggcctgggaatgtttgttctcatgctctgcctggcagttaattgttcacaagtgtccccataagtaactgtcgagaagattctcacaggagaccacgtgggttgcctgaagaagccagagtgaaggagggttgaaatcaacgcctttagagtcttaggaataaaagttaaaaagccccagagaaatgttgtcctttgtccacgggcacctgcactaacccctcccagaaagtgggcatgcagtttcccaggccaggcgagtgttcgttgctcaccgaagaccagtgtttactagcaggattgtcgccagaagcagctgcattctccccggatgcagacctgcccgttggtagggactctgctcacacggaacatggacggttacacctgtgccgtggtgacgtccaccagcttctggatcatctcggcgtgggtgttgtggaagggcagcccatccacctccatgcccacgatgcccgagacgccactccggactttgtgctgcaccaagatgcccagcattttttcttccttaatgaccgacgggagggcctgagtccaggcctgatctccaggtgccctggagggtccgactgctttcctcaggtactgactgtggacagcacatgagtacaggatgtagagtgcgcaggccagggcatagcctccccagttagaaacaccagcaatgacggcaaagtcagcctccacgtcgcaggcgatgacatccccgtgccgtatgtgcctcctcacagcctccttgactttacccatcccaagctcgttgcctccatcaccgactccagttgatgagattccaggaatcttcttcgcagcaagaaaaagatcgtcaatggggtcaaccaagtgcttgatgttcatcttccttgcattgtagtaattgccatcagcagctcttccggcacgctctatggccaccaggtggtcaaatctaggtgtctgcgggtccccatttttgcacaggaatgcctgagcagcttccactgatccaccttggtaagttaatatcgggatctgcgtcttcagaacaccttgctcaacagcatcttcaacaatcttctggtgcaagttccaggctctctggtcaacgattatggcgacctccttctccaaggcctgcaggaaggcaaccagagcaacagctcctggtgggccatctgtctcttctggc

SEQ ID NO: 15266 - DNA, 1216 bp, Homo sapiens
  misc_feature (1)...(1216): n = a,t,c or g
attccaaaaataattttatttaataggtattaaataatgtatagaaggaaaaggagctggtgtcaggttctgtttacgtccttctcttaccctagctcttctcgtgttttgcctatttttttgggcattttcttagcatggggatcttctagctccttggccttataataatggggagccacctccagaagccaactgctctcaatctccagtacctgtctcatgaactctttggtggtcaagacaagttcgtggtagagcagccagcgtggctgttgctcaaagagggaggagttgggatgaatgaagactgtctgctgctggttttcactgtgcggtagccactccgagtcaaccgtgccgtgtggtaaaagtaaccagcagtgatgggccttgcgtacacggatataggtccccctggcaggaactgagaccaacttccacacgttccaagagcccttccagctgttcccgcacatccccgggctcggccgccatcgatctgaactgtacaaagttctcatagcaccactgggaagagtaaccactctcagcccactgtgtgtaaacatttagcagaaccaggtggtcaccgccagggagaaagaagttgacacgggcattgtcagcatggacgaccttgtcctttggtcggtagaagatggagttgttgacagagagcatggcagccactgtcaggatctcctctgaacagctgtacttctcagaggctaagatcattttggacagcatggggtccaccggncaactctgcccatctttcgaccagaacttggtgagcttccccaaggtggttgagggctccccagagcatacagctgctccaaagccagcagcagtgtcttcatatggtggagggtcccaggaaatcaaagtgcattaggtcatggatccctaagctcttgagcagcaacacgacattgcccaagctggtcctctggatctcaggcactgtggtttcctcaagctcgtgctgataggcccaggcggtatacaggcggaagcacttccctgcagccacccgacctgccctgccagctcgctgattggctgaggccttgctgcagggtgtgacagtgagcgattccatgcctgtgcgggggttgtagctcttctgcttacagaaccctggatccagcacataaatgatgccctcaatggtgagtgatgtctcagcaatgttcgttgccacaac

SEQ ID NO: 15267 - DNA, 877 bp, Homo sapiens
  misc_feature (1)...(877): n = a,t,c or g
aattcgttgcatatagaggtatcaactgctgcatgttcaggcatattataaaactttagtctatgaaagaataattataataatgtccaggtgcaatactctgtaagtctattggttcaagttaccgagagataggtgtgttcctttatgggggatgggggggtgtgttggggattctttgtattgtttatttcattttggtttattttaaaagatgtaaacatatattaagctatattaaatctcacatacagttcttctgtgctctattataccctgatagagatgggggagagaaaggaatgtttttgatggtggtttcaaagctcggacagtaactatcttgagcccattagagagtctgtgtccatatttgcatctggctggtcatagcctttgttactaatgatgacattcagttctcttttgtttttattttttaaaaactcaggtgtaattattatctgttcttaagataattgcaaatattaaatattatgatatatcaattcatgtgtttgggcataccagtgaatgatgaagaacatgagattaatttaatttatccttcggtaacttggacattctgggagagagactatcttctgggagttgagtacaagcacagaaacatctttacggtggcatcatctcattttttaggaagacatgataatactgcccatcatattcatgtgtaactactgttctttcttctgctttcttcaccataataaactttggacaaccaagcaagctctaaccgcaatgccagatggccttgtccgagggcctagtgtttgccggcagtgggaactgggcctttcctacaggacaactggccagttttgctgggaagnccnannatacatttccg

SEQ ID NO: 15268 - DNA, 3436 bp, Homo sapiens
agacgtttcccgccggcgggagctgtggctgtgattgagagaggggttagaggcgggtcccagcgctgccgcaccatggcggaccagctttatctggaaaatatagacgagttcgtcacggaccaaaacaagatcgtgacatacaaatggctgagctatacactaggggttcatgttaaccaggccaaacagatgctgtatgattatgttgaaaggaaacgaaaagaaaattcaggagcccaactgcatgttacctacttggtgtctggcagtctcattcagaatggacattcctgccacaaggttgcagtagtgagagaagataaattggaagcagtgaagtccaagctagctgtgactgccagcatccatgtgtacagcatccagaaagccatgctaaaggacagtgggcctctgttcaatactgactatgacatccttaaaagcaacttgcagaactgcagcaaatttagtgctatacaatgtgcagctgccgtccctagagctcctgctgaatcctcttcgtcttccaaaaagtttgagcagtcacatcttcacatgtcaagtgagacacaagccaacaatgagctgaccaccaatggtcatggcccacctgcatccaagcaggtttcccagcagcccaaaggaattatgggaatgtttgcctccaaagctgctgctaaaacccaagaaaccaacaaggaaacgaaaacagaggctaaagaagtaacaaatgcatctgcagcaggcaacaagggcaccagggaaagggaatatgatgagcaacttttttggaaaagctgctatgaataaatttaaagtcaatttggactcagaacaagcagtgaaagaagaaaaaatagtggagcagcctacagtgtctgtcacggaaccaaagctggcaactcctgcaggcctgaaaaaatccagcaaaaaagcagagcctgttaaggtgctgcagaaggaaaaaaaaagggggaagcgagtagcattatctgatgatgagacaaaggaaactgaaaacatgaggaaaaagaggagaagaatcaaacttcctgaatctgatagcagtgaagatgaagtctttccagactctcctggggcttatgaagctgagtcaccatccccacctcctcctccgtctccacctcttgaaccagtgccaaagactgagcctgaacctccttctgtcaagagctcaagtggagaaaacaaaagaaaacgaaaacgcgtactaaaatctaaaacttacctggatggggaaggctgcatagtgactgaaaaagtctacgagagtgaatcctgcacagatagtgaagaggagcttaacatgaagacatcctcagtacacagaccccctgccatgactgtgaaaaaagaacccagagaggaacgaaagggccccaagaaagggactgctgctctgggcaaagccaacagacaggtgtccattactggcttcttccagaggaaataaactgccatctctggtagatcagagacttggagtggtcaagggagaagaccaagaaatgtactcctcacttactatgtaagttcatctagatctccacctcacctgtatcaaaagactgttctttcatcctgtgaggtttatactatttctggtttttaaccaaaaggaaatcatctggaagcaggaggcaaaaagctgttaccttctaatgacatttaaaaagcacagtctttgacctgtccaggagaaggatttactccaaaattatactgggaacagttttcagaattctcactgaagccatttagtggctaacccactgtgctccactcaccctatgccctgggtccgcatatgggcacagggaattattccttcttgtttcctctgtattctaagaattcatgtgggtgtttcttatccttacattctgctggatacgtttacccctcttgtcttcctgcagtaccacacttctgtcccctaacctcctgaggctgttctctgtaagtcttttaagttttggttggactaaaggctgaagtgaaaatctccctgtaatcctcttcctccattatgcagtacacggacacctggctacagaccaggacgtggcttgtgttctgttcctttcacaaaagctctctgggaccttcacttgcaattagtggttagggaaaagcctcaggcagaacacaaatagaaatttaatgatgtgttcaactccaccagaaattacctcgagtcagcattgacgatattggaggagctgccgtgctgctgatacggggtgtgctttatgctgctctttgcggtttgttgatcccctcctcccccactctcaatacctagagagtgaaacccgtacaatgagataaagactaaaaagagaaatcccttcctatatacagtgtgctacatttacaaaaaatttctccttaagaaaacagaatattcaaaaacagcacttttccaggaagttagtgaggaagataaggcacacatttatttataaatggatgttgctcctttgtatttttagcttccctatttgcttaaaagtacaggctccctaagagaggatggagagggagagactgaattgttagtaggtctaaacatcaaagaaaacatttttattagttacttatggaaaatcatctattacaatgataaccttcaagtgacttccattatggctggacaggcggtgagctcagtggattgcagtggtgtgctggtgattttgcacagtgagctctgcggaaggggtcaggctcaactgctgatgtgtctcacacgtagcagacaaggggtgtctgactggcttcttttgcctcaagatggtgtatgtcgtaagtgatgcaatcagctgtctgctttttaaggttgggattgtgctgactttgggattaacatgagcttctttagcaaccaagcatgaacttgattaagaccagaagtttgggagatgagtcctggcattatgtctaggactaaagcagtggctttgtatagcaagctgagtaaaggttgacatattccaaaacccttctttttaaaatgaaaaaggatggagagaaggatggaaagcctggacttaaacctttagaaaaaacttctggagagaaatcccttttaaacagttacttttgtcattgcctctggtcatttgtctaaataggaatggaaaattaaaagaaaagcaacaatccaatcttttttctaaaaattatgctggggtctcgactaaaactgaatttgaattggaaaattctggtgttggttggagttccatcttgcaagggataatacaaatcctatgatctctatgcccaatatgctgcctcaactctgagctgtctgcaaggcttagtaagtattgagtggtgttttttttttctttttatacaataccatgttaaccacatgagttaaataaatttgagaagttgtttt

SEQ ID NO: 15269 - DNA, 1176 bp, Homo sapiens
  misc_feature (1)...(1176): n = a,t,c or g
ttttttttttacataaaattatctcactccattttatttaagatttttttatccagttagtaaaaggaagatgtgtctctctttatacatatgtacaagttcagttataaaaatagcacattcaaagagaaaaggcttggcatttttctgattccctctaaatagcatctgtacacaggaatctgggtttgagcaggggaatcttaatgatttaaattaaatgattcccctataccccctactccaaaaaagttttaaaaatcaattctatcgaaactcaattccgcgattttcaggtgtgcaaatcagaggcttgcccgcccggaggtacctgctccaccagggacatcaggcagggacaggcagaaacacctcccatgcaaacactgctgattgaggtggctcctggtctctttactggcttctgggagtcccctgggtggaaggtgctacggttgctggtaggatctgaaggttctcttggtgtgaaccatgcaggatgggaggaattgctgggaacacaactgcctgtggatagacttcctctagcctctaccatgcttagcggcctccaccatctctcgcagtcactgctctctccaatgatgacactctggggttcagagacctggggagctgcctgaagactgtggacaacaggtatacaatctcccttactagccctatgagaaatcacactcttaagagaaatctctaccatggaaggctcttcacagcacctgcggagactttgcaagggacgtgtcagagccgaagagtggaatcgggatggaaacagtatgcctgagcatctaaagggggtctgtgtcaggcttgccccgtgagaggtttaagacttggctatacagttcacttgagatgcagtggggctgatccatgccctgtggccttcctcctacaggcaccccagatgctcctgatgagacacagatgataaaagtgctcacaccatccacctgcctgtccttccccctgctggacatttccacttctgactcaggatgcaagatgctgcacggggcaagccatccaaagaccactggcaggtcaggactctagccctgggtttggttgaaaggaaantcggaagggcccnaaatggntaccggtcctccanaggggtttggtgccttttgccctgttttcccggaccaa

SEQ ID NO: 15270 - DNA, 1306 bp, Homo sapiens
tttttttttaatatatatatttcattttaatgaagagtgctttcttgtagacattgatgcagtacatagggctggtaaggaagtagtaacagtgcggagggggtaagtatgtcagtctggcatgttttcttctaaattaatattcaaaaaggtgccattcaaggaacacttttggtcataccttgcaaccagtactgagacatgacataaagttaaaactccaggtgcctttttgagataagtgtgaatccacattcacaacctgggttgagaaaggtcacacttctctacttactaaaatggagtccttcaatcttaagtcagcccagcaattcagttgtattgacctgatggaggccatccgaggtttcactgccattaggagcagggcttgttttatgcgctccgtgcatgctgatggtgcagggagtggtggaagatgtgccacctcaaatctggataattcctttaatcccttccttcaatacaacctgctcttaaaactgaacactgattttcattcttttcatgattagtgtttccccacccttatctttgcattcactccctctcataaaggatgcattttcagagtccagatggattaggataactgcttacaaattccatggcaatagttaagttctgaggaaaagcaggctttgtgataagaccactggatgtctttcaattttcaaaagtcagatttcattccacagcttgtcatacagtttacagaattatgagaatcctccctggattcacagtgtctttcttaatagagtcatacattaatgaatgttacccattatttaatatttaaatttcaaattctagtttctactttacaaggaaaaggagacgaagacaaaactggatttgacccatggtcagtcaggagaaaatgtgtcttagctcctaatttagtgacctatatgctaaattacaccttttcatccctctgagaacataattctggaagcttgtataaacaaaataggccccaaattacattctcaccacagaaattagataatttatcaagtgcaaaaagaacacgagaatattctgcacaatttatcaaggaccttcaaataaatccattacaaaaaataccccttcaggcaaaataaataagactgaaattcagcataacaaatttgcaaagtttaaaattagcttaacgtgagggctgcaattccagttacaaagcaaatgtcccaagttcccccaaagaacttaagacaaattgattaaagttgttcagttattttagaatattttgtttagagaaaccaaacttgaa

SEQ ID NO: 15271 - DNA, 388 bp, Homo sapiens
gccggtgggtctacagcggaagggagggagcgaaggtaggaggcagggcttgcctcactggccaccctcccaaccccaagagcccagccccatggtccccgccgccggcgcgctgctgtgggtcctgctgctgaatctgggtccccgggcggcgggggcccaaggcctgacccagactccgaccgaaatgcagcgggtcagtttacgctttgggggccccatgacccgcagctaccggagcaccgcccggactggtcttccccggaagacaaggataatcctagaggacgagaatgatgccatggcccgacgccgaccgcctggctggaccagcggctgccgagctcttggccgccacggtgtccaccggctttagccggtcgtccgc

SEQ ID NO: 15272 - DNA, 551 bp, Homo sapiens
cccacgcgtccggttcacactggctgttgtcagcggcctctgaggtttcaggctcttggcggtgaaggtcagagtgcagacctgagaccactgctcaccgacttcagactccagtttatctgtgccccagcttcctcacttagtctcagaagacttaggctgaggcctcagaaggagatctccatcctttgtccagagcagaacaggatggccatgtcccaggaatcattgaccttcaaggacgtgtttgtggacttcaccctggaggagtggcagcaactggactctgcccagaagaacctctacagggatgtcatgcttgagaactacagccacctggtgtccgtggggtatctagttgcgaagccagatgtgatcttcaggttgggaccaggtgaagagtcctggatggcagatggggggaccccgggtacgacctgtgcaggtgaggacaggccagatgtatccatttttgcctcattgtattttgaagtgctgttattagaagtctggcaagttgatgagcagatagatcactacaaggaaagcca

SEQ ID NO: 15273 - DNA, 1565 bp, Homo sapiens
  misc_feature (1)...(1565): n = a,t,c or g
ttttttttttttttagaaatcaaatctgtgtcctttattccacctggtagggcatacccaagaaccatatactgagtcctgtctcaggttgatggagggttccctgggcccaaggcacacaactgcctgtgctctgctctacagatgataggagggatggacagtggagagaagctgagccttgtgaccaagacccccagcatgatggggaatggaaagttggaagaagtaggactacaagggaggggacagggaggggcttagaggcatttggggcaggctgggcattttgaagtgagaggcatttccatccagctccccatgtccactgacagccacacccaggcttcaggtggaggtgaggctgctgtttcccaatgcggtgctatattcttctggaagcccctttccttctgctgtggctagagctgtgaccaagaatgggaacaggaggctgctaaagtctggagaagcaggaatcatttgtcagaagaacacagaagccacctgctgggagttctatctttttagagatgagctgtttggggtttagaaatgagatggaaggaagtggaaggcagagggcaagggcggagttgtgagaggctaccagcacaaggatggaggctgggggccatgtgcagtagggccagaaaagtgttcagtggaattgtgggtaggaggctgagatgctgctgggccctgtccccaccaaagatggaagaactgaggtggaggcaactggccacttgcctaggagagaactcaggcaccaagttaaaaagactcccatgaagaactgccaccttctacccgctgcagtcttggatggtctacccatgcagaaatcagtggccaggaaggcagggcctactgctgggatatccagggcaagtgcccagtccaagaaagccacttgtaatgtccttgtaggcaaagccaggtccagtggacagcctcactgagctgtgtcttcatgcagtcccaggtcacctcacctctgcatcctcatggcagtgctcctggcccagccagggcctcaagcaagaggtgccacagtggcagcagcacattctggtggaaaagcaggggcagctctctcagatagcggagtagctgattcacggaatcggggagctggatctgtagcctctgagagagactggtgagactgtcaccaaaccacgcaaggtgagaggcacagtgggcagaaaggaagctgactgtggcattggtgtgagcccaggccagctgcaagctgggccgcaccacggtgagcaggtgggagccccagagcggcagtgtctcccccagccagcctggaaggagctgtgtgaccggaggtcatggcacaggaagcctacagcgaagaccagcagcaacaggaggagccgcgtccagggcagccgaggaccctgaacctgctgcaacaggcccttgcaggccatgtcacaggagacgacatcctggttgttactgctacccttcctcagcagctcctggttggtaagcttgagggactgaatggtttcttgcaaanacttctgtaccttcttgggaatctg

SEQ ID NO: 15274 - DNA, 831 bp, Homo sapiens
gaagatcccggctggaacgcccagatcaccctaggcctggtcaagttcaagaaccagcaggccatccagacagtgcgggcccggcagagcctcgggaccgggaccctcgtgtcctaaaccaccgggcgcaccatctttccttcatgctacccaccacctcagtgctgaggtcaaggcagcttcgttgttccctctggcttgtgggggcacggctgtgctccatgtggcaaggtggaaggcatggacgtgtggaggaggcgctggagctgaaggaatggacgagccctgggaggagggcagaaggctacgcagggctgaggatgaagatgcagcccctggatggtcccagactctcaggacatgcccagctcaggggcttcgagccacaggcctggcctcatatggcatgagggggatctggcataggagccagactgctcttagccccctggctttgtgccaggcctggaggagggcagtcccccatggggtgccgagccaacgcctcaggaatcaggaggccagcctggtaccaaaaggagtacccagggcctggtacccaggcccactccagaatggcctctggactcaccttgagaagggggagctgctgggcctaaagcccactcctgggggtctcctgctgcttaggtccttttgggacccccacccatccaggccctttctttgcacacttcttcccccacctctatgcatcttccccccactgcggtgttcggcctgaaggtggtgggggtgagggggggtttggccattagcatttcatgtctttccccaaatgaagatgccctgcaaagggcagtaaccaca

SEQ ID NO: 15275 - DNA, 378 bp, Homo sapiens
  misc_feature (1)...(378): n = a,t,c or g
cttcagagctgtcctacagggacgtttgagtctgcagaagtttctgctgccttttgttcagcctatgccctgctcctaaaggtggagtctacatgtagaggcagaggtcttgcnnnnnnnnnnnnnnnnnnnnnnnnnnnnnnnnnnnnnnnnnnnnnnnnnnnnnnnnnnnnnnnnnnnnnnnnnnnnnnnnnnnnnnnnnnnnaggctgctgcctccaaggtctatnnnnnnnnnnnnnnnnnnnnnnnnnnnnnnnnnnnnnnnnnnnnnnnnnnnnnnnnnnnnnnnnnnnnnnnnnnnnnnnnnnnnnnnnnnnnnnnnnnnnnnnnnnnnnnnnnnnnnnnnnnnnnnnnnnnnnnnnnnnnnnnnnnactg

SEQ ID NO: 15276 - DNA, 765 bp, Homo sapiens
gcggagaccatgtccctgcaggaacagatgaataggaaatgcttgctcctggtgctgagtggtgaaagttttgttgcatcctcttagaagaacttcagtgctcaacggctctcagaggcttcactgtgttgtctctgagatgcagcctcgaggttgtaggagagaggatctgggaagaagtccaaccttgacaagagagagggggcctgaatctggcaagcaagtgggggccacattctctgggcattcagaagccaggatttcataggccatgaaatctgctgtcttttagaagtgggctccggtctgctttctctacacaagttcaaattttccaccatttccaggagcctgcagctaacacaagtgaatgagtgatttcctcgtcattgaccccataaactcagatacttgtaaaagagaagttaacttacagagcatataaaaatcagaaaaaaacgggaagagcctacggacagtccggtacagctgtgtatggatcacccattggaacaagcatttctttaggcttccaaggctgttggaggaccctaagagggaagaaaatggtttagctggagatggtttgggtgcagactttccagaaggcagtaccagtgaccagaaggtggacagacttcaattccagccccaagagcacaggcagggagaaatgctctctaagaaggagggtctgcccttgagattctttgtctgcaacagctttgcatcttccaccagtaaaaactttgttcccattttaaa

SEQ ID NO: 15277 - DNA, 2142 bp, Homo sapiens
ctctttataatttagtttccatagaagttatatgtgcatttaaaaaaattcaatgctggagcgaccgtgtctggggagccgagccccgcttctcgctgcggtgagcccggactggggcacgcactgcgcagactccccgctgcagtgggcggagtcccacaggccccgccccctcctcccaccctcgttcagcctgtccagacagaagctggggcccagcggaggtagcagcagacgcctgagagcgaggccgaggcccctcagggtttggagaccctgacacacccaccttctcacctggggctctgcgtatcccccagccttgagggaagatgaagcctaaactgatgtaccaggagctgaaggtgcctggcagaggagcccgccaatgagctgcccatgaatgagattgaggcgtggaaggctgcggaaaagaaagcccgctgggtcctgctggtcctcattctggcggttgtgggcttcggagccctgatgactcagctgtttctatgggaatacggcgacttgcatctctttgggcccaaccagcggcccagccccctgctatgacccttgcgaagcagtgctggtggaaagcattcctgagggcctgggacttccccaatgcctccacggggaacccttccaccagccagggcctggctgggcctgctcgccggtgcgcacagcagcctgggacatcgcctccttctactggaccctcaccaacaatgacacccacacgcagggagccctctggcccagcaggggtgagggaggtcctccggcagctgcagaccctggcaccaaagggcgtgaacgtccgcatcgctgtgagcaagcccagcgggcccccagccacaggcggacctgcaggctctgctgcagagcggtgcccaggtccgcatggtggacatgcagaagctgacccatggcgtcctgcataccaagttctgggtggtggaccagacccacttctacctggggcagtgccaacatggactggcgttcactgacccaggtcaaggagctgggcgtggtcatgtacaactgcagctgcctggctcgagacctgaccaagatctttgaggcctactggttcctggggccagggcaggcagctccatcccatcaacttggccccggttctatgacacccgctacaaccaagagacaccaatgggagatcttgccttcaatgggaacccctgctctggcctacctgggcgagtgcgcccccacccctgtgtccaagtggccgcactccagacctgaaggctctactcaacgtggtggacaatgcccggagtttcatctacgtcgctgtcatgaactacctgcccactctggagttctcccaccctcacaggttctggcctgccattgacgatgggctgcggcgggccacctacgagcgtggcgtcaaggtgcgcctgctcatcagctgctggggacactcggagccatccatgcgggccttcctgctctctctggctgccctgcgtgacaaccatacccactctgacatccaggtgaaactctttgtggtccccgcggatgaggcccaggctcgaatcccatatgcccgtgtcaaccacaacaagtacatggtgactgaacgcgccacctacatcggaacctccaactggtctggcaactacttcacggagacggcgggcacctcgctgctggtgacgcagaatgggaggggcggcctgcggagccagctggaggccattttcctgagggactgggactccccttacagccatgaccttgacacctcagctgacagcgtgggcaacgcctgccgcctgctctgaggcccgatccagtgggcaggccaaggcctgctgggcccccgcggacccaggtgctctgggtcacggtccctgtccccgcgcccccgcttctgtctgccccattgtggctcctcaggctctctcccctgctctcccacctctacctccacccccaccggcctgacgctgtggccccgggacccagcagagctgggggagggatcagcccccaaagaaatgggggtgcatgctgggcctggccccctggcccacccccactttccagggcaaaaagggcccagggttataataagtaaataacttgtctgtacaaaaaaaa

SEQ ID NO: 15278 - DNA, 3846 bp, Homo sapiens
  misc_feature (1)...(3846): n = a,t,c or g
tctcggcccggcatcattgtgggaagagctgaagcaggcgctcttggctcggcgcggcccgctgcaatccgtggaggaacgcgccgccgagccaccatcagtgcctgggcacttacaggaaggcttcggctgcgtggtcaccaaccgattcgaccagttatttgaccgacgaatcggaccccttcgaggtgctgaaggcagcagagaacaagaaaaaagaagcccggcgggggcggcgttgggggccctggggccaagagcgcagctcagggccgcggcccagaccaactccaacgcggcaggcaaacagctgcgcaaggagtcccagaaagaccgcaagaacccgccaccccccagcgttggcgtggttgacaagaaagaggagacgcagccgcccgtggcgtgtaagaaagaaggaataagacgagttggaagaagacctgatcaacaacttcaccctgaagttgttgatcagggtgaagggaaaataattgatagaagaccagaaaggcgaccacctcgtgaacgaagattcgaaaagccacttgaagaaaagggtgaaggaggcgaattttcagttgatagaccgattattgaccgacctattcgaggtcgtggtggtcttggaagaggtcgagggggccgtggacgtggaatgggccgaggagatggatttgattctcgtggcaaacgtgaatttgataggcatagtggaagtgatagatcttctttttcacattacagtggcctgaagcacgaggacaaacgtggaggtagcggatctcacaactggggaactgtcaaagacgaattaactgacttggatcaatcaaatgtgactgaggaaacacctgaaggtgaagaacatcatccagtggcagacactgaaaataaggagaatgaagttgaagaggtaaaagaggagggtccaaaagagatgactttggatgagtggaaggctattcaaaataaggaccgggcaaaagtagaatttaatatccgaaaaccaaatgaaggtgctgatgggcagtggaagaagggatttgttcttcataaatcaaagagtgaagaggctcatgctgaagattcggttatggaccatcatttccggaagccagcaaatgatataacgtctcagctggagatcaattttggagaccttggccgcccaggacgtggcggcaggggaggacgaggtggacgtgggcgtggtgggcgcccaaaccgtggcagcaggaccgacaagtcaagtgcttctgctcctgatgtggatgacccagaggcattcccagctctggcttaactggatgccataagacaaccctggttcctttgtgaacccttctgttcaaagcttttgcatgcttaaggattccaaacgactaagaaattaaaaaaaaaaagactgtcattcataccattcacacctaaagactgaattttatctgttttaaaaatgaacttctcccgctacacagaagtaacaaatatggtagtcagttttgtatttagaaatgtattggtagcagggatgttttcataattttcagagattatgcattcttcatgaatacttttgtattgctgcttgcaaatatgcatttccaaacttgaaatataggtgtgaacagtgtgtaccagtttaaagctttcacttcatttgtgttttttaattaaggatttagaagttcccccaattacaaactggttttaaatattgggacatactgggttttaatacctggctttgcatattcacacatgggtcaactggggacatgttaaactttggatttgtcaaattttatgctgtgtggaatactaactatatgtattttaacttagttttaatattttcatttttggggaaaaatcttttttcacttctcatgatagctgttatatatatatgctaaatctttatatacagaaatatcagtacttgaacaaattcaaagcacatttggtttattaacccttgctccttgcatggctcattaggttcaaattataactgatttacattttcagctatatttactttttaaatgcttgagtttcccattttaaaatctaaactagacatcttaattggtgaaagttgtttaaactacttattgttggtaggcacatcgtgtcaagtgaagtagttttataggtatgggttttttctcccccttcaccagggtgggtggaataagttgatttggccaatgtgtaatatttaaactgttctgtaaaataagtgtctggccatttggtatgatttctgtgtgtgaaaggtcccaaaatcaaaatggtacatccataatcagccaccatttaacccttccttgttctaaaacaaaaaccaaagggcgctggttggtagggtgaggtgggggagtattttaatttttggaatttgggaagcagacagctttactttgtaaggttggaacagcagcactatacatgaaatataaaccaaaaacctttactgtttctaaatttcctagattgctattatttggttgtaagttgagtattccacagaaagtggtaattatctcttctctcttcctccattagaaaattaggtaaataatggattcctataatgggagcatcaccacttattaaaacacacatagaatgatgaattaaaaaagttttctaggattgtcttttattctgccacatttattgataaacagtgaaggaatttttaaaaaatttttaagaattgtttgtcacgtcatttttagaaatgttctacctgtatatggtaatgtccagttttaaaaatattggacatcttcaatcttaaacatttctatttagctgattggttctcacatatacttctaaaagaaacttttatgttataagagttactttttggataagatttattaatctcagttacctactattctgacattttaggaaggaggtaattgtttttaatgatggataaacttgtgctggtgttttggatcttatgatgctgagcatgttctgcactggtgctaatgtctaatataattttatatttacacacatacgtgctacccagagattaatttagtccatatgaactattgacccattgttcattgagacagcaacatacgcactcctaaatcagtgtgtttagacttttcaagtatctaactcatttccaaacatgtaccatgttttataaacctcttgatttccagcaacatactatagaaaacacctgctactcaaaacacaacttctcagtgtcatccattgctgtcgtgagagacaacatagcaatatctggtatgttgcaagctttcaagatagcctgaacttaaaaagttggtgcattagttgtatctgatggatataaatttgcctcctagttcactttgtgtcaagagctaaaactgtgaacctaactttctcttattggtgggtaataactgaaaataaagatttattttcatgctcacttcttaaaagtcataaaaacaatcaaataggatcatgtttattgtcatgtgtttcctggtttctgacctgtgtgcacacccctgtgtgtttataatttttaaattgaattttatatggggtttttatttgctaaaaaccaggctgttgaatcacatttgggaagggtacttatcttaatgactaatgacttaattgggaaagttgaattcttgtaaaatacaaaatccaaggacttcttgggatttaatctaattgtcacttcttaggcagatcacttttttggataatggaaagttaagcataccgaatgctacttttggttgacaaacgggcctaatagtccggggggaaatccctaacnggtaaggntcccaagtatgg

SEQ ID NO: 15279 - DNA, 1513 bp, Homo sapiens
  misc_feature (1)...(1513): n = a,t,c or g
gacagcgggttccgccgaagctccgctgcagtacagcctgctcctgcagtacctggtgggtgacaagcgtcagcccggctcctggagcctgggagcctgggcgggatcccaagtccagccaagagtgaggagcagaagatgatcgagaaggcgatggaaagctgcgctttcaaggctgcgctggcctgcgtgggaggatttgtcttaggaggtgcatttggggtgtttaccgctggcatcgataccaacgtgggctttgaccctaaggatccttaccgtacaccgactgcaaaagaagtgctgaaagacatggggcagagaggaatgtcctatgccaaaaatttcgccattgtgggagccatgttttcttgtactgagtgtttgatagaatcttaccggggaacatcagactggaagaacagtgtcatcagtggctgcatcacgggaggagctattggtttcagagctggcttaaaggctggggccattggttgtggaggttttgctgctttctctgctgcgattgattattacctccggtgagagtaattgcctgcagggaaggatgatgccagccccggatccgggctgctctctggaggacagtttctgtaccacaccagggccttgcttcagggcctgaagacattcattttccctcatgtcgttggtattctgagggagctgcctggcttctctgcctccagcctttggggtagccacactttgctgctcctggactccagccagccttcacagaggacgtcccgtgccagattctctcacagcagatcgggagacaggatgttgacatataggaattcagctccacaaagcttcaggcctgaccacagctggccctctaggttgtttggtgttgtgggcacagaggtgacagtgtctctgcaggcactcaggaagctgttctaccttggaactccatgcaactatccgtctcgaataccagggcagggcaaggcggactgatgccgtccaaccaattatctcacttgttttgtgttctgtcatccttgttttttttttaaaaatacactcccctcccccaccgccacacaccttacagttcaaaaggttggtttatttgtattttattttcaaattccctattccaaaaatagtgccgggtggcccaaagataacatctgaagggaaagaatgagaaagctcccagggaagcgggggatggggcgctgaggcagggttgttagaggactgtgtcatcctcaccaagctcattacatctggccagggcctgcctcaagaagccccagcccagccttttcctggggatgcagtgaaatcccatccatgtactcgatgggcccctcctgtgccggccgagaggcacacactgccttcacgacgtgactgctgggacctgggccgagctttgaggccacatgtgaagggtcctgctgtggtcatcttgggtgattcggtcacagcagntattggccaagntcagacttcgttgaggggtttttcaccacca

SEQ ID NO: 15280 - DNA, 1793 bp, Homo sapiens
  misc_feature (1)...(1793): n = a,t,c or g
gtgaatctctggggccaggaagaccctgctgcccggaagagcctcatgttccgtgggggctgggcggacatacatatacgggctccaggctgaacggctcgggccacttacacaccactgcctgataaccatgctggctgccacagtcctgaccctggccctgctgggcaatgcccatgcctgctccaaaggcacctcgcacgaggcaggcatcgtgtgccgcatcaccaagcctgccctcctggtgttgaaccacgagactgccaaggtgatccagaccgccttccagcgagccagctacccagatatcacgggcgagaaggccatgatgctccttggccaagtcaagtatgggttgcacaacatccagatcagccacttgtccatcgccagcagccaggtggagctggtggaagccaagtccattgatgtctccattcagaacgtgtctgtggtcttcaaggggaccctgaagtatggctacaccactgcctggtggctgggtattgatcagtccattgacttcgagatcgactctgccattgacctccagatcaacacacagctgacctgtgactctggtagagtgcggaccgatgcccctgactgctacctgtctttccataagctgctcctgcatctccaaggggagcgagagcctgggtggatcaagcagctgttcacaaatttcatctccttcaccctgaagctggtcctgaagggacagatctgcaaagagatcaacgtcatctctaacatcatggccgattttgtccagacaagggctgccagcatcctttcagatggagacattggggtggacatttccctgacaggtgatcccgtcatcacagcctcctacctggagtcccatcacaagggtcatttcatctacaagaatgtctcagaggacctccccctccccaccttctcgcccacactgctgggggactcccgcatgctgtacttctggttctctgagcgagtcttccactcgctggccaaggtagctttccaggatggccgcctcatgctcagcctgatgggagacgagttcaaggcagtgctggagacctggggcttcaacaccaaccaggaaatcttccaagaggttgtcggcggcttccccagccagggcccaagtcaccgtccactgcctcaagatgcccaagatctcctgccaaaacaagggagtcgtggtcaattcttcagtgatggtgaaattcctctttccacgcccagaccagcaacattctgtagcttacacatttgaagaggatatcgtgactaccgtccaggcctcctattctaagaaaaagctcttcttaagcctcttggatttccagattacaccaaagactgtttccaacttgactgagagcagctccgagtccatccagagcttcctgcagtcaatgatcaccgctgtgggcatccctgaggtcatgtctcggctcgaggtagtgtttacagccctcatgaacagcaaaggcgtgagcctcttcgacatcatcaaccctgagattatcactcgagatggcttccctgctgctgcagatggactttggcttccctgagcacctgctggtggatttcctccagagcttgagctagaagtctccaaggaggtcgggatggggcttgtagcagaaggcaagcaccaggctcacagctggaaccctggtgtctcctccagcgtggtggaagttgggttaggagtacggagatggagattggctcccaactcctccctatcctaaaggcccactggcattaaagtgctgtaanaaaga

SEQ ID NO: 15281 - DNA, 2191 bp, Homo sapiens
  misc_feature (1)...(2191): n = a,t,c or g
caatgtcagatgacgagagccctacatcatcctcggcagaagagtagccgtgagggaggcggggaccagccagaccgggagcaaaccgtcccttgtccccgtctcctccctgttcccgttcctccctggcccaccccactcacactccccaaggcccacggctcaaaggcaagcgagctctccctctgcttccctgggggagccccaacggccacaggactccagctccaagtgggttttcttggctcccctgttcaaagtggccacagcgcagaccgaagcaaaattcttgtatacattggcgccagggctgatgctggggtgtgggttttatgaagaacattgagaacaatcagctggtaattatggatggaggaagagggagaggaaaaaaatattgtatttttgaatcattgttgcaggagggggtgggaatcttaggatttgttgccagatttgaaagtcactggaacttgcatattttcattttaatcctaagtgttattacgcaccagttggggttcacccttcatccctcacatttaattgtctgatatagaatagtgttgtgtccactgccccgctagacggctttcttaggggaattttcttctggttgtttcacaagacagattctgtccttgtcacccgggacagaaaactcagtcttttcaccctcattcagatgaagggactcaggacaggctctgtgacttacagggacccaatcaattcacaatgagaaattacaggccaggcgtggtgactcacgtctgtagtcccagctacttgggaagnntnnnnnnnnnnnnnnnnnnnnnnnnnnnnnnnnnnnnnnnnnnnnnnnnnnnnnnnnnnnnnnnnnnnnnnnnnnnnnnnnnnnnnnnnnnnnnnnnnnnnnnnnnnttacccagaaacccctcccttccccacatggaggccttggcaaatgttaattttcctagaaaatccttcagacctgaagacgcaggaaaagaatctggctctcagggtggcttctgcgtccccgccgccaggccccagactatggtcacagggccgtcctgttcctccccgggactccagaatttctctcctcaaaggaaagaaaacagggcatgcgcttgttggcaaaacgcagggccggctcccaaaaaccccatgtgtgtacgattaaaagttggccgtccccaggcctcccagcgcaaacttaaagagacagggctttgctgaaaaccaaacatgggccagctgggctttttaacaacctagagactttccggagctgcctggaacagagcctgtgggaaacggggcttgccagagacactcacagtttccttcatggcctgttttggtcccctaagaatctccacatcattgtctttcttgtgccttttccttggtgagcaacagaaagggaagggttccaagcctctaaaaatgtgctttgtgatcaggagtgcgctccaaaccaaatacgcgcgctgccctttcgaggccagtgagctcagcctccaaggctttaaagccacatttcagcaagagaaagcgctgagagctcgcaggttcattaaagaaggcaaagcactggtttctctccttagaaaagtaggtttcttggcttgatgtagactggcttgctttgatttttagtgaagggaatgtacgtaaaacaaaatagggcttggctggtcaaaggagacaagcaggatggatggatggatggatggatggatgtatggatgaatagatagatggtgtttgcatgtaaattgcagagaaaacaaaaccaaagctgattggaaacaattaattgtgggtgtctgagggggaaggtcgcagctttgggcagctttgagaagcggtacaagagttctgtgcctgtgtgtccagccctggagccagccagtgcatttattttaagctcttagaagcaactccttggcccaggaatgcgtgacccctgagatgggtccacgcatctctctacacttccttctctccgtgggatactggactcgtgcctctgcgcccattctcttctcacgcatatccatgagctttaatttcactttctgatcacggtacgtccataaagccagtattacacttaaatgaagtattcttttttgtaatcgttttttttagaaggtaaacaaatttaataaagctaccaataatgttgatg

SEQ ID NO: 15282 - DNA, 708 bp, Homo sapiens
aacagcagtgtcaaaaggtgcacctcccctctccctctcccctgtctctgtcccctgtcctgtcctgtcccctttcctccttccctttttagaaagagccttaattccccgagatggagccttgggaaagaatatgtggcgagagggaccctttcatccctatgcagcttgatgtggtcttgggtggagcaactgaaggagcctgtaatcacccaaagaggatgtggacatgttggttgacaggcgagcagatgccgcagaagcactttttttattagagaagggacagcaccagactattctctgcgtgttgcactgcatagtgaacctgcagacaattcccgtggatgtggaggaagctttccttgcccatgccattaaggcattcactaaggttaattttgattctgaaaatggaccaacagtttacaacaccctgaagaaaatatttaagcacacgctggaagaaaaaagaaaaatgacaaaagatggccctaagcctggcctctagctttcactcgtggtgaatatttcagacctaaagatccagatagtatctctgttcatatgtgaataagttgaagattgtggggctactttttctcatagcactttattttgaatgttgttagtttgtgctgagaatggtcgtccgtatttgaaccaattatttattttaaaatatatttaagctacatttttgttttg

SEQ ID NO: 15283 - DNA, 1525 bp, Homo sapiens
ctttacaaaagattattttattaattcaatttttgcataaaagactgttaaaagaacttgctaacttgaaaacaattttgagtatttatgatctttccaacttgaaaacacctgaaccttatagaacagattgtgtaaagcagccagggccacaggagtgaaagaagatggagacccgccgtctggtcatgatatgagaggcctggacagtgacctcacgaacaaaaagaaatgatcctcttcagtccaaagtgtgtttgtgagactaatgactccatgccctcacatggccactcctcttacagcagacagcttcactccgctccagccccggtactgcggtctgtggtaatttacatgggaatgggatgagatctagtagtttttagatccaacgcaattctgggaaggggttggtaataaaccaaaactcaatctatgcagtatttaaaaaataattggagagttgtgacaacttcgattcctttcaggaggtgctgtcttaagatagaagaaagggatcaagctcttatcttagaaagcacagacacgtttagctcagggtagtgcaattcaatgctaagtggctgctccatgaaatctaagggccgggtaaggggaagaggcccagggacttcttccttgtctgacactctcgggactaggcatttctggcagggtctttacaagttataattacaaaacccatcagataaattctaatcacgactgtgtagttcctccccaaaataattttcctcttagaagtaaaatcaggaaaggggctgagttctgaaaagaaacatccgggctgtggcccaggcccctctgagtgtggacgctgtcccccgtgtccctgtgtttactgccttattgtctcctttgtatgaaagtataatttacgtaattcgtccttggagaatcacagtggtgttcaagaaccttttgaggccatccaagtttttgtccttcagtaccttgaaatcagataatctcaacatccagaaatagcctttgatttgttctttctctgatgtcttgtgtccttgggatcaaagcctctttcactggcaccaaataatgcccagtgaggagttctggccatataatcctttgcgctgaacgtttttgatccaccactatcttcatattcctggatgagctcctggaagcggttataatcgatccatgtccaccattcaccaccaattttaaactttctgtgtgctatcaggaggcaattagagtgttcgtgttcacatgcaatttcatattcggggatcagatccaccaactcgtggacaaactgtaccacttcctcatgccagggcacgtgggccatggtaagactgcttgctgaactttctccgcagtaggtaacgcccttcacttcgatgaagtcaggattccccagggacaccgactgcgcgtaggcctggagctcgtccacgttccatgctttcacgagcgtcagtctgtagacagttcgttgttgcttgactgccaaggcttttaaactgtcaag

SEQ ID NO: 15284 - DNA, 2647 bp, Homo sapiens
tttttttttttttttaacggtaaaactgaaaatatttattagtatgaatcagtgtgtgttaaaccaaaaataacagatacaattaggcattgttgatggaaatgctttactacagaatagaatacatggcggaaaggtcctagctgactgcagcggtgtcttgtatgtgcaagaactgggtccagcccagatggaagctctttacaaaaacacgagaaaaaggagcagtttgcacaacagggcagcaccactggactacagggtctggtttcaacaatgatgttaaaacagtaagctaggatacccagtcggtctgaatacagttcagagctctttaatttattaagctagcttcaccattcaactttgccatgaggcattgcaggaaccagtgagaactggagcccacacaaaaaagctcagtttcagccaccgcatgccaaagtccttgactgtagaggaaatatttcagtcatccaaacctttctcagaaaatgaactcagtttccatttggggcacagcccttattgttagctaaaagttagtttcgggccttcaaccttttagtctgcaaggtaacgtcatattcaactgcctaatgtgccgtttttaaccataaaatggcaagtcaattatgtggcaatgtaaaatgcttgcacaactccactgtcattctcagagatttccattgggaagccatgcctactttatattaacacatggctaggggccaaactcagccagtgaaatggattacatatcggagtaacacatatacaatcatatttacacagatacacactcatgccacacacgaaagaaaaaaaaaagggagaaggaacaaattttggaaaacgatgccaaggatgctacactacatgaaactacatgactttttttagcaacagtaatttccaggcctttacataatattacatggttatggttcaattattagacagccaggaagtaatcccgagccaaaacaaaggaaggttgtaaagcctcattgtagacaaggcctgagcatccacagagaagatacaatgtttatgtgaatcctggtgtgcccaagtgtgatctactctcttcactgactactcctgagtgcctgatgaagaatatatatattatcctctgactggcttgaatagctaagacaatacagaaaggtaacagagtggtttcacaccctcatgtgcttctgaaataaaaccatgggctcattagtgggtagctcactatctgtggcaaagactagacattttatgcaaaacacaaccactgcaaacccagcccaaagatgcaaaactctcagctaggatacttacccctcagctaaaaaacctgaacagctatctagagataaacccaggttctcagggaaaactggatgaggaaaggttacaaaataagcctgcaaagtcagctggaaagaggtcacttcaattttcaactcattttttttttttttttttttacctttggcaaggggtatgatcatttcttggcctgcaagcacaatcatgccaaccattaatgtggacaatgtggaaaaaaccctaaaaatccctgcaaagcccctgtcaagacatccaaatgccgcttgctaacagtttttgaggtacctatttgggagagccaagtggaactcttgaagcaaaataagtgtttcccagccttcacatcctaacactgtcaatgaactctcttaagttgagtgaagtggaagcgtgctgagttactgaagtgccaggtctttaatccaatcagctcacaacctctttcctgacttttgcgatatagattgtcaataaaggttagccgtcccttggaatgctcatggcaaagaaggtaccagctggccctggctagcacacagcatgattaaccatttctgagcaccaatcctaatgtcctttaagaatcacccccctaatataagccctggcaggaaatcagctgcttcttgatcccaactttttatgaaagttagaatggtaatagaatttgaattttcagtaggaatcagttctcttcctttccacactttttcttccttgacttcctttggatacaaacatctttaattgagcagacagggaatctgaaaaggaaggttttcatcggagcccattctcagttccttggcattctagggtcagacctctggttagccctaaagcccttctcctcaagctagaaacataaaaatactttttctgattttgtagttttttggggtctagaattttaaagtgctgacacttcctctggctggctttcctgtaacctattattaattgttattattagaagtttgcccaatgatttagattcaaacattaaatttaattctagttaattctcttcccctagatatgacaccaagagatattctcttagtaaaataatactatgtgcgttaaacttctctaagagaggacgaatgtattcctgaggaggagatgcatgtcaggtggtctcttgaataatgtgtatgtcctgcatctctcaccacttacatagtgattaattaaatcactctttcaaactaggccacccaatcccaaaattatatgcaataatttagtttgatttggtttgtttgggtatatatgaccataacttagaaaaattgttcac

SEQ ID NO: 15285 - DNA, 456 bp, Homo sapiens
gctttttttatcttcttttttgtttaactagagtacatcttacagagggtcacaaagttgcaaaataaatcatttttctttccttgtgacataagatacatatgtataattccagaacatttttaagtgtatagaagttttataaaatgtatagaatgcatttaagtgggtaggtggattgggaataaaaggaaaaagaaaagatgggaaatttctgtaaggatatcagtcacttaggaaaatgaatgcggttttataagagccttcaaggaatattcattagggaaggctcatgggtaggaattgaaatgcctttttgcttgcccctttctggggtgttgttatggtgagctctgaaatacctctcagagtgcccccctctaccccctttttaaattgaggcttaagaaataattcatttaaaacaagacgcagaaagcttgaacttgtatcaaa

SEQ ID NO: 15286 - DNA, 991 bp, Homo sapiens
caggcagaaggggaattaggttgggccttagaaggtccttcaagtgtacatccacgatcccagcagcagacactggcatctggctctgccctaccgtatagatgaggtgacaagctggaaggtcccagggcccttccttggtgcagctctcagggatttctgggtgaagggctaactttgcccctggctatctttgtggggttgcttccctcctaggcctgaggcccagccagcgcccaatggatgacaaaaagaagaaacggagtcccaagccctgcctgggcccagccagcccaggccccaggcacactacggagggtccctgtgcctaccagccacagcggctccttggccctaggacttcctcatctgccatcccccaagcagcggggccaagttcaagagagtaggcaaagagaagtgccgcccagtcctggctggaggtggaagcggctctgcaggcacgcccctgcagcactccttcctgaccgaggtgactgatgtctatgagatggaggggggactcctgaacctgctcaatgatttccactctggccggctgcaggccttcgggaaggaatgctcctttgagcagctggagcacgttcgggagatgcaggagaagctagcccggctgcacttcagcctggatgtgtgtggggaggaggaggacgatgaagaggaagaggatggggtcactgaggggctgccagaggagcagaagaagacaatggctgaccgtaacctggaccagctgcttagcaatctggaagacctcagtaattctatccagaagctgcacctggccgagaacgccgagcctgaggagcagtccgctgcgtaggcgtcccacgcaggcccacactgcccctctcattctcttcaaactgtgactttttacagactcgggcgggtgttctgcggccccccaggtgctatgggggaggggggcgttgaatggaattaaaccagaaagaaaaaaaaaaaaaaa

SEQ ID NO: 15287 - DNA, 2320 bp, Homo sapiens
  misc_feature (1)...(2320): n = a,t,c or g
acgaggggccacttctctgctttggttgccatggaaaatgatggctatggcaaccgaggtgctggtgctaatctcaataccgatgatgatgtcaccatcacatttttgcctctggttgacagtgaaaggaagctactccatgtgcacttcctttctgctcaggagctaggtaatgaggaacagcaagaaaaactgctcagggagtggctggactgctgtgtgacggaggggggagttctggttgccatgcagaagagttctcggcggcgaaatcaccccctggtcactcagatggtagaaaaatggcttgaccgctaccgacagatccggccgtgtacatccctgtctgatggagaggaagatgaggatgatgaagatgaatgaaaaaaaaaatcaaacagcagaagaccaaggcatcagatctgtaatgaccctaaagttagtgtggtgctccaagcagagtcgacatcatggaatgaaccaaatctggcaggatctgctcggggaagtgttttcctgggaccacacacaccttattggagataatggcctctgctgcgtgaggagacagagaactttagttggacttcagtttgtaaaaaaaactaattttattaagacagaactttttttccttccaaattgtaaatctgtctataaatgtaacgcatgtgggttgtgtaagacatggtttaataggaaaagttgtaccagcactctcatataattgagaaaattttttccagcatgggcacttagaaaaagcacatggcaaatggctctttgttcctttcagatattatttcagtagaacctggcattctcctttcaccttaaaagatccatctaagtctcagatctggaaacgttttgtaccgattatccacagcaaaacaaaaataagcttttattttattaataatttcgttcctcttgtgcccaatcaaatcttttaggaacaaactgcaagaaaagctaagaatgttttagagtgaactaaatacagacattgcttacttgttttgaagagggttttggttttggttattgtgtcttttaagttttctgatatgccccctttcaatatttagatatttatttgttgggaagaataccttaaaatgagggttcttattccagattctgggcagtggtctgtgagtagtttttttcctggatgaaaagggagcaagcccacttgtcactaaatgaattgtgtgaaatgtgctcacttggactccatcaacaatgtgctgctcccagattgccatgccagagggtcttcggattcttccatcacctctgctctaagcaaatcttgttagaagggcatgcctttgcttaggcagattgggaataccaattcactacagaataaagattttaaaaatgcaataaggtggcaaatgcattgtatgaagaatttctcagtgtttagtctgagaatttttgcatgttggttaattgtggccattctttaatttaaagttaaaactataatcttaggtagaacaacttttttataagaagtattatttgaccacttcaggtatacattcaatactgggtaaaaatttcagacctatctcaggaacacagaaatatttggtgtcctgataagcactttctagactattgatgtggccaggaatttggaaagacgacacacgcacgcacacacacacacacagttttttccttccctgtgatgaaaaaggctgtgaaaaccttaaagtatttgcttgcttcttgttttgtttagttgataatgaaatgtgtacaacctcaaatttgctgccagaatactaaaaatagaaaaatacccacaaaactgtcatgtctttagttctttccccccgaaaactcagtaaaaaggtgttcccaggatgaaaagatcattttttgctgcatgctaaatcttgcaggaaaaatgattttttagtacgattctgtagaaatgaatctttgatataatgtaaatgctgctgtttgtttcaagtggtgaatgtgttgttaaaaattggctgtttgctttcattttggccaataagtaatcaagtttgtagaaaatgttagcattctgactacttaggcatctgtagtaatttctctatgtataggggataattttttagtggggcagagatcctgttctagttgcctgttaagcaaaatctgccctcccaattggaaaaagccaaagaggattgttagaggggaaaagcctgttggccttgcagtccgccntgcgcccgcgttgtcccgagagtacangttagcantagctctaccgtgtgttgtggnctcggtgagtgttgtt

SEQ ID NO: 15288 - DNA, 1571 bp, Homo sapiens
gacggcttgttgacggaaacgagcccttgacgctgtggcccggaagtggagcggctgtcgcagtgcggctccggcagtggcagcggaggcctgtgtttgcggccttcggcaagcgactgagatggcgagcgcaactgcacctgcagccgcagtccccaccctggcttcgcctttggagcagctccggcacttggcggaggagctgcggttgctcctgcctcgagtgcgggtcggcgaaccagggagaccaccgaggagtttaatcgagagatgttctggagaagactcaatgaggcagctgtgactgtgtcaagggaagccacgactctgaccatagtcttctctcagcttccactgccgtctccacaggaaacccagaagttctgtgaacaagtccatgctgccatcaaggcatttattgcagtgtactatttgcttccaaaggatcaggggatcaccctgagaaagctggtacggggcgccaccctggacatcgtggatgggcatggctcagctcatggaagtactttccgtcactccaactcagagccctgagaacaatgaccttatttcctacaacagtgtctgggttgcgtgccagcagatgcctcagataccaagagataacaaagctgcagctcttttgatgctgaccaagaatgtggattttgtgaaggatgcacatgaagaaatggagcaggctgtggaagaatgtgacccttactctggcctcttgaatgatactgaggagaacaactctgacaaccacaatcatgaggatgatgtgttggggtttcccagcaatcaggacttgtattggtcagaggacgatcaagagctcataatcccatgccttgcgctggtgagagcatccaaagcctgcctgaagaaaattcggatgttagtggcagagaatgggaagaaggatcaggtggcacagctggatgacattgtggatatttctgatgaaatcagccctagtgtggatgatttggctctgagcatatatccacctatgtgtcacctgaccgtgcgaatcaattctgcgaaacttgtatctgttttaaagaaggcacttgaaattacaaaagcaagtcatgtgacccctcagccagaagatagttggatccctttacttattaatgccattgatcattgcatgaatagaatcaaggagctcactcagagtgaacttgaattatgacttttcaggctcatttgtactctcttcccctctcatcgtcatggtcaggctctgatacctgcttttaaaatggagctagaatgcttgctggattgaaagggagtgcctatctatatttagcaagagacactattaccaaagattgttggttaggccagattgacacctatttataaaccatatgcgtatatttttctgtgctatatatgaaaaataattgcatgatttctcattcctgagtcatttctcagagattcctaggaaagctgccttattctctttttgcagtaaagtatgttgttttcattgtaaagatgttgatggtctcaataaaatgctaacttgccagtgattaaaaaaaaaaaaa

SEQ ID NO: 15289 - DNA, 829 bp, Homo sapiens
  misc_feature (1)...(829): n = a,t,c or g
gggttttgctctagtgtttgggtttcttcgcggctgctcaagatgaaccgactcttcgggaaagcgaaacccaaggctccgccgcccagcctgactgactgcattggcacggtggacagtagagcagaatccattgacaagaagatttctcgattggatgctgagctagtgaagtataaggatcagatcaagaagatgagagagggtcctgcaaagaatatggtcaagcagaaagccttgcgagttttaaagcaaaagaggatgtatgagcagcagcgggacaatcttgcccaacagtcattcaacatggaacaagccaattataccatcccagtctttgaaggacaccaagaccacggttgatgctatgaaactgggagtaaaggaaatgaagaaggcatacaagcaagtgaagatcgaccagattgaggatttacaagaccagctagaggatatgatggaagatgcaaatgacatccaagaagcactgagtcgcagttatggcaccccagaactggatgaagatgatttagaagcagagttggatgcactaggtgatgagcttctggctgatgaagacagttcttatttggatgaggcagcatctgcacctgcaattccagaaggtgttcccactgatacaaaaaacaaggatggagttctggtggatgaatttggattgccacagatccctgcttcatagatttgcatcattcaagcatatcttgtaaaacaaacacatattatgggactaggaaatatttatctttccaaatttgccataacagatttaggttcttccnttctttgaggaagttaattacaatgc

SEQ ID NO: 15290 - DNA, 1180 bp, Homo sapiens
accaattcccaaaaaactttatttattgtttcaagtggcaaaatgtcattggtctctgtggggtacctggcggggcagacggagacctggggtgaggcagggatacagtcccacccattataaaaatcaaaggcttttataaaaaatgctataaattggtatcaaaagaaaacccaagggaggctggaggaggaagcagagagggagagggaaggaggagaggaagggacaaaaccttcaaccactagtgatgaaatccagggaagggaaggtgtggggggagttcggagggtgatacaaagtgcataaatgtgcctccccagacgctcctcagaggtggaggggacagaggctgcagcctggggcatggtggggctccagccgtctcctcacccagggaccccacaggaatgggcactgcctgagactgcccaggtgggaagaacctcagtgacttctcagaccttcttcttcttcagtttcagggcttgaagccagttgggcgacgatccttctgaccctgaggatttctctggcttgggaggtaacgtgaggggctttcccagtcctgggaccttgcaggatttcgaacgctggaccgcggactccttctggctcgacttgctctcagccagctctccctcctcagctgagcgattccgggggcgcagcttggccttcagggctgaggggctcaggcccaggaaagaggttgactttcagccccttggtgcccaacgacatccgtgtccggcggctctgaggttcctccactacctcttcatctgaagatggcacccgagatgcccgtggctctgtagagtcctggaacaggtgtgcatccgagtctgctgcctccgacaggcccaaggtacccccaggccgaatgaccggggcccggtgcccacgcttgcgccccaagttggcacggctccgatacatggcactgtcgaggatctcggtgtcctcaatgaaggagaagtcctgactgggggatctggcaggagggccttgggagggtcgccgagaagtctgtgctggcccctgatcgctccacctggctgctgaagagccccaggtgccatccacgtcttctgtctggctggcctcaccatcaggctgcggcctccaggagggtggagagtccctgccaggctccagcacctcctcttgggcagcc

SEQ ID NO: 15291 - DNA, 512 bp, Homo sapiens
ggatgtttacaaccccagcaccggggtcttcacggctccttatgatgggcgctacctgatcacggccaccctcacccccgagagagacgcctacgtggaagcagtgctgtcggtctccaacgccagcgtggcccagctgcataccgctgggtacaggagagagttcctggaataccaccgccctacaggagctttgcatacctgcgggggcccgggggcattccacctcatcgtgcacctgaaggcgggagatgcagtcaacgtcgtggtgactgggggcaagctggctcacacagactttgatgaaatgtactccacatttagtggggttttcttatatcctttcctttcccacctctaaggtggctggggagatgtcaggggaaagatagatagttgtaaaaactctaaagctttaatatattcggtttgtatgtaatggaagcacggggctagagtttccacataggccccaacataaaggccttccctcgctgttgaggccaccatgc

SEQ ID NO: 15292 - DNA, 9019 bp, Homo sapiens
cgctgctgggcggcggcagggtggcggacggagcgggggaccggggagcggcggccgcgaggaggttatgtttgtgtttggggttgtcaagtgaaggagggatcccaggcgccgccgccgccgccgcgggggtcgcgagatcccgagccgcggccgccgccatcagcagcgcagtccagggccggctgcagcggcagctccgccgggcgtcctggcagcagcacatggattaattgatgtatgttgagtttatggagctgccttttggtggcttgctttatctgcagtttttaagaagaaaaagaaggccctgagtcaaagaagatgcctcgaactaaacaaattcatcccagaaatctaagagacaaaattgaagaagcacaaaaagaacttaatggggcagaagtttcaaaaaaagaaatcttacaggctggtgttaaaggaacttcggaatcccttaaaggtgtgaaacgcaaaaagatcgtagctgagaatcacctgaaaaaaataccaaaatccccactgagaaatcctcttcaggcaaaacataaacaaaatacagaagagtcatctttcgccgttcttcatagtgcttcggagtctcacaagaaacagaattatattcctgtaaaaaatgggaagcagtttaccaaacaaaatggagaaacacctggaataattgctgaagcctcaaaatctgaagaatctggtctccccaaagaagcccttgtttctgcagcaaccatctgaactgcgtagatggagatccgaaggcgctgatcctgccaaattcagtgacctcgatgaacaatgtgactcaagttccttgtcaagtaaaaccaggactgacaatagcgaatgcatctcttctcattgtggcactacgtccccctcctatacaaacactgcattcgatgtcttactgaaagcaatggagccagaactgagcaccttgtcacaaaagggctcaccttgtgcaattaagacagaaaaactgaggccaaataaaactgcacgttcccctcccaaattaaaaaacagttcaatggatgccccaaatcagacttcacaggaattggttgctgaatcacagtcttcttgtacctcatacacagtccatatgtctgctgctcagaagaatgagcaaggggcaatgcagtcagcttctcatttgtatcatcaacatgaacactttgttcccaaatccaaccaacataatcaacagcttccggggtgttcaggtttcacaggatcactgacaaatctgcaaaatcaagagaatgccaaacttgaacaggtttataatatagcagtgacatcatctgtaggcctaacttcaccttccagtagatctcaggttactcctcaaaaccagcaaatggattctgcttcacctttgtcaataagtccggctaattctacacagtcgccccccatgccaatctataattcaactcatgttgcctctgttgttaatcaaagcgtagagcaaatgtgcaatcttcttctgaaagatcagaagccaaaaaaacaaggaaaatatatttgtgagtattgcaatagagcatgtgcaaagcctagtgtgcttttaaagcatatccgctcccacactggagagcgaccctatccctgtgtgacttgtggattttcatttaagactaaaagtaatctgtataagcacaagaaatcccacgcacatactatcaaactgggtcttgtcttgcaaccagatgctggtggcttgttcttgtcccacgagtcccccaaagcacttagtattcattcagacgtagaagacagtggggagagcgaggaggaaggcgccactgatgagagacagcatgacctgggcgccatggagctgcagaatgtgcacataataaagaggatgtcaaatgctgaaactttactaaaatcaagcttcactccaagcagtccagaaaatgtgataggtgactttttgctacaggacagatctgcagaatcacaagctgtgacagagttaccgaaagttgtggtccaccatgtcactgtgtcccccttaagaactgacagtccaaaggccatggatcccaagcctgaactttctagtgcacaaaagcagaaggaccttcaggtgacaaacgtacagccactttcagccaacatgtcccagggtggagtctccaggttggagactaatgagaattcccaccagaaaggcgacatgaatccactggaaggaaagcaagactctcacgtaggaacggtacacgcccagctacaaaggcagcaggctaccgattactcccaagagcagcaaggaaagctcctgagtcctcgaagtttaggaagtacggattctggttacttttcacgttctgaaagtgccgatcaaacagtgagtccaccaactccctttgccagaaggttcccagcacagaacaagactctggaaggagtaacggaccctctgcagctcttgtcaccacgtcaacaccctctgctttgccacagggaaaaggcattgcttttaccaggtcagatgcgcccacctttggccacaaaaacacttgaggagcggatatcgaagcttatctcagacaatgaagctttggtagatgacaagcaactggatagtgtgaagccgcggagaacctcactgtcaagacgaggaagcattgattcccccaaatcatacatatttaaagattctttccagtttgatttaaaaccagtgggacggagaacaagttcaagctctgatataccgaagtcacctttcacccctactgaaaaatcaaagcaagtgtttcttctgtctgtaccttcacttgactgtttacctatcacaagaagtaattccatgccgaccacaggttattcagcagtacctgcaaatataatacctcctcctcatccactaagaggaagtcagtcatttgatgacaaaattggcgctttctatgatgatgtctttgtatcgggacctaacgctcctgtgccccagagtgggcatccccgtacacttgtgagacaagcagccatagaagactcttcagcaaatgaaagtcatgttcttggtactggacagtccctggatgagagccaccaaggatgccatgctgctggtgaagccatgtcagtgaggagcaaggcactggcacaaggcccacatatagaaaaaaagaagtctcatcaagggcgagggacaatgtttgagtgtgaaacttgtagaaacaggtataggaaactggaaaattttgaaaatcataagaaattttactgttctgagttacatggaccaaaaacaaaggtagccatgagagaacctgagcacagccctgtgcccggcggtctgcaacctcagattctacactacagagtcgctgggtcctccggcatctgggaacagacgccccagataagaaaaaggaggaaaatgaaaagtgttggggatgatgaagaacttcagcaaaatgaaagtggaacatctccaaaaagttctgaaggccttcagtttcagaatgctctgggctgtaatcccagtttgcctaaacatagtgttaccataagaagtgaccagcagcataaaaatatacagttgcaaaactcccatattcaccttgttgccaggggccctgagcagaccatggatcccaagctgtcgaccatcatggaacaacagataagttcagcagcccaggacaagatagaactgcagagacacggaactggaatctctgtcatccagcacaccaactccctgagcaggcccaactcatttgacaagcctgagccttttgaaagagcctccccagtttctttccaggagctgaatagaacggggaattccgggtctctaaaagtgataggaatctcccaagaggaaagtcacccttctcgggacgggtctcatcctcaccagcttgcactatcagacgctctcagaggagaacttcaggaaagctccagaaagagtccaagtgaacgacatgtgttaggacagccctcaagacttatccggcagcacaacatccaagttccagagattttggtcacagaagaaccagatcgagacctggaagctcaatgccatgatcaagaaaagtcagagaagttcagttggccccagcgtagtgaaaccttgtcaaaattgccaacagagaaactgccacccaaaaagaaaaggctccgtctggctgagatagaacattcctcaacagaatcgagctttgattccactctctccaggagtctaagtagggagagcagtttatctcacacttcaagtttctcagcctctttagacatagaggacgtttctaaaacggaggcttcccccaaaatcgattttctaaataaagccgagtttcttatgattccagctggcttgaatactctgaatgttcctggatgtcaccgggaaatgaggcgtactgcatcagaacagattaattgcacgcaaacgtcaatggaggtctctgatctcagaagcaaatcattcgattgtggaagcatcaccccaccccagacaacaccacttactgaattgcagcctccatcttcaccttctcgagtgggagtgactgggcatgtgcctctcttagaaagaaggagaggcccactggtacggcaaatatctttgggcatagccccagatagtcatctgtctcctgtacacccaacatctttccaaaatactgctcttcccagtgtgaatgcagtgccatatcaggggcctcagctcactagtacatctttagctgagttttctgcaaatactttgcactctcagactcaggttaaggatctgcaggcagaaacatcaaactccagctctaccaacgtttttcctgttcaacagctctgtgatatcaatttgttaaatcaaatccatgcaccgcctagccaccagagcacacagctatctctgcaagtgtctacgcagggtagcaagccagataaaaattctgttttatctgggtcttctaaaagtgaggattgctttgctcccaaataccaattgcattgtcaggttttcacttcaggcccatcttgctcttctaatcctgtgcattctttgccaaatcaagttatttcagatccagttggaacagatcattgtgtgacatcagcaacattaccaaccaaattaattgacagcatgtctaattcgcatcctctgctaccaccagagctcaggccccttggaagtcaggtgcagaaggtgccatcatcattcatgctgcccatacgcctgcagagtagtgttcctgcttactgttttgctacactcacatccctgccacaaatactagtgacccaagatctgcccaatcagccaatttgccagactaatcatagtgtagtgccaatcagtgaagaacaaaattctgtgccaacattacaaaaaggtcatcagaatgctttgccaaacccagagaaggaatttctatgtgaaaatgttttttcagagatgagccaaaattcttctctatcagaatccttgcccataactcagaaaatatctgttggtcgactttcccctcaacaagaatcttcagcttcgagtaaaaggatgctttccccagcaaatagtttagacattgccatggaaaagcaccagaagcgggccaaagatgaaaatggagctgtttgtgcaacagacgtgagacctttagaggctttgagttcgagagttaatgaagctagtaaacagaagaagcctattttagtgagacaggtttgtactacagagcccctggacggtgtgatgttggaaaaggatgttttttctcaacctgaaattagtaatgaggctgttaatttgacaaatgttttaccagctgataattcatcaacaggatgctctaaatttgtcgttatagaacctataagtgaattgcaggaatttgaaaacatcaagtcatccacatcattaactcttacagttcgaagttcacctgctccttcagaaaatactcatctttctcctttgaaatgtacagacaataaccaagaaaggaagtctccaggggttaaaaatcaaggtgacaaagtgaacatccaagagcaaagtcaacggccagtcacttctctttcattgtttaacatcaaggacacccagcagctggctttccctagcctgaaaactacaaccaactttacatggtgttatctcttaaggcagaagtcgttgcatttgcctcagaaggaccagaaaacttcagcctatactgattggacagtaagcgccagtaatccaaatccactcggtttgcccacaaaagttgcacttgctctccttaattcaaaacagaacactggaaaatcactatactgtcaagcaataactacccattccaagtcagacttattggtctattcaagcaagtggaaaagcagcttaagcaagagagcattaggtaatcaaaagtccacagtagttgaattcagcaataaagatgcctctgaaattaacagtgagcaagataaagaaaattccttaatcaaaagtgaaccaagaagaattaaaatatttgatggaggatataagtcaaatgaagagtatgtatatatccgaggcaggggaagaggaaaatacatttgtgaagaatgtggaatacgttgtaagaaacctagcatgttaaagaaacacatacgaacccatacagatgtccgcccctaccactgcacttactgtaacttctcctttaagactaaaggaaatctgacaaaacacatgaagtccaaggcacatagcaagaaatgtgtggatttaggcatctcagtaggtttaatagatgaacaggatacagaagaatcagatgaaaaacagagattcagttatgagcgatctggatatgatcttgaagaatctgatggcccagatgaggatgacaatgaaaatgaagacgatgatgaggacagccaggctgaatcagtcctgtcagccacaccctcagtcacagctagcccgcagcaccttccatctagaagtagccttcaggaccctgtgagtactgacgaggatgtcaggatcaccgattgcttttctggggtacacacggacccaatggacgttctgcccagggcgctgctcaccagaatgactgtcctgagcacagcacagtctgactacaataggaagacactctctccggggaaggccaggcagcgtgctgcgagagatgaaaacgacacaattccgtctgtagacacttccaggtccccgtgtcatcagatgtctgtggactaccctgagtcagaagaaattctgagaagttctatggcaggaaaagctgttgctataacacagagcccatcatctgtaagacttcctcctgctgcagctgagcacagcccccagacagcagcggggatgccttctgtggcctcaccacatcctgaccctcaagaacagaagcagcaaataactctacagccgactccaggcttgccttctccccacactcatttgtttagccaccttcctttgcattcccagcagcaatcgaggacaccttataatatggttccagttggggggatccatgtggtacctgctggcctcacatactccacgtttgtgccccttcaggctggaccagtgcagctcacgatccctgctgtcagtgtcgttcacagaactttgggtactcataggaatacggtcacagaagtgtctggcactacaaaccctgctggagtggctgaattaagcagtgttgtgccatgtattcctatcggccaaatccgcgtgccaggccttcagaacctaagtaccccaggcttgcagtcactcccctcgttaagcatggaaaccgtcaatattgtaggcctagccaatacaaatatggccccacaagtccatccaccaggactggctctgaatgctgtcggactgcaggttctgactgcaaacccttcatcacaaagcagccccgcccctcaggcacacattccaggtctccagatcttgaacatagcattgcccaccttaatcccctcagtcagtcaagtagccgttgatgcacagggagctccagaaatgccagcttcccaaagcaaagcatgcgagacacaacccaagcagacttctgtagccagcgcaaaccaggtcagcaggaccgagtctcctcaggggttacctacagtccagcgggaaaatgcaaaaaaagttctgaatccacctgcccctgcaggtgaccatgcaaggcttgatggcctgagtaaaatggacacagagaaggctgcctcggcaaatcacgtgaagcccaagcctgaactcacttccatacagggccaaccagcgtccacgtcacaacctctgctgaaggcacattctgaagtttttacaaagccctcaggccagcagactctctctccagacagacaggttcccaggcccacagcactaccgcggaggcagcccactgtgcacttcagcgacgtgagcagcgatgatgacgaggacaggcttgtgatagcaacctgatggattttattttttatttgctttttttttatataacacttaaaggtttctttgaaaaccctcctttccttaaagcacatttttctgacataaactcatgactaatctttgtgcaatcatgaacttttgaccaataattgttgttttgtgtcagctccagccatttttgtacatgttgtatagacaattgtgccttttaggagctttatgtttagaaactgtacagattgttgaatatctatatacataaaaatatattatatatgtatatgaaaaccaggtagttatttgtgtttagtaaggaaaacctgtcaaataaatcaaatgattaaattatatgttccactgttgaatataaattttatggctatggggcagagtttctgtgtataaattagtatgtaaactccatatttattgtattcatattagtctttgaaaatgggtctgtcctccttgtgtaagacagtaactttacacttcagacagattttctgtgttatgaaatgtttcagtaaaatattgtttactgactttaaa

SEQ ID NO: 15293 - DNA, 789 bp, Homo sapiens
gtttggattgcagaagaatttgtaagatgaatacttttttttaatgtgcattattaaaaatattgagtgaagctaattgtcaactttattaaggattactttgtctgcccaccacctagtgtaaaataaaatcaagtaatacaatcttaactgttgtggccttttttgatcataagagttggtactgtttaaggccaaaagtaacagtttttatagatcttttagtttcaactcagcttttacaataaaaaggatttgtattgcattgagtttataaacttttggtttgtgaacttcatatttgatcttttctcttccaatcaaatgtctaggcttgtttgacttccacccccaatggtttttcactctttttatttacttcattttcctttaataacttaatctcttcatgttcagtttttacttcactctttattcttttctttgattatggtatgcttatttggaaagtcagtgaaactgtcaaaatgttatctcaataagatacttatatgagaactacaatcaccgaatctactgtattcaatattagcagatctaatttgataaacaacatggcttgtgtgaaaactgagcaggtgtttgtttacccatagtgttctgtgtagttattgcttagtctgcagaaaataatgacttagatgagatgtctgacttgctttcacttattaaacatgttcaccatgggatgatgtctgtaacatcagatattgttcaactagactaggatttaataaaaattgtgaaagcttaaaaaaaaaagtcgac

SEQ ID NO: 15294 - DNA, 447 bp, Homo sapiens
ttttttagttttgtaaggtggaggcttagatgattgattttagaaccttctcgttttctaatacatgcatccaatgctataaaaattctctctaatcactgctttaactgtatcccacaaattctgataagttgtgtttgcacttttatttagttcaaaatattaaaaaatttatcttgagatttcttctttgacccagagttatttagaagtgtgctgtttaatctccaagtatcggggattttccagctttcgttagtgacttctagttgaattccaaagcacacaccatatgatttctagtcttttaaattcggttaaggtgtgttctattcgccagaatataatttatcttggtgagtgttccatggtgagcttgagaagaatgtgtattctgctgctgttacatgtagcagtctactgatgttcatcatatccagttgattc

SEQ ID NO: 15295 - DNA, 480 bp, Homo sapiens
gcacagatttttcttgcattagggcacagtgttaaattttttggaggtaaatatactatttataatccacctatatatagttaggaggggggtatgtgtctcaggcttttctgaagttgccaagacttaaagaaataatccatctgcatcccaagtcctattttataaggatattcataaaaattccatggtgaatccttgtctgaaataggtcctcccttcccagtttctgtgtaagtctttgcatttaagacatccaatcaataatgaaggaaatttttttctgaatgtaggtttgagtgaggggcacctctgctttcccttagcaaccctcatatacctccctgcaccgttacgctgtgatggcaactggggatagaaaaaaaatggggaaagacaggaatcctaaaagggagagttattacgtgccacaagccctgtattctcaacagggatgcaaattggttcttcagtaaggat

SEQ ID NO: 15296 - DNA, 165 bp, Homo sapiens
gtgaaaatccatttaaagaggagctcactaattaccagtacttactgctgagcctggaatcattcgtatataccccagagttcattcattccagacacagtactagataaggagactcctatgagccaaaaacctaactctgaatagactgtgactgtcataatc

SEQ ID NO: 15297 - DNA, 1905 bp, Homo sapiens
gctcgactttttatttttttttttcatttcataaataatgtactttattttattgcatatggctattaaggagggcatccatgatcaatacagactaaatacaatgcactattctagtccagtttattctcgtctccagcagcatcacattgacccctatatacagcgtgtacagtggaagacagagcaagataagttaagtctcttgtcatatcacaatagcaagaaatatatttaacatcttgatatccagaaacaatacgtacccaaaaagaaaacactgtttaataactgttaaagtttatatagcaaaaaatattttaaatttaaggtaagtcaggcaaaatgtacaaagacccaatatacattgtgaagttttagcaaacataacatttatacattttggttccattctgtaaactaaattaaaaatgtaaatattgcatatgcctttttgtgaaatgtacaggatagaggaaaatttagcatattatcatctgtgtattttgcttgttttaagctgcagtatgaacacgaaccatctgtatagtgtcatgactactctacggatagagggcgagttaaatatgcgtcaatacaacgtttcagcagggtccatattcagtccctatcgtacctggggggagttacaaagcaaataccacccattgatgcctattcccaaaactaaataaaaacttcaggatgttttatacatcttaataaagtatatcatacactgaaattgaccttccagctaacattatatggcctatgcactgctgtgatgtataatttcagaaaagtaaaacctaaaaatgttcagggagatcactttacattcaactttgtcttgcaatacaatcctctgttctaaagttcagcacggaagcaggaagacttttggcattgcccattaaatatatttttaagacattggaattttttgggtccttccctctaaaaaagccctcatttttattaaatgcattaattcctatagcgatagatatcctattatatatttatatatatttttctaaaaacaaaacaaaacaaaaccaacaacttacatctccaatgaattagtgtaacctctccatgactatcagagaagataggcactggggaagccccccacgggaggagaggtcgacagccctccaatcaagtgtcgagggagcagaaaacggcagaacattctgccggtcaagttcagcagttttaggtaacatctgcgagaactgccacacactggtattttcagaatactgaaaacataaaacaagggtagtcttgtccggaattttttcgacaagtaacatgtactgcgagattgcttttcttctttttctttttccatcaataacataggggctggaatgcctctttttatcagtttctttctttccttttttttttttttttttttgtttttttttgttcagggcagcctcactggttgacataataacattttattaaagataatacgttttttaaaaatcaaatctgccaaacccggaccaccctggaattgctagcacgcctacagggatttttggttacagaaaggcatgcccaagattcaggagagcagagacatctgagcttgtaaatagaataaaaggcgtttgcaatgtgaagtacctacataaacatctacatcgagaagattaaacaagtctgttaaaggtaaaaagagatattcatccccttcccaaagcccttccctcccacctcccactacccaatacagttgattttcaaaagtaggttgcttcagttacatataataattattatttagtaatccgtcttcaaagtccaatccccaaattttcacttccattgagaaatggtcagtccccacacttgggcttcggtgttgggacgtaaacatct

SEQ ID NO: 15298 - DNA, 818 bp, Homo sapiens
tttttttttttaatgttaaaaatatttattttttttcctaaaagatcacacaaaagttgggaagagaaggatgtcaattagactacatcaaaatctgggcagagggaggacaaagagctgcctaaagaaactggtagctggagcaaactgcagagatcaagatgaccctagtcaacggaaccagcagcccaggtcagccacattcaggagcaccaccgaggcacggcagggagagcaaagttgctggccccaatcattcctccttttcagggcaggagaggcagaagctcactctttagacatgttcttgatggtcttgtgctctttcatggccttctcccaatcgctgccattgaattcctcagtgaccatactccgcacagtgccctcatccaggcagtggggggcaattccgaagcctccggggtttgatcgtggagtatagaagctctgaacgccacatctcttacagaaggtatgctgggctttgtgagtattgaacgtgtaagtcgttatgtgctcagctcccttcaggagcttgaagcgagaagctggaacaatgaagtgtctattctgcttcttcttgcaaatgctgcaacatctctggaattaaactgaagtcccctcttttcaggccacctttgaaaaagttctaatttagcacagaatcctctcacaagttattccacagtgcttcttttccaatctggactctattgttagtagcctggtcagttctccatttgagtaattccatcgtatgtgcttattattcatatataattccggtacttgcagtcaaatatatgcaagtctgc

SEQ ID NO: 15299 - DNA, 390 bp, Homo sapiens
tagcccatttatgcctagtgttccatcattggaactctaagcatgtgggagttatttatatcctactgctcaaggtcatcgccaaggtctgattgcaaaaattcaaaaaattgcaacctcagacataaatgggttaattgccatttgttttgttttctaatggaaaataagaactgatttcctcgctctgttaggtagcaatctgatgtaccctttctctccacccaccacaccatatataagcaaaactggtctctgtttttccaccaacacttatttctcatttgtggattgagctaaaaacacacacaattaaaaaagaaacataaagccaaccctttttctctgcaggtagtaattaaggtgatttgttagttagttgggtttttc

SEQ ID NO: 15300 - DNA, 1054 bp, Homo sapiens
ttttttttttttaaagtttatcatttatttccaatacattaggataaaaacccactttatgcaactgtaccctttaattcatttcttctgaagaaaagtacaaaagaccagactaaaattgagacaagcatttaaaggaaaatcctttgactcagagtccaaaaccgaactgtaaatggttcattttaccaaaagaattagtttttgtacaaaatataaagaattctacactataaacaaagacggctgtatatgtaattaaattagaattctagtatctgcttttcctctaattcttctggagtacaaacatatttgcaagtcagaaatctaatattctcaatggacagactgtcttagaataagcttttacccttaagatatctggaaagatagtactcattctttcccttggctcaaagtccaatatatcagtaagttttaatttagtttacaaaactctgccatattaacatgaagagcacactaatgcttaatgtttaagcattatcttttaggaagtaatacaacacagagctcaacaccgaatctaaaaggtcacaatctaagtcattattaattcagaaaacttcagcaacttctatctttattgaaaaagaccaaaccaatcccttatctcctactatatcattactctattttcatggcccttctatcaaagaaacagcttaaaataaaacttggttagagttaagtcatagaaaatagttctctagcactagctgaagttcagacttgatcaggaaagcaacttctatacagtaatgattttctgactcagtgtttaagatagtattaacctgacttttatctcttttaacatttgaaatctttgttatctaaaagtctttcccaatagaattataaccatgatagttttaaaggagacaatatattaaaagttgagctggaaccacatagtcctttaatatgattagccagttatccaagtatcaataacgttaatctccttttaaatgaaaacaatgaaattttatgagcttaactgaaatgtcttaatttagaacttctc

SEQ ID NO: 15301 - DNA, 998 bp, Homo sapiens
ggaagactggatggctgtgtcctcaaggcagtcccctcccatccccattcccaaagtcagaaagtgaagccagatctcaagggctgatacctgaggcaaggagagctaggggagagaaattggggctgagtggaagcagatgcctgcacaagccaagtgtgtcttattgatctgtacaagctgatagaaggaccatctgctgaaatccagggctcctgagttggtgggtttgcttgtgaagcttctaggacaaggcgcagccagatggaagggagagggtccagggcttcctaaatgcagccgcatcacctgtcaactcgctgcagtttcagagacagtggaagctgctctttacctcaaaagcacaaagcagaattggcaacttcacttgtctcaagagctccaagatcctttggtctcgtgtcctttggcaccccgtaactggactggggacaaatttgttacgtgtttccaaggctacagacatggcgccatcctcacaggcctagctcatgtcatggatcaggtgctttgctggggggatacaatgacccatgtggtctgcgtcttctgccattggcttgaactgggcaccccctgaagtctccatctcagctgtatattctagtccaaattttcctggctcccctgctccctcccaggtcctgcacactgtctttttgccaacacctcagccctgtttgctatttcatgtctgcatggtacgagacaccccttcacggcatacactgccatggtatgtacatatgcatccacgtgtgtgtatgtgtagcatgtagctcattctgctcagcctctggcgccgttccacattgctccagccccattgctgtcactgtcgtcccagatgtccttgccatggccacagacaatctgccgtctcctggaaacgctggggctgcccttcagagagctggcagccccagcagtcagggcctgctttgcagaatagaatgtgaacccaactcctgatggcc

SEQ ID NO: 15302 - DNA, 3821 bp, Homo sapiens
gagctccgttgggagtcccatgtttctttatggcataatgggtgagaacacagacttggaagccaaaccacctgaatttgaaccccagttccatttaccaactgtcaaaagcttaggctttgattctaagcctgtttcctcaactgctgttctaaagattaaataggctaatattcataaggcaactgggacagtggcttgtgtgtatagcaaccattatataagtgaattatctactgagcaccacagcacttcttcactccatggtgtggtgaccagaatggagatgagacagagaactgcaggttctgcttcgagtttaagttaggatttcccttgaccaatgagacctgacttggaggagtcctggcctcattccattaccccaaacaccctctagtctctagatgaacagatcctgaatgtccaggccccacgtggcctgttctaaggcctgagatggaattggatacaggacacatccagccttgagatcttttgctaagtgtgacacagtgcccccagccctgtgctcatgttcatgcctagggaaaggcttctatcaaaagagttgaacttcttcccactggggatggaagaccatttcctcccttaaaccttggctctccctgcttccttcaggccaccaacaacacatgtgcaggatatgaaattgctgaggcatcactgctttcctacttcccttccaagtctcagctcccttattttaaaaaatatttggcctcaatgatcatttctcaacaattcctcaccgcaggagcctctgaagctcccaccaggccagctctcctcccacaacagcttcccacagcatgaagatctccgtggctgccattcccttcttcctcctcatcaccatcgccctagggaccaagactgaatcctcctcacgtgagtgcaatgccttgtcttccttccaacctagagcctgcagggaaataagcaggagtgaggttggggctcaggggaagaccaggagcagggactcagaaaggagggctggtatcttcttgaaattgtgtgtatagcaacattatataaatgaattatctactgagcaccacagcacttcaccccatggtgtggtgagcaggatggagatgagacttaggactgtaggttctgcttaagagtttaagttgggatcttccagccttgaccaatgagacttgacttgggagactccaggcttcattccactaccccaaatgccctctagtctccaaataaacagatcctgaatctccaggcctcacatggccttgatctcttatcattgccccccaggaccagtccccccttgccctcaaggacatggagtgagaccagcctgcctctctactccctcaatttctctctctttgccgctaagcaaaagagtggcccaccccatttggggtatatttcctcagggagattaggagcagtgtcttgagcccctcaagggcatttttctattggcctcctgaggtttgggcccagcctgcttccagcgtcacctgtgcccagtgagtgcagcattgcttgggtatgggctggggggaaacacgacagtgtggggtccatcctaggcccccttttctcagctgatttcttagaataagctgcctttagagataaccaaaactatttatcactcttccattttacctactctccttttcagaaactggggggaaaccgaaggttgttaaaatacagctaaagttggtgggtatgtgcacagtttgacttgccctctccgatgtcatttgtcagctcagaggaacaaggtgggagagtataggagctctgactgggtctcaggaaacaggggccccttatgccgttctttggatcgtgaggatgctgcctggaatggagctggaaaacaggatgagacccttccacccagacatctggccaccctcagtgacctctgaggccattgtgatgcacatccatgattctatgaagcagggtcacataacatgcacacacctgatttctccactccataaccacaacatgtgcctgtttgtacagggctcttggcctacaatgtccttcctgctacctctataattcaagcttggggtggctgctgtcaccttgcttctcctataaaagccatgaaacttctcaatcagaaaatagatgaaaaaatcacccaatccagtgatttttaaaactttttagaccacaaaaccttttcttcaagcaatatcttccacagaggcccaatatgtaaaacagaaaaaatgggttgagtagggtacaagacaccactctcaaatgcagcaaggcctccacaatagtccctgaggcccccagagctcagtgtaaaaaccactgatgcagtccaagggcctcatttacagaggagggaacagggggaaagtaaaatggccacagtacacaggaagcacaggcaaggttaggttaggatttgggtgccctgactctgtggcctttgtccttggggcttgctgtgggcatcctgctctctctgcaggttgtcggttcaatggggacatgggcagggtggagcactaggaggggctgggtttgcattcccaaatggcatgtctccaaatccctattgggatttcttccaaatattcctcctatttggagcacctttcccgaataaggcatgaaggctgcatgatattggccaagtccctagccttctctgccagtcggcccccagagatggtgtaagaagatctgagtgtgctgctcttcaatcctggagttgaaagtcatccaccagtctttccaagaggggttgaagaaaaggaggaagggtgattgatgatgagggaggagaaaaagaagagcccaggagtaccatggagaaggagaagagaagatgaggaaagcctactctcccctccaagttctgaggggctgtctcctccttccttccctcctccatgccctcagcttgcaggagcagccaatggtatggcctttaacaaggggcccctcctcagcatctgatgctctctcctcagggggaccttaccacccctcagagtgctgcttcacctacactacctacaagatcccgcgtcagcggattatggattactatgagaccaacagccagtgctccaagcccggaattgtgtaggtggtacacacacatcacactggggggagagggagccagcagggcctcctggagggaagcagggagtggtggtggaatggggacccccagcgtacctcccaggtgtgactacatggggagaggcagctgaggggcaatctgagcgctttctggctggagcctgcaggagccatggggaaactgaccccatggatggggagatgacagagaagggagaagaaggcaagagggcacttcctcagggggacacagagactagatgggtctaggggtcctaggaaccgaagagtatgtctcagagaggagactggctctaagctgcctctgtggaagaaaggaaaagcagtataggtcaggtggggaatttaggagggagggaagatgggctgtctcttccggccactgggcccctcggtttgtgatccttctccctcttgctccacagcttcatcaccaaaaggggccattccgtctgtaccaaccccagtgacaagtgggtccaggactatatcaaggacatgaaggagaactgagtgacccagaaggggtggcgaaggcacagctcagagacataaagagaagatgccaaggccccctcctccacccaccgctaactctcagccccagtcaccctcttggagcttccctgctttgaattaaagaccactcatgctcttcaaaa

SEQ ID NO: 15303 - DNA, 915 bp, Homo sapiens
ctaattgggcccccagccttgctgcctctctacttccagtggtatattttctattttgttatccagcgaaagaagtgggtggacttggcctggatgattaccttctacgtccgcttcttcctcacttatgtgccactattggggctgaaagccttcctggggccttttcttcatagtcaggttcctgggaaagcaactggtttgtgtgggtgacacagatgaaccatattcccatgcacattgatcatgaccggaacatggactggggtttccacccagctccaggccacatgcaatgtccacaagtctgccttcaatgactggttcagtggacacctcaacttccagattgagcaccatctttttcccacgatgcctcgacacaattaccacaaagtggctcccctggtgcagtccttgtgtgccaagcatggcatagagtaccagtccaagcccctgctgtcagccttcgccgacatcatccactcactaaaggagtcagggcagctctggctagatgcctatcttcaccaataacaacagccaccctgcccagtctggaagaagaggaggaagactctggagccaaggcagaggggagcttgagggacaatgccactatagtttaatactcagagggggttgggtttggggacataaagcctctgactcaaactcctcccttttatcttctagccacagttctaagacccaaagtggggggtggacacagaagtccctaggagggaaggagctgttggggcaggggtgtaaattatttcctttttctagtttggcacatgcaggtagttggtgaacagagagaaccaggagggtaacagaagaggagggacctactgaacccagagtcaggaagagatttaacactaaaattccactcatgccgggcgtggt

SEQ ID NO: 15304 - DNA, 1262 bp, Homo sapiens
ttacatttggaaaaataaaactttattaaatcaaatgaatgagtatgtctgtttcctaagaaagacaatgataaagaatttggtggaaggtataataggggtttgttgactttgcttttagcctcatggtagttggtagagagcatgattagcttttttctgtatgtgactgcttcttcattgctgcagcttcagttttgaattgatgtctggactgccagcgggtctcattattccagacacggccaaaagagggcagccagcctgcactggtcctggagctgtgatcaaagttggccccaactcggtctggggggagttttttcaacttctgtttttccttttctttaagaaattcttcataggatggtcctatttcttggttcccagcaatgtattcttcatcttggatcatccagggaggtgtggcacctgagtggatgttaccaactcctggtatatcctgatggccaatgaatgtcagagatggtcctgtctccatccagtcaagctctggagctggtggcaggtccaaatttgagggctgctgtaagctggaagctacttggctgttcatccctttccagcttcctaggtgctgaagagccctcttctgggtctggcactgcctgaggtggtctggatcctccgagggaaaccaacctctaagacagaccgaaccacctcctgtcggctctgctccacctcacggatctgagctgccatctccttgatcactttatcctccttttcttcataggaatccaaacctttcaccatggatttcttgaatctaaaaggaaaaggggcaaaaccacccagaacccattccccaccagttaaaacgaaaagctcctcagtagatatttttttaattttgagaaattccaaattcagaaacaaaacagtatagtaagcacctatgtacctctcacccagagtccttgtaaacattttgccatactggctccacttcttttgtacagacacacgtcctttttgccaaaacaaaataggtttagacgtcaaaccctattttcaacacacatctcccaagaggaggaacattctatacaaccatgataccattaccacattaagaaaattcttccttttagtgttcaaatatttggctggttagtatagacatggtttacatgtcttcagacttgagtgtaggcatacaggctatattcacatttccctcgtctcaaaaacgtgcattatgccttctctactctcacctccaatcccaaagtcca

SEQ ID NO: 15305 - DNA, 1214 bp, Homo sapiens
gggcagggcagggcagaggaggagacacccatagtaatgacaacagcgtccttaaatggagtctgaggcagagtgtagatgggatacgtgggtaatctctttggatttccacaaccaccttgagagtgacaggaattccacccatttttcagatgaagaaactgaggccctgtgatgtgaagtgacttgccccccagccacacagctggaccattctggctgctgtctggacaagaagtcgtagggggtgagggtggaagctgggaaacccacaggaggcaaccacactagtttaggtgatgttctgcaccctgaacacccacaaagtggacatggacaagctcctggggggccagatcgggctggaggacttcatcttcgcccacgtgaaggggcagcgcaaggaggtggaggtgttcaagtcggaggatgcactcgggctcaccatcacggacaacggggctggctacgccttcatcaagcgcatcaaggagggcagcgtgatcgaccacatccacctcatcagcgtgggcgacatgatcgaggccattaacgggcagagcctgctgggctgccggcactacgaggtggcccggctgctcaaggagctgccccgaggccgtaccttcacgctgaagctcacggagcctcgcaaggccttcgacatgatcagccagcgttcagcgggtggccgccctggctctggcccacaactgggcactggccgagggaccctgcggctccgatcccggggccccgccacagtggaggatctgccctctgcctttgaagagaaggccattgagaaggtggatgacctgctggagagttacatgggtatcagggacacggagctggcggccaccatggtggagctgggaaaggacaaaaggaacccggatgagctggccgaggccctggacgaacggctgggtgactttgccttccctgacgagttcgtctttgacgtctggggcgccattggggacgccaaggtcggccgctactaggactgcccccggaccctgcgatgatgacccgggcgcaacctggtgggggcccccagcagggacactgacgtcaggaccccgagcctccagccctgagcctagctcagcagcccaaggacgatggtgaggggaggtggggccagggcccttgccccgttccaattcggttaccatcccttcctgggtttcccagttttgggccgg

SEQ ID NO: 15306 - DNA, 1017 bp, Homo sapiens
  misc_feature (1)...(1017): n = a,t,c or g
tggagagcacnggcacctggcagacacttactgggcaggggggatcccaagagcagccatggggtgagccccactcccgctgacaccagagacaggggagacatgtgctgcggtctgggaaatagctacccccagccaaatcatgaaagagccattaaacaccgcactatacaacatacttaacttaaaccaatcgggtcgctcagcaaaagagagagaacaccagtccaaacagtgcagcagacccagttccccatcccggagaagtgcgcagcagtgtggggagctggagctggggtggctgtcctgcaccagcccccacgaccctcagaccacaggcactgccaagagggaacatgaacctagccggcctctaagtgcaacggctgcccctgacaggtggtgacagatattttcaagagtgactctgaccagctgtgatttccaccttacatgttgtctttggatcctttccctgaatgatatgagattgtgctgggaactctagccctctgtgtgctgacctccagaatctgacaactttcctttccaaacagttcaagcaccaaggcacgatcacagtgaacgaggaaggcacccaagccaccactgtgaccacggtggggttcatgccgctgtccacccaagtccgcttcactgtcgaccgcccctttcttttcctcatctacgagcatcgcaccagctgcctgctcttcatggggaagagtgggccaaccccagcaggtcctagaggtgggaggtctaggtgtctgaagtgccttggggggcaccctcatttttgttttccatttccaacaacggagaacagagatgttctgggcatcattttacgtagtttacgctaccaatctgaattcgaggcccatatgagaggagcttagaaacgaccaagaagagaggcttgttggaatcaattctgcacaatagcccatgctgtaagctcatagaagtcactgtaactgttagtgtgtctgctgttaactagaggggtctcac

SEQ ID NO: 15307 - DNA, 719 bp, Homo sapiens
cagcctgctgaggagctgtctccctcctccccgatggatgcctggatcctgagccgccttgccctggctgcccaggagtgtgagcggggcttcctcacccgagagctctcgctcgtcactcatgccctgcaccacttctggcttcacaacctctgtgacgtctacctggaggctgtgaagccgttgctgtggcactcgccccgccccctggggccccctcaggtcctgttctcctgcgctgacctcggcctccgcctcctggccccactgatgcccttcctggctgaagagctctggcagaggctgccccccaggcctggttgcccccctgcccccagcatctcggtttgccccctaaccctagcgcctgcagcttggagcactgggcgccagccagagctggagcggcgcttctcccgggtccaagaggtcgtgcaggtgctaagggctctccgagcagcgtaccagctcaccaaagcccggccccgagtgctgctgcagagctcagagcctggggaccagggcctcttcgaggcttcttggagcccctgggcacctgggctactgtggggctgtgggctgttacccccaggcgcagagctccctccggctgggcccaggctccactcagtgacacggctcaagtctacatggagctgcagggcctggtggacccgcagatccagctacctctgttagccgcccggaagtacaagttg

SEQ ID NO: 15308 - DNA, 642 bp, Homo sapiens
cctcgtgccaagcttggcacgagggcgcgaaacatggcggggcaggacgctggctgcggccgtggcggcgacgactactcagaggacgaaggcgacagcagcgtgtccagggcggctgtggaggtgttcgggaagctgaaggacctaaactgccccttcctcgagggtctgtatatcacagagccaaagacaattcaggaactgctgtgcagcccctcagagtaccgcttggagatcctagagtggatgtgtacccgggtctggccctcactgcaggacaggttcagctcactgaaaggggtcccaacagaggtgaagatccaagaaatgacgaagctgggccacgagctgatgctgtgtgcgccagatgaccaggagctcctcaagggctgtgcctgcggcccagaagcagctacacttcatggaccagttgctcgataccatccggaggcctgaccattgggtgctccagttgctcgagcctgatggagcacttcgaggacaccagggagaagaacgaggccttgctgggggagctcttctctagcccccacctgcagatgctcctgaatccagagtgcgacccgtgggcccctggacatgcagcccctcctcaacaagcagagtgatgactggcagtgg

SEQ ID NO: 15309 - DNA, 669 bp, Homo sapiens
ggcacgagccccgcggctgggtctcgtctgctccggttcctgggctcctaattcttggtccagcttcttccaggtctgcgcgtctgttgttcccagcgctctgcgaagctgaaaaggaggagcaacctgtccagaatccccgcaggacaggaaaaggaggggaaatctcgacatggaaaaactctacagtgaaaatgaaggaaacctggaaaacgagggaaagccagaagatgaagtagagcctgatgatgaaggaaagtcagacgaggaagaaaagccagacgtggaggggaagacagaatgcgagggaaagcgagaggatgagggagagccaggtgatgagggacaactggaagatgagggaagccaggaaaagcagggcaggtccgaaggtgagggcaagccacaagcgagggcaagccagcctcccaggcaaagccagagaaccagccgcgggccgccgaaaagcgcccggcttgaagattatgttccccggaaagcaaaaaagaaaaaccggaccagggggaccggacgattttcccccaaggactctcaggaggacttacaggaaaggcatctgagcagtgaggagatgatgagagaatgtgggagatgttttcaagggttcaagagggagctaagggaaaaaacagaaattggttgtttttt

SEQ ID NO: 15310 - DNA, 1012 bp, Homo sapiens
tttgtacaaaacctgaaatatttttacttttttaaaactttgatctaagttgccttagacctcatggactcgatacaagagtaatatgaattgggaaataaaacactttaatagccacgataaactttgttagaaatgtacatgttgccaaaataataataataaaattaaaaaaaagagagagagagaacagcttgatgtccaggttagattatataaatgttcaacaagggcagggtaaaggaaactttaaaaacaccagttctgaataagcctggggccccgtgagactccccctctcccacccagtctcgggccctagggactgcgtccctccaaacaggacaagtgggagtggataaggcctccaccaagctgcctctcccagtggacaaaaacatccaggtaatggggtatataaacaaagctcataagaaatgtacaaatataaaaagctacaaacattaataaattacagcatcacaaaacacggaaacacttcacaaggtgctagtaaaataactgtatcccccaatcccctcatcatacaaggaaaacaaagagctggtattaaagttgaagattcatcttcaaaatgtgtctgaaatagatcttttgtgtactatttgcttctgtaaagacagagtgtaaggctgcacagacatcacttgtttttcaggcaataccttagttcttaaaagaaaaaaataataataataaaaggaaaggagaaggaaaaagcatcagaacccaactgtccatctgactcagcaaaaaactcgtataaatgttaatgaagaactctatagaaagaaattcctaaagatacttttactcttataaaaaagaagttatttaaaaagctatttacacgctacattctatgaaaaatatgcttcaggaaatacatctaaaattaaaatacaggattgcctgagaaacaaatccagcccctccgtgtcgatggtggacacaccatccaggtacgacccatgcaggcgacaccacacgc

SEQ ID NO: 15311 - DNA, 585 bp, Homo sapiens
atataaaataaaatttattttaaaaaagaaaagtttgtcttcaatccagaaagaaccactattaccattttttggtgttccattccaaaatatcccacaaatatacaattgttcaatcaaatttaacattagactttatacttgaacattcaaagtacgtaagaaattatagaaaagtgtctgtgtgactccctgtctgtagggcacaggcttcatctccactaacacacacacgaccagtaccttatacagagagtccttgtttgtctttagtctgacaccatgggcgagcctgagttggcccgtggtccacattcctgaccaggtgtctttctcacccactggtttcaacaaagatgttactgggttatagaaggctgggatggaaacaggataccaagttcgcatgaagacaatatcgctcatccgcagcttatcctcaaagctatcctggaaagctccttctggagctcagagtgctctcttgatctgcccccttatcccactgacagttcgaatcacagcatcttcaaatttggccacttccaaggcagaattaaacattcccttaataaatgaagtgtt

SEQ ID NO: 15312 - DNA, 550 bp, Homo sapiens
gaagatggctgccgcctgggggtcgtccctaacggccgcgacgcagagagcggtcactccctggccgaggggcaggctcctcacggcctccctgggaccccaggcgcgtcgggaggcgtcgtcctccagccccgaggccggcgaagggcagatccgcctcacagacagttgcgtccagaggcttttggaaatcaccgaaggtccagaattcctcaggctgcaagtggagggaggtggatgctccggattccaatacaaattttcactggatacagttatcaaccccgacgacagggtatttgaacagggtggggcaagagtggtggttgactctgatagcttggccttcgtgaaaggggcccaggtggacttcagccaagaactgatccgaagctcatttcaagtgttgaacaatcctcaagcacagcaaggctgctcctgtgggtcatctttctctatcaaactttgatgtgatgactggtgactctgggattgtcaccagttgtaccaatttgaaggacctgggaattagtagaattctagaagttta

SEQ ID NO: 15313 - DNA, 430 bp, Homo sapiens
ggtattttctccagtttcccctgactccaattgctagcttctattaaaatgtttctgatttgtctttcttttcctatataaaagaagacaagtctattcttgtcctacatttttgtataatccctcaccactcaaaatgaatagcccccaattatttagctcctcaaagtatcttagactcaaacttatttttaacacattttgctaaaggttcatgataattgtacagcaaattacttaaaattgtatattagacatccctggggcttaaaagagctcgactcatttttgtcaccagtgttaatctcccaccaatatccggggctgttctctctctgaatctttatccccctttgtgtaggctcactcatcttcaacatcctggtaaatgtcttgggggcaaagcatttttattacctatgagcattat

SEQ ID NO: 15314 - DNA, 715 bp, Homo sapiens
gagcgctgggtccagtggtcgggggaaggcgaggattaccctcccggaggcgttgtctgcgactcggcggaggctccaacttccagtggcccggtcgggaaagatcagagcctcctaagaaatatccagaagtcaagccatggatccacctgcacgtaaagaaaaaaccaaagttaaagaatctgtcagcagagttgagaaggccaaacagaaatcagccccagcaggagctgaagcagagacaaagagcagagatctatgccctcaacagagtcatgacagaactggagcagcagcagtttgatgagttctgtaaacagatgcagcctcctggagaatgaggccccaggttcaaaccagatgggatcctgagagctttgagagggtgttgccagttttaagctgagatggcccatttggagccttacagaactagaccagaagacatttgtggataaatctgaactcacttcctgtgtgtaacttctaacttcactggttcctcccatctgaattggccacatgcttgctgaagagacttgttttcttcttctaagacagtggttttgttttttgggtttttaaaaaaaaaaaaaaaaaaaaacacacacaaaaaacactttttctattgtttgagaaaaatcagtgtttctcatgaaactctatatcttctccaaaaatacaaataaaatactaataaaatgttaaaaaaaaa

SEQ ID NO: 15315 - DNA, 943 bp, Homo sapiens
ccctgcacattttgaggtttggtgtcagaacactggtgaggtggccttcctcaccaaagatggagtcatggatttactgaccccagtgcagactgtctaaatgcccccagcccacccctgcccccatttgcagccttggtgttcgttctaacactgcattttcctacacccctttcctggactgctctctccagaaacagcacagctcatggagggtgagatcatgttagggaaatcaatttttatctagtcatttgttcagattatttgtatttaaagtcattaacttgatccctttctccagactgggccatgccaccatatacctttccttttgtattccattgtggaagcttctaggaggctgagaagcaggagatccaagctccagtcctgggggtgttaccctgaggggggaagtcacttcccttctctcagctgagtttttcacgtgtaagatgagaatggctgatgggctgagagcccaccaaccttccccaccccgtatcagttttgaccacgggccttttgctacattctatccagagagcaggcctgccagcccctctccactgagaagttgggctgagagtatggggaaaagaatcaagagacctgactgccgccaactcactagtgacttagatacatcccccttccccctgctggggccgtcagtttccccatctgtaacttgagaaaatagaactagatctgtaaagtctggaactagatctgtaacgtccttataggtgtcactagggggttccatgagaggtgtgtgacaggcagtctgattcctctcattctccatagtctgtttcctggaaagtcgatgtaattaactgatggcccaaaaactacctcaagagacctggccctgttaagacggcttaaccactgagatcccgttctattgatttaataaagtcaaactattgga

SEQ ID NO: 15316 - DNA, 1167 bp, Homo sapiens
  misc_feature (1)...(1167): n = a,t,c or g
gccgcgactgcacctccaagcggcccggaacccgcggcttccctggctcccgttgaagaaatatggagatcaacacaaaactgctcatcagtgttacctgtatcagctttttcacctttcagcttcttttctactttgtaagttactggttttcagcaaaagtttctccaggtttcaatagtctcagcttcaaaaagaagattgaatggaactcaaggggtagtatccacatgccattctttggtggttggtatttttggcctgtacattttcttattcgatgaggctactaaagctgatccactttggggtggtccatcacttgcaaacgtgaatattgctattgcctcaggtacctcatttctgatttgtccattataattttgtattggaaagtgattggtgacaaattttttataatgcatcattgtgcgtccctgtatgcatactaccttgtactgaaaaatggagtgctggcatacattgggaattttcgcctgcttgcagagctttccagcccgtttgtgaatcagcggtggttctttgaagctctgaagtatcccaagttttctaaagctatcgttatcaatggaatactcatgacagtagtattcttcatcgtgcggattgcctcaatgcttcctcattatggcttcatgtattccgtgtatggaacagaaccctacataaggcttggagttttaatccagttatcctgggtcattagttgtgttgttttggatgtgatgaatgtcatgtggatgatcaaaatttcaaaaggttgcatcaaagtcatctctcacatcagacaagagaaagccaaaaatagtcttcagaatggaaaacttgattaaaagagtgctaccgataagcaaacttcattactacccagcatatctgctgataggatgaattcttggcatgttcttgtgtacctttcttaattataattgttattcaggatttcagtgtcattttttttaaaccttagaaaagagaaggcgtgagccaccgcgcccggccctcagtttaaatgtatgtaaatatcgaagctatatggnatgatttataaagataaatgggccaaagtgtcattgagactggcagcatntatggnccactggaaccctgnccanaaaagtggnttgntttgaacccantggcttt

SEQ ID NO: 15317 - DNA, 1633 bp, Homo sapiens
ttttttttttttaaaaaatcaaagactttattggataaaggttacacaacattctttaacatttaaaactctgagcatacttaagatgagaaacaatttttatcattcaagtctacaaaacaaaataggcttatgaagattgaaatacagacaaaaggtagcatgaagcaaagcttaaatattaagcaactaaagcaatgaaagtgaaatagcaacatggtaggtgtaggttttaaataccaccaagtctcattttttaaaaaatgaaaatctggtttgtaacaaaacacctttgagaatatgccatgagaaaaaaaaaatatttatatacttaaaacctgatctctcccaattcttttgctttatattattacttcttggtcatttccatcactctacacaaataaagaattctaaagcttaattaaaaatcttgattatacacttcatgtatcatggtttgggagagttatctggttcttgaagtgagcccgaaagtactgctggtgttatgtatctgaaagaacaagactgacccaaaccaaagccctaggccatatagagtagggcacccctatagtatagttcatgtcatctttagaactccctgctgctacagttcctgagctgactttttctgatttgataaaatatataatgacgttcataatatgtaattttccaaacagacaattgtagaatgcaatcaaaactttaaattatttgcagtataattagaatttgcattaagctcattagacacaagactgcctgccttttcttcaagttgtaaaacaaatcataggtatattaaatgttttaaaactcacccagaaccttctgttaatcctgagcctggggttattaggtaattccaaacttacacagtaacattatgaaaagtctgaccacttgagccaagtgctcagttatctgttacgttgcttcatatgaattttaaggttttttattttttggcatattttcccttttttgtagtaagtaatcaatatggattatctttctggtttaaaaaataaatcagtattgccactaaaaaacttcagttttattattattaaaagtacggcaccatcaaatataaaatgccttaaaaatgtagtactaacaggtccatctggttttctcatgttttctccattcattaaaaaagaaaaattaaggtcttttatatatttaccaaagacaagtaaaaaaactacagtctctattagtaagaattcatgctccatgcatgagaagtttgacactgttttaaaggatcctgttcctgccacttgttgtcccccagggccaagtcctactgacacctgttggaatttcttgcacttaggagcggctctctatggagagaggtccacatcaaaatttagacgttgtcaccttttttgaactagataaaaccagtaaggatacagacaataataaaaggctttccaactcagcagaattaagaactagctcttggagtatatacatttgcactccaatatcaacactagcctatccactttgagtcaaaatttgaaaggtaagaatgtaattatgaaaatgtgcacaaaatgttaaatactagtggcaaataaatatatcttaatatgttctaacaagc

SEQ ID NO: 15318 - DNA, 460 bp, Homo sapiens
gggacacggtcctggtgcggagcggccagggcacggcggcactgccccggagcaccagcctggaccgggactgggccatcaccttcgagcagttcctggcctccctcttaactgagcctgccctggtcaagtactttgacaagcccgtgtgcatgatggccaggattaccagtgcaaaaaacatccggatgatgggcaagcccctcacctcggccagtgactatgaaatctcggccatgtccggctgacacgggcgccttcccgggggagtgggaggagagggaggggagggattttttatgttcttctgtgttgagttttttctttctttcttttaaattaaatatttattagtacctgggcttgaagcctagtgttttcataatgtaattcaatgaaaactgttggagaaatatttaaacacctcaatgtaggtacattacactctttgttgcgggga

SEQ ID NO: 15319 - DNA, 363 bp, Homo sapiens
  misc_feature (1)...(363): n = a,t,c or g
ggtagaaccacgcagtgcaagaaggcctgctggtcacacttaagtgtcttcaggtaccccccagagcgtttcacaatgcccatggcaagctgtcgggaatgtcaggtccaagggtgaaaagtggaatccgctcatgtgcccacttgtgtgttgtgaatttccagnatctggtgccaggagacactgcattctactcccaggtgggtttctccggcttttaaaaatgcggaatactctctccatcgtgtcgcagggccatgatttctccattcagtgccttctgaaattgcgagtccanagatctggttccgtcgtccgcttccgccagccttggcccaagtcattttgtcttttgatgttggg

SEQ ID NO: 15320 - DNA, 414 bp, Homo sapiens
aagcagatttatctctaagaaaaagaaaacaaaattgtttccatcttttatttcaatttaaaagctaagatggaatattaatattgcctacttctgctttccttgtttaagcactaaaagaaatcaagcagtcattggaatgttttcttttttaaaagaccctttaactatatgattttaaaaatgtctgtctccaaaaaatgaaaatcaaaacacatagccaagagccaagagacgaggaagaacattctcatatcttttcagcatttggaggtggtggtgattgtgagcactttagactgagccaacttgacctaatatggacaaagggaccagagcttttggttatgggtatttcatcagcttcctttctcagcatgcataattgggcttatatttatgtcattggtgctg

SEQ ID NO: 15321 - DNA, 185 bp, Homo sapiens
gttgggtgccaactgggcagagcccctcagggcagcagggactcaggggtgggtgtcagtacagagtcagtgcccccagctgcctcctgacccttttgttcagtgcttgaggctgccgttttaggagtcatagagtaaagagaagctatggaagggcctggataatcaggactgggatgaggcag

SEQ ID NO: 15322 - DNA, 1067 bp, Homo sapiens
gcttatcaaaatgctgactcttatcaccatcacaccagcccccagcatctgctacaaatcagggcacaagaatgtgtctcacaggcttcctcacccaccccgccccacgggtatgctcaccagccggcactgatgcattcagagagcatggaggaggactgctcgtgtgagggggccaaggatggcttccaagacagtaagagttcaagtacattgaccaaaggttgccatgacagccctctgctcttgagtaccggtggacctggggaccctgaatctttgctaggaactgtgagtcatgcccaagaattggggatacatccctatggtcatcagccaactgctgcattcagtaaaaataaggtgcccagcagagagcctgtcatagggaactgcatggatagaagttctccaggacaagcagtggagctgccggatcacaatgggctcgggtacccagcacgcccctccgtccatgagcaccacaggccccgggccttccagagacaccacacgatccagaacagcgacgatgcttatgtacagctggataacttgccaggaatgagtctcgtggctgggaaagcacttagctctgcccggatgtcggatgcagttctcagtcagtcttcgctcatgggcagccagcagtttcaggatggggaaaatgaggaatgtggggcaagcctgggaggtcatgagcacccagacctgagtgatggcagccagcatttaaactcctcttgctatccatctacgtgtattacagacattctgctcagctacaagcaccccgaagtctccttcagcatggagcaggcaggcgtgtaacaagaaacagagagttttgtgtacagcttgggaatgaaaaggttgattgtaaacccacagtatctagcagcgttgtgccaaattgcccttgtgtttctctccacccaaaatatcacagctgctttcctcacatttggttcatccgtgtgctgttcttttgggttctgagagggttttgccatgtttgcttgtatgaccaagtcaccaaggaaataaacaggaaggaaatccatgtt

SEQ ID NO: 15323 - DNA, 1665 bp, Homo sapiens
gggtggtgcacgtttctggccccattaacccccaggtgctcaaaagcaaagcagccaaggagctcaaggcgctgcaggacttggcacggaaggaaatgctggagctcttggacatgccagcggcggagctgcttcaagaccaccagctcctctgggctcagctcttcagcccaggagtggaaatgaagaagatcactgacacccacacgccgtctggcctcaccgtgaacctgacgctctattacatgctctcctgctcgccagccccactgctcagcccctccctgagccacagggagcgagaccagatggagtcgacgctcaactatgaagatcactgcttcagcgggcacgccaccatgcacgccgagaacctgtggccggggcggctgtcctccgtccagcagatcctgcagctctctgacctgtggaggctgaccctccagaagcgtggctgcaaggggctggtgaaggtggggtgccccaggcatcctgcaggggatggtgctcagctttggggggctgcagttcacagagaaccacctccagttccagggccgaccccgacgtgctgcacaacagctatgcattgcatgggcatccgctacaagaacgaccatatcaacctgggccgtgctgggcggatgccgagggcaagccctacctacacgtgtccgtggagtcccgtggccagcctgtcaagatctatgcctgcaaggcaggctgcctggacgagccagtggagctgacctcggcgcccacgggccacaccttctcggtcatggtgacacagcccatcacgccactgctctacatctccaccgacctcacacacctgcaggacctgcggcacacgctgcacctcaaggccatcctggcccatgatgagcacatggcccagcaggaccccgggctgcccttcctcttctggttcagcgtggcctccctaatcaccctcttccacctcttcctcttcaagctcatctacaacgagtactgtgggcctggagccaagcccctcttcaggagtaaggaagatcccagtgtctgagtgaactaacagtcctgctttcagccaccatttgcacaagacacccagcactgaaagtcccgctgccaggagcaagggatcctttggaagcacccgccctttgtgccttgttgggggaaaccggtgacgcagaagtgagtgtggatacaccagagtttgcattggaaggaatgagtgtcacgtggggagggaaggggccagtggaccttttgtaagctttccactcaataaaatgaacctgtatggcaaatacttgaaatggaactcactccttccactttccccctttcttctgtcccaggaaatagatcatcttttgaaaagactcttgtctaggaaaagttgtgtccttttcctaatttaacgtgttctttcttaatgaagttttaatttatttttgttgagattttgctagatggcttttgcatcccctgtagatggtgagtgttggcggtgatgtccatctcggcgttcggaggccccacggtcccgaggctgggccgggggcccccccagggtggctgtgctgctgcctgtaggagggtgcgggttgtgctgtcatcctcgggtttgcacgcccttttttaggagcctgtggacatatgtggttttgt

SEQ ID NO: 15324 - DNA, 630 bp, Homo sapiens
gccatcaccacgctcatgcacctgagcccgccgggccgcagctttctcccagagctgaccgccacgcccgtggtgcagtgcatgcttcgcttctccctctcggccagcgccaggctccggaacctggcacagatcttcctggaggacttctgctccccccgccaggtggccgaggcccgcagccggcaggcgcactctgccctggggtatcccactgccgaggagcgtggccccacggcagcgctgatccatggagactgcgagaccgtggcacccctactgctggggaccacagtcctgatgtggacgcagggaacggggagcacatactgccccattggtgccttttcagccatctgaaaggcgggttctttcagcaggacaggcatttacactgatgaaacgccactgggagtgaggaagccagactccagagacacggagaagatcaaactggagctgcgttcataggctggcactctcaatcctacatcaggtgccaccaccaccagactcaggccctggtgtaagaagcggccaagtgcctggacccagaggctttgcaggacagtgttctcaggagcttgggcctgaggctttaggagagctgccttcgctgcaggaatcagg

SEQ ID NO: 15325 - DNA, 582 bp, Homo sapiens
tgataaatagccaaagacgtcaatggcacccatggacatagtaagcatagtaggagctgaaaaactagaagcaatgacaatgtcaactattttgagcaaaaagaagcagtgtcttcggaacatttgatcataaaaccagaaattaaaggatgagaaaaacatttttctgaagcttatactttcacatttcctagagagcatatttgtgtggatgggggtgggtaaacactcaacaaaagtttctttaaaaagaagaaaccatcctggtttgatgtaatcaatggttgcccactgctcccttcctgtgcctgtgacccttcccaaactgccctgttgcttgcaggctcgcctgagctgaaaggcagccctcacatcccgtcggcacctccctggggccttctttacaccctggagaacttcacgagggaatctgtgtctgtaacacaaaggcttcctggtccagatgtagatactaaggctgactggttattttaaagcctgcggacttactctgccaaaattatttaatcatgtaaaaataatttataattcttataaagtatccccttcataatataaaaa

SEQ ID NO: 15326 - DNA, 867 bp, Homo sapiens
aagaactgccagccatgaagcggcctcggctattaagcactaaaggggacacgctagatgttgtgttattggaagctcgagagccactcagctcaataaatactcaaaagatcccaccaatgctttctccagtccatgtacaggacagtacagacttggcacctccctcacccgagccgccaatgttggctccagttgcaaaatcacaaatgccaactgcaaaaccattagaaacaaagtcatttacacctaaaacaaagactaaaactagctctccaggacagaagactaaatcacctaaaaccgccagtcaccagcaatggtcggaagtcctattcgatcaccaaaaactgtatccaaagaaaagaaatcacctggacgttccaaagagccccaagagtcccaagagccccaaggtcacgactcacattccccaaacacctgtgagacctgaaacgcccaacaggactccttcagctacactcagtgaaaaaatcagtaaagagactatccaggtaaaacaaatacagacaccccctgatgctgggaaactgaacagtgagaatcagccgaaaaaggctgtggtagcagataaaacgattgaggcctctatcgatgctgtgattgcacgagcctgtgctgagcgagagccagatcctttcgaattttcttctggatcggaatctgaaggagacatttttactagccctaagagaatttcaggcccggagtgtactactcccaaagcttccacttccgcgaacaatttcacaaagtcaggatccactcctctgcctctttccggtggaacctcaagttccgataactcatggacaatggatgcctccattgatgaggttgtacgta

SEQ ID NO: 15327 - DNA, 903 bp, Homo sapiens
cagttatcatcatgagaaaaaaataaaaactttattggactttgttacatttattttacagtttagtattgtttgtattttgaattacattaaggcggaggatggggcactgtaatgtttttgaagtttaggacctttaaagctcttaagctgactccgctactgtaaagaaaagcagggtatctgcttcacactggcaaaataaggggctacatttccccatctgaccctcaaatcccttgaaacgctataccctgacataaaccactggtttaaaagacaatgattccaataatttatatcaagtcctgcttccctaccccacacctccaccctaactgagcctgtcccctctgtgttcctctgtctaattctgtaacaaaatctgaaatccagcctccatcagattctggctagatatctctgacctttgaatattgtcttattttagcccataatgagatcagcagctactgtcagtgctatgtcagtgctaaaaatgggttacactttgcaaaataactttattctttaacaatcttgtacactaggcaccaacactgaggctcagctgcctgtggtcataaatcaaatagtacgtactcaacaaataatagctgacaagtttgatagccagaaaacggcaaagctgggatgcaaacccaagcagtctgactcccaagcctcttaaccattcttaagagaccacctacctccattcttcttcgaacacatgtttttcctgtttgccacctgaatacgtggaaccaccatccacccagctggttaaaccagaatcactcagaaatctacctctccttcatattattcataactgccagtgttaaaattctaattgctggccaggcacggtggctcatgccagtaatcctagaactttgc

SEQ ID NO: 15328 - DNA, 292 bp, Homo sapiens
tacaaagtgacttaaaaaaactttattgcagcttcttagagcagaactgagtgtgcagtgctaggaccatgttgggatcttcagagtgggaaactgggacatcacaggagaagaaagcaagccactgctgggagggctggccgcccccagggagccacaatattcacaagagctcttgcttgccacactgcagaggacccagcgacatctggccaggagggagaggacgccagggaagatgggctcagggcaccatgttccaccacttgaagtcgacgcggccgcgaattcc

SEQ ID NO: 15329 - DNA, 3033 bp, Homo sapiens
ggcctcgcctgcggccgctccctccgcctcctccccgccccgagccccagtcagcccgtcttccttcccctcccttgcatgatggaaacaccatggctgcggcggcccagctctctctgacacagttatcaagtgggaatcctgtatatgaaaaatactatagacaggttgatacaggcaatactggaagggtgttggcttctgatgctgctgctttcctgaaaaaatcagggcttccagacttgatacttggaaagatttgggatttagccgacacagatggcaaaggtatcctgaacaaacaagaattctttgttgctttgcgtcttgtggcatgtgcccagaatggattggaagtttcactaagtagtttgaacctggctgttcctccaccaagatttcatgataccagtagtcctttgctaatcagtggaacctctgcagctgagctcccatggggctgtaaaacctgaagataaggccaaatatgatgcaatatttgatagtttaagcccagtgaatggatttctgtctggtgataaagtgaaaccagtgttgctcaactctaagttacctgtggatatccttggaagagtttgggagttgagtgatattgaccatgatggaatgcttgacagagatgagtttgcagttgccatgtttttggtatactgtgcactggagaaagaacctgtgccaatgtccttgcctccagccttggtgccaccatctaagagaaaaacgtgggttgtatcccctgcagaaaaagctaaatatgatgaaatcttcctgaaaactgataaagatatggacggatttgtgtctggattggaggtccgtgaaatattcttgaaaacaggtttaccttctaccttactagcccatatatggtcattatgcgacacaaaggactgtgggaagctttcaaaggatcagtttgccttggcttttcacttaatcagtcagaagttaatcaagggcattgatcctcctcacgttcttactcctgaaatgattccaccatcagacagggccagtttacaaaagaacatcataggatcaagtcctgttgcagatttctctgctattaaggaactagatactcttaacaatgaaatagttgacctacagagggaaaagaataatgtggaacaggaccttaaggagaaggaagatactattaaacagaggacaagtgaggttcaggatcttcaagatgaagttcaaagggagaatactaatctgcaaaaactacaggcccagaaacagcaggtacaggaactccttgatgaactggatgagcagaaagcccagctggaggagcaactcaaggaagtcagaaagaaatgtgctgaggaggcccaactgatctcttctctgaaagctgaattaactagtcaggaatcgcagatctccacttatgaagaagaattggcaaaagctagagaagagctgagccgtctacagcaagaaacagcagaattggaggagagtgtagagtcagggaaggctcagttggaacctcttcagcagcacctacaagattcacaacaggaaattagttcaatgcaaatgaaactgatggaaatgaaagatttggaaaatcataatagtcagttaaattggtgcagtagcccacacagcattcttgtaaacggagctacagattattgcagcctcagcaccagcagcagtgaaacagccaaccttaatgaacatgttgaaggccagagcaacctagagtctgagcccatacaccaggaatctccagcaagaagtagtcctgaactactgccttctggtgtgactgatgaaaatgaggtgactacagctgttactgaaaaagtttgttctgaactcgacaataatagacattcaaaagaggaagatccatttaatgtagactcaagttcgctgacaggtccagttgcagatacaaacttggattttttccagtctgatccttttgttggcagtgatcctttcaaggatgatccttttggaaaaatcgatccatttggtggtgatcctttcaaaggttcagatccatttgcatcagactgtttcttcaggcaatctactgatccttttgccacttcaagcactgaccctttcagtgcagccaacaatagcagtattacatcggtagaaacgttgaagcacaatgatccttttgctcctggtggaacagttgttgcagcaagcgattcagccacagacccctttgcttctgtttttgggaatgaatcatttggaggtggatttgctgacttcagcacattgtcaaaggtcaacaatgaagatccttttcgttcagccacatcgagctctgtcagcaacgtagtgattacaaaaaatgtatttgaggaaacatcggtcaaaagtgaagatgaacccccagcactgccaccaaagatcggaactccaacaagaccctgccctctaccacctgggaaaagatccatcaacaaattggattctcctgatccctttaaactgaatgatccatttcagcctttgcccaggcaacgatagccccaaagaaaaagatcctgaaatattttgtgatccattcacttctgctactaccactaccaataaagaggctgatccaagcaattttgccaacttcagtgcttatccctctgaagaagatatgatcgaatgggccaagagggaaagtgagagagaggaagagcagaggcttgcccgactaaatcagcaggaacaagaagacttagaactggctattgcactcagcaaatctgagatatcagaagcatgaagaattctcttgttctttggcaacaatatagtattcttcttcctgaatactgaaactatttacaatgtgtatcaaaactacctgtggagcatggggaatacaaaaggtttgagattcctgtaaatgtgacaaaattttagggtttttttttttttcttcattacagattcgtctttttttttttttcttataaaagccgtaacccagtcagacaaattcaccttcacttaggcccctgttctgggata

SEQ ID NO: 15330 - DNA, 749 bp, Homo sapiens
gaagtgacccagggagacaaacacttggagatacttggggctgagtttgagcaagactccctaacctgtgtctggacaagtctgatgtcctgtgtggcccaagaagaactgaccccgtgtctggagctcccaccgttattgcatccctgctgtggctcacctgctgctgtctccaggagcccctgagaagatttgcttcctctcccctgctaagctccaggtcctgagattgaattaggggctggagctcactgcactccagcagtcatggggacccaggatagggccagcgggtgaggtaccccaaggtaccaggacaaggaaaccaaagccacaatgggcacagaaaacacacctggaaggcaaagcaagcccagaccctcaggacgttgcgggccaagtgtgttccataacatcaagctgttcgttctgtgccacagcctgctgcagctggcgcacgtcatgatctccggctacctaaagagctccatctccacagtggagaagcgcttcggcctctccagccagacgtcggggctgctggcctccttcaacgaggtggggaacacagccttgattgtgtttgtgagctattttggcagccgggtgcaccgaccccgaatgattggctatggggctatccttgtggccctggcgggcctgctcatgactctcccgcacttcatctcggagccataccgctacgacaacaccagccctgaggatatgccacaggacttcaaggcttc

SEQ ID NO: 15331 - DNA, 843 bp, Homo sapiens
tttttttttcacatggcgctgctttattgttttaggtcttttgggctgaagatttgctagttccattaatttgttcattctctgtcggtcctcatcatcagtgctttcatattctgattcttcactagataattcctcatcctcgtctggcaaaggaggttcctcaggtggctgaggagatgtgggtggaagaggtgcatgcaatggcatatagtcttcatacatgggaggtcgcgcagtaattggtccaaaaggtgtgggcaaattcattttattcataagatgaaggacctgtacatagaacttagggcacgcttgccaaggcatttacaatgtttgctaggattgtgctggaaggtggtgggtacatatacttgaggcatgaatttaaaggaaaagtcagcccatgggtttgggtgccaattcccattttcctaccttgttaaataacccaagttcctttttttctttttccttccttaggatcttgttttggtctagcagatcgagcaaactgaaccaccatgggttttccaaaaagcacatatccattagcttcctttaaggcttttgctgctgctttttcattaggaagtccaatgaaagcttgtcctttcatacgaccttctttcatcaaacgtatatcaaacatgatccgctgtgtttctgatgaaaagtcaacatatcttccaaaaatatatttaaggtccttttcttgaacatgtttagctaaattctttacataaattctacagtttggttcacccggttcataacttctgaaaactgaaagtgtttccatttcttctctagaaattctgcccttttccaattcccttctag

SEQ ID NO: 15332 - DNA, 457 bp, Homo sapiens
  misc_feature (1)...(457): n = a,t,c or g
tttcggcacggagaattcattctcagatcagcttcccagatttttgccaatatcaattaaaaaaattttttagccaaccacgtactgtgagtaagccaatatcaattagcaaaatctttagtttcttttggtgattcagtatcttccccctggagttttttgatgattcagtaccctcctagatttggcccctggggcctgcggggatgtgacttgtcatttaattctggagaaaatgaggggtagggcttataaggagactccttcggggcagggtcattacagggtgtgttacatagggaaatgctagctgctggctagctcttcgctcttgaaaggctcttcctccctcaactgaaatggggaagggggaaccccggccgactgaggtcctgacatctttagcacatggcttcttaggtcacccagggcattcanggtaccaacttgggaaaca

SEQ ID NO: 15333 - DNA, 434 bp, Homo sapiens
gacacagttgtttatgagacttattaagctggttctaaaatttatatattacactaaaaggacaagaatagccaggtcacttctgaagaagaagagcaagaaggtaagattaaagaaaacttaaatagctggagagataccaggttcacggataggaaggcaatattgtaaggttgtcatttcttcccaaattgatctttatattcaatacagtcccaatcaaaatcagaacacagtttttcatgaaacttaataagccagttctaaaatttatatactagactaaaaggacaagaatagccaagtcactcctgaaaaagaagagcaggaaggtaagatttcccctacaaataggaggacttattatgaagcttacagcactttagaaagcataggagccccatgcccagcctagcttgggtcttttgggttta

SEQ ID NO: 15334 - DNA, 1589 bp, Homo sapiens
  misc_feature (1)...(1589): n = a,t,c or g
acctgagcccgccattattaatttccctataaaatgacgatacatgtgaacatttataaatggactaatactgcttgtctttcccccaccgcacaaaactggttcttaagatgccagcaatgaatttgagactatctttatttataaatggaaaccggaaacttttataccaaactataataatgtgcagcactgtagggctttttttttttccctccaaatacagtgaaatttttttattcacaagagctgccacatctcaggcatttagtaatagagctgctttaataaaattctagtttgattgtcatgtcaaaaaaaggaaaaatgttgcatctttgtgattttaaaacataaattaatgaaggctctgataggctattaggagttggcttggaaacagtttttggtctcacaggttaccattgtttggggatgtctgagctgttttcagatctaggaatagcacagtgttgtcttgtctttggcagtctcatttggctctgtttcttgcaccaccagcatgttcattaccacttaaatatattgctacagcagtggaacaacagagtggttgcaagacactgtagattaacggtagaggagaaattgtgcccttagtgttaacaatgtgccttttgttctgaatgccatgttgtagggcatgcattttttggcctctttaactcttcgaattctagtcagtaagaatggaacccatctctgcaaagatacatctgtcttaaatatctagttacaggccttaatagaaaccataaggcatgactcatcttcaggcactgaaaaaagataaccatcaggtagtgttacacaaggacttcctatatttaaggggttaaagatggtctttgttgtatcttaacatcagactgatttttacattttttttttgttatgctaacactagacaaaaatcaactgtatttgtaaaaatttacctcaaaccatttaattttatagtgtgattaatcccagggcatttgggtatgaacccaagtgcattccctttatatgtgcctggctctagtaaggatggccagggatttttaccatttgggtgcaaggcncttaagccacttttaaacttaatgggtggtttggggtcgtgttaaatgactccatcagaatgttagaaaacactttaggcatcagtagcattgggccatattggaatcctaaagtgtgaattatttttaagggagagcattcatttttggaaattttttttcatcaaaaatatttctggtaagcagaagactttttaaaaaaactgatctggtctcggtaaaggttttaatattgcccaacataatgctgtaatagcattaaaaaaagtatttgtgaactctgtttcttaaggggcttgtacatctctctgctatggacatacataaaattaattctaattatactcagctcaactgctacagttctgtctaggcagtggccttgggtttttatcgagcaacaacttagacacgtgactgtaatatgctgcaactgtgtgtactgaaaatatgtgaaaatggttgaatgtggactgtgtatatatgtatgtaaaaatttcc

SEQ ID NO: 15335 - DNA, 713 bp, Homo sapiens
gcagggatttgaaccgcgctgacgaagtttggtgatccatcttccgagtatcgccgggatttcgaatcgcgatgatcatcccctctctagaggagctggactccctcaagtacagtgacctgcagaacttagccaagagtctgggtctccgggccaacctgagggcagacaagttgttaaaagccttgaaaggctacattaaacatgaggcaagaaaaggaaatgagaatcaggatgaaagtcaaacttctgcatcctcttgtgatgagactgagatacagatcagcaaccaggaagaagctgagagacagccacttggccatgtcaccaaaacaaggagaaggtgcaagactgtccgtgtggaccctgactcacagcagaatcattcagagataaaaataagtaatcccactgaattccagaatcatgaaaagcaggaaagccaggatctcagagctactgcaaaagttccttctccaccagacgagcaccaagaagctgagaatgctgtttcctcaggtaaacgtggaataaatggtaacagagattcaaaggtaccttcagaaggaaagaaatctctctacacagatgagtcatccaaacctggaaaaaataaaagaactgcaatcactactccaaactttaagaagcttcatgaagctcattttaaggaaatggagtccattgatccaatatattgagagaaaaaaaaa

SEQ ID NO: 15336 - DNA, 1402 bp, Homo sapiens
cggcactaggacttcctgccgatgccggtgtggacgctgtgaatcgtggctggccacggttctccgcttctccccatcccctactttcctccctccctccctttccctccctcgtcgactgttgcttgctggtcgcagactccctgacccctccctcacccctccctaacctcggtgccaccggattgcccttcttttcctgttgcccagcccagccctagtgtcagggcgggggcctgggagcagcccgaggcactgcagcagaagagagaaaagacaacgacgaccctcagctcgccagtccggtcgctggcttcgccggccgccatggcaatgagacagacgccgctcacctggctctggccacacgcgacccgtgggttgatttggccttcagtggcatcacgccttatgggtatttcttaaatcagcgcttgcaaagatgggtaaacctatgctacgccagggagatacaggagactggattggaacatttttgggtcataaaggtgctgtttggggtgcaacactgaataaggatgccaccaaagcagctacagcagctgcagatttcacagccaaagtgtgggatgctgtctcaggagatgaattgatgaccctggctcataaacacattgtcaagactgtggatttcacgcaggatagtaattatttgttaaccgggggacaggataaactgttacgcatatatgacttgaacaaacctgaagcagaacctaaggaaattagtggtcatacttctggtataaaaaaagctctgtggtgcagtgaggataaacagattctttctgctgatgacaaaactgttcgactttgggatcatgctactatgacagaagtgaaatctctaaattttaatatgtctgttagtagtatggaatatattcctgagggagagattttggttataacttatggacgatctattgcttttcatagtgcagtaagtttggacccaattaaatcctttgaagctcctgcaaccatcaattctgcatctcttcatcctgagaaagaatttcttgttgcaggcggtgaagattttaaactttataagtatgattataatagtggagaagaattagaatcctacaagggacactttggtcctattcactgtgtgagatttagtcctgatggagaactctatgccagtggttcagaagatggaacattgagactatggcaaactgtggtaggaaaaacgtatggcctttggaaatgtgtgcttcctgaagaagatagtggtgagctggcaaagcaaaagattggttttccagagacaacagaagaggagctagaagaaattgcttcagagaattcagattgcatctttccttcagctcctgatgttaaggcctgagcgtcaatcatatgttgc

SEQ ID NO: 15337 - DNA, 3932 bp, Homo sapiens
  misc_feature (1)...(3932): n = a,t,c or g
gcggcggggctccggctgcgctcgtggccgggccgggcggggaggccggtcccgcgggcgggggcaggggcggctccgcggcttctcccgccgccgccgccaaggggagtttccaggaagtggccatattggatccattcagccgcagccgcccgggcggagcgcgtcccgcagccggctggtccctgtcgctgcccctgcgctcgtcccagcccacccgcccggtgcggagctcgccatggcggccaccgacctggagcgcttctcgaatgcagagccagagccccggagcctctccctgggcggccatgtgggtttcgacagcctccccgaccagctggtcagcaagtcggtcactcagggcttcagcttcaacatcctctgtgtgggggagaccggcattggcaaatccacactgatgaacacactcttcaacacgaccttcgagactgaggaagccagtcaccatgaggcatgcgtgcgcctgcggccccagacctacgacctccaggagagcaacgtgcagctcaagctgaccattgtggatgccgtgggctttggggatcagatcaataaggatgagagttacaggcccatagttgactacatcgatgcgcagtttgaaaattatctgcaggaggagctgaagatccgccgctcgctcttcgactaccatgacacaaggatccacgtttgcctctacttcatcacgcccacagggcactccctgaagtctctagatctagtgaccatgaagaaactagacagcaaggtgaacattattcccatcatcgccaaggctgacaccatctccaagagcgagctccacaagttcaagatcaagatcatgggcgagttggtcagcaacggggtccagatctaccagttccccacggatgatgaggctgttgcagagattaacgcagtcatgaatgcacatctgccctttgccgtggtgggcagcaccgaggaggtgaaggtggggaacaagctggtccgagcacggcagtacccctgggggagtggtgcaggtggagaatgagaatcactgcgacttcgtgaagctgcgggagatgttgatccgggtgaacatggaagacctccgcgagcagacccacagccggcactacgagctctaccggcgctgcaagttggaggagatgggctttcaggacagcgatggtgacagccagcccttcagcctacaagagacatacgaggccaagaggaaggagttcctaagtgagctgcagaggaaggaggaagagatgaggcagatgtttgtcaacaaagtgaaggagacagagctggagctgaaggagaaggaaagggagctccatgagaagtttgagcacctgaagcgggtccaccaggaggagaagcgcaaggtggaggaaaagcgccgggaactggaggaggagaccaacgccttcaatcgccggaaggctgcggtggaggccctgcagtcgcaggccttgcacgccacctcgcagcagcccctgaggaaggacaaggacaagaagaattaacgcacgcacagacttacatgtcaagagtggactttagactttcatgtgttaagttgcttgagttacaccttgtgacccttctcccataacatggtgtgaggacggactgggagccggtacagactccagtgtttacagccttgctttcctcccaccgaccctggccccaggctgccccgggcctggcgggccacccctctctatgcaaacacgtaaaagccatgaatgctggaatccaaaactgacgaggtttatttttttcagagccagtggctggtcttccatttacagtgtcactattcccctgagggnagctgttatgtgccgctctagcgaaggcccccagccgggatgcctaggccctaattgttcagcgtggagatggcaactcacgtgggtgccctagggtgcagctgccgtggtctggtatacatgctgcaaaattcacccagttcccctcattttaatttttctaacctacagcttaattttaataactttaaaacacttctaaatatttattttgacaccagcgtcaagacaaataatatcctctcccattattttcataagtaacacagattccctgatttttaaaaactaaaaatacagctaaacctttcttatgtataaagtatgcctatcatatacagggagaggtgggtaataaacttcctgtaatgacagtgtttggcatttctttatggatggaattggaacatgaacaagaccatgtccagcgtttttactgtgaatgtaaatggaacagcagcccaaagctgttgtctgtgccccagaggtgctacctgtagacagggaccaactccatgtgtgtgtgttaagtgtttgactccaattaagactcccaagcgaatcctgcatattccaaatgtaaagagtactcagtgggaaaaaggttgttacctcaaagtcattgcttctttcctggctgggtcacagggtgaagagatgaaggtgtctgatgtatatagacaattagggaaaaatgagcggcaaaggagctttccccttcagctgcactctaaaggggaacattttaaggaagtactagcagctttgactcttctatgctcctgttggtttacaagccaccaagaatgtcagtgttgagaatacggcctggtaaaatgggagatgtaaaatgactaaatgaaaggaagggtagttttaatgttgaagcaccgtgctgggcactggagctacccagaggaatgcacaacgctcccctcaaggagctcacagtctagcctactccctggctggaagcctcaggaagacgtgctaatttattgtggaattggtagtttgcttttcatgcccctgtcttccttctcatgaccatttccccctttctgtctggcttgcattattgatttccaggaccaagtcctgggcttcctcctgccttcctgagatgatgttctgctcagggagaagtggaggggtgagctgtgtgtgtccactgaggcacggccaggaagaggcagcctttacctgtgaggggctccatgctccagcagcagagcaggttctagtgacaattcaactttttatgctatgaccaggggtggatctaaattttatggggctgaaagcttgaattatttagaaagacttctttaagaaaaacaatgttaatataaaattaggtacagggtcttggaagggggccctgaagattaagcttccttagcgtcacaataagtccgtatctggttgcaattgaaaactgatgcttcagtgagggtatctaaaaaggtaaactgggcatatccaggggcaaatgtgggctgccaatggctcatctctagggtaattttatgtctgaaagtgtatgcagttgggtcagagcatgacctttaagatagcctctctcagctaacatatttatgaagatgaggcctgggtgacccagcaggttcattgggatacataagaaatgagaattcctggttcatgggccaacctaggactctggagtatgcagacttggccattcgtccattgtggcctgccgggtcgcacccccagggcatactgaaaggccatactcgtggctggctgcctgcgggcctaagccttcccaggatcttcaggacacttgacagacttgtgttttctggtctgagctgcctccacaggtccctccagcaagcctcactgcacctctcccctgctgtttgtgtttggaattttgtcttctttagctgagaccaaattaaaccttggtgcataaagtgagcttaaaacttgccactgtttagtaagttagcccccatagaatgtgaccctgtctgcagagtctcatttacccctctttttctcattgtcatttgttggctttattagggctgtcttacaggatcatggtggcaatactat

SEQ ID NO: 15338 - DNA, 741 bp, Homo sapiens
  misc_feature (1)...(741): n = a,t,c or g
gggagaacctggggcatggggtggaggcacaatgcttactcttgggagtatatttgctttgtcatctgttttggtgacagcaaaagtggttaaatggaggagatggtagcgcaaagaaatggcaggttcagagtaaggattttgtttggcaggtgaaatatgaagagggcaatggacttgtgctgagactgaaaatgtgagagagacaagaggattgatgaggcagtgtcctgggaaggtgagaatagaaatgagactgcagtcagcctcagagttaaatatttaactgtgagagttttggcacttgctggtgactgccgtcactattttacagatatgaaaactgagacggagacaatattcgtgatttgcctaaggccctatagtgaaggcaaatgaagaagcaggtatttgagatagagaagaagaaagcagactatcctaaataatagggcagccagatggatcttttaaaaacgtaaatcagattatgtgggctgatagtttaaagccctctgggtgggcttcttcattggcaagcagccaggaaagtaaaantaatttaggggtcttgttaggacacttaattacccggggcccctggatttgctatattttaggtatcctgttccctnccttgcttcattnccccacactgnccctttctgttggggtttccccccaancccaggccccctttcccttttgggggtcccctcgtancttaccggggggcccttg

SEQ ID NO: 15339 - DNA, 1055 bp, Homo sapiens
aaaacatagtaattacacaatttagtgcagtcaaccaaaatgttgagtcaattggaatgtaatttattaaaccatgtatttaaagagatatttttctttaaaagccaagttactttctcatatacagcattttaggaagcatgattttttttttctatcatctattcctccaagcatgtttaattgaagaaagtattaatatctctttagataagcttgtattgacctaatttggtttatgatgtgtcagagctaattcatgttcagggtgagcgttgtacctaccaacaaatttcctggttgggtatgcaaatggttattttctttttattgttgttaattggggactttctgttaatgaaaagcactattcccaagattaatagtgttctatggcacaatgaagcacctaaaaacactgcttgatattataaatttaaaacacaagtgaaagtttagccatggttttgtgcggcatcatagttatgtcaataaagtttatttaggtcatagaatatcctaaagtatcacatagttaaatttttcagtcagtgaagaccgggagggaatgtcagtgaattggcttgaatgttctgtggcaatccacaggtctagccaaatattgacataggagtctagggtataatttgccttgtgatgtttggcagtcactgtttatactttaaaggttatattttaagctatttgagattgcttttgggaagatcactagatttatggaggaattagtcacaaatgacttgtagaaaatactgtcatatagttcatttcatcattttctgttgcaggaagccactccaccacagaatgctaatatgccagtggtacccagtacctcttgtatataggttattgcaaatattgttctgaaatgcttaacttcagaattacattttttaaagtaaataattgttttaaatctattttgtaaagatataaagtacaatagaatttctggagtacagattaaactatttgcactaacacacgtgacgtgcatgatttaataaaataactttactctccctaaaaaa

SEQ ID NO: 15340 - DNA, 995 bp, Homo sapiens
tttttttttttctgacacgagacataaaaacttttaatgaaggaggacacagctcagagcccttccacatgcggcccaaccctgccccacggagaccggccatggcaaccgctcaatcagaaggtgttcttgatgcggccggccaccagcctaaggatgtccccgatcttcttctgccagttggcgatgtccttggacacggcgcaccacagctccccatgccgaggctctgcactctcacagcgcttcctcacctcctcctgctgctcctcagtgccatgctgcagctcaaacttgtagaagaaggcccaggcatcccccaggtccgagtcaatcttcacagtgcggtggaaccactccctggccttggtgatcttccgctgactccaaaacagcttggccacggccaggagcacatgggggtcatgctcacacttcttcagggcatccacgctcttggtcctcctctggggccttgcctcgaggaagatggcctcagaccacaggataccggagttggggcactcctgcagcgccttggccatgagtgtatttgcgatgttcttcagccccgcacggtactccagccgcacggactccaaccacagcccagggttctttgggttcttcagacgagacttttccaaaatggcccgtgctcgagtaagctgcccaatcttctcctccagccgagagagcaaaagccacaggggtgtggagtggggacacttcttcaacccctggttataggcttcccgcgccttctccatcatctccttctgctcctcgatctgccccttcatcatccacagcttggggaagtcctcatagtgccgcagggcctcctcgcacagatcttgggctgccctgatgttgtcttgcacccactccagcttcacagacttcatgaacacccgggcggtgggggcactcgtccgcgccttggccagcagcctccgggcccgctcgtactcatcattctcggactccagctt

SEQ ID NO: 15341 - DNA, 1653 bp, Homo sapiens
gagtgtgggaagaccttcagctggagctccaccctcacccaccatcagagaatccacactggtgagaaaccctacgcctgcaatgaatgtgggaaggccttcagcaggagctcaacccttattcaccatcagagaatccacactggagaaaaaccctatgaatgtaatgaatgtgggaaagccttcagccagagctcacacctctatcagcaccagagaatccacactggagagaagccctacgaatgtatggaatgtggaggaaagtttacctacagttcaggccttattcagcatcaaagaatccacaccggggagaacccctatgaatgtagtgagtgtgggaaagccttcaggtacagctcggctcttgttcgccatcagagaattcacactggagagaagcctttgaatgggatcggcatgagcaaaagctccctcagagttacgaccgagttaaatatcagagagtccacgtgaaagagccacacacccattttcctcactttccctgagtctcaagagctcttgccttaccctataaatctcaacagcttaggatgtgtccctttcaactcagacttttcattttagagaatggggcagatggggcaaatcgttgaattttcccagaaatcacaccagccttagaaagcgtcaaggcaagtggatggcgtgctgggaatagaaagcagctctgggaccagttaccccatttaggaaaggagtttgcactaaactgtttttctcacagcagaggaacctttccaaggtggggatggaagcacagtcgggacagaattcgatggattcctttagttggagtccgcgtagtcagcacagacagcagtggaaaggacgctctgggtcctgttatttgctagggagggtaaagggagactatttcaaagctactgttcctagtccagctttaagtttcggtaagaaacatgctgttttgtttcatgatttcgttaattatggaaatttggcattgagggattattttattgagggtagaagagattccagaatcatcatctgtgatgatggtgtcctttagggctcttggagcagccagaccatgtttccaagagaaacctggtgatattgccagcagaccccctgccatcccccccagttgtcctggggctgaatgggcaaatctgtccaaacagctagtaaccggctgtgagggagagggtcagaagcacttagcgttggcctctgattgctgtcctctcttgtcctcttcccactccaatgatgaaaatgattttctctaaatgcctgggtaaggatgctttcaaggagctcacttggcctgcttgccctgccctctcacctctgacacccagccccaggagccagaccactcctgcctccacctctgactcttcagcagctgaagattaatgcagagaaagagcaaagcccaaaagggagaaaaaaaaaacaaaaaaacaaaaaaacgaagcccagagaaggcaggctgtgcctgagcctggtagcagagctcgttgctgggtgaggatggcactccccgagttttcccaaccgacgggatgaccttccattgtgttttcccaaccctgctcatcctgtagcataaatgaagtgcactattaaacagaatagtttttcagaagaaaa

SEQ ID NO: 15342 - DNA, 631 bp, Homo sapiens
  misc_feature (1)...(631): n = a,t,c or g
tgtgggagaccagagttttattattacacaaatcagtctctctgagcatggaagggggaggtcagagttcttaaagataatttggcgagtaggagcttgggaagcggggagtgctgattggtcaggttgaagacggaatcacagggagtcaaagtgaggttttcttgctgttttctgttcctgggtggaatggcagaactgattgagccaggttactggtctaggtagtcagttgatccatccagtgcagggggctgcaaaatatctcaagcactaatttcaggtttcgcaatagttatgttattcctaaaagcaatttggggaggttcagactcttggagcgagaggctgcatgtcccctaaactgtaatttgtaatcttgtagctaatttgttagtcctacaaaggcagactggtcccaaggcaagaagggggtcttttcgggaaggggctattatcaattttgtttcagagtcaaaccatgaactgaattccttcccaaggcnnnnnnnnnnnnnnnnnnnnnnnnnnnnnnnnnnnnnnnnnnnnnnnnnnnnnnnnggagtggattaggtctgatctctttcactgccataatttcctcatttataatttttgcaaaggaggtttc

SEQ ID NO: 15343 - DNA, 1872 bp, Homo sapiens
ttaattaaaaaacattcattgttggaagcctgttttaggcagttaagaggagtttcctgacaaaaatgtggaagctaaagataagggaagaaaggcagtttttagtttcccaaaattttatttttggtgagagattttattttgtttttcttttaggtgaatattggcttggaaatgataaaattagccagcttaccaggatgggacccacagaacttttgatagaaatggaggactggaaaggagacaaagtaaaggctcactatggaggattcactgtacagaatgaagccaacaaataccagatctcagtgaacaaatacagaggaacagccggtaatgccctcatggatggagcatctcagctgatgggagaaaaccggaccatgacccattccacaacggcatgttcttccagcacgtaggacagagacaatgaacggctggtatgtgtggcactctttgctcctgctttaaaaatcacactaatatcattactcagaatcattaacaatatttttaatagctaccacttcctgggcacttactgtcagccactgtcctaagctctttatgcatcactcgaaagcatttcaactataaggtagacattcttattctcattttacagatgagatttagagagattacgtgatttgtccaatgtcacacaactacccagagataaaactagaatttgagcacagttactttctgaataatgagcatttagataaatacctatatctctatattctaaagtgtgtgtgaaaactttcattttcatttccagggttctctgatactaagggttgtaaaagctattattccagtataaagtaacaaacacagtccctagatggattggccataaaggcccagttatctctctttcttgctatagggcacaggaggtctttggtgtattagtgtgactctatgtatagcacccaaaggaaagactactgtgcacacgagtgtagcagtcttttatgggtaatctgcaaaacgtaacttgaccaccgtagttctgtttctaataacgccaaacacattttcctttccaggttaacatcagatcccagaaaacagtgttcctaaagaagacggtggtggatggtggtataatagatgtcatgcagccaatccaaacggcagatactactggggtggacagtacacctgggacatgggcaaagcatggcacagatgatggtgtagtatggatgaattggaaggggtcatggtactcaatgaagaagatgagtatgaagatcaggcccttcttcccacagcaatagtccccaatacgtagatttttgctcttctgtatgtgacaacatttttgtacattatgttattggaattttctttcatacattatattcctctaaaactctcaagcagacgtgagtgtgactttttgaaaaaagtataggataaattacattaaaatagcacatgattttcttttgttttcttcatttctcttgctcaccaagaagtaacaaaagtatagttttgacagagttggtgttcataatttcagttctagttgattgcgagaattttcaaataaggaagaggggtcttttatccttgtcgtaggaaaaccatgacggaaaggaaaaactgatgtttaaaagtccacttttaaaactatatttatttatgtaggatctgtcaaagaaaacttccaaaaagatttattaattaaaccagactctgttgcaataagttaatgttttcttgttttgtaatcccacacattcaatgagttaaggctttgcacttgtaaggaaggagaagcgttcacaacctcaaatagctaataaaccggtcttgaatatttgaagatttaaaatctgactc

SEQ ID NO: 15344 - DNA, 537 bp, Homo sapiens
acccagcctaaaatgatggttttctgattctagcatttcttttataagattgctatgtaaagcacagcttttctttttttaggggaaaaatgtcttttaacagctgcaaaataaatattctttcaatggaatgacaattattatttttgccatatatttattttaaaaatttatgtataatggtaacctgagcctgcatgttattcatgtgtggtgccatactgatctttaattttaatgtgaagcaagtactaatatagtaaagcataaattatataaaatttgctttatattttggattgcaaattaattgctgtactttatagaaaagtttcccaaatccgttttacttttttgtatttgaaatttaatcacaggtggaatcttaaagagagcatttagggatattgtaaacagatgttattaaggactaatgttaacaaacattgaagaagagaaaacagtatttgtttttagcttaacatcttagtggagtgaaatattttcagtatatttattttatttatttattaattt

SEQ ID NO: 15345 - DNA, 331 bp, Homo sapiens
ggtcaagctgtggtcttgtctgcgctccctgattcattcatatctttttataatcattatcagatgacacctctgtcactttggagatgtgtagctaggagcactggtgacacccacagtgaagcccagcaatttttgaagtgatttctcctcattgggagccacagacctaatgttgagcaaaaactgagctgtgtgtatttagaaatcaattgaaaacatcacattgctcaggctctgaatgcgcgtgctgagtctgcctattcttctcggtggcccaggctgctccgcttattttaagatagagctcatcggttgtgaaaatgctact

SEQ ID NO: 15346 - DNA, 770 bp, Homo sapiens
agtgaggccccggtcttcctcctccgtcctgcccgcaggcccaagaaccccctgacgggtattcaagcttgcgcgtaagtctggccggtgccatctgtctccgcaatgccccccaagaaacaggctcaggccgggggcagcaaaaaggcggagcaaaaaaagaaggagaagattatcgaagacaaaactttcggtttgaagaataagaaaggagcaaagcaacagaagtttatcaaggctgtcacacatcaagttaaatttggtcaacaaaatccacgtcaggtagcacagagtgaagctgaaaagaaattgaagaaggatgacaagaagaaagatttgcaggagctaaatgagctgttcaaacctgtagttgctgctcaaaaaataagtaaaggtgcagatcccaagtctgtagtatgtgcattcttcaagcaaggacagtgtactaaaggagataagtgtaagttctcccatgacttgactctggagagaaaatgtgaaaagcgaagtgtttacattgatgcaagagatgaagaacttgaaaaagatactatggataattgggatgagaaaaagctggaagaagtagtgaacaagaagcacggtgaggcggaaaagaaaaaaccaaaaactcaaatagtgtgcaagcatttcctggaagctattgaaaacaacaagtatggctggttttgggtatgccctggagggggtgatatttgcatgtatcgtcatgcacttcctcctggatttgtgttgaaaaaaaaaaaaaa

SEQ ID NO: 15347 - DNA, 726 bp, Homo sapiens
gctctggttttaaggtcagtcctgaattgctcgtatatatgaactgaaggtaaccgaagtattaggggtttgaggagtgcgtgcgtgtaagtgtgcttgtgtgtgtgcgtgcatggtgggggagaggatgggaagggggcgggggcagtggaagggaaaggaaggaaagaaaaatcgtcctagaccaggatacacccgtgggagcaattttctctactgtctgtagcttcacagaggaggcgctggaatgaacaagaagagacatctggtctgtggccacagcaccctgaacgcccctgatcttgtgtgatcttggaagctaagcttggttgggcccggtcagtacgcggaagggaagaagggacacctggccatagaaaacagctgagggtgtttgctgtgttcctggatcaggccctgcttcagaagggactcctggaggcccatgttccttgatgcaacctcgtggcccaggccgggagcagcttgcctcctcagaggtgttgactatctgggtgttcttggtaaccgttaactctgtctttctcagctgcaagccctgagtctccagtagctgaattcacctgacttttcaacaggccaaatctctgaaccttgagtacagggacagctcctcctcagacatcccagctctccccatgtgtgtgatggtgtatttaatgtgtttttttaatgcgacattaaaagattctccacgtcttgctc

SEQ ID NO: 15348 - DNA, 894 bp, Homo sapiens
ggcctcctattgatctggcagacattgaagatttaagtgaagacaccctgacagaagcaacacttcagggcaggaatgaaggggctgaggttgacatggagtcctgatgtaaggagccgaagcagtgggattggctgatttgaggagatgtctctaagtgaattctcgtattcttaagggaaaagttattttccatacttgaagttatatttccaaacctgagaaatgaagaaagattgttctgacattaaatacctacagttactactgaacctcttaataaggatttgtcaaggatagagtacagttgtaggggaagtattttatgtatgcattcttagagcaaaaagttttgtttaaattctagaattgaaggtactgatcttataaaaagaaattctagcagttttagaaataggtgggaaaaactcaaatattcctcctatctgcaccaaaaagtttatttgtggtatataaaatgaatattgttttataataacttgttaataaagtactttctaatacattctattgactctgttagttgaacaaatagctgacttgaacatctatgcaaacttaagatgggcgggattgttgtaaaagctattgttttaaaagagctttctaaatgtaaagtagtgataatttcaatttgggtagcgtgtttgcaaagcttccaatatttgatgttggttaagctctactatgggcaactgaagatggataaagaaaaatgaaaactgaatcggtgcctgcttccccctgttttcccaggattagaggaaaaaatttattgtataatcagcttcttggttttgaattgcttcgaggcatggttttattccttattactttagacctgtagttttcaacactgacagcactttaaaa

SEQ ID NO: 15349 - DNA, 1439 bp, Homo sapiens
  misc_feature (1)...(1439): n = a,t,c or g
ttttttttttttttggaccccaggagagacgcattttctctttcagatgcaaacaaaatcttacactcttctcctttggatacaatagagaaacggaaagaaaggaaggaacaagaggcctgtgttaagtcctgttgatgttaagtcctgttgagagcaccaggtaaacactctgcaccccttctcttagtagtaataggtttttcactccttggcctcagctgtcctcacaggacagtgggggcagatcagagaacacatcagaaatacatacaaagaaatcgtacaaactggacaggttcccctccccctgccacaactggcatcccaacagagggaacaagtactaaatcatttttgacgacgtaaataagactgaaaacaggttaaacagttgctgaacttaagggcatgacaaaaaggactcctctctctgacccaggtaggcaaaatgctttgggtgtgaggtaaaaaaaaatgggtaagagcagctgtacagagtggggtgaaatgttaaacagggtgcagtgcccaagggctaagaaccaggtccagcgcaacgctggagaccacaggaggcactcacagctcacaaaggcgtctcgcctgattggccagggcaggacctgccgcctcttctcggtgcacagacagtcatgccaaccctgggcagggtggcatctgcccctgcttctcccactgagtggggagacagggcagtgtgctcaggccctcaatcctcacgcaggtaggcctcctgctccgactcagcccgctcctccccttcctcctgtgttttctgacggagctcttctatctgtgcttctgccagcttggtttctgctttccgggagagctggtgcacctcttccacctgcagtttcaccagctgaatgtgattcctggcggttatagaggcctgatctgcgccagtttgatatgcagcttctgctgccatctctgaaagaccaactgcagtcatccaagtggtttccagcttcaagtactcttggtgttttgaagtcatctcagctctggctcctatgatcacctgccacacttcatcttcctcctctgaattcattttcccaagtaaacttgtatattgtcggtaaagagaagttaaggtataaacagccttagtatattcagtaatagcttcaatcaacgcatatgtggtctgagagagaaaggtagaggtgctatctgttaccaaagacactgctctcctcatcaatgcttcactactaagggaatgaggctctgatttctggaagtagaagtcagatttcataaggcacgaccgccaatctgtaacaggctcttggatttacttgcaggggctgtaaactcaaactcgagccaagcaggaacctgaagaatgaagtntactgcgcgacagccaactcttcagagccgccattgtgcagcgcgcgtgc

SEQ ID NO: 15350 - DNA, 3481 bp, Homo sapiens
agggctggctggagctggagagcgacccaggcctcttcaccctgctcgtggaagatttcggtgtcaagggggtgcaagtggaggagatctacgaccttcagagcaaatgtcagggccctgtatatggatttatcttcctgttcaaatggatcgaagagcgccggtcccggcgaaaggtctctaccttggtggatgatacgtccgtgattgatgatgatattgtgaataacatgttctttgcccaccagctgatacccaactcttgtgcaactcatgccttgctgagcgtgctcctgaactgcagcagcgtggacctggggacccaccctgagtcgcatgaaggacttcaccaagggtttcagccctgagagcaaaggatatgcgattggcaatgccccggagttggccaaggcccataatagccatgccaggcccgagccacgccacctccctgagaagcagaatggccttagtgcagtgcggaccatggaggcgttccactttgtcagctatgtgcctatcacaggccggctctttgagctggatgggctgaaggtctaccccattgaccatgggccctggggggaggacgaggagtggaacagacaaggccccggcgggtcatcatggagcgtatcggcctcgcccactgcaggggagccctaccacgacatccgcttcaacctgatggcagtggtgcccgaccgcaggatcaagtatgaggcccaggctgcatgtgctgaaggtgaaccgtcagacagtactagaggctctgcagcagctgataagagtaacacagccagagctgattcagacccacaagtctcaagagtcacagctgcctgaggagtccaagtcagccagcaacaagtccccgctggtgctggaagcaaacagggcccctgcagcctctgagggcaaccacacagatggtgcagaggaggcggctggttcatgcgcacaagccccatcccacagccctcccaacaaacccaagctagtggtgaagcctccaggcagcagcctcaatggggttcaccccaaccccactcccattgtccagcggctgccggcctttctagacaatcacaattatgccaagtcccccatgcaggaggaagaagacctggcggcaggtgtgggccgcagccgagttccagtccgcccaccccagcagtactcagatgatgaggatgactatgaggatgacgaggaggatgacgtgcagaacaccaactctgcccttaggtataaggggaagggaacagggaagccaggggcattgagcggttctgctgatgggcaactgtcagtgctgcagcccaacaccatcaacgtcttggctgagaagctcaaagagtcccagaaggacctctcaattcctctgtccatcaagactagcagcggggctgggagtccggctgtggcagtgcccacacactcgcagccctcacccacccccagcaatgagagtacagacacggcctctgagatcggcagtgctttcaactcgccactgcgctcgcctatccgctcagccaacccgacgcggccctccagccctgtcacctcccacatctccaaggtgctttttggagaggatgacagcctgctgcgtgttgactgcatacgctacaaccgtgctgtccgtgatctgggtcctgtcatcagcacaggcctgctgcacctggctgaggatggggtgctgagtcccctggcgctgacagagggtgggaagggttcctcgccctccatcagaccaatccaaggcagccaggggtccagcagcccagtggagaaggaggtcgtggaagccacggacagcagagagaagacggggatggtgaggcctggcgagcccttgagtggggagaaatactcacccaaggagctgctggcactgctgaagtgtgtggaggctgagattgcaaactatgaggcgtgcctcaaggaggaggtagagaagaggaagaagttcaagattgatgaccagagaaggacccacaactacgatgagttcatctgcacctttatctccatgctggctcaggaaggcatgctggccaacctagtggagcagaacatctccgtgcggcggcgccaaggggtcagcatcggccggctccacaagcagcggaagcctgaccggcggaaacgctctcgcccctacaaggccaagcgccagtgaggactgctggccctgactctgcagcccactcttgccgtgtggccctcaccagggtccttccctgccccacttccccttttcccagtattactgaatagtcccagctggagagtccaggccctgggaatgggaggaaccaggccacattccttccatcgtgccctgaggcctgacacggcagatcagccccatagtgctcaggaggcagcatctggagttggggcacagcgaggtactgcagcttcctccacagccggctgtggagcagcaggacctggcccttctgcctgggcagcagaatatatattttacctatcagagacatctatttttctgggctccaacccaacatgccaccatgttgacataagttcctacctgactatgctttctctcctaggagctgtcctggtgggcccaggtccttgtatcatgccacggtcccaactacagggtcctagctgggggcctgggtgggccctggggctctgggccctgctgctctagccccagccaccagcctgtccctgttgtaaggaagccaggtcttctctcttcattcctcttaggagagtgccaaactcagggacccagcactgggctgggttgggagtagggtgtcccagtggggttggggtgagcaggctgctgggatcccatggcctgagcagagcatgtgggaactgttcagtggcctgtgaactgtcttccttgttctagccaggctgttcaagactgctctccatagcaaggttctagggctcttcgccttcagtgttgtggccctagctatgggcctaaattgggctctaggtctctgtccctggcgcttgaggctcagaagagcctctgtccagcccctcagtattaccatgtctccctctcaggggtagcagagacagggttgcttataggaagctggcaccactcagctcttcctgctactccagtttcctcagcctctgcaaggcactcagggtgggggacagcaggatcaagacaacccgttggagcccctgtgttccagaggacctgatgccaaggggtaatgggcccagcagtgcctctggagcccaggccccaacacagccccatggcctctgccagatggctttgaaaaaggtgatccaagcaggcccctttatctgtacatagtgactgagtggggggtgctggcaagtgtggcagctgcctctgggctgagcacagcttgacccctctagcccctgtaaatactggatcaatgaatgaataaaactctcctaagaatctcctgagaaatgaaaaaaaaaa

SEQ ID NO: 15351 - DNA, 729 bp, Homo sapiens
  misc_feature (1)...(729): n = a,t,c or g
ttcgcactgcatgcaggcccagcgtgcggggcacggacgcggcccgccncntgcaggacctcgcggctgggccgtggntccctgtgccgccgcgctgaacgatgttagagacgccttcacccaggagctacgccgcggcctccgaggccgctcggggccaccaccaggtagccagaggggccctggcgcaaacatttaatcctgggctgtgcggggccgaggctgcttgcttttccttccgggctctacagtggcatcaatgtggaggggtcattccgggcactgcgcgcggcttcgaatcccgactgggattgttggcctgcagacatcccacgcataagagcctaggccagaccgcccgctccgttgaagtcttgtgattggacaagacacagtgtggagaaagacccctaagcctaacagagatgaaggtaggctgggtccagacacggcacctacggagagccacggaccgaagccagagagcctttcctctgcaagtgggactgaaactcttgacagatgctgctcaatctgactggtatagcaggacagttaattccagggacgatatggatgaaaagacaaccctacagctgccaaattcctttgattaaatgtgtgagctggttgataggcatgagtgtgatacttctcaggcaagatgtgttaagaataccggggactgtaggcctatggtaataataaacacgtattttatgaaatgaa

SEQ ID NO: 15352 - DNA, 876 bp, Homo sapiens
gcttgctgagagagtaatattaaaggaacagtgagggagtggaaggagagccttagttagagcgttcccatttctggcctttgggggtttgcactgtgcgggagatgctctctcatcactctgaaggcccatcctgtgcagaagtgggactctgtggctgttcactgagcaccagggcagactgtagctgagcagacttgggttatggatgggatatggggcccagggaccctcaggacacagggaccggctcaaggtaccactcagcctggccaggacccccagctttgcttttgttcttgatctctttgtgatagagaagcttagaacattgaatttggaaccccaaaatgtgtgagtctttggaaaacccattccagcctttcttcaaatgctcttattttcagtatatgaagtgtgtatttgaaatattcatatttctgttatttcttgttttcaagctctgaattattgcagttttctgtcctgcatgctttcaacagtgtgcttttacagtggcagtttaggcacagcgaatgtccctgccccacactccatatggtcctgttttcctgaaaatacactccaggtagcacagacttgttattttgcctggctggttacacacatgctgtcttgctttgctgctcagccacctccctctgaggccaacttaggccaacctacataggactccatctttagcgagacaccagagacacctagtgatgaccacgggtctgcttttctctctgatcctaggggacttgttgacatgggagtgtctgtttccacatggaaggatgtctgtttatctctcatcctctgaatagatgtatgacaactctagtgtccatgggtttaaaatgttgcttt

SEQ ID NO: 15353 - DNA, 1195 bp, Homo sapiens
tttttttttttagtaactatggctatgttgtaacaattttattttgatttttaaaaaaggaatctcttgatttaatcagggctttggggtcatagggggattagtcactgtcacagtcataataatgcatttattcagggaaaactttaatcttctttgtcttctccaaaaacagctgctggaacacctcaaattaagggatgttcatctaaaacacctttactgaaacttgattccttgggccagaggaaggtctttactgtagttgatagtacaagtagaccttctcatgtactgtttccaggcatcactgccagactccctgccaccaccagtgtgcttttctcctccaaaggcacctccaatctcagccccacttgttggaatgttgacatttacaatgccacagtctgatcctttaggtccaagccagcgaaagattctgcccagatctttggtaaagatgctacttgaaagtccctgttttacttcattattccatgcaaagacctcttcttcattcttgaatttaaagacatagagaatcggagcaaaagtctctgtgtgtgcaatggacgcatcgtggccaagacctgtcacaattgtcggttctacataatttccagggcgatccataaccttgcccccatagaccactgtgccaaccttctttctttgcttcttccactgctccaagaaacatgctcactgcctgcttggtgtggagtggcccatagagaacattagggtcccatgggttcccaactcggatctgtgcataggccctttttaagtctgtttacaacctcatcatggatgctttcatgtataaacagtcgccctcgcagtggtacacctctggcccagctgttccccacagcaagcgaagagagctgatggaacaactaagctgaggtctgcatcttcaaaggcaataatggcattgtttcctccaagttccaacagacttctcccaaacctctcctgcaccatcaggcccacctgttttcccacctgagtgctcccagtgaaggacagcaggttcactcgttcatctttggccattgctgtgccaatatctgctccaccacaagtcaaggaacaaattgcaccaggcagcttgttgtcctccagaaccttggctattatctttgtgacagccacactaatgagggaagtggttggagctcctttc

SEQ ID NO: 15354 - DNA, 2288 bp, Homo sapiens
  misc_feature (1)...(2288): n = a,t,c or g
taaaggagactcaggagttgatacccaaaacagtgaaggaaatgccgatgaagaagatccacttggacctaattgctattatgacaaaactaaatccttctttgataatatttcttgtgatgacaatagagaacggagaccaacctgggctgaagaaagaagattaaatgctgaaacatttggaatcccacttcgtccaaaccgtggccgtgggggatacagaggcagaggaggtcttggtttccgtggtggcagagggcgtggtggtggcagaggtggtaccttcactgcccctcgaggatttcgcggtggattcagaggaggtcgtgggggccgggagtttgcggattttgaatataggaaagacaacaaagttgctgcatagtctacaaacaagtctctgaaaataggtgaatttctagctcttcatggtcctgaacattgatttcagtctttgcaaagaatgaagaagtgaattcgctgtacatttgtcaccagcactgggtttttgttttttgtttgtttttccgcttaatttcaaagataaaatgcagttacttttgggggtggaaggctcatcttaaaacatgagcattaaatatatttgggaatagcagaaggttaagtaatttcttatgtatagttaaactaaagcagtacttcagtggggactttaacaagtatttttttcatcactggaaaggttttttttttttatcaccaaattgtatttgggcaatgccaagttgccctgccagatagggccgtgataactgtgttttgagccacagaagnnnnnnnnnnnnnnnnnnnnnnnnnnnnnnnnnnnnnnnnnnnnnnnnnnnccctcctttcttttggggaatcctgtaatatgaggtagcttatttcgtcaattaattagggtgctggatggtagagaattttgtcagtcaactatgtacacacagtaaatactgtttcttaggcaaaggtaacttttttatatagttgtaaaattccattatattccattgccaaagaaacattaagaactttatatagctgtataaaaagcaactaattttttaaagaataaacattttaaagtcagcaaacatactgtgtccttgcagaagttgatgtgctgagcagcagcccttatgggtgggtctctttttcttagttttccaggcttaacatttttgattttgttttttaatgtttggaacataaatgaagatttgatacattatttcattatctaaaaaggattaattattcatgctcattgtaagaacttcattttgtagcaaatggcatatcacaggatctgtccagataatcgatattttcagtatacaaatgtaaataatcacagatgagaatgtacttagctgtattttcaaataagtaatcttccccccttttgtaggactttaaaactaggcatcaatgaacctgtttttcctattatgcctggaatttagtcatgataccttgactcattccatcatatttcaagaggattcagagtgctagaaattattttggtagcctgtaacacacggcaacactggtccttgggcctatgatgacccacagatgactcagtatagagttcattgctaattataaattactagtgaatctttttgatattttaagctctagtgggaaaaatctggccacttttgtgtttttatgaaggccatggaataaaaggatccaaagatttaaatatttttatctaatattttgattgttttcttaactttctccttaaaacattcagtagtgataaagatatagaaactgcactgtaggagaattggaatatttaaggctggttgacattttttattttcattttatatcctttgtatagctctacaaggcagtgttttgtaatttggtttccattatgaagatccagtacttggcagccatagtttagaccatattgttcagtgctgtttgccttgcatgttaacaacaaaaccttttagaggacccacaaatcatgatattgaacacagttccgaggcattcagagcatcagagcaagtaccatggcaatacatgtgtagactgttggagatgtcccgggccaatttcaagaaagaaaactgtaaatactagttctacttgctctgaaattatgagtttatgcgttttcccagccctccgaatcactgactggggcgttttgtgccccagcaataactggcagcatggcatacctgcaggtaccccttacaatattaaagcaaagtttttattctaaaacagaataaaactgttcaata

SEQ ID NO: 15355 - DNA, 969 bp, Homo sapiens
gagggtaagaagtttgtcccacgaggtttctcttactttgcctccgcagtatacacgtacatccaaagccggttctaccgatccccagaagtgatcctgggccacccctacgacgtggccattgacatgtggagcctgggctgcatcacggcggagttgtacacgggctaccccctgttccccggggagaatgaggtggagcagctggcctgcatcatggaggtgctgggtctgccgccagccggcttcattcagacagcctccaggagacagacattctttgattccaaaggttttcctaaaaatataaccaacaacagggggaaaaaaagatacccagattccaaggacctcacgatggtgctgaaaacctatgacaccagcttcctggactttctcagaaggtgtttggtatgggaaccttctcttcgcatgaccccggaccaggccctcaagcatgcttggattcatcagtctcggaacctcaagccacagcccaggccccagaccctgaggaaatccaattcctttttcccctctgagacaaggaaggacaaggttcaaggctgtcatcactcgagcagaaaagcagatgagatcaccaaagagactacagagaaaacaaaagatagccccacgaagcatgttcagcattcaggtgatcagcaggactgtctccagcacggagctgacactgttcagctgcctcaactggtagacgctcccaagaagtcagaggcagctgtcggggcggaggtgtccatgacctccccaggacagagcaaaaacttctccctcaagaacacaaacgttttaccccctattgtatgacctttgctgagggtatgtcctgctcctttccaccagtgatttgtattaagacagcacttatattgtacaatacttcagactgttttttttaaatacataaaactttatgttaaaaaactctattaacatgaaaaaaaa

SEQ ID NO: 15356 - DNA, 521 bp, Homo sapiens
  misc_feature (1)...(521): n = a,t,c or g
gctaagaaacctaatttgtgcttaggaatcttcccaggtaagaagaactagttcctctagttgttgtttttttttcccaaacatgcaaacactgaggattgagctgtgtggggtcagctgtgctgccaggcacatgtacgttgcctcatttcatccttgcaacagctctgcagggccccgcagatgaggaaatccgtaggcaggagcggttgagtgattttcctaaggtcacccagctgtttggtaatagtgttttgtcatctggtagcaggtttccattaccatgccatcagagcagacctcagccagggccacagaggtcccaaccgtctctgccctcttctgctgcccctgcctcatgggctcccagccacaggttccccatgggccaactttacgcctcctgatccttccgaatggggcanactagganaggaaagacggcctgggctgggtgcgtggtcangcctgtaanccancantttnaaaaggtnacgcggttggtcncctnnaggcaagtt

SEQ ID NO: 15357 - DNA, 651 bp, Homo sapiens
  misc_feature (1)...(651): n = a,t,c or g
ggcaatttggtggtantccatttgcttccttggtgagcaatacatccnctggtgaangtantcaaccttcccgtncannanatacagatccacnacccaatccatgggctccacanacttcccacagttcatcagcttccagcggcactgccagcactgtgggtggcactactggtagtactgccactggcacttctgggcagtagtactactgcgccaaatttggtgcctggagtaggagctagtatgttcaacacaccaggaatgcagancttgttgcancaaatanctgaaaacccacanctgangcanaacatgttgtcngccccctacatnagaagcatgatgcagtcactaagccagaatcctgaccttgctgcacangtgcagaatcctgatacacnatcagcaatgtcagaccctagancaatgcaagccttgttacnantcaccagggtttanagacattagaaccggnagccccgggctaatccaaagggttaatcctggcctggngggatngggaaccccggaggcccttcgggaanaangggncnncgcnncgcnnntgnnaancacgnccctnngnngaccncgncncgggcacccaaaattnccncaaantnntncnnnnnggggggnnnnnccccc

SEQ ID NO: 15358 - DNA, 1134 bp, Homo sapiens
ttgcggccgctgcctccgcggaacccaaaatcatgaaagtcaccgtgaagaccccgaagaacaaggaggaattcgccgtgcccgagaatagctccgtccagcagacgttggaacttgccaggaatccagcaatgatgcaggagatgatgaggaaccaggaccgagctttgagcaacctagaaagcatcccagggggatataatgctttaaggcgcatgtacacagatattcaggaaccaatgctgagtgctgcacaagagcagtttggtggtaatccatttgcttccttggtgagcaatacatcctctggtgaaggtagtcaaccttcccgtacagaaaatagagatccactacccaatccatgggctccacagacttcccagagttcatcagcttccagcggcactgccagcactgtgggtggcactactggtagtactgccagtggcacttctgggcagagtactactgcgccaaatttggtgcctggagtaggagctagtatgttcaacacaccagggaatgcagagcttgttgcaacaaataactgaaaacccacaacttatgcaaaacatgttgtctgccccctacatgagaagcatgatgcagtcactaagccagaatcctgaccttgctgcacagatgatgctgaataatcccctatttgctggaaatcctcagcttcaagaacaaatgagacaacagctcccaactttcctccaacaaatgcagaatcctgatacactatcagcaatgtcaaaccctagagcaatgcaggccttgttacagattcagcagggtttacagacattagcaacggaagccccgggcctcatcccagggtttactcctggcttgggggcattaggaagcactggaggctcttcgggaactaatggatctaacgccacacctagtgaaaacacaagtcccacagcaggaaccactgaacctggacatcagcagtttattcagcagatgctgcaggctcttgctggagtaaatcctcagctacagaatccagaagtcagatttcagcaacaactggaacaactcagtgcaatgggatttttgaaccgtgaagcaaacttgcaagctctaatagcaacaggaggtgatatcaatgcagctatt

SEQ ID NO: 15359 - DNA, 1062 bp, Homo sapiens
gatacatgaggagagagtaaattgaggtttggggattataaattcaggcaagagaaccttatagatatcacagtcttgagggtcaaaaaaaaatacttaggaagctagccatggaagcttcttgcctctgacccagcccactttcccagcctacctctgggccttagctgctaaaaagcttctctggcagcggagctgcaggcctgaggaaacatgctcagtcatgcacatgtgttgacccatgtttcagatgcagtctgatgccaggtatattgttagggaaagaggaagaagggtaaactgagctagcccctggggctgagtactcctgcagggctggaggaacaggttcttagaagatgattcaccttggaggaagctggggaaagtggttagggagggagaggaggaagactgagaaatctctgcatccccagaactcagcaacccagctcttttatcatgaggagaggtagccatgctgactcatgaacaggtggaggaaaggggttgcaggttgaccagcattcttcaatctagtttaccaccagctttggctagaattttattgaacgcaacttgctagttattgacagagaggaccagggtgagaactaatgctcaagagagcaagattctgtaatcctcttgccctctcacatcacaaattctgatatgccaaacatttggccccaatgagaatgactgatagacttgctgatgtgcatgtggggggatgaggtgtgtatatgcctttctcctgactggccattcagtgttcaggctgtcattcaaattggataggagaaagttggtgaggaaggaatggagagagcaggatccctgggactccctgggtccccaaactccttgactgtcacttgtaattgtatataatttttgtgtttcttgctccatttcctcatgctgtcatccttaaagtccatctgggaaggggaaaatgctgaacaccattgtatagtttcttcaactgtcccagccatgttgtacatagatatgtcatgttattatatatataaatatatatataattttgtaccg

SEQ ID NO: 15360 - DNA, 1075 bp, Homo sapiens
  misc_feature (1)...(1075): n = a,t,c or g
gtggccgccgtcgcccggatcccctgagctgcccgccatcccacgtgaccgcgccgccccccagctccaccgctgagcccgctcgccatggccctcttcggggccctcttcctagcgctgctggcaggcgcacatgcagagttcccaggctgcaagatccgcgtcacctccaaggcgctggagctggtgaagcaggaggggctgcgctttctggagcaagagctggagactatcaccattccggacctgcggggcaaagaaggccacttctactacaacatctctgaggtgaaggtcacagagcttgcaactgacatcttccgagctcgattttccagccacagcaggagctgatgcttcaaatcaccaatgcctccttggggctgcgcttccggagacagctgctctactggttcttctatgatgggggctacatcaacgcctcagctgagggtgtgtccatccgcactggtctggagctctcccgggatcccgctggacggatgaaagtgtccaatgtctcctgccaggcctctgtctccagaatgcacgcggccttcgggggaaccttcaagaaggtgtatgattttctctccacgttcatcacctcagggatgcgcttcctcctcaaccagcagatctgccctgtcctctaccacgcagggacggtcctgcttcaactccctcctgggacaacgtgcctgttgcggcagttctgtgggacgagctttttgggcattgaattattccctcatgaaggatcctgtggcttccaccagcaacctgggacatggacttccggggggccttcttccccctgactgagaggaactggagcctccccaaccgggcagtggagccccagctgcaggaggaagagcggatggtgtatgtggccttctctgagttcttcttcgactctgccatggagagctacttcccggggcgggggcctgncagctgttgctggtgggggacaaggtgccccacgaacctgggacatgcttgctgagggccacctacttttgggagcattnttcctgnttgaagcccagcagtgattgaatttcccatt

SEQ ID NO: 15361 - DNA, 3684 bp, Homo sapiens
  misc_feature (1)...(3684): n = a,t,c or g
ggtttttaaatatttccaaactgaccaacccagtttctcttaacttcttccttctccaattttcttttccacttttaccaagttaacttcacattcttatctccagataagttctttagtataatctattactttgtcttcccgattaattacctaaatctcgtttgatgtttgtccttttcataccactcataggtcagattctcctaatacagctccataattaataagaaacagtcatcaattacaagttttaaggactattctctcctccctgtcctctgtctctccagggtcaccccagctctgatatttgccatcacagttgctacaatcggctctttccaatttggctacaacactggggtcatcaatgctcctgagaagatcataaaggaatttatcaataaaactttgacgggacaagggaaatgccccaccctctgaaggtgctgctcacgtctctctggtccttgtctgtggccatattttccgtcgggggtatgatcggctccttttccgtcggactcttcgtcaaccgctttgggcaggcgcaattcaatgctgattgtcaacctgttgggctgtcactggtggctgctttatgggactgtgtaaagtagctaagtcggttgaaatgctgatcctgggtcgcttggttattggcctcttctgcggactctgcacaggttttgtgcccatgtacattggagagatctcgcctactgccctgcggggtgcctttggactctcaaccagctgggcatcgttgttggaattctggtggcccagatctttggtctggaattcatccttgggtctgaagagctatggccgctgctactgggttttaccatccttcctgctatcctacaaagtgcagcccttccattttgccctgaaagtcccagatttttgctcattaacagaaaagaagaggagaatgctaagcagatcctccagcggttgtggggcacccaggatgtatcccaagacatccaggagatgaaagatgagagtgcaaggatgtcacaagaaaagcaagtcaccgtgctagagctctttagagtgtccagctaccgacagcccatcatcatttccattgtgctccagctctctcagcagctctctgggatcaatgctgtgttctattactcaacaggaatcttcaaggatgcaggtgttcaagagcccatctatgccaccatcggcgcgggtgtggttaatactatcttcactgtagtttctctatttctggtggaaagggcaggaagaaggactctgcatatgataggccttggagggatggctttttgttccacgctcatgactgtttctttgttattaaaggataactataatgggatgagctttgtctgtattggggctatcttggtctttgtagccttctttgaaattggaccaggccccattccctggtttattgtggccgaactcttcagccagggcccccgcccagctgcgatggcagtggccggctgctccaactggacctccaacttcctagtcggattgctcttcccctccgctgctcactatttaggagcctacgtttttattatcttcaccggcttcctcattaccttcttggcttttaccttcttcaaagtccctgagacccgtggcaggacttttgaggatatcacacgggcctttgaagggcaggcacacggtgcagatagatctggaaaggacggcgtcatggagatgaacagcatcgagcctgctaaggagaccaccaccaatgtctaagtcgtgcctccttccacctccctcccggcatgggaaagccacctctccctcaacaagggagagacctcatcaggatgaacccaggacgcttctgaatgctgctacttaattcctttctcatcccacgcactccatgagcaccccaaggctgcggtttgttggatcttcaatggctttttaaattttatttcctggacatcctcttctgcttaggagagaccgagtgnaacctaccttcatttcaggagggattggccgcttggcacatgacaactttgccagcttttcctcccttgggttctgatattgccgcactaggggatataggagaggaaaagtaaggtgcagttcccccaacctcagacttaccaggaagcagatacatatgagtgtggaagccggagggtgtttatgtaagagcaccttcctcacttccatacagctctacgtggcaaattaacttgagttttatttattttatcctctggtttaattacataatttttttttttttacttttaaagtttcaggatacatgtgccgaatgtgcaggtttggttacatagggtatatatatgccatggatgggaaatatttatttttttaagcgtaattttgccaaataataaaaacagaaggaaattgagattagagggaggtgtttaaagagaggttatagagtagaagatttgatgctggagaggttaaggtgcaataagaatttagggagaaatgttgttcattattggagggtaaatgatgtggtgcctgaggtctgtacgttacctcttaacaatttctgtccttcagatggaaactctttaacttctcgtaaaagtcatatacctatataataaagctactgatttcctttggagcttttttctttaagataatagtttacatgtagtagtacttgaaatctagggattattaactaatatggggcattgtagttaatgatggttgatggggttctaattttgggatgggagtccaggggaaggaggaaagtgatttctaggaaagcctgttccccctcactgggatggaataacttcctccttgtagtagtctcattacttttgaagtaatcccgccacctatctcgtgggagagccatccaaataagaaacctaaaataattggttcttggtagagattcattatttttccactttgttctttaggagattttaggtgttgattttctgttgtattttaactcatacctttaaaggaattccccaaagaatgtttatagcaaacttggaatttgtaacctcagctctgggagaggatttttttctgagcgattattatctaaagtgtgttgttgctttaggctcacggcacgcttgcgtatgtctgttaccatgtcactgtggtcctatgccgaatgccctcaggggacttgaatctttccaataaaccaggtttagacagtatgagtcaatgtgcagtgcagcccacacttgagaggatgaatgtatgtgcactgtcactttgctctgggtggaagtatgttattgttgacttattttctctgtgtttgttcctacagcccctttttcatatgttgctcagtctccctttcccttcttggtgcttacacatctcagaccctttagccaaacccttgccagtgacagtattttggttcttagttctcactgttccctctgctcctggagcctttgaataaaaatgcacgtagctatggagtggggtttagctggaaaggtggccttccaacttcacgtcaacttctggctcctcagtttggcagtaaggcagggaagttgttttcctatttctcactgagaagattgtgaatatttccatatggattttccattattgtttgtttgattctttgttttaaaataaaaattctgaatgtacatgaaa

SEQ ID NO: 15362 - DNA, 809 bp, Homo sapiens
aaagattcaatgacaaagttttattaaataccaatactggctaggcacaattagacacattattatctcatttgctgtatctggtatcaaacaacaaagcctgaaagattaccatagattttgatggcctcattaacataattaatccgtagtgacattccctggataataaatacagttttatgtccgtgtgtcttctgtgtcttccaagttgctacagggctctatttgatctgagaaactgactgctgtttacatccaggtatgcaatgtgacattagaattgaagcagaaaggaagcaaaacaaaacagggttcatgaggaaaataatcttctaagaactaacatggcctggaggtaaaatgcaaatatatccggtaataagaagcccagattactgcagataaaagattaaaataggattcaattattcatctccatttgcaaatctacaaactaggaggaaggactaacccttttcctgggattagtaactaaatttaatgattacagcaaatataaagttcttttgtaaattattgttggttaatgattgacttgcattgacaacacactttactctcgcccctttcattctccgcctgcaagaacaaaggcaaaatgaacagtgaggaaaacctggaaacaggaccgagtgtttgctatcacttgattcctttgaaggagcaatgctttctcataatataggttttatagtatcatcaagtacatcagttaagcaaatcaagtgctttgtgttctgtatataaattacataatacaagagtctgtggcagttaagaatctg

SEQ ID NO: 15363 - DNA, 821 bp, Homo sapiens
ttttttttttatttttttagtgggtaaaaccatttttattaactgaccaaagcacatcattttgttttctgatttgaggtaaaatcataaaacacagttcacaagaaaatacaatgactatttaaccacaattacaagtttgaaatctcactaggtgttcatatacttttacaaattcatacaactgtatagtctacttaagcttagtgttaaccaaaagagcaatatcaaagacctagacacttgactactacttttgcagtgggtatagttttataacaacagaataactgttaccttatgaatatactttactttaaaaaccacttgactagcgactgtactgtttcctcgtggttcaggggtgtgcatgaaggctcttaggagagcaaacacctgttcctattctgtatgtccctccctcatttcaaatgagagtaaccaattgagtaaaataaccaaataaccattgccccaccatgaacatggggcttgggaagacagtcctacaatcttcatcatatatttaggtttttaggccagccagctctttttttccaaagctttcttttgaatgttcagatcctattttaatcctaactatagactactgtgtttgtgagggtgtctgagtgtctatgtgagggcaaggacaacagtgcagtccagaaacacagaaaatatgcttttttgcagctgagctctgttttgagatttcattttgttactggacagcgcttaatccataccaaagtctttggaacactgcagatttgctttagaggtagataaaacagaaatcatgcagttaagtcaattga

SEQ ID NO: 15364 - DNA, 1014 bp, Homo sapiens
gcctgatgctggagctcttatttctagcctgatgctggagctcttatatctagcctgatgctggagctcttgaagctgactcttggaagtttggagggtgtagagtttcccatctagtatttaatttgtccctgtgccattagtcccagcttgaagtcatttgccagtgtcgatgttgacaggattgtgacaatattgcctttcataaaaccgagaaccaaagaattccattattctaacaaagcctgagtttcatagattgtgggcacatctagacagatatgtgcatgcttgatggtgcagagaaactgctgacttccaccaacctcatgctccccctgggctggccatacagagggattcgttgtcatattgaaaaggctctgaaagatgagtttctaattgaagctcactatctcaggttggtgtttctactgtgtagtcccaagcctgtatccatatcataaaagtggaggcctggtactcctccaggttatctggccagtgtagactcctccatctgaatatgaacctccagggtaagaatttttcagacatgtctatactgaacagtaggatcctgcactttccaaatgtctgcctccttttgttcttcattgacccattctaattcctgttaggtgtgagaagaattgtcttcagttctctctccattctcattcatgatggaatcattgatccattgaccagttgagaaatgattgatgctgaagaggtggtattctattggtaaggcttattaccaaacttccgataatgaagccaggctaccaaaaacttatccagcccaccctagggagtgtttggatttgatcatggatgtagcatacaccaaaatccaccgaggacctttgcaaaattagggctacttgttttattttgccaggattatcatggggagagtctttaactagttctggaatatttgtaagtctgagtactttcataggatttataaagggagggtaccagctggaccccctttcttcaccc

SEQ ID NO: 15365 - DNA, 1352 bp, Homo sapiens
cggttgaggccttcggtggtgaacgagtctccagcaccatgtctcggtttgtctggcccaccagcccggcgcggcccttttccgttagcgttgctgcttttgttcctgctcggccccagattggtccttgccatctccttccatctgcccattaactctcgcaagtgcctccgtgagggatttcacaaggacctgctagtgactggcgcgtacgagatctccgaccagtctggggggcgctggcggcctggcgcagccaacctcaagatcacagattctgctgggccatattctctactcaaaagaggatgcaaccaaggggaaatttgcctttaccactgaagattatgacatgtttgaagtgtgttttgagagcaagggaacagggcggatacctgaccaactcgtgatcctagacatgaagcatggagtggaggcgaaaaattacgaagagattgcaaaagttgagaagctcaaaccattagaggtagagctgcgcacgcctagaagacctttcagaatctattgttaatgattttgcctacatgaagaagagagaagaggagatgcgtgataccaacgagtcaacaaacactcgggtcctatacttcagcatcttttcaatgttctgtctcattggactagctacctggcaggtcttctacctgcgacgcttcttcaaggccaagaaattgattgagtaatgaatgaggcatattctcctcccaccttgtacctcagccagcagaacatcgctgggacgtgcctggcctaaggcatcctaccaacagcaccatcaaggcacgttggagctttcttgccagaactgatctcttttggtgtgggaggacatggggtaccacctacacccaacaagtcaatgagggacttctttttaatttggtaggattttgactggttttgcaacaataggtctattattagagtcacctatgacaaaaaataggggttacctagataatgcccaaagtcagcatttgtcctgggttcccttgtgtgatctgtttggactatgttttcttttcttctcccacttgctcagcagcttgggcttccattctagttcttttaccaagatttttgtgtgaccatgttgacttcatttggattgccctctttcaatttccttgtgaaaacacccttaactttctctttacccttagctgaaatgtttacatagcttctggtgatatcttttcatgattttatatctcttaaaatggtgatggatgtgacacctcataaaagtgagctttgaactgtagataactcttaaagaaaatgtcattttagacaattaaaatatttgtgctcaactgcttgaaaaaaaa

SEQ ID NO: 15366 - DNA, 1434 bp, Homo sapiens
aggtgacggacgcctcaagagagagaagagaaaatgaaagcagctggttttgcagaagtgtgtgtcgcatgcgccagttgggcctggaccctcctgtgtccatccctgttcccccaggggctctatcagcccctgtagcccacactgccctctgaagacaacacaggctcctgcttccacctcggcccttgcccagggtggggcctgggcttcatcttgaccaaagctgctgtgtggcagcttcggcctctctacgaccccatcttggtggctgcacactcttcctgggcccgcacccccatccccagtccctgttccccaagaggatacagagcacggtgctgggttgattcaactgtgcgtcccaggttcagggtcttacagagctccaccccctggggtcttacctcactgggaatgtgttttgaaaatgaattgaagacaagccaacaaacccctgcactccaaaaaagcaaaacagaccctaatttttttgtgccaaaaactgtggacatgctggctcagcatcctcaggaccaagttgttgcttaatttattgttttttaataactaatccagataaaaagttgtggggcttcagggtgacctgggcccaaaggttctgaagggcagttcctggcagccccaggcttgctgtgggaaggggccgtgccgtcactttctcatcattccatggggtgtgtctgcctgggccaactctgcatggagaggccagggctggggacagtccgcactctgccaccctcctgccccttccacccaccccagctctatgtctgtgtctgaattgtggatcgtgcagccatggttattgtggaactgtggaacctgcagccatagttatttgactatatcttgaccgagggcttgcagtgcaaagccaggccagtgttgcgcattacttacaataaaagggatcatttatatcagaggggtcctgtggcagtgctttcagttgtggggggtggaggtaggtttttgcttagcaggggccaggtatggtgcctggcaacgagcctgggcctttcaagcagaagagaacttgactccaagtagaggggtcctggggtgatctggctgataccattgtcagtccagaggtgtctgcccctttcctccagttgcccctccaggagctccactggggtggtcccaacagggctgatttaccagggtggcactgctggccctcacaacctgaacgtcaccagtggctgagttcccggagctttcatgatatttggtagggtcttcctggcccagaggacttccttcagtcccatctttgcagggcaggggtcagtgtctccaagagccacctctccagtacccccttgtggtcatctgctactgttgcttaaccgaaccaagatgatccttgccatctgagacctctggtgcaggaagttggcc

SEQ ID NO: 15367 - DNA, 965 bp, Homo sapiens
  misc_feature (1)...(965): n = a,t,c or g
tttttttttttttgcatttaacattttattgagattctcaacagctgccatttggtttgtatagcaaattttttacaaagtaacttttttccatttttgatatttttatgaaaattattttcttcagttttaaagccctgtccctcccccaaagaaggattaataactaccaagtaaggattatttaggagaaaaacaaaagcaaaaacagctttataaacacttgtgaaacaggggtaagtgtccgaagtcaagaccttctgggcccagtggaggtgctgggctgctccaggacaccatcaccacttcaccatccacaacatcctcaagagctgagcagccctgcacagaccctggggggcttcctgttccacaagctccactccctttttcctctccatctttgctgttgggcctcccctccaaatctgcctaacaaaggcagcacgatctttaatacctgtgcagctttgtaaatggagccaggatactctattttgaaagttgagattccctatccagtctgggggaggaaaaattatccaatgtagcatggatggtttcactttcttgtccactcagacacatgctcatacttattaaatggatttattggatgcttcaaaagtcctgatgtgtagtagcacaaaagttccttgtaaaaaaagaagttgcaaaattataaaaatttctgcagcagttctggctctggatgacaaagctcattctgattagtagtttttttgacatgcacagcagcttcccctataagtcctacgttcggagggttccgtttagacaacaggaagttggaatccaagtttaaaaggctctctgctgacaaaatgtggtacatccatcaacagaattctactcagcaataaaaggaacaaactaccaagacgttatctgtcatggacaaacctcanaaacattagctaagtaaaaaagccagacccaaggga

SEQ ID NO: 15368 - DNA, 569 bp, Homo sapiens
gggagattctatcctgtatatccagcacctaacgtagttgccaacaccagtggttcggggcccaagaagaatgggaatgtctcatgttacaattgtggtgtaagcggacactatgcacaggactgtaagcagtcgtccatggaggccaatcaacaaggcacttacagactgagatacgcacctcccctccccccttctaatgatacgttggattctgcagactgaaacgagtaaagcttgcctacttaatacactcaagtgtggggagtcatggggtgtggaggggaggaaaggaaaggtattttgtttctttgtctatacatttcctagatttctatgcagttgggatttttcatttctcttgtaccaatgtccaaaacaagaaagaatgcaatgcttttgagcctctggtctcctggttcaacaacaggcttatatggtatgatacatgtaatttaaaccttcagacaaacttaaatgttggtgcgtgcttttgtttttttttttttacactgaatacttggctggtggggcaatgtttactggaatctttaaaactggggtatttg

SEQ ID NO: 15369 - DNA, 635 bp, Homo sapiens
gactgaagatttgtacagccggctggggaagcagcccccaccgggtattgtggccccagctgctatgctgtccagccgccagcgccgcctctccaagggcagcttccccacctcccgccgcaacagcctacagcgctctgagcccccaggccctggcatcatgcgaaggaactctctgagtggcagcagcaccggctcccaggagcagcgggcaagcaagggggtgacattcgccggggatgttggcaggatgtgaattcagaacagaagccatgtatctcccccacaccagggcccaccatggagcttgtgttctcagaatctgatgctttctgatcaacaaaactgagcaaggaagatcccaacactgaaggggtagaaggccaggggggcatggagagtgcagctccattatagtgaagagccaaacatatgtgaactgtttgctgtgtggaggtgttagttctgctgcctaccatcttcatctctagcacctcccctgccaagagtcaaccactaagcaatcccacccaagcctggatgcttctagaggggcccactcccagctgggagagtgtaggggatatgctcacaccacattagcagcaaccaataaaaatgctggaaacaagaaa

SEQ ID NO: 15370 - DNA, 1168 bp, Homo sapiens
  misc_feature (1)...(1168): n = a,t,c or g
ttttttttttcattgtaacactcgtttttatataaatattcgcaagtcatgttacagaagaagccccaccagggaaaaaagtcaacgttagggttttgttagattgacccctgccttctaggttgggccccagcctggaggcgcctgctgctttgggaaggctggggttgctgccgtgaggctgccgaagaagctgcctgtgtcgcccacccctgggccgacccccttctttggtgtgtggtacatggtgaccttctctggccacccttagcctggggcagggttttggagaacagggttcagggaagcagggcccaggagtcctgggggcacttggaaatggggtgaaggggactgagccattaagaggtggtggagtctgagatttagaggctgagcctttgggggtgggggcagagtgaacgggaacatgttgggggaaccggggctgtcagccaagtaggaagcttctgcccttccctccagcccaggtccccaggtcctgccccctgttggtcatctcctgctggccccaccttcccagggagaagcctgactgtcccttcccggctcttccccctgcagtcccctttccccacagagaggccagaggcctaggaacacagcaccagtctgagggtttaattaaccaggaagggaactgttgggaggggcacccctgtaaaaatgtacaaaaggtcttggggctatgtgaaaggggtgataaatatgtacatggaaccccccttccttgagcccctcctcccccagccctcggagggcatgaggacttgggtggtaggtgaacgggagggggcactttggcctctggcttagtgagcccttggggaggcaggcccagggcctagaggcccttacaggggcaaaggtgtacctcaggaggccccatggcccccgagatgagccacactcccatgcacacgcccctctcccttctctagaggctgtgacctctgctctcccagtgaccctacactccatgtgatgcttggtcttgtgggggttgaggcttctgttcccaggttccatgacctcagaggtggctggtnaggttatgacctttgccctccagccctggcttaaaacctcagccctaggacctggttaaaggaaggggagatggagctttgccccgacccccccccgc

SEQ ID NO: 15371 - DNA, 1041 bp, Homo sapiens
tttttttttttttttttttagagtcaataatgtattatacatcttagatttatacatttcatatatgcttttaaagcttcaattaacagttcaatacaaaatttaaaaacaaatatatgcagcagtggttctcaggcacagaactgaggaggagactggagcaagtcttttccctagcatacatacagtgaatactatgaaccatgagagtggtatgtttccttctgacctagctgcctttttgattgaattttgttacaatgaacagctttaataggtatgatattgctaactggaaacaatgagatttaaaataaattgataacctgtattttcttgaagtctttaagacctaaaatgattacttttctcctaatagagctccagaatcatccaatgaaaataatattgtccataaagcatctagagtatctgcctaagaaccactgcccagggttattcaatgtcttcaggcctcacaggatgaggtaatgggtatgatggatttcttctcagtatccctggaaagtgctttcctcatatcataagcgtcctcatcaggctccccgttgctggccgaatagtactctatgaccgtcctatatacactgtagcccaactgcttgtacatgttaactgcaacttggttagatactcttacaaagagatccacaaaaaatccaccctttctttctgaaatctcctctagtaactccataagtttagcagccaaaccaaggcgtcgaaattctggggcaacagacagagctgtgacgtgcccgtgccattcttccctagctactgagccttctgctttacccataatataacccattaattctccaccaggtgcctctgcaacaatgaaatactctggccagtgggcgaggtattgtaggtagaaaggaatcccataagtttctgtaagtggatccaagttaatgttgttgaagcggaacaggtcgtcgcaggtaaaggcccgtagcgtggtcatcgcgccgccgccgcttccgaagaccgttcgccaagaccccgcgcccg

SEQ ID NO: 15372 - DNA, 563 bp, Homo sapiens
gggaacttgtggaaaaagtgaaaaacattttctgaaaaacagctcttagaaattaaaactgaagaaaatagaactaaactcccccagaaagattttgaaaataaaatttaaggaaatttactggaatattgggccagtacgacagaaggatttttaaaaaacttagtccaggaactgtactaccagcttaatagttgtggacagaataaaagcagagggaattgcttaagaaaaaaaatttgcagtactaaaggacattcatctttaggttgagcaggtcctacaagtgatcaggacagtgaatgaaaaagatccatacctaggaatacccctgtgaaattttagaacacgggggtggtgggggtgggtgtaggtcacagaattatgaatcagaatggcctaagactggtcagtaacaacgggggaagttgaagacattggagaaacatcctcagggtgctgagtgaaaatgtgtctgccggagggggaaaaagacattttcagatatacagggtctcaactgatttatctcccacgggccttttctcaggaaactccaccaa

SEQ ID NO: 15373 - DNA, 438 bp, Homo sapiens
gtgccacctttaatgaagttaaaagtcaaaatcttttggtaaaaggacttaagctttctaattcctatgaagattttgagttgaagaaattactattcaatgtaattgtgatcttatgtaaagatttacctactgtacagctattaattgatggcaaagttattttggctttgtttacctatgttaagaagcctgagaagcaaaaaataattgactggtctgcagcacagcatgaagaattacaactgcatgcaattgccactttgtcatcagtggctcctttattaatagaagaatacatgtcatgccagggaaatgctcgagtccttgcatttctagaatggtgtgagagtgaagatccgtttttcagtcatggtaacagttttcatggtacaggtggccgaggcaacaagtttgcccagatgccgttcagtttaa

SEQ ID NO: 15374 - DNA, 557 bp, Homo sapiens
  misc_feature (1)...(557): n = a,t,c or g
gagcaaattattgtattatcctttctggtctcacctggaagagtttcctgctgtcctcagtatgataacatggcgacctcttggtatgtatttctttagcaaacttacccatcaggaaatatccagcacctctgaagcaaacctacaaatgagtgtgttatcaagcccagccgtcttcctttcccctaatcccaaaaggaaagaaagaaaaacttattttaagctgcagaaaaagtgtggagcacttttgagctagaataatgtagaaaattacatgtactgatttttttaaaaacaggtgagaagcaccagagggacaggacttctagaagttagaataatatgaagtaatcaggaaatatctatgcctacagaagcagcaaccgtaagataaacatttgttacacttaagaaattgctgaggttaatactttgttataatggattataatatttgacattcatagtgttgaccctggaatctttcacagaaagcttgggggtcaggaccaggaggtagaattttacaaggcaataaatgaaggncctttaagatc

SEQ ID NO: 15375 - DNA, 1088 bp, Homo sapiens
ggggtctggctttctctttagttctcatcacactagggctctcagtcacagagaaggcacttaaatgggaaggccacctgatgcaggccaaccatattcaccccccgcccacccgctctgggggaggggagcacaacgacatcaccacttgacatcccccttgggcactggtatgtggggtccccttaaccgttagaccctgggggagagcccaaggcctttgacctccggaatcgccatgttagggaggagggggcttcaggaaacagtttgggaaggcaggatatcctgggagttccccccagccagcaggggatcaggcagggggctgtaggagatgggttggcacaggggaaggggacagcttggtcgggcttcctggagatccccaaaccccacagaaggtcccacctcctacagatcccccaaaggcaccggtgaaggatgggcaaggaggcactgatgagctggcgtagagaccccccacacacacttagctggtgggcctagcatatgctgggcacagaaggtgctcaagaaatgtttttttgaatgaatgaacggagcaaaggggtgtgagggacagaggacagggcctgggccccttggcccagcttgttccattcagaaaatagcagtttaaaaaatgtaaaaatcctttccctccctccccccaacttctgggcccaggaaaggggcaagggaggggtgtctctaccctgacccttccctctctccttcccctaaaaatctatatacacatgtacatatttatatggcaccacaaggggggtcctgcctatgcccccacgctcagagctgggggagccaagccccggggctggttaaggcagaagtctgaggtcattgcttggatgatgcagggagcagccctcagctgtcggccctggagaagctgcactgtggggcctgaaggacagactcctgctgccttccccagtggtaacagacctcccctccctccaaggcagaggcaaaggttggtaggggccctctcagtcccaagggaggaggtggggcagggggaggggctggttctcccctcccagcctagagctgtgcccctg

SEQ ID NO: 15376 - DNA, 764 bp, Homo sapiens
cggcagagggtgggccggaagggactggctggggaatgagaaaacctggggccatcgtcaacccagagacttgggtttgcaggtgaagggtatcgggccgtccatccctctagcatgcttctcacgacttgcatctttacccactagacttctgcactgacccaggggctggagcgaatcccagaccagctcggctacctggtactgagtgaaggtgcagtgctggccggcagcaagtgtgaagacagaaaaagatggagccattaacagtcatctggggacctggagaatgatgagcaggcagccagtgccatctctgagctggtcagcacagcctgcggtttccggctgcaccgcggcatgaatgtgcccttcaagcgcctgtctggtgtgtctctcctccagtggtctttggagaacacacactgctggtgacggtgtcaggacagagggtgtttgtggtgaagaggcagaaccgaggtcgggagcccattgatgtctgagcctgccggagggcgagggtcggagaagcggattgggtcctgggcctctgtgatgaggcaggcacacctgtcggtcttggcttgctgctagaactagggccttctgctcgcccacctcccacccctacctggacgggcccaggcttggggactctgagctgtgttaaggagaacaagggcaaggagacctccctttgtgctccctcactccctaataaacatgagtctgatgttctccagcccagggaaaaaaaaaaaaaa

SEQ ID NO: 15377 - DNA, 912 bp, Homo sapiens
gggaagtcacccctcatcatctttgctgactgtgacctcaacaaggctgtgcagatggggatgagttctgttttcttcaacaaaggagagaattgcattgcagcaggccgactctttgtggaggactccattcatgatgagttcgtgcggagagtggtagaagaggtgcggaagatgaaggtgggcaacccgctggacagggacaccgaccacgggccgcagaatcaccatgcccaccttgtgaagctgatggagtactgccagcatgggttgaaggaaggggccacactggtctgcggcgggaatcaggtccctcggccagggttcttctttgagccaactgttttcacaggcgtggaagaccacatgttcatagccaaggaggagtccttcgggcctgtcatgatcatctctcggtttgctgatggggacttggatgccgtgctgtctcgggccaatgccacggaatttggcctggcttctggtgtcttcaccagggacatcaacaaggccctgtatgtcagtgacaagctccaggcaggcactgtgtttgtcaacacgtacaacaagaccgacgtggccgctcccttcggaggattcaaacagtctggatttggcaaagatctaggagaggcggctctgaacgagtacctgcgggtcaagacagtgaccttcgaatactgaagaaaggtctttgtgagaagaaagtccctgcccctccctcgtggctggggccccctccctcttgagcctggggtgcacagcacctcccacctggggggctagtggaagccctcctgcctgcacaccatgtctgcatcttggacgccctctgtccagtcagaagcagcccttggctgggtgaggtgtgcccctcccaggggagaataaagcttctgaagagagaccgtc

SEQ ID NO: 15378 - DNA, 1798 bp, Homo sapiens
ggtaccagaggtggcagtgctgccgacttcgcgtttgccttgctggatgattccgcttgtttgccggctgcgtgagtgcttagagcttttcggtggaagatgccggacagtaacttcgcagagcgcagcgaggagcaggtgtctggtgctaaagtcatcgctcaggccctgaaaacgcaagatgtggagtacatatttggcatcgtaggcatcccagtgaccgaaatcgccattgctgcccagcagctagggcatcaagtacatcgggatgaggaatgagcaagcggcttgttatgctgcctccgcgattggatatctgacaagcaggccaggagtctgccttgttgtttctggcccaggtctcatccatgccttgggcggtatggcaaatgcaaacatgaactgctggtacatggaacgctgcatgtcacctcctattagcatggcagaaacctctgctgtgtgcacggcggcttctgttattaggaatgccaaacaaccccttcttatcatcgggaaaggtgctgcttacgctcatgcagaagagagtatcaagaaattggtggagcaatataaactgccatttttgcccacccctatggggaagggtgttgtccctgacaaccatccatactgtgtaggtgcagccagatccagggctttgcaatttgctgatgtaattgtgttatttggtgccagactaaattggattttacattttggactgcctccaagatatcagccagatgtgaagtttatccaggttgatatctgtgcagaagaattggggaataatgtaaagcccgcctgttactttgctaaggaaacatacatgctgtcactaaacaacttttagaggaacttgattaaacaccatggcagtatcctccagagagcaagtggtggaaaactctgagagaaaaaatgaagagcaatgaagctgcatccaaggaactagcttctaaaaaatccctgcctatgaattattacacagtattctaccatgttcaagaacaactacctagagactgtttcgtggtaagtgaaggagcaaatactatggacattggacggactgtgcttcagaactaccttcctcgtcacaggcttgatgctggtactttcggaacaatgggagttggtttgggatttgctattgcagctgccgtggtggctaaagatagaagccctgggcaatggatcatctgtgtggaaggagacagtgcatttgggttttctggcatggaggtagaaaccatctgcaggtacaacttgccaatcatactgttggtagtgaataacaatggaatttaccaaggttttgatacagatacttggaaagaaatgttaaaatttcaagatgctactgcagtggtccctccaatgtgtttgctgccaaattcacattatgagcaagtcatgactgcatttggaggcaaagggtattttgtacaaacaccagaagaactccaaaaatccctgaggcagagcctagcagacacaactaaaccttctcttatcaacatcatgattgagccacaagccacacggaaggcccagggaaggcttctcggaggtgattcttaaacggagatccagaaggataagcagagactaactcggcaaaggggagagggaagagatgtgcaacaggctctgtagcaagaggaaagaggaagcatggcaagtctgaggaagagggagatgcaactgtaatacaaggatttgtgcaggattttcattggctgacccgctctaatatgtaaataaagacgccagttggtggtcttgagtttta

SEQ ID NO: 15379 - DNA, 426 bp, Homo sapiens
acatatggaaggtctccacaccctggcaacctcctactgtgctcctgggtcattctcaagaggtcacgtctgtgtgctggtgtccatctgacttcacaaagattgctacctgttctgatgacaatacactaaaaatctggcgcttgaatagaggcttagaggagaaaccaggaggtgataaactttccacggtgggttgggcctctcagaagaaaaaagagtcaagacctggcctagtaacagtaacgagtagccagagtactcctgccaaagcccccagggtaaagtgcaatccatccaattcttccccgtcatccgcagcttgtgccccaagctgtgcttggagacctcccttttccttcaaatactcctacgtttctctattaaaacctctcctgccaaggcccggtctcccatcaatcagaa

SEQ ID NO: 15380 - DNA, 405 bp, Homo sapiens
gccaaaagctctctggttgtaacctggagacatgtggaggggaatggcgatgggattataggactctccccatctcgggccctgaccctgacccttgccaccaacccaaagacagctggtgggtttccccttggagacaatcctgcgtttgcctgggccggccctggctgccctcagctttcgctgatctgcccggcctggagcctcccatcaccccgcttcttgttgggcctcaggactggttaccagaagggggtctgggtctgctcaggatcatgttttgtagcacctcctgttggaggggtggagggatgttcccctgagccaggctgagactagaaccccatcttccctgagccaggctgagactagaaccccatcttccccaccacgccacccctgtgg

SEQ ID NO: 15381 - DNA, 366 bp, Homo sapiens
ggagagagctagcaccatgaaataccctgctgccaaataaccttccccaaatacttgtttttatcatacttcttccttgcttaaaataaaatgataaaacataacaggatatagaatattcaagatttttttaattccagaattcaataattaagagaaacaatgtttttatatgaatgatgaagaaatatacatgtgtatatgtaacataaaagatattttcacgggtaagcaaatatatatataaagccctgtaatagctcaccatggcagcttggagcaatagttaaaaaaaaggcacaggttcttttttgggacggagtggggaggatgggagggtacatggggtttttaagtcacctggat

SEQ ID NO: 15382 - DNA, 446 bp, Homo sapiens
  misc_feature (1)...(446): n = a,t,c or g
tttgaannctttgaacncccntcnnnnatgnccctgattactgccaagcttggnccgagggaggaggaacctgtctttaaagctgtccctgaagtgacagcggagagaaccaggcagcccagaaaccccaggcgtggagattgatcctgcgagagaagggggaacatcatggcggatgacctaaagcgattcttgtataaaaagttaccaagtgttgaagggctccatgccattgttgtgtcagatagagatggagtacctgttattaaagtggcaaatgacaatgctccagagcatgctttgcgacctggtttcttatccacttttgcccttgcaacagaccaaggaagtttccaaaaataaantnatcctgnnnccattacacctaccaagngggtcaatttaatcgttacctttggtggtgagttcatagccanccagcagtg

SEQ ID NO: 15383 - DNA, 769 bp, Homo sapiens
  misc_feature (1)...(769): n = a,t,c or g
ggcatctgctcctgtgatggccgccacctggctgtcatgcctcaccctgagcgggccgttaggccttggcagtgggcatggcgaccccctccatttgatactctgaccacctccccctggctccagctctctatcaatgcccgaaactggaccctggaagggagctgctgactggccacaggggctcacctgggccccatggcttttcacctaagtgggtcctgccccctcccccatgaccttcaggagcaccccatattatttccaaaaatatcttggacagacaaggaccaaaatgccaaaatctcagcggactcgatgatctgcctgctgatgttccttctgtggctgtgtctattttcagttctgctctaacatggcatgccctttctcagcccaggaaacagcatgtggttcagagaaaagagcgacaaggaaaagttaggactcctgaggtccgaacaggggcttctgttgcccacttcacaacacccagtgatcaccggtgtgcaattgcctccttggctctgagggatgttttgcgctcccttttctcatcattggggttagcgggtgcagacaaattcagcaatagtatgcagatcagcccctcaccacctcattgttctcatctggaactgaaactttctggatttctcttgaagtgctacactgcactgaatgtaaggaattgttgcttgtggaagtttctcagcgtttctggctgtctaaggntgggctcaaaaccacatccgtantgctctaatta

SEQ ID NO: 15384 - DNA, 366 bp, Homo sapiens
  misc_feature (1)...(366): n = a,t,c or g
atgccctgcaccacnnnnnnnnnnnnnnnnnnnnnnnnnnnnnnnnnnnnnnnnnnnnnnnnnnnnnnnnnnnnnnnnnnnnnnnnnnnnnnnnnnnnnnnnnnnnnnnnnnnnnnnnnnnnnnnnnnnnnnnnnnnnnnnnnnnnnnnnnnnnncaaggaacagagacagtatgtggcctgcaaagcctaaacattactgtcagaaaaagtttgccaacccctgctgcacagcatctttatcaatcctggctttagcttgcatacccctggggatgggaagttctctacctctcaagacagagtttccatggttggaaaccaagctctgcctgggcttctttatttcaggatgaaacctgtcccc

SEQ ID NO: 15385 - DNA, 472 bp, Homo sapiens
  misc_feature (1)...(472): n = a,t,c or g
tgcacaccaaaccctggattagagcaagggctcgaagggagtattgggagaatctgctgccagcttcaggcagacctttctgtccttcgctgtcaaagccagacttctaaggagtagtgaaagaaaaccctgaaataatcgaacaggaaaaagttgccctcaagcctgacctggaaccgttcctcaccttcatcctcaccatgccctgctatctccagctgctgagcagctgaggtgctgcagccccttcccttccagcccacaagtgtgtgcatattgagctcctgctgtggttaagcactgcaacagactctaccagagatgcaaagagaagcgagagaggcaccttgttctccaagaacttactgtccaatcatgctgtggtgcattcctttgaagatcatgaagaatagccaaacttgtctttgagggtgaatttgacactttaanntnnncanaannnctgagaccc

SEQ ID NO: 15386 - DNA, 458 bp, Homo sapiens
gtcgttgcaaagcagccgctcggtggccgtacaacgcttcatctctccgagcctcggtttcctcatctccagccctaaaatgacgacacgccccacaggtcttgggaggattaagtgaggggacatgagcctggaagctccgaccccaggagccagcccatcaacctgaaccattacgccaccaagaagagcgtggcggagagcatgctggacgtggccctgttcatgtccaacgccatgcggctgaaggcggtgctggagcagggaccatcctctcactactacaccaccctggtcaccctcatcagcctctctctgctcctgcaggtggtcatcggtgtcctgctcgtggtcattgcacggctgaaacctgaatgaggtagaaaagcagtggcgactcaaccagctcaacaacgcagccaccatcttggtcttcttcactgtggtcatcaatgttt

SEQ ID NO: 15387 - DNA, 550 bp, Homo sapiens
atttagaggttttccgaaattctctgtatgcaccagattattcatctcgtttagatattgtaagagcaaattcaaagtcacctcttcagagatcactgtcagctaagtgtgtatctggaacaggacaggaggctggctgggccgcaacttgccaaaccctgatctagagagctatgcccttttcatatctagccttcagaatataaaattcaacaaacttattttcaagatacaacttttaggtatccacttgtcgactaagaaaggatcaacaagcagaagatgatgaggatgacgagttagatgttacagaagaagaaaattttcttaagtaaactacacatttccattttcatcataaatgacttgaaatccacaatgactaaattgtagaactttatactcactttgctatgttaagcctcaaagtgaagtccaattggaaacagaaaaataattaaaggaaacttatgctgaccaaaaatgaaggctttaaaaaatattgcataccagtcatttcaacatcctacctagtgttacatgatttttg

SEQ ID NO: 15388 - DNA, 598 bp, Homo sapiens
tttaggtttaataattattttaattacaaatttccaccaattcttgccagtcatattattgtggatatcacaaatgaattatataatagtatattaccttatattcatctgcatgaaacttaggagaaaggagagcagaaatgtataagtttctgagaatgacaccataaagctcatatttacagtatggtagtctgtaaacatacaggcctgccagttaaagcccactcttctatcatcacccagctgcatgaccctgagcaagtcacttttgtttgctaatttttaatatcatctatcacctgacttctctatctacgagagttaactggctgcatgcaaaataccatgaaaaataccatgcacttttaagtgtgaagtagcactgtaaagtgacttatatattactggtctttctatttttagagtattaatattcatacatcagttaaaagtcaacatgtgtttgctaagtgatccttttgaaaggatccctttaaaagttcctaggcatcagcttcactgacaatctggtatgattctgaagccagcatttcaactcttggaaagatatacaatagtcacagcttgaattagt

SEQ ID NO: 15389 - DNA, 347 bp, Homo sapiens
tacaagggggctggacttccttttgttcaaatatgaccttgaaggtcttgatgcatgttgagaaaggcacggaatagagaaatggatgctacagaaggaagttgggaggaagcaagagaaatactcatggaaagcctttatatgcttccaaaaacggcactttgattccagagggcaacgtttatttgccctcttgacagaaagtagtaacctctagaggacttagggcttgaggtaaggactcgcaaatggcagaagaatttctcttcctaccaaaggggtgctaactcaaaaagcaagtaggtggaatcattgaagggccagagtgagcctttatggaggttgac

SEQ ID NO: 15390 - DNA, 1011 bp, Homo sapiens
  misc_feature (1)...(1011): n = a,t,c or g
acaacaatgaagatgctccccatgaaccagatggagtggccttggtttggaacatgaagtttaagaaaaccacaccagaatacgtcttccactgtcagtcctctgtgatgtcggtctgcttcgcccgtttccatcctaacttggtggttggtgggacttactcgggccagattgtcctctgggacaatcgcagtcatcgaaggactccagtgcagcggacacccttatcagctgctgcacacacgcatcccgtgtactgtgtaaatgttgttgggacccagaatgctcataacctcatcactgtctccactgatggcaaaatgtgttcctggagcctggacatgctctcaactccacaggagagcatggagctggtgtacaataagtccaagcctgtcgctgttaccggaatggctttcccaacgggagacgtcaataacttcgtggttggcagtgaggaaggtacagtctacacggcttgtcgtcatggaagcaaagcaggtattggtgaggtctttgaaggtcaccaagggccagtgacaggaattaactgccacatggcagtgggcccaatcgacttttctcacctgtttgtcacatcatcatttgactggactgtcaaactgtggaccaccaagcacaacaagccgctctactcctttgaagacaatgcagactatgtgtacgatgtcatgtggtcccccgtgcatcctgcgctttttgcctgcgtggacgggatggggcgcttggacctctggaacctcaacaatgacaccgaggttccaacagcaagtgtggccattgagggggcatccgcctaaaaccgtgttcgttgggcccaagctggcaaagaagttgctgttggggactcggaaggccgtatttgggtctatgacgttggagagcttgcagttccccacaatgatgaatgggacccgatttgccagggaccttgtgggaaatttcgtgnttaacagagctgatagcgagggagggaagggnatttttgag

SEQ ID NO: 15391 - DNA, 1565 bp, Homo sapiens
  misc_feature (1)...(1565): n = a,t,c or g
accatcgagatctttgaagaaccagctagcctagaggagccagaacatctcgctcctcgcgcgtttccgtttccgctaggactctggcagttggtgcccactcccacatccggggactggggctggacgatgccttggagcctcggcaggcttcgcaaggcatggtgggtcagctggcggcacggcgggcggctggcgtggtgctggagatgatccgggaagggaagattgccggtcgggcagtccttattgctggccagccgggcacgggggaagacggccatcgccatgggcatggcgccaggccctgggccctgacacgccattcacagccattcgccggcagtgaaatcttcttccctgggagatgagcaagaccgaggcgttgacgcaggcctttccggcggttccatcggcgttcgcatcaaggaggagacggagatcatcgaaggggaggtggtggagatccagattgatcgaccagcaacagggacgggctccaaggtgggcaaactgaccctcaagaccacagagatggagaccatctacgaccttgggcaccaagatgattgagtccctgaccaaggacaaggtccaggccggggacgtgatcaccatcgacaaggcgacgggcaagatctccaagctgggccgctccttcacacgcgcccgcnactacgacgctatgggctcccagaccaagttcgtgcagtgcccagatggggagctccagaaacgcaaggaggtggtgcacaccgtgtccctgcacgagatcgacgtcatcaactctcgcacccagggcttcctggcgctcttctcaggtgacacaggggagatcaagtcagaagtccgtgagcagatcaatgccaaggtggctgagtggcgcgaggagggcaaggcggagatcatccctggagtgctgttcatcgacgaggtccacatgctggacatcgagagcttctccttcctcaaccgggccctggagagtgacatggcgcctgtcctgatcatggccaccaaccgtggcatcacgcgaatccggggcaccagctaccagagccctcacggcatccccatagacctgctggaccggctgcttatcgtctccaccaccccctacagcgagaaagacacgaagcagatcctccgcatccggtgcgaggaagaagatgtggagatgagtgaggacgcctacacggtgctgacccgcatcgggctggagacgtcactgcgctacgccatccagctcatcacagctgccagcttggtgtgccggaaacgcaagggtacagaagtgcaggtggatgacatcaagcgggtctactcactcttcctggacgagtcccgctccacgcagtacatgaaggagtaccaggacgccttcctcttcaacgaactcaaaggcgagaccatggacacctcctgagttggatgtcatcccccgaccccaccctgttttccaccagagttctgacactgtgactctgtataaaatggttgggaagctgcacccaccctgtgtatgtgtggttgccctgagcccacagaaagacacctccagagtg

SEQ ID NO: 15392 - DNA, 987 bp, Homo sapiens
gcggcgatggcgtcatcaccgagtgccgggccgacagcagcccggaggttggctatgtgaccaggcaacatgctgagccggcttcaggaactgcgcaaggaggaggagacgctgctgcggttgaaggcagccctgcacgaccagctgaaccgcctcaaggttgaagaattagccctccaatcaatgatcagttctagaagaggggatgagatgctgtcttctcacactgtacctgaacagtcacatgatatgttggtgcatgtagacaatgaagcatcaatcaaccaaacaaccctggagctgagcacaaagagtcatgtgacggaagaggaggaggaggaagaggaagaagaatcagattcctaaaggagggggaaagccaggctggtcagttatacaaattgcatttctaaggctcaggctacttctcctcaaggaaatcatcttgccctgggccctgtgatctgcttgaaaggaaagcaagaactataaggaggatgtgtagttgcaaaaatggctccatcggtaactcaagcttcagaatgttatgacatacagaaaatcaaagatgctgtgtcttagcattgagtaatatgggtggtgctgtctgtaatctggtcagattcagttaactgttcagaacaaaatttcctctgaaatactgttgagaaagtctgtcatttgcaaaaagagcagagtttaaatacaagccagtctttccagtcaacaatgcctctttgaagaaaaccaattaaagactgtttgcatgccgctgaacccttgtgagcagttaggacacagtctaggacagaaagatgacaaggggaaggactgagggccatctgagagcacaagctgtttctacctctcagaggcattgaaatattgcatgctataaactgctttgtgtatctgttaccacctctcacttgagacatcactcactggtaaaatgttttataaataaattataagtagccatcatgg

SEQ ID NO: 15393 - DNA, 1706 bp, Homo sapiens
  misc_feature (1)...(1706): n = a,t,c or g
tttttttttttctttttttagacatcaactctacatttattgcagtcctttaagtctatgacggcggggcagccgctgacagcatgcagagcaagttaggaaaaaccgaggccctgtgggaacagcaacgcgggctccagccagggctctcgtcctcgcagcctcccacaagacctggggctcagggcagccgcttccccacccagcacagcagcagaggggccctagagcccccacagaaaggactgtcccagcctcgggagcaagagatggctccctccggacgggcctcatccaactccgccctggagtgtggctggaaggaagggacagagaaagaagggacagaggaaaggggctgtcccagcccaagaaggcagttccactgggaagtcagtcaggtccggcggcagcgcttcctctggcagggccgaggctcgcgactgctggggtgggcggaggtcgctgcctggggatcggacactggagccttgcggcggctgcaactcatgctcaggacccagcccagcttgttgtgtagcacctgcttgaggcccggcggcagcggcagaccctccagcgtgtctcccgagtctgggccgcagctggcgcaggcggtggcagcacaggtactggagggaagtggcgctggcacaggagcgggtgaccttcatgctgctccgggccgccgtggagcacaccatcgggtagaatctcttgttctgcagcttggtggctgccacacctatacacttcctgttcttgaaaaaggtgagtgtgccgtgccaggtgtccaggtgcacgccaatgatggagccctggccgaaccgcgacgagaagctggtcttgtcgcccttgtggtggaggaggcccgtgtaggagaggccccagctgtcctcatccctgcccagcaggctgcagaacgtgtggcggtatttgtccaggtccacatccgacgtcccgatgcccaccatcatgtcggtgccgtagacgggagaggtcatcttgatctcccagaagtgctggccctcccccagctccttggtgccccggatggccgctgtgccgcagctgtactccatgtggaagcttgacttacggttgtcacagctcagcagggtggctgatgacttatttaagtcatcccagacccagtcgaaatactcgtcttcctctccgcaagcggaagtcccttccccggtgggccgaagtgcaggctgctacagaaggaggcctcgctctgcccagcacagtcacagaaggactcgccggtcacgggcaccgcactggggatggatggcggcagcgtggagtactcggggtcggagtccgagtcgctgtgctgcccatcagagtcgtagccccagttaagtggagcctgctaagagccacggcccgggcatctgcgtctcggcgggctgcactcaggacgaagtgccaggccctgctgttccgggggcgtctggccatggtggaaagaatctagaagaaaacacaggctctgggcaaaggaagactcacagcactcccagccctgagcttccaaggctgggccacggacccactcaaagtggggactgcaggggccgcaccggtgnccagccagggctccagaacgcttcaggagcccgtacctcaccccaggatctgagcagctcaataaaacccaggtagatcctgtgaaacgccacccagaaaaaaaaaaa

SEQ ID NO: 15394 - DNA, 2221 bp, Homo sapiens
ttttttttatttttttcttctacattttattatttcaaaccaggtgaacaattccataaaacatgtgaaaaaagcaaggaagtgttcaacgctgaaggccccgggcctgggacaagggcatgaggggcgtggccccccagcaggcagcggcggttcctaggttagcgctagggagctacattttaggttaatagagcctggggccagggccgctggggcagggccctcagtgacgttggcagttgtctggaacagcccttggaacccaattctgtggagggcagggcaggggtgccgctcgcacgggggcggccagcagagggacgggtgtaaacacgcagacacactcaaggcacggagtcacttggaaggggggctgggggggggcttgctggtcaggatctgacagttttaaatagtttttctctaaaaagttttctagatttgcagttttttttttttcctttactttcatttttttaaaaagctacgagaatgagcaggtggactgtggtttccaggaatggtggcgtctcacgcttcttgtgctttttcctttggggcctccgagcggctggggttgggggactgggcaggaggctccctgtaaacatttggacttgggctcggggcaggggctggtgttgggcaaagctgggggtccaggctggagaagcaggggcccctccaagacgcagcctttgggagactcagcatgtgcccccctccccctcatcaacagaaacaagacaatggttaaaaaccagaacagatgccccagaaggggggtaccatggccattaccagcatctcagacaagggcaggcttcaaacagggaaggcctgtgcgaacccctcccctacgtctggagctgaggggacagggggagctgagaacaaagagaggaaagaggagaaaagcggcgggggaacaggcggggagcgtgatcttcttgcccccatcttcctcaggggttggggggtacaaattcggcggtggccccatcccgcccaggccccgctgcccctcagaagaggccgcagtccttcaggttgttcttgatgatgacatcggtgacggcgtcaaacacgaactgcacgttcttggtgtcggtggcgcacgtgaagtgcgtgtagatctccttggtgtctttgcgcttattcaggtcctcaaacttactctggatgtagctggctgcctcatcatatttgttggcccctgtgtaactcagggaagcagatggtcaggggactgtgtgtgatcttctcctcaaacaggtccttcttgttgaggaagaggatgatggacgtgtctgtgaaccacttgttgttgcagatgctatcgaatagcttcatgctctcatgcatgcggttcatctcctcgtcctcagctagcaccaagtcataggcgctcaaggctacgcagaagatgatggctgtgacgccctcaaagcagtggatccacttcttccgctcagaccgctgaccacccacatcaaacatcttgaagtgtaggtccttgaaggtgaagtgtgtctccacgatccccgtggtctttacgcgggtccgtagcacatcttgctgtgtggggatgtagtcactctgtgcaatacgctccaggtcgttcaggtagtaggcagctgagtcgttgagctggtattcccttgagcggccaaagcaggcctgcacaccatggtcagcccagagcctccggatgacgccggacaggtcatcagggagcacgccttgctcctcggcggtgcaggacagtgcaaatagctgcctggcgtcgtccgctctggaggggtcggcaaagtcgatctgcaggtttcccatggctttgacaatggccatgatggactggatggtgttgctgtagacaaccgcccggtactgccggcattcctcctcggagtagccatcctcgtggatgatcttcatctgcttgacgatggtgctcttccctgactccccagcacccaacagcagcaacttcacctcccgcgccgccttctctccgtcctcccgcaggttcttgtcgatcatcttagagcgctcggccgccgccttgtcctcggcgctcacggtgcagcccatcccgcgttccgccgctccgccgccgcccggcccccatctacggcccacggcccggcttcggccccgcccgactccactccgctcccaccaccagccctctgcgggaagcactcgggactgccgg

SEQ ID NO: 15395 - DNA, 680 bp, Homo sapiens
  misc_feature (1)...(680): n = a,t,c or g
gggtgggtagagaggacattccaggctaaacaatgatgcaagttagagttctaaggcagaacagtgtgtgatttgtttagcatgatttggtcatggttttcttgggagagtcccaaagaactgattctccagggggtgttactaaaactcttattgaaaggagggactacagagatgaatctcatcactctcccagaatggcacagagcttttcatggacccccgggccacctatgtaggaacctcagggggtctgtggaccacttaaaagcccaacatgcctgagactccacagatactggcttccaccatgataaaggcaaaaaagcccctctttccccaaaatcaatacttttattctcataggcctcctgctgtggtctagtccccatgttgaaagctgctgtccccagggtgttgcttcactacttctaggctcctgcagagtcctgcctcataggccgcactggtgagtgaggccagcaaacccatcagggagactacatgaatccaaacctaagtctgtctgacagcaaagcctgttctctccatctctccaggttcctaagccaggtgagcgttgaacctttcttgaatcaaggtccaattccaaggtaggaaagcacagtcagtcagggaatatttacactgagaccacgccgagccctatgcatanatca

SEQ ID NO: 15396 - DNA, 633 bp, Homo sapiens
acgagcaaggaaagaaggaagcagtaaaagcagacatttattgaaaatgaaagtacactctacagggtgggagcgggcttgagcataggggctcaagagccccattacagaattttctagggtttaaataccctctagaggtttccattggttacttggtgtatgccctgtgtaaatgaagggggtgaagtaaagttacaaaattatttacttggtgtatgccctatgtaaatggagaggatatttcctgtcatggctgaagtggttccatttgatttagttctaggaagtcagcatgaatcagccttatgttccctgcctccagaccctattctcctgcctcattttcccctgagagatgtgatccccataaatctttctgggaggcagagggacccatggtctttcttccataactacttcatgctgacttggggcacagtccctacctactggggattacagaactctcaccctgctctgtctagtggagacaaggttacttcttggtggccggggttgacatcattatctgaaactgactggtggccctgctgcattatcataatggtctctaggcaagaagaaataaatctggttaaaagatttaacaaacatgatccaaaagccaag

SEQ ID NO: 15397 - DNA, 1073 bp, Homo sapiens
caatgttgtaataaaatatttattaatttctctttataaaaatttgggaaaagataaaaggcaaaactacacatagaaaaaggtcagtgataagtgtttatacagtcagttttttctgatgtgtgaaaaaaactgataaaaaaatcctttgaggtaatatgaaagttcatgattctcattccatcaacatcactgtttgctaccatagcttcttagttgtccagctagattttatgctatgaactgatgcatgagatttcataaaacattaatacctcttttttatactacagttctttcactggtataccataaagtagtattacaaataaattatggactatacttcatcataaatagaaattaagaaagtacactttgccaaactgatttctgactcttttaaattgtatttattcactccccaccaatttgaaaaatcttgtaaattacagagggtttcctagtcattaacatgaattagtaatgctataacttaattcaaaagcaattacttcttaaaaatagggcgcataccaggaaagcttagcatcagccaaagctactagcacaccacgggcaaaaggccaactctgcagggatatgtaaaggtcattttatggataatccatataaaaactgctctcaagatattttgcccattagaatttgtttacaaatggaaatctaatttgatgattttaggcctttgtgctagaatctcacaaccagaaagaataacacctttaatatgaattcttatgatattgtcagaaagtttaacaggagttattttaactcctgttaaaataatagatgacagtaaaaagaaattcaaagggaaagaaacaatatacgaaaaagctatggggtaacagatgttgagcctacaattaaaaactatttattttaaatgttttcctatgtataagacagaaataccaagcactttctacttttgtgttgtcagaaatcccaggaaaatccagaaatgaaaaaaaaaaagtgaaggatagacatgcatcacatgcatctagctggttgactgagaaaacctgagaaatagcactaaa

SEQ ID NO: 15398 - DNA, 524 bp, Homo sapiens
gcagccctgttctttttcccccctttctaatgcgttgtatctgtatagcacttagtcctccctctttctgttctctcattttatctgccatgcttttcatgtctccagtctgtatttgtgatctagactagaatggaattttgtctgtctatatcagtctgtcatggtgtgtttgactgtctctcggagctatgtgtatctccctctcacatgcctgtcagtagggacaccattgtctaaattgtgtgtgtctagtctgtctgacagtgtgtgagtttgtgactaaggatcagcctgagggtctgagtgtgactgtgggtgcttgactgagttgattcttagtgactagctttatccatatgccacttctctccgtctgtcccacagcgtaactctgtggttgtctgtccctgtctgccttgtctgtcacagtgtgtccatcctggttagtcatatatctcttgtggtctgtccatccaaccatgtgctagatgtcatcttctatcatttgtcactgccttagg

SEQ ID NO: 15399 - DNA, 1470 bp, Homo sapiens
aggtcacggctttgactacgactacaccctggcccagtatgcagacgcactgcaccccgagatcttcagtaccgcccgtgacatcctgatcgagcactacaagtacccagaagggattcggaagtatgactacaaccccagctttgccatccgtggcctccactatgacattcagaagagccttctgatgaagattgacgccttccactacgtgcagctggggacagcctacaggggcctccagcctgtgccagacgaggaggtgattgagctgtatgggggtacccagcacatcccactataccagatgagtggcttctatggcaagggtccctccattaagcagttcatggacatcttctcgctaccggagatggctctgctgtcctgtgtggtggactactttctggggccacagcctgggagtttgaccaagcacatctctacaaggacgtgacggacgccatccgagacgtgcatgtgaagggcctcatgtaccagtggatcgagcaggacatggagaagtacatcctgagaggggatgagacgtttgctgtcctgagccgcctgggtggcccatgggaaacagctgttcctcatcaccaacagtcctttcagcttcgtagacaaggggatgcggcacatggtgggtcccgattggcgccagtctttccgatgtggtcattgtccaggcagacaagcccagcttcttcactgaccggcgcaagcctttcagaaaactcgatgagaagggctcacttcagtgggaccggatcacccgcttggaaaagggcaagatctatcggcagggaaacctgtttgacttcttacgcttgacggaatggcgtggcccccgcgtgctctacttcggggaccacctctatagtgatctggcggatctcatgctgcggcacggctggcgcacaggcgccatcatccccgagctggagcgtgagatccgcatcatcaacacggagcagtacatgcactcgctgacgtggcagcaggcgctcacggggctgctggagcgcatgcagacctatcaggacgcggagtcgaggcaggtgctggctgcctggatgaaagagcggcaggagctgaggtgcatcacccaaggccctgttcaatgcgcagttcggcagcatcttccgcaccttccacaaccccacctacttctcagaggcgcctcgtgcggtgctctgacctctacatggcctccctcagctgcctgctcaactaccgcgtggacttcaccttctacccacgccgtacgccgctgcagcacgaggcacccctctggatggaccagctctgcaccggctgcatgaagacccccttccttggtgacatggcccacatccgctgagggcacctttattgtctgggacaggccctcagcccctcctgccccatccacccagacaagcaataaaagtggtctcctcccaaaaaaaaagtcgacgcggccgc

SEQ ID NO: 15400 - DNA, 4923 bp, Homo sapiens
  misc_feature (1)...(4923): n = a,t,c or g
cctgcctgcccgcctgcttgctctctggctgtgctcctgcttaaagaaatcagtccttcctttccgacttagtcctcgggaagaagtttcagactacaaggtatcattggaacatttcaagatcatcaaatcaaattccacagggattggtgaccaaccagaaggctcagacatctgattgctgacctgtccagacatcatctggtctccctgaacctgaaatcacaccatggatgattttgagcgtcgcagagaacttagaaggcaaaagagggaggagatgcgactcgaagcagaaagaatcgcctaccagaggaatgacgatgatgaagaggaggcagcccgggaacgccgccgccgagcccgacaggaacggctgcggcagaagcaggaggaagaatccttgggacaggtgaccgaccaggtggaggtgaatgcccagaacagtgtgcctgacgaggaggccaagacaaccaccacaaacactcaagtggaaggggatgatgaggccgcattcctggagcgcctggctcggcgtgaggaaagacgccaaaaacgccttcaggaggctctggagcggcagaaggagttcgacccaacaataacagatgcaagtctgtcgctcccaagcagaagaatgcaaaatgacacagcagaaaatgaaactaccgagaaggaagaaaaaagtgaaagtcgccaagaaagatacgagatagaggaaacagaaacagtcaccaagtcctaccagaagaatgattggagggatgctgaagaaaacaagaaagaagacaaggaaaaggaggaggaggaagaggagaagccaaagcgagggagcattggagaaaatcaggtagaggtgatggtggaagagaaaacaactgaaagccaggaggaaacagtggtaatgtcattaaaaaatgggcagatcagttcagaagagcctaaacaagaggaggagagggaacaaggttcagatgagatttcccatcatgaaaagatggaagaggaagacaaggaaagagctgaggcagagagggcaaggttggaagcagaagaaagagaaagaattaaagccgagcaagacaaaaagatagcagatgaacgagcaagaattgaagcagaagaaaaagcagctgcccaagaaagagaaaggagagaggcagaagagagggaaaggatgagggaggaagagaaaagggcagcagaggagaggcagaggataaaggaggaagagaaaagggcagcagaggagaggcagaggataaaggaggaagagaaaagggcagcagaggagaggcagaggataaaagaggaagagaaaagggcagcagaggagaggcaaagggccagggcagaggaggaagagaaggctaaggtagaagagcagaaacgtaacaagcagctagaagagaaaaaacgtgccatgcaagagacaaagataaaaggggaaaaggtagaacagaaaatagaagggaaatgggtaaatgaaaagaaagcacaagaagataaacttcagacagctgtcctaaagaaacagggagaagagaagggaactaaagtgcaagctaaaagagaaaagctccaagaagacaagcctaccttcaaaaaagaagagatcaaagatgaaaagattaaaaaggacaaagaacccaaagaagaagttaagagcttcatggatcgaaagaagggatttacagaagttaagtcgcagaatggagaattcatgacccacaaacttaaacatactgagaatactttcagccgccctggagggagggccagcgtggacaccaaggaggctgagggcgccccccaggtggaagccggcaaaaggctggaggagcttcgtcgtcgtcgcggggagaccgagagcgaagagttcgagaagctcaaacagaagcagcaggaggcggctttggagctggaggaactcaagaaaaagagggaggagagaaggaaggtcctggaggaggaagagcagaggaggaagcaggaggaagccgatcgaaaactcagagaggaggaagagaagaggaggctaaaggaagagattgaaaggcgaagagcagaagctgctgagaaacgccagaagatgccagaagatggcttgtcagatgacaagaaaccattcaagtgtttcactcctaaaggttcatctctcaagatagaagagcgagcagaatttttgaataagtctgtgcagaaaagcagtggtgtcaaatcgacccatcaagcagcaatagtctccaagattgacagcagactggagcagtataccagtgcaattgagggaacaaaaagcgcaaaacctacaaagccggcagcctcggatcttcctgttcctgctgaaggtgtacgcaacatcaagagtatgtgggagaaagggaatgtgttttcatcccccactgcagcaggcacaccaaataaggaaactgcctggcttgaaggtaggggtttctagccgcatcaatgaatggctaactaaaaccccagatggaaacaagtcacctgctcccaaaccttctgacttgagaccaggagacgtatccagcaaggcggaacctctgggaaaagcaatctgtggataaggtcacttcccccactaaggtttgagacagttccagaaagaacccaagctcaagacgcaggacgagctcagttgtagagggctaattcgctctgttttgtatttatgttgatttactaaattgggttcattatcttttatttttcaatatcccagtaaacccatgtatattatcactatatttaataatcacagtctagagatgttcatggtaaaagtactgcctttgcaccaggatcctgtttctaaagaaacccatgctgtgaaatagagacttttctactgatcatcataactctgtatctgagcagtgatncccaaccacatctgaagtcaacagaagatccaagtttaaaattgcctgcggaatgtgtgcagtatctagaaaaatgaaccgtagtttttgtttttttaaatacagaagtcatgttgtttctgcactttataataaagcatggaagaaattatcttagtaggcaattgtaacactttttgaaagtaacccatttcagatttgaaatactgcaataatggttgtctttaaaaaaaaaaagaatgtactgttaaggtattactttttttcatgctgatgattcatatctaaattacattattatgttagctgacagtggtactgattttttaggttggttgttttgtggatttctttagtagtgatagtagcctgaaccacattttagataactcaattatgtatgtatgtgcatacacatatacaaacacactaatggtagaatgcttttttatgtgctagactattatatttagtagtatgtcattgtaactagccaatatcacagcttttgaaaaattaaaaaatcacactatattaatattttatatttgccaacagaaacatggcagataggtatcaatatgttttcaatgcctgatgacctataagaagaaagtattgaaaagaagagagattagaactgttagaaggagttgaaattttctaaaagacatagtatttagtttataattaaatgcattcttgaagtccagtgtgaattttattaatgctatcatctcgaccaagctcaaagcctacttattagaaacaatgaagttcacaataggtcataaggtctcttccttttctaaaattgaaagacaagaaatttagtgccaatattgtacagacagaaattccatgtatgagtctcaacaaagactacctttggctaaatgtctagaagcagagaagtaaagtgagcaaaatccagtgttgaggagtcatgacagtactttgatctttatatactctgaagcatttcttcaaacttttctacttttatttgtcattgatacctgtagtaagttgacaatgtggtgaaatttcaaaattatatgtaacttctactagttttactttctcccccaagtcttttttaactcatgatttttacacacacaatccagaacttattatatagcctctaagtctttattcttcacagtagataatgaaagagtcctccagtgtcttggcaaaatgttctagtatagctggatacatacagtggagttctataaactcatacctcagtggacttaaccaaaattgtgttagtctcaattcctaccacactgagggagcctcccaaataactattttcttatctgcagtattcctccagaagagctaaccagggcagggctggcatgagaagtgacatctgcgttacaaagtctatcttcctcataagtctgtaaagagcaattgaatcttctagctttagcaaacctaagccaaaggaaggaaagccacgaagaatgcagaagtcaaaccctcatgacaaagtaggcacaagtctacaataagctaaatcagaatttacaaatacaagtgtcccaggtagcattgactcccgtcattgggagtgaaatggatcaaagtttgaattaaggcctatggtaaggtaacattgctttgttgtacttttgaacaagagctcctcctgatcactattacatatttttctagaaaatctaaagttcagaagagaatgtatcactgctgacttttattccaatatttggatggagtaagttttagggtagaattttgttcagtttggatttaatcttttgaaaagtaaattccttgtttactggtttgactataattctctgttatctttacgaggtaaaactgcaagctgactagcatgttctgtgaatctgccattccctaaaaattttataaacacttgatacttttcactgataatggatcgctccaataaacatatattgtgaaaatgcatccacaataaatggaattccctcctgcaaaaaataaaaaagtc

SEQ ID NO: 15401 - DNA, 689 bp, Homo sapiens
tggggcccagcaaaccaagaaagacaaggataagaaaaatgcaagcttcacataaagcctggcaagccaaggatgttcccgcattcacctgcttttgcagtaatatcgtatctctgccatgtgtgttctttagttttattttattttattttatttttttacccttcctcaaacaccagtaactattattaactcgttttgctgaatgttgttgggtggtagaaaatgatagaacaagggaataaccgcgaatgctctgtgcagctggactctgtttccggaaagtaaatgatttgctttttatgcctgttctgaatggcagcacgaagcaggcctgttacttgtatgtcgctttggacagaggaaagtggggtaaaatgctacctgtacgtctgacatgaaaacttctcaccgcctcagcagctgaactaaaaacctgaatagccatgacaagagtttgcattttcttgatgattcatctccatgagtgcacaatccctgaactcactgtcttttctccacacttgtcctaagccaaggtagatttgtacgtagacagactggtgagcaagcattatattttatttttacccttgcatgacattttcattttaatcaataacattatttggcctgagcttgtgggtctgttcagactgtctcctctcaagggtttgaaactgcatctg

SEQ ID NO: 15402 - DNA, 1707 bp, Homo sapiens
aggcacagaatgagggcccggctacagacgtcagaggccccgctgaaggaggatgggcttttgcccaaaccactctcttctgggggagaggaagaagaaaaaccccggggcgaggcttctgaggacctgtgtgagatggccctggacccagaactgttgcttctgagggatgatggagaggaggagtttgcaggagcaaagctggaggattcggaggtccggtccgttgcctcaaaccagtcagagatggagttctcttcacttcaggacatgcccaaggagctggatccctctgctgtgctccccttagactgtctgcttgcttttgtgttctttgatgccaactggtgtggctacttgcaccggcgagacttagagaggatcctccttacccttgggatccggcttagtgcagagcaggccaagcagctggtcagcagggtggtgacccagaacatctgccagtaccggagccttcagtacagccgccaggaaggcctggatggtggccttcccgaggaggtgctcttcggaaacctggacctgctgccccctcctgggaaaagcacgaagccaggtgctgcccccacagaacacaaagccttggtgtcccacaatggcagcctgattaacgtggggagcctgctgcagcgcgcggagcagcaggacagcggccggctctacctagagaacaagatccacacactggagctgaagctggaggagagccataaccgtttctcagccactgaagtaaccaataagacgctggcggcagagatgcaggagctgcgagtccggctggcggaggccgaggagaccgcccggacggcggagcgacagaagagccagctccagcggctgctgcaggagctccgcaggcgtctgacccccctgcagctggagatccagcgggtggtggaaaaggctgacagctgggtggagaaggaggagccggcacctagcaactgacggcctcgcacggaactgccatcctgtgagggcagcggtggcgcccggcaaagttggagcccttgcggtaccagaaagcagcgagagcgagacctgggagccagggcaggggtggctgaccccatgctcagcctctaggggacggcaggccatcaggctgggggctgtgctatgtgggatggatgtgtgaggaaccccggttccacttaacaactaaatacaacatcttttgcacccctagaatgtcattttgccctcaaccttggtatttctcctggggcccttttagtcttgtgctgactttctcctgtcctcttccagtttagaataagacaggggagaaaaaggcttttcgagtgtgggacaaggtctgatgtcagtgaacggaattgaagagcaagacatggagcctggctggggctaagcagccccctcctccggatggcacaggctctgctaggttccggacacaggcttctgggggaagggtctcccttggccatcacgggaatggagtccatgctagaaagagctcagtgttgggctgggtttgccagtagaacactgcgttccagtcaccccggtcttgccagaagaaaccagcacctctttcccgtggctcctgtgttcagaatgtggtattggctctggcccagccttctcccctgttacccataattcttgcctctttccataatccgtggtttcagtttgactttgtatataaagttgggg

SEQ ID NO: 15403 - DNA, 2114 bp, Homo sapiens
gtgtctttgaagaatggacagaattgccctggctaactacaagctacggttcacagtggataaatagatgcccgagtggtaaaagacatggcaacaggaaagtctaagggatatggctttgtctcctttttcaacaaatgggatgctgaaaacgccattcaacagatgggtggccagtggcttggtggaagacaaatcagaactaactgggcaacccgaaagcctcccgctccaaagagtacatatgagtcaaataccaaacagctatcatatgatgaggttgtaaatcagtctagtccaagcaactgtactgtatactgtggaggtgttacttctgggctaacagaacaactaatgcgtcagactttttcaccatttggacaaataatggaaattcgagtctttccagataaaggatattcatttgttcggttcaattcccatgaaagtgcaggcacatgcaattgtttctgttaatggtactaccattgaaggtcatgttgtgaaatgctattggggcaaagaaactcttgatatgataaatcccgtgcaacagaatccaaattggatatccccaaccttatggccagtggggccagtggtatggaaatgcacaacaaattggccagtatatgcctaatggttggcaagttcctgcatatggaatgtatggccaggcatggaaccagcaaggatttaatcagacacagtcttctgcaccatggatgggaccaaattatggagtgcaaccgcctcaagggcaaaatggcagcatggttgcccaatccggccttctgggtatcgagtggcagggtatgaaacccagtgaataaggactccagaatctaaagccagtggcttgaggctacagggagtgtagtaaagccgttgtttacttaaagatttatcaaatcagtcagtgcaaatgtcagatacaatgtatttatttaaaagattcatttttaatcatgaaattacttatcatccacattgttttaaaaagaaacaagatgctggatgtctgccaatttttgccttcattaccttttttgataaagtttctcagatccttgtttcaaacacaaatgcagggattgctgccactttttaactattaagaggcagaaaattgcacaatattgaacttttttccactgaagtagtgtgcagttctagtttgcattcctgatatgatttaaaacatgtaatataaagatgttaaaaaaaaaaaccaaacacgggccgagatctagaagttgtttgtcatcttcagcctgtgcacaattctgttttaggttaaaaaaaggcattgtttgagctgtcccatccccaccgttatccctttggggttttttaatataaattattagtttacatcatttttgtatctacatcttttttcacaaatttgtcttgccttattaaagttctgtaaaatatacttaaatggaaaaaatgatgttcatttagattgaaaacttttctcagatggattgataattgcattcatcttgtgttttatatgagaaggtgcctcaagaatttcctgttggatttgtttaaaaggatttttatctttcgtgataaactttgctgtgtaccaggaactataaaaacaaaaacttgttactaaagaaaatatctgaaatgtgataagttcttatgccatgttaatttcatgtgtcaacttcaacatttacatgtattatttcattatgtaaaatgttttagcaatttaatattttgcacagttagcaaactttgtatgtcatttccttcaaggcatcatgcagagttgacatgagatttataaggttttaagttgtttgcatgtgaaaatcaaatacatactttggtagtctttgaatacaaagtcatctgctcttgtttttcaagaattttgagacacaaagttgtatgtaaaggaatatattaatttgccgttttctaggtagatttgctcaaaaagagtgaatcaacttaatatgtacaaatgatagctgtgaaactgtagaatatctttgtgtcaggcttggagttcattgtgacctccaaattttgcctgaaggaccagctgggcaaagcatcttttaaatgttcagaggccaaaagat

SEQ ID NO: 15404 - DNA, 2679 bp, Homo sapiens
  misc_feature (1)...(2679): n = a,t,c or g
ggggatcactgttggaaggcagctgcttgaggtccaaggcagtcagtgtcccctctcttttgcctcgggacagctggtatttatcagactcctaagaagttttccttgctccctagtagaagagagagattatgcagcgggcttttgattgatccaatgggaattacattgatctggtgtctggccttggttcttatcaagtggatcacctctaagaggcgtggagctatttcctatgacagttctgatcagactgcattatacattcgtatgctaggagatgtacgtgtaaggagccgagcaggatttgaatcagaaagaagaggttctcacccatatattgattttcgtattttccactctcaatctgaaattgaagtgtctgtctctgcaaggaatatcagaaggctactaagtttccagcgatatcttagatcttcacgcttttttcgtggtactgcggtttcaaattccctaaacattttagatgatgattataatggacaagccaagtgtatgctggaaaaagttggaaattggaattttgatatctttctatttgatagactaacaaatggaaatagtctagtaagcttaagcctttcatttatttagtcttcatggattaattgagtacttccatttagatatgatgaaacttcgtagatttttagttatgattcaagaagattaccacagtcaaaatccttaccataacgcagtccacgctgcggatgttactcaggccatgcactgttacttaaaggaacctaagcttgccaattctgtaactccttgggatatcttgctgagccttaattgcagctgccactcatgatctggatcatccaggtgttaatcaacctttccttattaaaactaaccattacttggcaactttatacaagaatacctcagtactggaaaatcaccactggagatctgcagtgggcttattgagagaatcaggcttattctcacatctgccattagaaagcaggcaacaaatggagacacagataggtgctctgatactagccacagacatcagtcgccagaatgagtatctgtctttgtttaggtcccatttggatagaggtgatttatgcctagaagacaccagacacagacatttggttttacagatggctttgaaatgtgctgatatttgtaacccatgtcggacgtgggaattaagcaagcagtggagtgaaaaagtaacggaggaattcttccatcaaggagatatagaaaaaaaatatcatttgggtgtgagtccactttgcgatcgtcacactgaatctattgccaacatccagattggttttatgacttacctagtggagcctttatttacagaatgggccaggttttccaatacaaggctatcccagacaatgcttggacacgtggggctgaataaagccagctggaagggactgcagagagaacagtcgagcagtgaggacactgatgctgcatttgagttgaactcacagttattacctcaggaaaatcggttatcataacccccagaaccagtgggacaaactgcctcctggaggtttttagaaatgtgaaatggggtcttgaggtgagagaacttaactcttgactgccaaggtttccaagtgagtgatgccagccagcattatttatttccaagatttcctctgttggatcatttgaacccacttgttaattgcaagacccgaacatacagcaatatgaatttggctttcatgtgaaaccttgaatatgcaaagcccagcaggagagaatccgaaaggagtaacaaaggaagttttgatatgtgccacgactttttcaaagcatctaatcttcaaaacgtgaaacttgaattgttcagcaacaatctcttggaatttaaccagtctgatgcaacaatgtgtatcttgtaccttccactaagttctctctgagaaaatggaaatgtgaagtgcccagcctctgctgcctctggcaagacaatgtttacaaatcaactctgaaaatattggttctaaattgccttggagcatgattgtgaaggaaccactcaaacaaatttaaagatcaaactttagactgcagctctttccccctggtttgcctttttcttctttggatgccaccaaagcctcccatttgctatagttttatttcatgcactggaaactgagcatttatcgtagagtaccgccaagctttcactccagtgccgtttggcaatgcaattttttttagcaattagtttttaatttggggtgggaggggaagaacaccaatgtcctagctgtattatgattctgcagtgaagacattgcatgttgttttcactactgtacacttgacctgaacatgcgagaaaaaggtggaatgtttaaaacaccataatcagctcaggggaatttgccaatctgaaataaaagtggggatgggagagtgtgtccttcagatcaagggtactaaagtccctttccgctgccagtgagtgagaggtatgttgtgtgtgaatgtacggatgtgtgtttgcgtgcatgtttgtgcatgtgtgactgtgcatgttatgtttctccatggtgggcaaagatttgaaatgtaagcttttaatttnttattttagaatgtgacataatgagcagccacactcgggggaagggaaggttgggtaaggta

SEQ ID NO: 15405 - DNA, 1843 bp, Homo sapiens
gaattctttcttcagcccatgtaaacatgaaaataagggttaaaaatgacttcattatggggaaaagggacaggatgcaaattgttcaaattccgggtggccgctgctccggcctccggggccttgcggagactcaccccttcagcgtcgctgcccccagctcagctcttactgcgggccgtccgacggcggtcccatcctgtcagggactatgcggcgcaaacatcctccttcgccaaaagcaggcgccgccaccgggcgcatcgtggcggtcattggcgcagtggtggacgtccagtttgatgagcgactaccaccaattctaaatgccctggaagtgcaaggcagggagaccagactggttttggaggtggcccagcatttgggtgagagcacagtaaggactattgctatggatggtacagaaggcttggttagaggccagaaagtactggattctggtgcaccaatcaaaattcctgttggtcctgagactttgggcagaatcatgaatgtcattgaagaacctattgatgaaagaggtcccatcaaaaccaaacaatttgctcccattcatgctgaggctccagagttcatggaaatgagtgttgagcaggaaattctggtgactggtatcaaggttgtcgatctgctagctcctatgccaagggtggcaaaattgggcttttggtggtgctggagttggcaagactgtactgatcatggagttaatcaacaatgtcgccaaagcccatggtggtactctgtgtttgctggtgttggtgagaggacccgtgaaggcaatgatttataccatgaaatgattgaatctggtgttatcaacttaaaagatgccacctctaaggtagcgctggtatatggtcaaatgaatcaaccacctggtgctcgtgccccgggtagctctgactgggctgactgtggctgaatacttcagagaccaagaaggtcaagatgtactgctatttattgataacatctttcgcttcacccaggctggttcagaggtgtctgcattattgggccgaatcccttctgctgtgggctatcagcctaccctggccactgacatgggtactatgcaggaaagaattaccactaccaagaagggatctatcacctctgtacaggctatctatgtgccctgcttgatgacttgactgacccttgcccctgctaataaggtttgcccattttggatgctaccactgtactgtcgcgtgccattgctgagctgggcatctatccagctgtggatcctctagactccacctctcgtatcatggatcccaacattgttggcagtgagcattacgatgttgcccctggggtgcaaaagatcctgcaggactacaaatccctccaggatatccattgccatcctggggtatggatgaactttctgaggaagacaagttgaccgtgtcccgtgcacggaaaatacagcgtttcttgtctcagccattccaggttgctgaggtcttcacaggtcatatggggaagctggtacccctgaaggagaccatcaaaggattccagcagattttggcaggtgaatatgaccatctcccagaacaggccttctatatggtgggacccattgaagaagctgtggcaaaagctgataagctggctgaagagcattcatcgtgaggggtctttgtcctctgtactgtctctctccttgcccctaacccaaaaagcttcatttttctgtgtaggctgcacaagagccttgattgaagatatattctttctgaacagtatttaaggtttccaataaaatgtacacccctcagaaaaaaaaaaaaaaaaaaagtcgacg

SEQ ID NO: 15406 - DNA, 151 bp, Homo sapiens
gatttaccagcaaagccatctggtacgggctttttgttgagaggtaggtctgactccatgttacagatgaggtgacacaggaaagcctcctccaaggttgctcaaggtcacatgggcagagaaggtgaagccaggatttaggactacgttt

SEQ ID NO: 15407 - DNA, 1570 bp, Homo sapiens
gcggccggaagtagccggaatctctgaaagactgaccgactgactctgacaggatccggggctgagggaaggaggcggcggccatggagttgggcgagctgctctacaacaagtctgagtacatcgagacggcatctgggaacaaagtcagtcgccagtcagtgttgtgtggaagccagaacatcgttctcaatggcaagaccattgtgatgaatgactgtattatccgaggggatctggcaaatgtaagagttggacgtcattgtgttgtgaaaagtcgtagtgtcataaggccaccattcaagaagttcagcaaaggtgttgcattctttcctttacatattggagaccatgtctttattgaggaagattgtgtggtcaacgcagcacagattggttcctatgttcatgttgggaagaactgtgtgattgggcgccgatgtgtgttgaaagactgctgcaaaattcttgacaacacagtattacctccagaaactgtggttccaccattcactgtcttctcaggctgcccaggactcttctcaggggagctcccggagtgcactcaggagctgatgattgacgtcaccaagagctactaccagaagtttttgcccctgacgcaagtctagcatctctgcctcatgtcttgaatctgcttgagctctaagatgaacctggggacaaagtgagccagtcagcacctacaaagagcttttgtgtctttgacatctaccaccctcctccttttaaaaaatttctttagaatttctcaatcttcaaggctctaagtgcttaagaattcactaacagacagaccatctggaggagctgtcttcaaatgctgtgcttacaccttatctatgaacagtcactttgtaccattatctgtggaacacagaatcatctgttcccaacactccagccccttggtcctgtggatggctggatcccgcctgaaacggacctgcagagcagcagcacccttccggtgtggaggctatgtagctggtgcgctgctcacggccattcactgcccatgctgagcgcctctcacacaggtaatgcccagcttttctgctgctaacacatttggccagttgttgcagttgctcatcatcttgggaaaggtgtttgtgacttttcagagcccagattcctgttgtctattaaaacttgaagggaggggtgaatagtgtttctctcttcttcccaaaatgaccttagctgtcctaggatagttagtaaaagactttttagcattttgacctagggcctttggctttcactaaaagtggggacctcagtatcccagattgtaattttgccaagtgttagatttgagtctctcatgtggatgcattagtcaggtggttactccttgcttcaaggtacttaccttatttcattgaagacaccgcatttgtgaactcttgcttcctggcctagaaccattccagcctaaccctggtatttgcccataaactccacaattcacaccaaaatggtctggaacttagagctaattcggcatatatacaggaagggctccttagaatcagtttggtgg

SEQ ID NO: 15408 - DNA, 648 bp, Homo sapiens
ttttcaaaatccaagcaaacttcaaactcattcatgagatatttattaaaataacacatttagggaaaaaaatcaatacaatgtatacatcattactgaaaactgtataccatcatacaaaaaaggattttattttgggaaattgttttctaatttatggcaagttttactttcagaaataaaaccacaacaacacaatctaattcaatcttaaaggctggcatgctgagcaaggaatgttcttattctttgtaggagctccttctttacactgtcaggtaccagggctctgccttttggagtgatttcagccaccaagtcatcaacagtaacgtgttctagtcctttttctttaattacctctttacagtgtgccttcaactgatccttccagccacattcaattaatttagctctcagcaactctttgaggcgttctctttctccagtttctatcaacttttggttaatcgctgctctcatctgcgcatctttgttcatcttgctaaccaccatcaccgcgggcgagggccgtcccttcccagcgacgaaatgacccttgcgctgaggaccgttacctaccacactcttcggctgcccggacttagaccctcagtagctcgggcacctaagcacacagaaagctag

SEQ ID NO: 15409 - DNA, 1079 bp, Homo sapiens
gactaaaatgaatatattattctaggttaatttttttccattcaaatgtttatactccatctacccagaacaattacagcagaaaaaataggcacctccaaagtcttcccaagaatgatgactttctgaaatgacacactgtacaaactggacaaatgagacgactgactgtgacaggggccggggagctcttcaaggggccgttttcttcaagtctcggatctgtttaatcaagtagttcttctcgtcagcgaactgctcatcatccgtcctttctttttggaagctgctcagaaactcaatgagtttgggctgattttttaacaggatctccacaataggctgtgttttgtgaggactggccacaaacaccttaaaaacatgaaaggcttcaaactggatgttgggacttttatcccgaaggaggttcatcatgagtttcaggttctccggcttgctgatatactttgtcatgatggcaaagttgtgacggtccaggatcagctcccctagcagctttaaagactgtctcttagtaacataattctcagactgaagcaatttctcatagtcttcaaaaatagtgtcgtaattttgttctaagaagtctgctaccaacactttatgtctggttagtaaatccttgaaagtagcaaaggcatctgaagcaatatcaaatgttgacaactccacgtacttaaagaaatctctgaattgattagaaaagaggatgattttggcaagtggttcatgtcgaatacattctctcagcataatcccacaacgtaaggcaatctgtggggcttcatatcctttgaggagcataaacaggatatgaggatgagcactaatatactccacagtaggactccgagtgcctatctgtcttctcaagatgttgttaaatatctgggtcacatctttttttccctcaaagtctatcagctgcaggtcagctatcagtgtcactagcaggccactgctgtagagttcttgtgctagctgagccactgcttctgttgggggttctttctcgtttgtaccacacagaatttctttcattgcttgcagtgatttag

SEQ ID NO: 15410 - DNA, 2722 bp, Homo sapiens
gggacaaggagagagtgcggctgctgagagccgagcccagcaatcccgatcctctgagtcgtgaagaagggaggcagcgagggggttggggttggggcctgaggcaagcccccaggctccgctcttgccagagggacaggagccatggctcagaaaatggactgtggtgcgggcctcctcggcttccaggctgaggcctccgtagaagacagcgccttgcttatgcagaccttgatggaggccatccagatctcagaggctccacctactaaccaggccaccgcagctgctagtccccagagttcacagcccccaactgccaatgagatggctgacattcaggtttcagcagctgccgctaggcctaagtcagcctttaaagtccagaatgccaccacaaaaggcccaaatggtgtctatgatttctctcaggctcataatgccaaggatgtgcccaacacgcagcccaaggcagcctttaagtcccaaaatgctaccccaaagggtccaaatgctgcctatgatttttcccaggcagcaaccactggtgagttagctgctaacaagtctgagatggccttcaaggcccagaatgccactactaaagtgggcccaaatgccacctacaatttctctcagtctctcaatgccaatgacctggccaacagcaggcctaagacccctttcaaggcttggaatgataccactaaggccccaacagctgatacccagacccagaatgtaaatcaggccaaaatggccacttcccaggctgacatagagaccgacccaggtatctctgaacctgacggtgcaactgcacagacatcagcagatggttcccaggctcagaatctggagtcccggacaataattcggggcaagaggacccgcaagattaataacttgaatgttgaagagaacagcagtgggggatcagaggcgggccccactggctgcagggacctggaggtctgcaccagttccagtgaccactcagaacccacctggcgcaccccccaatgtgctctggcagacgccattggcttggcagaacccctcaggctgggcaaaaccagcacagccagggcagaccccaccagcacgttcagagcccttccagcttaggcagaaccccacccagcctggcagaacccagtcgcttggcagaacccagtgatttggccaaacccagtaatctggcagaacccagtgatctggccaaaccccattgtctgggcccggccctgttgtctggccgaatccactggcctgggcagaatccacctggatggcagactccacctggatggcagaccccaccgggctggcagggtcctccagactggcaaggtcctcctgactggccgctaccacccgactgggccactgccacctgattggccacttcccactgactggccactaccacctgactggatccccgctgattggccaattccacctgactgggcagaacctgcgcccctcgcctaacctgcgcccttctcccaactcgcgtgcctcacagaacccaggtgctgcacagccccgagatgtggcccttcttcaggaaagagcaaataagttggtcaagtacttgatgcttaaggactacacaaaggtgcccatcaagcgctcagaaatgctgagagatatcatccgtgaatacactgatgtttatccagaaatcattgaacgtgcatgctttgtcctagagaagaaatttgggattcaactgaaagaaattgacaaagaagaacacctgtatattctcatcagtacccccgagtccctggcctggcatactgggaaccgaccaaagacacacccaagctcggtctcctcttggtgattctgggtgtcatcttcatgaatgggcaaccgtgccagtgaggctgtcctcctgggagggcactacgcaagatggggactgcgtccctggggtgagacatcccctccttggagatctaaggaaacttctcacctatgagtttgtaaagcagaaatacctggactacagacgagtgcccaacagcaaccccccggagtatgagttcctctggggcctccgttcctaccatgagactagcaagatgaaagtgctgagattcattgcagaggttcagaaaagagaccctcgtgactggactgcacagttcatggaggctgcagatgaggccttggatgctctggatgctgctgcagctgaggccgaagcccgggctgaagcaagaacccgcatgggaattggagatgaggctgtgtctgggccctggagctgggatgacattgagtttgagctgctgacctgggatgaggaaggagattttggagatccctggtccagaattccatttaccttctgggccagataccaccagaatgcccgctccagattccctcagacctttgccggtcccattattggtcctggtggtacagccagtgccaacttcgctgccaactttggtgccattggtttcttctgggttgagtgagatgttggatattgctatcaatcgcagtagtctttcccctgtgtgaggctgaagcctcagattccttctaaacacagctatctagagagccacatcctgttgactgaaagtggcatgcaagataaatttatttgctgttccttgtctactgctttttttccccttgtgtgctgtcaagttttggtatcagaaataaacattgaaattgcaaagtgaaaaaa

SEQ ID NO: 15411 - DNA, 662 bp, Homo sapiens
ggtggagtaaactggaatgctctccctcgctcactcctcagtgtaggagtgatctgaagcaggacaagctcagcctgcagctgccgtgggctttgtgtggactggacgcagagcttgggagacgggggagggctattactccaattcactgtcaatggaattacagctatagcggcagtgtatataggattgctttttctcgtcttcctggagattctcagtcccagtatattttaaggaagagaaatataaaggaaatttagtatgcctccttttctttaaatgaagaatttagtttcctttacttcttaaaagagaatacctgttcttgtataacgtgactgcaccagacattctgaaaaatcagcaagaagcaaaagctggaaatagctatttcacagcaggtaatcatacctcaggatgtagctactgtacaaagtttatacttggataatcctggatgggaataaaggtagggggtaactgcctgaaaaacctattactatacaggccttagcatcatgaatgactttcttcatgaggatctgaagttactatctctgaccacattgcacagaagagccaataagaatttcaaagagggcaatttccactaagggaattaagctacacaaaaggaactttcacacagaaactctatc

SEQ ID NO: 15412 - DNA, 1447 bp, Homo sapiens
gagtcttcagagcactttccacattttagtgaaccaggtgatgactttggagaatttggggatataaatgctgtttcttgccaagaggagacaatattaacaaagtcagacctaaaacagacttctgataatttatcagaagaatgtcaattggcaagaaaatctagtggaacaggcactgaacctgttgcaaaacttaaaaatgggcaagaaggtgagattggacattttgattctgtgccaaatattcaggatgactgcaatggttttcaagactctgatgattttgcagacttcagttcagctggtcctagccaagttgtagattggaatgcttttgaggatgaacaaaaagatagttgttcttgggctgcttttggagaccagcaggctactggaatctcatcatcgaaaggaagcctgggcagtcacataggacagatgaaaatattgatactccagggaacccccaaaacgcacagtgtaccttcagcaacttccaaaggagcagttgctagtggccatttacaggaatcagccacttcagttcagacagctttattaaaccgcctggagcgaattttcgaagcatgttttccttccatacttgtccctgatgctgaagaggaagttacttccctgaagcacttgctggaaacaagcactttgccaataaaaacgagagaggccttacctgaaagtggggaattgctagatgtgtggactgagctacaggatatccatgatgcacatggcttgagataccagtggggcggctcccatagcaacaagaagcttttgtcctccttgggaatagacacccgaaacattctcttcacgggcaataagaagcagcctgttatagtgcccatgtatgcagcaggattgggtatgttagagcccaccaaggaaccactgaaaccactttctgctgcagaaaaaatagcttccatcggtcagacagccaccatgtcaccagatatgaacacatgtacatctgatcagttccaggagtctctaccacccgtccagtttgactggagtagcagtggccttactaaccctttagatggtgtggatccggagttgtatgagttaacaacttctaagctggaaatctccacctcaagcctcaaagtgactgatgcatttgcaagactcatgtctacagtagagaagacaagcacatctaccagtaggaaaccgaaaagagaagagcacctaagtgaagaagctatcaaggtgatcgctggccttcctgacttaacattcatgcatgccaaggtgttgatgttcccagccacgttaacaccttccacaagctctcaagaaaaagcagacggataactgatgtgaattggacagtttctattgcttttccttttttccatcccttccctaccatcaaaagcatacctgctctaattaaaaaaaaaaaaaaagtgtt

SEQ ID NO: 15413 - DNA, 798 bp, Homo sapiens
ggtttatgtgtagggactgtgggaaggctttagcaataatcaacatttaccagacatccaatgacagcctcaggggaaagcacccttgtctggggagtgttggggagcatcagtaaaagaatggacactcaggcacagagtggccctcaggaaggaggtctttgtttgtaggatgtatgggcaaagcttttgtgatcacacaccacagggagaatctgcatgtggggacactgtggagctctgcccagatgaccttttcaggggtaacaccccagctgcttgagagaacagtgttgctgctggcagaagatgcattccagaagatgcactcccgctctggaactcactctcagccacagggaagcttgcatgcacccacaggggcaatgcacctttgcaggggtaccttctggccccaacccttgactcaacggggacaactccagaaggtcattccagatccagagatccccatcgaactgaaggatcactgggttgcagacacattgcaggtcagcttcttcctctgcccagtcctgccctcactccccagtgaatcctcaattttctgtctcgttgtctgtccagataattgattctaagacatgttaggtatataaggagtgtagataaggcttcagccatgagtcaccccccagtaagccccagagtatattgaatagaaattctgcatgtgtggggagaatggacaaggacttaggaaaaagtcctcatcaaagaacagcttttttgggacaagctttacatgggtggggagggaaaatgtgaaacacatta

SEQ ID NO: 15414 - DNA, 870 bp, Homo sapiens
ctgagactggggcctcgctcgctcccgacccggttgcaagtgttgcggtgggagaaagtcgcgtccgcatcggaggggaagcgccgtcatgcctaagtattatgaggacaagccgcagggcggcgcgtgcgcgggcctgaaggaggacctgggcgcgtgtctgctgcagtcggactgtgtggtccaggaaggaaaatcacctcggcagtgtttgaaggaaggatactgcaactctttgaagtacgcattttttgagtgtaaaagatcagtgttggataacagggcaagattcagaggaagaaaaggatattgatgcattatgttgaagccaacatggaaaacaacaaatattttccctggtcattaacacaaagaagccaaaacaggaaacatactttttactacatctgtttggttggaccagatttcccctccgtggaacactgaagaaagtggatgagttgttttcgaatatgtataaagtaaatgattctcttgatccaagttatttttagaagaaaaacctaattgaacaggtatgggttgggagcataataaatgtgttttgagaattgttctaaagcacagaaaatggaaagactgttatttgcaaacttgactcttcaattgaattacccaattagtacaggccactgatttggactgacacagtcgataacatgcagcctatccagaaggtgtctgttgggaaagtttaggataaaactttttctttagttcagtcttttcctgtctagttctaaaatggaattgtgtttgattccttaagagaagaaatacttcatttgtgctctgattcactgaagtaataacctcagcactttaatagcgtccacaggcatagctgat

SEQ ID NO: 15415 - DNA, 738 bp, Homo sapiens
agaggccccatagatgacaggcccaggtgctttagttgggcaggacctgggagtcagtgaggaactcgccccgagaacagagaaaaggtaggcaaggagaggagatgctgatggcatctggaaacaagtcttagagatggtctgcacccagagggaataaggggagacatccccaactggaatgtgtcctggagcagctgcctgggaagaagtcctcgagtttcctcaaggtgggggacagaggtcaaggatgaggccgagctaaatggaagggcgacagtgaggcaggtgggctttaaggctgtggattcgtcatgctggcggctgccagcaggcactttcaggttccttggggcttgtaggggatggggacttgtcagtggaaagacgggagggatgatgtttttggacttcagtacgggtgtgatgtcccaggaagtgggtgtggctccccatcctgtatgaaataagcagtaaagcttgctcatggctgttgcacatctctgtgactcttgtttctggcaggccccactccctggcagctgagtgctgcacctgccttctcgatcacgagcctagagaactgcacgggggagcagcccagactggctagaaaccatgttttcagagtgcagggtcaagtggcgtgtaggactctatcaaaagggatgacccctttccccaccacatacccacaactgcacaggttaaaacagaaatcttgtcattttataattg

SEQ ID NO: 15416 - DNA, 508 bp, Homo sapiens
gggacttggttcaacaacaagaacttacttaaaacaatgtactgtggtgatgagtcccaggggcactggtcagcctgtggagccctggatgctatccacacccacctatccctgcagctaatttagctgatctctaatttaactgagctctaatttagctgatcagattttgcttgggtaaagttcctttttaatgttctaaagtgtttacggttctcaaatatcagttaaaaactaattttaggtggccataaacataaaatagaaaccctgtaagttacagaagaccctaaattgtatcaaaaccctagagacaacttttcaatttgatccaaatttgaactggccaaccagtctttaaaacactggactagaagagataatgattgaaacatttaaaaaaaaaaagtgctccattcgcaggagcttttccctgtccctgtgggttttcccagttgggtgacccaccctgggggagggtcgctgggcttcgggcttcacttccctt

SEQ ID NO: 15417 - DNA, 420 bp, Homo sapiens
  misc_feature (1)...(420): n = a,t,c or g
ggagagagctagcaccatgagcctcaataccctgctaacattcagaaaatcggttcaaatgatacctcccctataaaactgtcactgaaatccctaagctgtatgtcctaatttttctcccatagtatcttgactctgcctacataacatatggcattatgatctgccccttccagcaatgatctccttaagtacaccaactgtattgttttacatccttataactatgtgcatgtacacatagtacatattagttactcaataatgtctgctgaatacagaccaatgattcccagtagatttgttctaccctaatggaaaattttcagcaaatatatcactttgggcaaagggtaccaagaatgntttcatggtcagagaaccttagaagctncacaatcantatgtggttggatccag

SEQ ID NO: 15418 - DNA, 650 bp, Homo sapiens
ttttttttttttttcttctcaaacagtttaatagcaaataaacaaaggaaggtaccacacttggcagatacaaaatgactttttgtccatgtgtctgtgcaattaaaacagatttaggttccccattgggacaaaaggaaaaacacacaaaaaaaggaaggagattcctttgaaacacatactcccttgctccaaacttataacaatttttttttctttttaaattcactacacaaactctgtgattaggtaagaaaagcgacaagggctctccttgcctttttttaaaccattaaagtaaaatccataattttctacagagtacaacacaagttcacacaaaaaagacattttcttttgcaaatcaaaacaggaaagaaaggaaaagctcaaacaagataaaggaaaagcatttctacggctgaatcacgactgagttgattgaatcccgttgttgctgcagaacagactgtgcgtttggtcatagtggcaatttttttttctcttcacattgtgaaatcactttacattgttttctagtagaaaaggcaaaaaactgtacaaaacccctagtgttaaatacaacgtttgtaccaataaaaaactcacacaggtttgtctccaaaatgtaaagtttctttttttttttc

SEQ ID NO: 15419 - DNA, 792 bp, Homo sapiens
tgaagcagaagtacctggaatacaagaagatccccaacagcaacccacctgagtatgaattcctctggggcctgcgagcccgccatgagaccagcaagatgagggtcctgagattcatcgcccagaatcagaaccgagacccccgggaatggaaggctcatttcttggaggctgtggatgatgctttcaagacaatggatgtggatatggccgaggaacatgccagggcccagatgagggcccagatgaatatcggggatgaagcgctgattggacggtggagctgggatgacatacaagtcgagctcctgacctgggatgaggacggagattttggcgatgcctgggccaggatcccctttgctttctgggccagataccatcagtacattctgaatagcaaccgtgccaacaggagggccacgtggagagctggcgtcagcagtggcaccaatggaggggccagcaccagcgtcctagatggccccagcaccagctccaccatccggaccagaaatgctgccagagctggcgccagcttcttctcctggatccagtaagagtttcggcaccgttgacgaactgcagcgatcttactggccaagccagagcgcctcctctcagattccttctcgacacagcaccctaggcggcttcttcctgtcagtcggaggtggcatgcaagatgaagctctctttgctcttcctgctttcattttgtgcttttccttgtgttttcatgttttgggtatcagtgttacattaaagttgcaaaattaaaaaaaaaaaaaa

SEQ ID NO: 15420 - DNA, 3607 bp, Homo sapiens
  misc_feature (1)...(3607): n = a,t,c or g
tcgggcggcgtcggcagcggcgcgagaggcgacgaggcccgggcggcaggagccggcgcggcgaccgcggcgagggcggcggggacggagcagagcacgacgaagacgcacaggcagccgggccgggccgggccacggggagagcggccggcgggcagcgggcgggaggccgggcgggccgcgggcagccaccgagccgcgaagcgacatggtgctgctcaaggagtatcgagtaatcctgcctgtgtctgtagatgagtatcaagtggggcagctgtattctgtggctgaggccagtaaaaatgaaacgggtggtggcgaaggcgtggaggtcctggtgcctgagccctacgagaaggacggtgagaaaggccagtacacacacaagatctaccacctgcagagcaaagtacccacgtttgttcgaatgctggccccagagggagccctgaatatacacgagaaagcctggaatgcttacccctactgcagaaccgttattacaaatgagtacatgaaagaagactttctgattaaaattgaaacctggcacaaaccagatcttggcacgcaggagaatgtgcataagctggagcctgaggcgtggaaacacgtggaagccgtatatatagacattgcagatcgaagccaagtgctcagcaaggattacaaggcagaggaagacccagcaaaatttaaatctatcaaaacaggccgaggacccttgggccccaattggaagcaagagcttgtaaaccagaaggactgcccatatatgtgtgcatacaaactggtgaccgtcaagttcaagtggtggggcctgcagaacaaagtggagaacttcatccataagcaagagaggcgtctgtttacaaacttccacaggcagctgttctgttggctcgataagtgggttgacctgaccatggacgacattcgaaggatggaagaagagacgaagagacagctggatgaaatgagacaaaaggacccagtgaaaggaatgacagcagatgactaaagccgcctttcccctctgcactttttgcaagacagtggtcaacaggaagacccagcagctccaccctcccaagtgacaggccattttgnggacgcagccgttctgtgcccattcttcaggcaactttcgattccttactgtagctaattctagatgcccttcagtattgtgaacaaatagaccgtctggtgtcacagagcccgcgtgtgcaggagcctgctcctccgagatacgtggcgtgtaggttgctgtagttacagcgcctccgtctctctccattgtgttccgatccatttctgtgtgttcccccaacctttatttccaagtgacattttcagtctttcaaatagctgccttttgtgatgtggtgatttaaatgatttaagttcatttgttctcaaccttggggtaaactgaggtattttgcttcctgggaagatcttcgcaattttgagtgctcctgtggggagcggggatgagctaaagatacaatgtttccctgccccgcactgcttccacaaaatagcaatgtggttttgcagctctgacttctgctcccagtaacccatcgttagggcactctagcactatggaggtacccaaggctcagccagtctctatttaagaaaatttaacaaatacgagtaaccctgtcccaatcactgaatctctagttactactcttagaaacacctgtggcttcttggccctcctgttgcccgctctgaatctctctgcagtctacaaaatcgccccagtcaactctccacttggaggggaattgtccagtgtggcccctagaattgagtcaccccctagataccaactgtctgaccccgaggagctctgtaagtccctgctcctcctcttccctttggggctggtgctgccactcagcaataatcctcttttctctgtgctttcttaggtccctgtcctctgtctttgaggctggttaggaagcaagagtcctgatctttcatgctgcacaatatgagcatgcaaaaagctttttccagcagaacatgttccctcgtctccagttgccggaaaggaatttggggatcaagaacttagctcgtcctacccccatgttgagttctgccctggaaaacccaaagcaagtagtgatcatagtacagaacccgaccaaagtaggctggtgaggaagtccaggctccaggggaacagacgctgcccagtgttcatagcttcctgcaacttgacagagcctgagtttgcctcttagtgggagaatgagagagagctgtagtgtcacctgacattccccaaaccttgtgaagcacgttggcctaagtgtgccgtgatcccagcccacactagcctgggtgcatctgctaatgggagaccaaatctttgtccgggaagcaagaagtgggtgggagaatgtatcctgtttttgtcagtttgtttgccttactcatttctaagtgcaataagggagtgttttcacaggattgcacctgtgacatcctgatgggatgcttccctggtggccctcctggggcaagggtggaacagactcagacccccagcatggttagcgctgaccttcattgaggtccctttggaaccagatgtcttgttacagacaccttcctctgtgtaagtctcctcaccttgagggggtctttagtaatgcatctgggtagcatctcaactgctggtagcatttatctgacttggaaagttggagaagaggcattcctactggagaaaaatgtcagtgttttcctataagctctgtgttagctattcattatatttgtgcttaaagatgttccttcattcatcaactagggggaagtccagatgcgggttatcttgaaagaaacaaactgacattctaggcagacagttgtctatgtggtctgagggtcagcagctgttagtctccttcctttggctcttgagacccacacatatcactttagccctaacaagggctcctcccacctccacctgttgccccagttgaaaagcatccattatgagctgaggtcagcctggatctggaattgcagcccacataaacataaaggaggatgtccctggtctgttccatccccacggatggtgttgctgctgggcaacagtgttggcttcttttaagtaccccctttcctcctcacccacctccaaactgactagcactcagagggacttatgataaaggttcagctccaggggtagtacctgagtgtgtgccatgccccttcagaccagctgcttccatcagaattccagggtcacagccccaacagaagcagcagtgcctctgtaggaggggtgctgggctctggccttctcatgcagagaggtccgggacagggtcagtatcgtgggcatgtgtatagcttcccaagttcttttacagtccctgctgggactccctgacttactttggttggttcctagtgctacttgttttacaaactacactttgtagaattgattagattaccttgtttatttaatgtgagtttgtgcctttttgtctcaatcttccaatacaggtatattgagaaaaaaagcagtctaataaaatcctagacagaaaaaaaa

SEQ ID NO: 15421 - DNA, 274 bp, Homo sapiens
ggggctgatttcctcttggttctcttagttcctcttgttatgatgttagggtgttaatttgaactttttctagctttttgacgtgggagtttagggctataaactttccccttaacactgccttagctgtgtcccatagattctgctatatttacccaaaaattccagaacagactgcttaatttccatgcattgtacagttttgagtggttttcttagtatttattcctatttttattccactgtgctctgatttcgcttttctggatttgcg

SEQ ID NO: 15422 - DNA, 2241 bp, Homo sapiens
  misc_feature (1)...(2241): n = a,t,c or g
agcggtcgtgttgccatgggccggaggagagccccggccggtgggtcgctgggacgggcccttatgcgccatcagactcagcggagccgaagccatcgtcacactgactcctggttgcacacaagtgaactcaatgatggctatgattggggtcgtcttaatcttcagtcagtgactgaacagagctcccttgatgacttccttgctactgcagaacttgcaggaacagagtttgtagctgagaaacttaatattaagtttgtgcctgctgaggctagaactggactactgtctttcgaggagagccagagaattaagaagctccatgaagaaaacaaacagttccttgttgtataccgaggagaccaaacctggaaccaaaatactaccccagaagaactcnaacaagcagagaaagataactttctagaatggagacgtcagctttgtccggctagaagaggaacagaagctgatattgactccatttgaacgaaatttggacttttggcgccantctggagagtcattgagagaagtgatattgtggtccagatagtagatgctcgaaacccactcctgtttagatgtgaggatttggaatgttatgtgaaagaaatggatgccaataaggagaacgtcattctgatcaacaaggcagacttgctgactgctgagcagcgngagtgcctgggccatgtacttccgaaaaagaagatgtgaaggttattttctggtcagctttggccggagccattcccctgaatggtgactctgaggaagaggcaaacagagatgatagacaaagcaacacaaccaagtttggacattccagtttcgaccaggctgaaatttcccacagtgaatccgaacatctcccagctagggattctccttcacttagtgaaaatcccacaacggatgaagatgacagtgagtatgaggactgtccataggaggaggaagacgactggcagacgtgctcagaagaagacggtcccaaggaagaggactgcagccaggactggaaggaaagctctactgcagattctgaggctcggagcaggaaaaccccacagaagaggcagatacacaattttagccatctggtatccaagcaggagttactggagctctttaaggagctacacactgggagaaaggtgaaagatgggcaacttacggtcggactggtgggctaccctaatgttggtaagagttcaacaatcaacaccatcatgggcaacaagaaagtatctgtgtctgccacacctggtcacacaaagcactttcagactctctatgtggagcctggcctctgcctgtgtgactgtcctggcttggtgatgccatcttttgtgtctaccaaggcagaaatgacttgcagcggaatcctcccaattgatcagatgagagatcatgttcctcctgtatcactagtttgccagaatattccaagacatgttttagaagctacctatggcattaacatcataacgcctagagaggatgaagatccccaccgacctccaacatcggaagaactgttgacagcttatggatacatgcgaggattcatgacagcgcatggacagccagaccagcctcgatctgcgcgctacatcctgaaggactatgtcagtggtaagctgctgtactgccatcctcctcctggaagagatcctgtaacttttcagcatcaacaccagcgactcctagagaacaaaatgaacagtgatgaaataaaaatgcagctaggcagaaataaaaaagcaaagcagattgaaaatatcgttgacaaaacttttttccatcaagagaatgtgagggctttgaccaaaggagtccaggctgtgatgggttacaagcccgggagtggtgtagtgactgcatccactgcgagctctgagaacggggcggggaagccctggaaaaaacatggcaacagaaataaaaaagaaaaaagtcgtagactctacaagcacctggatatgtgaggttgggctgcaacagaaatgtcatctgcattgtgcagatggaaaagagcagaagctgcctgttgcctgtggaactgtcccaagacactagcactgtagaacgggccctgctcttgcagagcacggctgcacccaacagtctccatgtcaagaccaagggcctcctggaaacaccaactctgacaaaaaggagtcatctgggagcccgagaatcctactcctggccgggcacagtggctcacgc

SEQ ID NO: 15423 - DNA, 641 bp, Homo sapiens
tcactcatcctcagggctgagatctggccttcttggaaagggaacaacggtgctcactgagtggccgagaatttgctgtggtatgtcaccagacgaacttgcatggtatttgtactcccatgtgctggggaggtatcttcatgggagatttcacacaacagaaccgtttgagagagtctcttggagcaggctgctggcccacccgaagtactttaggatgctggggcacctgcaggagcatggctgaggggatgcacccttcctcctccctacagcgtctcccccccaggacccctgtactgacccatgctgcatgccctctgcctcctactaaatgggctcccaaacagctgcaatttcacaaccaaagttttttacttgaaacagcatgttactccttgctaatctaattgagtgtgtattaatcggctacactggtcacacatttgattgggtaagacctaaagtaggctctgcttaacagtgagtccgttcatgtgacctataaaatctctctcagagactcctttccagtccatctttgtcagctgtcttgtctagagctttcaactagctcatagcctccagataacaaggtcattacctttagattaatacgtgcaagttaatacaaaaaaaaa

SEQ ID NO: 15424 - DNA, 819 bp, Homo sapiens
gagaacatttatatgccagactgtgctggagtcatagaatgtaatggttggcagaatctagtaaaaagaaaaagattgagcaaactcctgaatttgcaattttgaatgctttatctccaccttctatcaactgctttgagtaaataaaatttggaagtccacatttcttccctaactttctgaaagccagcatagcatggtggccagagctcagatttggagccagggtgccagtgctcttggttcccagctccatcactttctagttgaatgatcttgggcaagttacttccgtgcctcgctttctcatcagtaaaatggagacagtaacatctgccttttacagggctgttgtaaggcttacctgaatttcatatatgtaaagtgctggctcataccgtgggatatatgtttacaatagttatcaataagcaaataagtgaaaatatgccgcacaaagtgattacaatggaattattgcttttatcatgtaaatgataactttggtcttcctgttatttaacatgacttaacattctacaggagtgggaatagctttgcgaaaaatgggcgcaatggccaagccagattgtatcatcacttgtgatggtaaaaacctcaccataaaaactgagagcactttgaaaacaacacagttttcttgtaccctgggagagaagtttgaagaaaccacagctgatggcagaaaaactcacgaactgtctgcaactttacagatggtgcattggttcagcatcaggagtgggatgggaaggaaagcacaataacaagaaaattgaaagatgggaaattagtggt

SEQ ID NO: 15425 - DNA, 847 bp, Homo sapiens
gtgatttggtgaagtaccttttggctaaagaccagacgaagattcccatcaagcgctcggacatgctgaaggacatcatcaaagaatacactgatgtgtaccccgaaatcattgaacgagcaggctattccttggagaaggtatttgggattcaattgaaggaaattgataagaatgaccacttgtacattcttctcagcaccttagagcccactgatgcaggcatactgggaacgactaaggactcacccaagctgggtctgctcatggtgcttcttagcatcatcttcatgaatggaaatcggtccagtgaggctgtcatctgggaggtgctgcgccaagttggggctgcgccctgggatacatcattcactctttggggacgtgaagaagctcatcactgatgagtttgtgaagcagaagtacctggactatgccagagtccccaatagcaatccccctgaatatgagttcttctggggcctgcgctcttactatgagaccagcaagatgaaagtcctcaagtttgcctgcaaggtacaaaagaaggatcccaaggaatgggcagctcagtaccgagaggcgatggaagcggatttgaaggctgcagctgaggctcaccttggaagccaaggctaagggcccgagattagaagctccgaatgggcattgggctcggctcggagaatgctgccgggccctgcaactgggacgaagctgatatcggaccctgggccaaagcccggatccaggcgggagcagaagctaaagccaaagcccaagagagtggcagtgccagcactggtgccagtaccagtaccaataacagtgccagtgccagtgccag

SEQ ID NO: 15426 - DNA, 604 bp, Homo sapiens
tttcagactttcagcccctttaattaggtgctctgagaagaggtcagaatggcaggcagggggtggggaaggcggtgcttcttgagccccacttagcaactggtcactcatcctctggcagctggatcttgctggggtcgaagcagttggattccatgatgggaaggccattggctctcggtatttcacaagcctctcagcttcgcggcgggaccactctttcatcccatcccacgctcttggacaccctgtgcacctgtagtcaggcagataggccacaaaggtgctgccaaggaccaggatgatggagacgccaaagaagaagacaagtcgcatgttccagacgtccaaaacggggtccttgtcataaccatgggagtctgggttcttctcatacaagttttcgtcctcgggttctgggtcctcttgccacggtgtggtcggttctgggggccgctttcccgccacagcggacggggcgaccacagtcctggagaagctagattcccagcggacgcgggcggccgggagccctcgcgtcgccgctgccgccaaaagacggcgagcgctcaaaccaaacagcccagccgccctcgtgccgaat

SEQ ID NO: 15427 - DNA, 478 bp, Homo sapiens
acatgcttaccagctctaggccagggcagatgggatatgacgaatggactgccagctggatacaaggatgctcaccaagcaccaagttctcacaagttattttatgtgactttgcaggaactgaggcattatatctgaggacaccaggggaaaagtgtggcatctcagggaaatacagccctgggctgtgtctacacacaccatgagagtgctgatgggggcgcaatagtcttgaaaatgtataaagtgtccaggaatggaagtgctctttgattcattattattttcttccttcatattcccctcccagagtctcctatctaggacatcagcattctcacacaagcctaatggcttatctgagtaaggcagggcttagaaattcactttcttgatactcagtcttgccttcctaaacactccttgatcttggccttacctctcccccttttccacatgtccttttcccggtaggaac

SEQ ID NO: 15428 - DNA, 702 bp, Homo sapiens
tttttttttttttttttgactgaatgcgaggatttaataccaatgcgggcacaagaattttcttagaaaaggtcagtggggagggatcatggacaccttggtttcaacaactccaactccttcatacatcatcttcagttaggctggctgatcagtgtgctgatactttcttctacctctgacagcgtcttcagaatttggttgactttgacctcatcaaattccaaacacagaaattcagattcctgtccatatttgcctaattccagctctataatggcaacaggtgtgtgtatttgagctgagtgccttgactgagacttgccatcaactctccagctcaggccccgaagcccgctattccagcggctctggttcatgaggctctcacggatttttgtcttgtggctcttccagaatttggaaatgacagcagcttggtcagatgtgatcccaccttgctttttggtttgagcagtcaagaatgcctccagctggttgaaatccatgtctgcagacgcaatagacttaagaatccccctcatctttgccagaaaggggcggaactcctcgggtggcacctctggatatagctggctccgtagcagctcctctgtgatgccggggtacccgtggaaagtgtccctgggccaggcgcattcagcagcccgctcaggggtttgccaccctcaagctcgtgcc

SEQ ID NO: 15429 - DNA, 1805 bp, Homo sapiens
cgtagttcgctcacctccctttctaactccgctgccgccatggctcctgtgaaaaagcttgtggtgaaggggggcaaaaaaaagaagcaagttctgaagttcactcttgattgcacccaccctgtagaagatggaatcatggatgctgccaattttgagcagtttttgcaagaaaggatcaaagtgaacggaaaagctgggaaccttggtggaggggtggtgaccatcgaaaggagcaagagcaagatcaccgtgacatccgaggtgcctttctccaaaaggtatttgaaatatctcaccaaaaaatatttgaagaagaataatctacgtgactggttgcgcgtagttgctaacagcaaagagagttacgaattacgttacttccagattaaccaggacgaagaagaggaggaagacgaggattaaatttcatttatctggaaaattttgtatgagttcttgaataaaacttgggaaccaaaatggtggtttatccttgtatctctgcagtgtggattgaacagaaaattggaaatcatagtcaaagggcttcccttggttcgccactcatttatttgtaacttgacttctttttttttctgcttaaaaatttcaattctcgtggtaataccagagtagaaggagagggtgactttaccgaactgacagccattggggaggcagatgcgggtgtggaggtgtgggctgaaggtagtgactgtttgattttaaaaagtgtgactgtcagttgtatctgttgcttttctcaatgattcagggatacaaatgggcttctctcattcattaaaagaaaacgcgacatctttctaagattctctgtgggaaaatgactgtcaataaaatgcgggtttctgggccattcgtcttactttcattttttgattacaaatttctcttgacgcacacaattatgtctgctaatcctcttcttcctagagagagaaactgtgctccttcagtgttgctgccataaaggggtttggggaatcgattgtaaaagtcccaggttctaaattaactaaatgtgtacagaaatgaacgtgtaagtaatgtttctacaggtctttgcaacaaactgtcactttccgtctccagcagaggggagctgtaggaatagtgcttccagatgtgggtctcccgtgtggggcccagcaatggggggcccctgatgccaagagctctggaggttcttgaaagaggggacacgaaggaggagtgactgggaagcctcccatgccaaggaggtgggaggtgccctggaaatagctgcctcatgccacttaggccatgactggatttaatgtcagtggtgtgccacagtgcagtggctagacaactgaaaggggctaccaaggctgggaaaaaaatgcaattgttgctgtgagtgactttgaaagactctggtgccttgtggtgcccttctgaaattcaaacagtaatgcaaaagtgtctgcattagaatttacggtgtctaaaattcatgtttttaaaagagcttgcctacagatggtttccacacttgaaattgtgccctgcgagttgcatagctggaagttcaatgctcagtcctaccttggctcccattaaacatttggtgctctgtggattgagttgaacgtgttgaggctttgcaatttcacttgtgttaaaaggctctggcatttttcccatttctatgcaaatttcttttgaagcagaattgccttgcaataatttcttctctgccgtccacagaaaggcaggagtttctttcaaacttcactgaggcatcagttgctctttgg

SEQ ID NO: 15430 - DNA, 1066 bp, Homo sapiens
cggacgcgtggggtgcagccgagtcactactgcctgcctgcctgcctgctacggctcagcagcaggtacgtacccaaccatgggctcgcaggccctgcccccggggcccatgcagaccctcatctttttcgacatggaggccactggcttgcccttctcccagcccaaggtcacggagctgtgcctgctggctgtccacagatgtgccctggagagcccccccacctctcaggggccacctcccacagttcctccaccaccgcgtgtggtagacaagctctccctgtgtgtggctccggggaaggcctgcagccctgcagccagcgagatcacaggtctgagcacagctgtgctggcagcgcatgggcgtcaatgttttgatgacaacctggccaacctgctcctagccttcctgcgggcgccagccacagccctggtgcctggtggcacagcaatggtgaccgctacgacttccccctgctccaagcagagctggctatgctgggcctcaccagtgctctggatggtgccttctgtgtggatagcatcactgcgctgaaggccctggagcgagcaagcagcccctcagaacacggcccaaggaagagctacagcctaggcagcatctacactcgcctgtatgggcagtcccctccagactcgcacacggctgagggtgatgtcctggccctgctcagcatctgtcagtggagaccacaggccctgctgcggtgggtggatgctcacgccagcgctttcggcaccatcaggcccatgtatggggtcacagcctctgctaggaccaagccaagaccatctgctgtcacaaccactgcacacctggccacaaccaggaacactagtcccagccttggagagagcaggggtaccaaggatcttcctccagtgaaggaccctggagccctatccagggcagggctgctggccccactgggtctgctggccatcctgaccttggcagtagccacactgtatggactatccctggccacacctggggagtaggccaagaaggaaaatctgacgaataaagacccccgctgcc

SEQ ID NO: 15431 - DNA, 675 bp, Homo sapiens
  misc_feature (1)...(675): n = a,t,c or g
acccccattggcacacacctgccaacagcactgggggcttctccccagggngaccacgctgtcctccaagaccaggagcagctgtaagctggagacagcagagggaccccagggtgtcccctgcagatcccaccagggccgcatccatctnagtgtggaggacagtgacgggaccctcaccatcctcttgcgttttggcccccatttgctccctgagctccaagataagantggccccgagagaactgctgaacatttgttcattgctgtcacctcctgtgtcactggggtccctcaccagcacctccctgacacctgggctatggagaggttggcgcctgtcagtgaccatcctaatgcctctcgctcactcccaagccaccatttgagagggaggggtgttggtgccctgacagggactgggcagggtgtccaaacttggggcttcccaggcacctgcagtgtgaacactgcttggctggctcaagattagggccgcggagggggctgtgcacataccagttacttaagcagccacgagtgtcccccatgccttggtgcgggtcctgggaggcctcttgggggtgggacctttgggcagggtttgcccactgacangcccgccatggggcactggctgcatggggctcctttgaccctttagacccagcagac

SEQ ID NO: 15432 - DNA, 282 bp, Homo sapiens
gtaaataataatctcacaaataatgaaatagtttctgggggaaaaattattataaccttatgcccatatctaaccccattcccttgagccctggtcagtgccaagtgccagtagcttggcacaaacattagtgccctgccaaaccccaattcctctcccactcttttctcacatagctcagctggccgcaccttcatggctaaacaacctgagctcttggagatgccctggctcccctctctctgctccttatcacacaaggttctaggcagctgatgaggc

SEQ ID NO: 15433 - DNA, 931 bp, Homo sapiens
agcatcttgaatccacttagataaagagagactgtgtgtgtaggtggatttttcccaaaggatttgggaattgtaatgttacaatgaactgtatggatatgtttgtcatgtacattttcaaacaaaaaggaaaactgaaagtagtgatctttgtatacccatctcttagattcagtgattttgctatataggttgtgtatcccttatctgaaatacttgggactagtagaagcatcttggatttgggatgtttttccaaattttggaatacctgcatacacacaataagatatcttggagatgggacccaagtttaaacacaaattcacttgtttcatatataccttatgcacatagcttgaaggtaactttatataacattatttttaataattttgtgcattgagaccaagtttgcataccttgaaccatcagaaagcaaaggtgtcattatctcagccactcatgtgggtaatttgtggttggttgatgtcaccatcattcctgactgaatgtatatgctaccaataagcagttattttcttatacttattcatgcataagtacttaacagtaaaaaatatgacataactcgcataggaacaaggatggcaaaaaaaaaaatatgacacaccactgatacagtgaaaaaataatgtggtcagggtagctaggcaacagtagcatcaccagaaacctgtatcagctgttaaacggcaacaacaatggcaggctttcagtttcccacttaatgatgctgtattttaaaaggttattgtatactgtaattttatttttgtaggtgaagagaaacagaagcagctgaagggccaggaagtgggtctttctagggatgtggcattctgctggatggctttttaaaatgggttttttcctttagggagaccgaataaactgtgttgtgcacctg

SEQ ID NO: 15434 - DNA, 502 bp, Homo sapiens
  misc_feature (1)...(502): n = a,t,c or g
tatgcattaaggacaaattttattttatgattttcatttcggtgagtcacaagatattcaacacaaaatgaaacttcacaaaatttcacaaaatgaaaaattcatttcagattcaatatccacctccatcatccatattcattcttccaatgtctcaggccagaaatttggagtatgtggcttctccacctcacacaatttgccctaactttaatatatactcagaaattactggcttttcactgtttctatgattcccatgtgtaatatacaatactcaccatgcatacaataatacaataattctgtgtcacaaccacacctaaattgggtaaggtttataaggttataagctgaggaggttttgctgatcttggggctgaggctcagctgggggcagggtcttctgggtcttgggctggggggttcactggacacacaggcaggctggacaggttgggctggatctggggnggggcctcagctgggggatggacagggc

SEQ ID NO: 15435 - DNA, 861 bp, Homo sapiens
  misc_feature (1)...(861): n = a,t,c or g
ccactcggtgatgagatatatcgcaaaggttcaatccntgtgttgtaagtggatgccaagaaacacagggtaaaagtggtgactttagaaaggagttgaaatgttgtatattcacaggtttcagaaggcatatgttttttctccatcacaccttgtgaaggacatagaactcttctcttgccaaaatacacaatgtgtttcattaataattatggtatgtttgtgaattttaggcctttatctgtttaggaatcagtggcccacacatgaactctgtttctctgcttccagatctactgccaaaacctgtgcctgttggccaaactttttctggaccacaagacattatattatgatgtggagcccttcctgttctatgttatgacagaggcggacaacactggctgtcacctgattggatatttttctaaggaaaagaattcattcctcaactacaacgtctcctgtatccttactatgcctcagtacatgagacagggctatggcaagatgcttattgatttcagttatttgctttccaaagtcgaagaaaaagttggctccccagaacgtccactctcagatctggggcttataagctatcgcagttactggaaagaagtacttctccgctacctgcataattttcaaggcaaagagatttctatcaaagaaatcagtcaggagacggctgtgaatcctgtggacattgtcagcactctgcaagcccttcagatgctcaaatactggaagggaaaacacctagttttaaagagacaggacctgattgatgagtggatagccaaagaggccaaaaggtccaactccaataaaaccatggttcccagctgcttaaaatgg

SEQ ID NO: 15436 - DNA, 433 bp, Homo sapiens
gccaccaagtgagataactgtatgtcactaacttataagccgcctccatggcagatgctgctgtgctccctgatgccctgtgagcaccggggttgcctgtggcgcctgccatgtgactcgggcgcagcatcagctggctggaggtgtggctttcatagacctccacaggctgcctaggacaagatgaccaggagggcccaagccagacaaaagccggagtggggagagaggcatttcagccagaccaacaggctgaaggagctgtgcagactattgctaaaatgagggttcacagctgccaggagtcattccagaacattgctacttatttattaaaaagctaaaaactagtgaaagcaagtaactgaaccagtgaactctgggtatcgataggttcaccttaaataggccacttccccactccccgtcgacc

SEQ ID NO: 15437 - DNA, 600 bp, Homo sapiens
gaatggagcttaatcagatagcttgagaatgatttaatgttacgaaatctgttaattgcattatctcaataatagatcggtgaataactttattattctctcaacaaatcctgtatttgatttacaaaatggatgggaggtttcagggagagcagttggaagcctgtgtgctcacctgttaggaacgagagtggcaacagcagtggggaggagtgctcggctcctgcacctgtctcgatggcagagcccacaggcttggctgacagacgtgggatgaaggaaagagaagcctctcactcttcccacagcattgtagtgcgatttcatgcagaagtccaagcaggttccaggacaattgtgtaagaagctatggacaagaacgtctaagaaaacggaaaatgacatagaggatttgcactgtagctaagacttcacgcaaggctgtggcagctgaaagcatgttctggtgctggggctgcgtggcagagccaggagcccaggatccagcgcactgggcactgacctgggacctggtcatctttgcgtgtggaaaagatggcatttccagttattgacaggtgaatgctggccttttaggga

SEQ ID NO: 15438 - DNA, 469 bp, Homo sapiens
  misc_feature (1)...(469): n = a,t,c or g
gtcagcaccgtgggggtacattggtaacagttgatgaacctgcactgatacattatcatcacccaaagtggacagtctgtagtttaccttcatcagtcttttgatgaagctcatggcttgtaatttctctccctggcaatccttccaacacccatcccagatgaatcactgccatcatgtcaagcttccacttactccatccctgccttccaacaggatagaagtccaaattcctccttttgttcttcagggacttcccaatcctaaaatgcttaccacagcctgtgatattatgatatataatgttgggtttgtccacagttcctggcccataaatcccatagcccttgttacagtgtttgggtgttttaggcctcagaagcaaggcctcagaaaacagaacctcttgctgactttctcctgntctcctttaacctgctctttttcttcccaaggctaantttccctg

SEQ ID NO: 15439 - DNA, 197 bp, Homo sapiens
  misc_feature (1)...(197): n = a,t,c or g
tcgcaatcctcctcccagtcctaggcaagtactcatctactttctctctctcaaacannnnnnnnnnnnnnnnnnnnnnnnnnnnnnnnnnnnnnnnnnncgtgaaaccttttgtaattggcttctttaacttaacacgtcttcaagatgcacttaccttgtagatgtttaactacttctgtctgtgtatttgtttg

SEQ ID NO: 15440 - DNA, 586 bp, Homo sapiens
  misc_feature (1)...(586): n = a,t,c or g
cagcctcggagccgctgaccctggagcaggagtatgccatgcagtgcagctggcaggaagatgcagacaagtgtaccttcattgtgctggatgccgagaagtggcaggcccagccaggcgccaccgaagagagctgcatggtgggagatgtgaacctcttcctcacagatctagaagacctcaccttgggggagatcgaggtcatgattgcagagcccagctgcaggggtaagggccttggcactgaggccgttctcgcgatgctgtcttacggagtgaccacgctaggtctgaccaagtttgaggctaaaattgggcaaggaaatgaaccaagcatccggatgttccagaaacttcactttgagcaggtggctacgagcagtgtttttcaggaggtgaccctcagactgacagtgagtgagtccgagcatcagtggcttctggagcagaccagccacgtggaagagaagccttacagagatgggtcggcagagccctgctgatggctgggccttgtgggcagccactctgtgtgancagggtgttgggcccatacactttaaagaccaganccctgtctgggaga

SEQ ID NO: 15441 - DNA, 334 bp, Homo sapiens
ttgatgtgtgacatttttaacatttacttgatggggccacatgactcttacttaatctttcagccagagggccacatttgtttgttcatggtgattaaaatggctttgaaaagaatgagcaaacattgattcccaccctcggcccttagtaattctgcacactacatatttggagaaagaagaggaatattcaccacactattcttgtgatttcaagtaataaaaatcagaccctttcttaatccagtcttctaataggttgtctcaacattcatggccagaggaattgaaaggcaccgtgtcatccttgaatagaacagctatgttatactgc

SEQ ID NO: 15442 - DNA, 815 bp, Homo sapiens
  misc_feature (1)...(815): n = a,t,c or g
ttttttttttttttcttggatgctcctactttatttttggctacatcatcacaaagaaagatgctgggtggttgtgcatgcaccggaggacgtgtgtgtattctaggcagggaggtggttacatttgtcggggacagcgggcacccagactaggggcactgtgagcttgctgcatgctgattccagcgcctacaccagcatcaggcttgggcgacacagccagcatgctgtctcctaaggggaaactgtggtgagggaggtgggctgagagtaggtgccaccagggactaatggggaaagataaggtcaaaaggaaagatggcagccaggaagctgttggccaccttggggaaggtgaagagctcgatgtttagaaaatggttattcaaggcaagaaatgagtcctcccatgaattgtgcagggagctgagggtggagggccttgaaaagttaagagatgtgatttggggaaagtgagaatttgagtatctgtctgatgccttctgtagagaatgtccaggggtttgggatgactgggagtgattttcatgagggaagacttcatcaaaattgggaaaatcgaacctttctcacagggcattgaagattgcctgacttcaacctcaaatttgtaatgtttgcccacattgccttttcctcctttataaaataattttttttataggaagaaagtgaaagattgatgatgagcccanaanctttggcatcaggcctgtctctctctactgttccatagccatgatattatttgattctcccaggaagcttagtaacgagagtgccctgtgccgaat

SEQ ID NO: 15443 - DNA, 3557 bp, Homo sapiens
  misc_feature (1)...(3557): n = a,t,c or g
tggccgaagcagggggacagcaagggacgctcaggcggggaccatggcggacggcggctcggagcgggctgacgggcgcatcgtcaagatggaggtggactacagcgccacggtggatcagcgcctacccgagtgtgcgaagctagccaaggaaggaagacttcaagaagtcattgaaacccttctctctctggaaaagcagactcgtactgcttccgatatggtatcgacatcccgtatcttagttgcagtagtgaagatgtgctatgaggctaaagaatgggatttacttaatgaaaatattatgcttttgtccaaaaggcggagtcagttaaaacaagctgttgccaaaatggttcaacagtgctgtacttatgttgaggaaatcacagaccttcctatcaaacttcgattaattgatactctacgaatggttaccgaaggcaagatttatgttgaaattgagcgtgcgcgactgactaaaacattagcaactataaaagaacaaaatggtgatgtgaaagaggcagcctccattttacaggagttacaggtggaaacctacgggtcaatggaaaagaaagagcgagtggaatttattttggagcaaatgaggctctgcctagctgtgaaggattacattcgaacacaaatcatcagcaagaaaattaacaccaaatttttccaggaagaaaatacagagaaattaaagttgaagtactataatttaatgattcagctggatcaacatgagggatcctatttgtctatttgtaagcactacagagcaatatatgatactccctgtatacaggcagaaagtgaaaaatggcagcaggctctgaagagtgttgtactctatgttatcctggctccttttgacaatgaacagtcagatttggttcaccgaataagtggtgacaagaagttagaagaaattcccaaatacaaggatcttttaaagctttttaccacaatggagttgatgcgttggtccacacttgttgaggactatggaatggaattaagaaaaggttcccttgagagtcctgcaacggatgtttttggttctacagaggaaggtgaaaaaaggtggaaagacttgaagaacagagttgttgaacataatattagaataatggccaagtattatactcggataacaatgaaaaggatggcacagcttctggatctatctgttgatgagtccgaagcctttctctcaaatctagtagttaacaagaccatctttgctaaagtagacagattagcaggaattatcaacttccagagacccaaggatccaaataatttattaaatgactggtctcagaaactgaactcattaatgtctctggttaacaaaactacgcatctcatagccaaagaggagatgatacataatctacaataagggtcttagtgctttagaaaaaagttaaaattggaagtcattaaaaaaagactgttataatggtgtatatgttggggttttttttctaagcttctttgtcttaaattttaaaatagtgaatatgtttgagactccctttgacctttcagttccccaagttcattgttaactttgcatttgcaattggtgcaaaaatacagatttctgtcgtctgaatacacaaaaagttgtgtcataacttacccagatatgtttttctatcatttgaaacctttttagctactgtttgttttcattcaactaacaaacatattccaataataaaagcagtatatacatatttcctttctacagttacctctgattctcaacattttgtggggtagtgatttggcaagtgttttttaaataaaacaaatctcattgtaaagttatcagtcatttagtagaatagaaaagcaacatagagcatacaagaacatttgggatagagttgtgatttgtgaagaatttgtactttgatattgtggcggaaagtctagactgagtgtgtatgctggtaaactgtagacttttttttttttttttgagtccggctggttccaatcacagtagcttgattgctttcagccctcatcctctcacttgatcagttgttcaacagaatcagctgacataattgacacagtttattgggtgttaagtccgctctatagggatagtgactacttttttttttttttttttttttgctcttcttcctctcccctttctttatatgggtttaaatttaacataaagttgtttttataaggcttatttgtggctttaacttgtaagtctgattacatcattattgttccaaattcattatctctgtaggaacttttagttccattatatgaacactggataacctaattttttttaatgctttaaaaaaatggcaaaaagacgtcaggccaccctcatagtaagtggtgtagtattaaaatattttcacggaattaaaagtagcttgctgtcaaagaaacacctgagatgaattggtgtgaacgaattttgcaagtttaatttgcatttatttcagagaaaatagaaaaaacaatgttagaaggttatttaaaatgatacttaaataaagaaagtgtgaggtctactttaaaaaaattcaaatgaagagaaaaagaaaaacagcattctagaaatggcatttctcctaattaattttccacttaatggaagattatcaattgtcctattttatgatcccaggactgaagacagttgtgggatatctgtcatatttatcctgtgagtcattgtgaataatgacatacagtactgaagtaatctgattttattctttggaaattcaatgcattggtcacactaataacatcaacatctgctatcacttatctttttaaaactaaccaaaaaaggccggnnnnnnnnnnnnnnnnnnnnnnnnnnnnnnnnnnactcctctttcgtctttctttaacacacactaggctctttgtgtattatgattcagtgctatttgtaactgtgtcccagtgaccaaattgcactcgactcgatcagctgttcatccatttcgtgttttttcctgtcaaacattaatccagcaaatatatgaggtatttaccaatttattttcttagtattacaaaataattcattagcataaagtacaatagtgaaatatttgagttgttcggaacctcaattaatcctgttttacatttcagacctaaagctggcaatcaggagaagaagcactttgttttaaatgtggagaagataacacttgattccatttcattgtcattagtgtattaaccagcaggagaggtgatgagccatttttcaaatgaaataccttttatttccatataatttttttattttagagttcaatagctgtttctatgattatcctcaatttccgatatgttactgaatctgaaaaacatctttaaaattcaaacagttccattttctctcttgtaagtgttaaatgtgataaaagtacatattttaaattgttttcagctcttggatatagcagcaataaaaacactaatttgtgggtatttaagaaaacctggagaataaactcatactttaaaagatc

SEQ ID NO: 15444 - DNA, 486 bp, Homo sapiens
  misc_feature (1)...(486): n = a,t,c or g
gcggcacgaggtggccgagagggaaaggagcattcgaggtctcagtcctcgctctgagcctacttctctgcttctgggctccagccatctttgtggaaagggggctgctagtgacaccctctcaagggtctttccagctctaggtcggctgtgctggagtctaggatttgcccactgagaaatctgtttccaagttccttcaacctgatgcatcctgcagcatcacggcagctgttcagagtggtcagaaggcccctgaatgagctcagtagagggaagcctgggaacagggaggcacctgcagctctactcatgggcctggccagagctcagcagctcttctctgccatctagtggggatggcataccatcactggggaccaccctgtgcaaactggtgagcctgagtgcctgttcacagagggaaagaaaggggggggatacaggtttaggtgaaatagcaattctacctattntcaaatcatt

SEQ ID NO: 15445 - DNA, 378 bp, Homo sapiens
  misc_feature (1)...(378): n = a,t,c or g
ggcacgagggaattttataggcaaacagaatgcatctaataaattgcctttatttttacacacacagtgctaaatattagtacaaagagttcgtttctctgcagattaagtacaggctaatctatgttttggattttggattttgtaatatttgcattacacttaatattcaaannnnnnnnnnnnnnnnnnnnnnnnnnnnnnnnnnnnnnnnnnnnnnnnnnnnnnnnnnnnnnnnnnnnnnnnnnnnnnnnnnnnnnnnnnnnnnnnnnnnnnnnnnnnnnnnnnnnnnnnnnnnnnnnnngtttgaatttgaatgctcaactgtagtttacttttcttttttccaacagaggtgtcagatctattaaaaattaa

SEQ ID NO: 15446 - DNA, 3149 bp, Homo sapiens
  misc_feature (1)...(3149): n = a,t,c or g
ctgggactggtggcaccggcggcggcgtaggacggaggcgtcgctaggcagcttcgaaccagtgcaatgacgatgccagtcaacggggcccacaaggatgctgacctgtggtcctcacatgacaagatgctggcacaacccctcaaagacagtgatgttgaggtttacaacatcattaagaaggagagtaaccggcagagggttggattggagctgattgcctcggagaatttcgccagccgagcagttttggaggccctaggctcttgcttaaataacaaatactctgaggggtacccgggccagagatactatggcgggactgagtttattgatgaactggagaccctctgtcagaagcgagccctgcaggcctataagctggacccacagtgctggggggtcnnnnnnnnnnnnnnnnnnnnnnnnnnnnnnnnnnnnnnnnnnnnnnnnnnnnnnnnnnnnnnccatgggcgcatcatgggcctggaccttccggatgggggccacctgacccatgggttcatgacagacaagaagaaaatctctgccacgtccatcttctttgaatctatgccctacaaggtgaacccagatactggctacatcaactatgaccagctggaggagaacgcacgcctcttccacccgaagctgatcatcgcaggaaccagctgctactcccgaaacctggaatatgcccggctacggaagattgcagatgagaacggggcgtatctcatggcggacatggctcacatcagcgggctggtggcggctggcgtggtgccctccccatttgaacactgccatgtggtgaccaccaccactcacaagaccctgcgaggctgccgagctggcatgatcttctacaggaaaggagtgaaaagtgtggatcccaagactggcaaagagattctgtacaacctggagtctcttatcaattctgctgtgttccctggcctgcagggaggtccccacaaccacgccattgctggggttgctgtggcactgaagcaagctatgactctggaatttaaagtttatcaacaccaggtggtggccaactgcagggctctgtctgaggccctgacggagctgggctacaaaatagtcacaggtggttctgacaaccatttgatccttgtggatctccgttccaaaggcacagatggtggaagggctgagaaggtgctagaagcctgttctattgcctgcaacaagaacacctgtccaggtgacagaagcgctctgcggcccagtggactgcggctggggaccccagcactgacgtcccgtggacttttggaaaaagacttccaaaaagtagcccactttattcacagagggatagagctgaccctgcagatccagagcgacactggtgtcagagccaccctgaaagagttcaaggagagactggcaggggataagtaccaggcggccgtgcaggctctccgggaggaggttgagagcttcgcctctctcttccctctgcctggcctgcctgacttctaaaggagcggggcccactctggacccacctggcgccacagaggaagctgcctgccggaggacccccacctgagagatggatgagctgctccaaaggggaactgttgacactcgggccctttgagggggtttcttttggacttttttcatgttttcttcacaaatcaaaatttgtttaagtctcattgttagtaattctgggacaggttattaaaggatttaaatttgaacctggctttctcacagctggacataattctaggaaaataaaatactatgtcgccacttggtcataatcatttagatggtggtgtagggcaaagctgttagaaagattgtagcgttttactctccctgggctttcctccgccttgctgcaacagagaggaaatgcccatgtccacagcttgtacacactgccccctcactatcttgttatccagtggcatgccaaaggagaactgaattagcttctgaggcttctgctgtaaatcagaagtgtatgttagtcaagagtaaacaagatgcacccagtatggtgggagggttttgctgtcagtagctcaaagtatggtgtagaaatggcctcctccctccatcctgggaagtcccagtcccatcctggtgtgagaatcaaccaggctttcctgctccacctgagataaccaactccctcccgtaatcaggaagccaaatgtcaccttcccaaagaaattttattttcacgtagctgaagtgcaaaacatagatgaccatttttaataagcacaatcaaatttttaaccacagaatgtctacaagaattatagctttaaaaaatacaaccaatttttatatttcaaaaatatttgaactcaaataaattaatttcttaaaaagtacacttctcatactatgtgtttggcattgactctggttaactcttgtgcagcaacacctacgagatgctatcacacacgcgccagctggcactcctggcaccagccgctgcaacgactgcacctcacgtggtggcggggactcacattcacaagacgggacgggaacatgcagtaataaaatagctttttaaaaaataacacatataaattcatcacataggattatgcttttcactgcaaccttgaaggtggcatttatctcaatctgtgactccagctatttagtggcagacaatcccggtgaggcagcctgtggtcccaccttgtaggtggcagcccctgcaatctggggtctacgtgtcggcgtttgctttattgtgggtggagcagctgctgcagaatctgtgagttgactcaccagtccctacagttctgctaccaaagtggtcttcaatttaggggcctgacccctccccagctggagacaagctgccatctccagggctcgctgtaaacagcctccactcttgggctgaataagcactcccaagaagctgggcccctaccaacagattaatcggctgcagagtgctcatcccctccccacacccccatccacccctgcctcctcctcctttccactgctttaaccaaaccttaatgaggtaaggccaggctaggtcagggctcaaaggaaaatgggctcaggaaaacttagtttgcccagccttgtcagctgagattggttttgcc

SEQ ID NO: 15447 - DNA, 451 bp, Homo sapiens
gccactggaatcccacagactggggtggacagctattcttatgaaaagtgtggctccatttctggactaaacaggcgtactggcgctgaagataaggatcccaaactccaagtcaggcctatctgcaagcaaagtctcagcctcgctcacctcttcccttcttccatcagtcattagtcctgtgtgagaaagcaggggtgcattgttaccatatgacatggcaaaaagggattacctgctaatgccatttggtttagtgatgccttgttacataaactactctggaggagttcaaatatccctcaggcgaacgcttccatccccaggttggtaacactatagctgagtattggtttatttgccatttttcaaaagaggggagaaactacccaagccattatccagcctaccaataatacatttcaagaaaacaaccgcaactcccaatcct

SEQ ID NO: 15448 - DNA, 409 bp, Homo sapiens
  misc_feature (1)...(409): n = a,t,c or g
atgtaatgaatgttatttatatctatttattattccgtaacaactatgtgtgtgcgtcctttgacccagcaaattctatttctaaaattttggttcacggaaataaaagcactcgtacatagactaaatgtacaaattaatggtataatttgtggtgggagaaatgaagtgaatgctcataaataagggaatgggtgaatatattttggaacatccatacagaggagtattatactgtcattaaaaagaattgagtttnnnnnnnnnnnnnnnnnnnnnnnnnnnnnnnnnnnnnnnnnnnnnnnnnnnnnnnnnnnnnnnnnnnnnnnnnnnnnnnnnnnnnnnnnnnnnnnnnnnnnnnnnnnnnnnnnnnnnnnnnagatcacaaagcaagactgtctctttaaaa

SEQ ID NO: 15449 - DNA, 1072 bp, Homo sapiens
ttttttttctccagggtttgcacctgtttccccatgtagtttttaatagcatcccgcttcatactcagaagtgtcccagggtggacaagacattgtgtggcacccttgcaatggcccgcgctgagcagtgggagtaggggatggggagggcggggggcaggtgcccctctccactcaccttcccagaaggccccacccacctccctcagcaccatctccagtgggtggggcaacatctgtcctggcctcagattgcccaagacaccatttgctcacggaggccaccatgccccaatatgtacttcccgtttcgggaccaccaagctctggggactggaatgcaggcagtggaagccccagattgacttaacctgttgacagatcttcagagaaactgctggtaggaggcagctggggaaggtggcgatggccagtgggcaggcaggcctggccccagagccactgtggtacaaagaggaagtctgacagaagagcagcctcgggcaaaacgggggagccaaggcggccacgggggagaagtctctccaccgtgccctgtgtctggtgccctgggagggtggcccagtgtccatcttgtcccactgatgctgccacatcccaaggctcatgtctcagaacgagagctgctgaagggctggacgttctgagacttcttaagatgtaagtcatttggcatctgtagctggtgaatttcaggtctctaggggagaatctcagcaccccaaaatccttggaacaggggctgagccgtccagcatccccatgtagcatccagaggggttgaggggctgggcttctgggatgtcacagtatctgagcccagagcaggagggagggaaccagggccgaggcccaaggaggccactcacagagccagccctggctcaaatgcacctgccccagacccagccacaacagcccactgtcccccagctgggctagatgacctcaaagtttggagagtcagggacagggtcccagggatgggaagaagacgtctccggggcctggaggagacaggggggtgctgggctccgaaagcagatgccgc

SEQ ID NO: 15450 - DNA, 297 bp, Homo sapiens
gccattcattccccattcatcatatggaggctcatgcacttactattaggttgacccaataaagtagaatttccttttttagttcttttgatttctggaggtcactgtctgttggcattagttcaaggagtttcagattttctgcttcttggaaagtctttggacatagcaccaggtgacatgctcttttaaagataggaattatggatggtcctccattcttctccagactcttctattcccgagtacaaatgatagcagagccgttggattgttcctaatgtggtaaatgcttct

SEQ ID NO: 15451 - DNA, 315 bp, Homo sapiens
catgagcttctaccctgtcttaaaaaattaaaaaacagccacagtggggtgaccaccctgagcttacagcaagccaggcattggggtcagcaccaaacacatatccagtcactgaatgctcacaacagcccaatctgcagttgaggaaaccgaggcacaaagaagctacatggcttgtccaaggccacacagctggcttgaacttcagcaccaccctgcccccatggaggcagtccacccgggggcagggggctatgggaggaggggctccccacgcattcttttaggcggtcttccccttaggactgggaaccc

SEQ ID NO: 15452 - DNA, 333 bp, Homo sapiens
cgtcgactttgtacagcattgtctgctttgtcaggaatacctgcagataaggtaagatgtttctggggttgaagtatataagttggtatttagtttctcagtgctgtaaaaccagcttaatagaaattcgtttccttttagatgatagttactgatatatacaatcatagatttcacagaatattcgctatggatgaaaaccttagtagtattatggaacgggatgatatttatgtgtttgaaattaacatcaataggacagaagatacagagcacgtgattattcctgtttgcctaagagaaaaattcagacactcggtcgacgcggccgcg

SEQ ID NO: 15453 - DNA, 1452 bp, Homo sapiens
gtcgacaatagatgacggggctcacgttgtacgttcacatcaggtcccggcccgccggaacctgggcgatccacgatgccgagtttgccacgctgcgacagcccataggcttgcccccccgggatttcgggtggactacgaacacaaactgaagccctaggacttgtcgcccgtttgcgctctcgccgaggcacaggctgctcgcggaccaccctgctccgaaaactaagaggtaggtggtagcccattcatctggttactgatactggccggcatcagtggactgtcggcaggtccttgagcaactggtgtgtgaaatggggacggacgtcaaaggacaagcgggatgtctactaccggcctgggccaaggagaatggctggcgtgctcgcagcgcctttcaaactgctacaactggataaggaattccaactcttccaaggcgttgacacggggcagtttgacctgtgtgcagccccaggcagctgggagccaggtgctgagccagaagatcgggggccaagggtccggccacgtggtggcttgtggacctgcaggctatggctccactaccaggtgtggtacagatccagggggacatcacccagctgtccactgccaaggagatcatccagcactttaagggctgccctgcggacctagtggtgtgtgacggggctcctgatgtaaccggtctccatgatgttgatgagtatatgcaggcccagctcctcctagctgctctgaacattgctacacatgtcctgaagccagggggctgctttgtggccaagatattccgaggccgggatgtgacgctcctctacagccagctgcaggtcttcttctccagcgtgctgtgtgccaagcccaggagcagccggaactctagcatcgaggccttcgctgtctgtcagggctatgaccctcccgagggcttcatcccggacctgagcaaacccctgctggaccattcttacgatttcaaccagctggatggtcccacccgcatcattgtgccttttgtgacctgtggggacctgagctcctatgattcggaccgcagttacccactggacctagagggcggctcagagtacaagtacactccacccacacagccccccatctcgccaccataccaggaggcctgcacgttgaagaggaaggggcagctggccaaggagatccgcccccaggactgccccatcagcagagtggacacgtttccccagcccctggccgcccctcagtgccacaccctgctggcccctgaggtctggaaatgtgactctcagcctgccttgaccccttccccgtgtgcctttttctgacccaaatctcatggtttctggggccaaaattccctttcctgcctcccaatagctataaaaaattggtaaagccaagcataatgaatggaaaagtttcgccaaaaaaaaaaagtcgacg

SEQ ID NO: 15454 - DNA, 2536 bp, Homo sapiens
tttttttttaaaagaaagtttttattaacaaaagttttccttaattcacatttcaactttattaaatagtccaagggtttcatttatgaacacttattccagtttagttctcttaaattcatttgcttgttgtgcatttatgtttaaaaaggtaactaactgcactggaaaatgaaaatttatagttttatcaataggtcagtttttaaaaaatcaaaggataaggatttaaaaatattagggcattacacctttttcagaacaaggataatttacagaaattatacaaagcagattttcatcaaatatcaattatttagcgatgttttatttagctgaaatgttatttcacttgtaaaaactatctccggttacaaaaaaaaatcagaaaccttattaaatttaacctgcttttacaaatgtcctaagaagtcttaagctaaacaaaatttaagtaggaaaacgataatttaaaaatagtgtgttatactatttctgtggtttatgtacatatattaactggtctcttggataggaaacatgactagaagtttatcacactaagcactgtaaaataaaggcaagagctaatcatcttctagcaaaaatagtctctatgcaacaattgcaaatgtcaaagctattatttagtagttaattgcctgctacaatacataaaacaaagtacatttactggattgtttttcagtttgcagctgccctcttgacatcccaaataaggaattcccgttaagtaaaacctgcagtgcaattcactcagtggttagtttcaggccaagcctccccctaccattatgcttgttcttccccaccgcccccaaatcctgcagtggcaccatattattaaaaacactaagtacctgggatttatgcctcagagcaagacatcatttgagtaatttcaaatgatacacagctccttcatgtaaaaaagatgttttgtggtcacaattacttcaaaaagtaattatattcaaataacctgacatatcatgccttagcaattacaaaaccatgattttgacacatggcaatttttaagttaggcaaatgtaaaatgctaaaagatgtgaacagctgttcttctgtttaagttagagcactgcaaaactcaggtaatgactttatttttttcagttaacataaccagcccacgatacagcatactaaatcacaaagtacaaatccaaggaagttaatacctttactaagttacaaaacttgggcaaatcaatacagtactcttttataatgaaaccatacttttgttggagtcatgttactttagtgataattttcactccaaaaatatttaagtaccaaatcaaaacactggtttttaatggtggtttatagcatagtaaggtattttgcacaaaatatattttaaaactacacaatttctccttttaagtgagctcccttgtgcaagctgctgaagtgtacagcagcagggcaatgggcgtctataggaggtggctctgctctgttctggggttggtccaaagtcaggtggagttccaatgtatgaaaagcttgaaaaatctaccttaaggagactgaatatcaataccagtttccaaggagttcttgttgaattttcacagaaatactggaaccctcaaaatcagatagtaatttcaaacaacattaatttcagatgatcccttttatttagaggccctgcatctgttttgatcaagtcacatagccttacaccaacttatcaaaaaaaaaaaaaaaaaaaaactacccaaaatatagttgtatttttaaaataacaaataaatatatagtcagtttggagagacctggagtacccgatgttgtctaccaactgtcacgatcacttctctgcaaacgctgctgctgccattggagtccttatggttcctcttgctgaggctgtcagttcttcaatctcagcatttaatttatgtattacccattccattgcttctcggcctttactagcatttgaggatatcgtacttgccatcagtccttcaaggtaactgctgaggctaactcctttcacggtaattatggcttcttgtgtcaaaacagttttttctggatcctgaggatgtggtttgtatataagtctctcatctactgaaaccatgtttgtaaatgaaatattagtagatttaagttccattgttttctctacaggatcaactacagaatgttcttgcacatatgttttcgttcttgctgcaccaataagagacttcacaatggaaggcagtccccactctgtgctgagaagtctgtggctgtgcaactttccagagggatctatatgtctgtccaacacatcaactccaaccacacttgggttcatagggtttgggtatttctgcattgcagctgttgtaacagtttcccacgggtggtcaaagacgtgctccgaagtccagatcttcatggtgccggcaccctgagagatgtccgggtagcgccaggggacaacgaggcacagaggctacacctgcccctgccccgcccccag

SEQ ID NO: 15455 - DNA, 584 bp, Homo sapiens
gggccgctgctgactcaggacattcgcgcggcgctctcccgccagaagctggaccacgtgtggaccgacacgcactacgtggggctgcaattcccggatccggctcaccccaacaccctgcactgggtcgatgaggccgggaaggtcggagagcagctgccgctggaggaccctgacgtctactgcccctacagcgccatcggcaacgtcacgggagagctggtgtacgcccactacgggcggcccgaagacctgcaggacctgcgggccaggggcgtggatccagtgggccgcctgctgctggtgcgcgtgggggtgatcagcttcgcccagaaggtgaccaatgctcaggacttcggggctcaaggagtgctcatatacccagagccagcggacttctcccaggacccacccaagccaagcctgtccagccagcaggcagtgtatggacatgtgcacctgggaactggagacccctacacacctggcttcccttccttcaatcaaacccagttccctccagttgcatcatcaggccttcccagcatcccacgccgagccctatggagtctcaaaaaaaaaaa

SEQ ID NO: 15456 - DNA, 488 bp, Homo sapiens
  misc_feature (1)...(488): n = a,t,c or g
gggaaaatctgaggtgaaaactcttagcttactaatagctatcttttgtcaactccatttatatggttgattataatattcctgtcattcttggtaatatttgatacatatatttgaaagaaatgccatgagtcacccgagagggagggaggttgaggagtcagacatatggcctgatgaactgaaatggaactttaaaaatcatctagcacaatcactttccctcagataagtaaatgattatataatccagagtagcgatcttctcttggaaatctttagggttaagaatttgtgatcttcaggtttgagtgaatagcccacttggacttagttctctgtggagaaacaggcttgaagcagtgggagtctgcagctaacctcccgcacttgcagggtcaaaggtggattcacgaacctcgactgcagtgagttatgggcaagccaggcctcaancactcacagggnctcagtttccattgnacagg

SEQ ID NO: 15457 - DNA, 552 bp, Homo sapiens
gagatagaacagtgttttgtctagtgcttagcaaaaggggtgaagttcagaattctggcatgtgtttgaaatcactgctgctccttgcaaggtagcaatgggcatgacattttccttagcagtaaaaattggggaaatacaggaaatgttcctctctgcagggcaaattgtgatgatgcaatgatttcaggtcaagactgcagcccacagggtgggttgcccattggcaggagaagtgtgaaagttgtatcatcacacttacctccccccaaccccaactcagccaagatggggaacactgaatatcccgcagggtcaagtatagaaatagccatgttctggcgggaggtgagagttcattacaatgagcaacactgttaaaaaaacaaacaaaaatctcccctgccatttataccaagtgctcttctcggagtccctcttcttgggtttttggtcttggattctcggttgactccatgattccctacattagggcctactgtggcctcccttttggaagggggcccaggggcaggaagacctgggcgggcc

SEQ ID NO: 15458 - DNA, 549 bp, Homo sapiens
tgaaactcatcttcgtggccatgaaggaggtggtgcgagtccgcaagatcgcggtgggcatccatcacgcccatcaccactaccaccacgggtggttcgtcatgattgcaactgggtgggtcaaaggttctggtgtcgccctcatgtccaactttgagcagctgctccgaggggtctggaagccagagaccaacgagatcctgcacatgtctttccccaccaaggccagcctgtatggagccatcctcttcaccctccagcagacccgctggctcccagtgtccaaagccagcctcatcttcatcttcaccttgttcatggtgtcctgtaaggtgtttctgacagccacccactcacacagctccccctttgatgccctggagggctacatctgccccgtgctgtttggttcggcctgcgggggtgaccatcaccacgacaaccatggtgggtcccacagcggtggtgggccaggagctcagcattcggccatgcccgccaagtccaaggaggagttgagcgagggctccaggaagatgaaggccaaga

SEQ ID NO: 15459 - DNA, 1384 bp, Homo sapiens
aacagcctccagtcataaaaatgtgttctttacaaatatttgcttgggcaacacgacttgaaataaataaaactttgtttcttaggagaaaatgattctgtaattccagtgtcactaatttatattgttctttcctctgatttttttcaggttagtggtttttttgtatacaatttaatccaaatgttatgacattcagaaatcatgaaacacagtagatatctgttataatgtggtgtatcacatggattataaagcaaagttatggtcgatttctattcttgaaagaatcaactacagtgaatcctttgcatttgaagccttaacatgcattgcctttaattttgcccaggggacaaattttaataatcagcaagactggtttgtgcaaagcgttgagtcatcaggtatttagagcctagccagctacccagtatccatgctgccatatcccttcattgtaaaaagtacctaaacattcgtgaaatgattttttttagctgaaaaatgctggcaagaagaattttaaagcttaaaataggtggtaaatttgaagtatgagtgtgttcacgagaaacataggcttttcaaaaaatttttattcaaggcaaagcaaggaacatcttgagatatgtctcaagaatataaagatgtattattttaagccaaggagctgaaatatatctcagtttataaattcaggtatattctttttgtctccatggcaaccataacttttgaaccaaaaaaaattgtttttacatctttatgctgaaaatgtgtttagattaggaatatggtcgggctgaatttgctgttgctccctaaccaaatccacctcttgttttccttgtgagtccatggctaaatcaaagctgcccctgagaagagacttaatccaagcctgattgtactagtggcatcacttagaagtaggctttccctcttcctagtagatctcaatgttttataattccttaaaacagctgaaaattgggacaacatactttacgcaatgaacagtagttaaataggaaataaactagttccatataagtatacacctagagttttaattacctttataatgtttcttaaaagtgaaacttagatacaattgtgattggatacttagatactaagtgaaacttagtgtaacaattttgatctgttaaattggattttacatgtacatttgaatgccagaatttctaaataaatcccctggttaggaaattttaaaagtcaaagcttgttttcttcaaccactaccttctacattggttgacttagaccgtaagctttttaagtttctcattgtaatttaccttctcatgcagattgctgatgttttattaaaccttatttttacaaaaatgaccat

SEQ ID NO: 15460 - DNA, 326 bp, Homo sapiens
  misc_feature (1)...(326): n = a,t,c or g
cgcggccgcgtcgactgatcatcatagtcgtcatccttcatccccttcagccgaagccgggcaaagtcctcaaacacaatgtcatcatctgtggcatagttggtatcaaattcaatgaggttggtgtccacagggacatctgtctccggagcggccgcctcgagacaccaccagcttcaccttgaccctgtaggacaccaggattcccagcacctccttgttggcaccctccttcacgatggtgctggaagccaggttggtgtcctcgtgcttgagtttcccatccagggcgagaccccggttctcccgnntnccctgaanagggg

SEQ ID NO: 15461 - DNA, 760 bp, Homo sapiens
gccccaataatacagcccctgatgtaactatcactaagggtctataaggcctcaccactctaggaaatgaactagctgaaaattcgggaatgaatgatccctttacaggtgtaatggaaaaaatggtttggtagatggaaaggactaatggcctctattctcacctcccttgtgatcataataggggtgctcattctcttagggtgctgtattataccctgtgtctgcggactagttcaaaagctcatagaaacagcccttaccaagacctcccacaactctcccccaccctattcagataaacgtttatttctaagcaaccaagaagagcagtgaagccagatcctgttagaaatatatgaagaggaaggactacaaaatcaaaaggggaaaattattagacaaaatgagttgctctacaaaggtccaacttcgttgtcctttgttctgtaacctttgttctgtaaactgcccttcccgcagaaactgtctttcccgccgaccaaaactgcccttcactatcactgtaatccatacccctactctatttgaaactgccaatcgggatcagcttacattgtgtggttcaaccaccagccaatgaggaaaaaacacagaagcaaaagctatgatgcattagggttaaaaaccccttcctttccctgtccaatgtgctcttgagactgctacaggcgcaagcagccaccttctgcagaagtaaaccttgccttgctgagaaaaaaaaaaaaaaaaaaaaaaa

SEQ ID NO: 15462 - DNA, 1010 bp, Homo sapiens
ctcccaaagcagaattgcagctgccgccgccgccacctccaggccactatggcgcctggggctgcccaggagcttcaggccaagttggcagagatcggagctccgatccagggtaatcgcgaggagctggtggagcggctgcagagctacacccgccagactggcatcgtgctgaatcggccggttttgagaggggaagatggggacaaagccgctccacctcccatgtcggcacagctccctggaattcccatgccaccaccacctttgggactcccccctctgcagcctcctccgccacccccaccacctccaccaggccttggccttggctttcctatggcccacccaccaaatttggggcccccgcctcctctccgtgtgggtgagccagtggcactgtcagaggaggagcggctgaagttggctcagcagcaggcggcattgctgatgcagcaggaggagcgtgccaagcagcagggagatcattcgctgaaggaacatgagctcttggagcagcagaagcggcgcagctgtgttactggagcaggaacgacagcaggagattgccaagatgggcaccccagtccctcggcccccacaagacatgggccagattggtgtgcgcactcctctgggtcctcgagtagctgctccagtgggcccagtgggccccactcctacagttttgcccatgggagcccctgttccccggcctcgtggtcccccaccgccccctggagatgagaacagagagatggatgacccctctgtgggccccaagatcccccaggctttggagaagatcctgcagctgaaggagagccgccaggaagagatgaattctcagcaggaggaagaggaaatggaaacagatgctcgctcgtccctgggccagtcagcgtcagagactgaggaggacacagtgtccgtatctaaaaaggagaaaaaccggaagcgtaggaaccgaaagaagaagaaaaagccccagcgggtgccgaggggtgtcc

SEQ ID NO: 15463 - DNA, 533 bp, Homo sapiens
gggacctcagaggttgtctgaaggccgaggccaagatggcggtgctgtgcagctcctggcctgcgcggcttccggatccttggtctgcgctccagcgtgggcccggctgtgcaggcacgaggtgtccatcagagcgtggccaccgatggcccaagcagcacccagcctgccctgccaaaggccagagccgtggctcccaaacccagcagccggggcgagtatgtggtggccaagctggatgacctcgtcaactgggcccgccggagttctctgtggcccatgaccttcggcctggcctgctgcgccgtggagatgatgcacatggcagcaccccgctacgacatggaccgctttggcgtggtcttccgcgccagcccgcgccagtccgacgtcatgatcgtggccggcacactcaccaacaagatggccccagcgcttcgcaaggtctacgaccagatgccggagccgcgctacgtggtctccatggggagctgcgccaacggaggaggctactaccactattcctacttcgg

SEQ ID NO: 15464 - DNA, 1168 bp, Homo sapiens
gacctccagctgcagccgctaaagcagctaaatacggtgctgctggccttggaggtgtcctagggggtgccgggcagttcccacttggaggagtggcagcaagacctggcttcggattgtctcccattttcccaggtggggcctgcctggggaaagcttgtggccggaagagaaaatgagcttcctaggacccctgactcacgacctcatcaacgttggtgctactgcttggtggagaatgtaaaccctttgtaaccccatcccatgcccctccgactccccaccccaggagggaacgggcaggccgggcggccttgcagatccacagggcaaggaaacaagaggggagcggccaagtgccccgaccaggaggccccctacttcagaggcaagggccatgtggtcctggccccccaccccatcccttcccacctaggagctccccctccacacagcctccatctccaggggaacttggtgctacacgctggtgctcttatcttcctggggggagggaggagggaagggtggcccctcggggaaccccctacctggggctcctctaaagatggtgcagacacttcctgggcagtcccagctccccctgcccaccaggacccaccgttggctgccatccagttggtacccaagcacctgaagcctcaaagctggattcgctcatagcatccctcctctcctgggtccacttggccgtctcctccccaccgatcgctgttccccacatctggggcgcttttgggttggaaaaccaccccacactgggaatagccaccttgcccttgtagaatccatccgcccatccgtccattcatccatccgtccgtccatccatgtccccagttgaccgcccggcaccactagctggctgggtgcacccaccatcaacctggttgacctgtcatggccgcctgtgccctgcctccacccccatcctacactcccccagggcgtgcggggctgtgcagactggggtgccaggcatctcctccccacccggggtgtccccacatgcagtactgtataccccccatccctccctcggtccactgaacttcagagcagttcccattcctgccccgcccatctttttgtgtctcgctgtgatagatcaataaatattttattttttgtcctggaaaaaaaaaaa

SEQ ID NO: 15465 - DNA, 298 bp, Homo sapiens
gctcgacagcatgttaagatttttttaagatttttaaaattttagttatatccaccctatttcaggttatttttgttggtgtcaagtatgtataggacatgtgaatggttctttttaatttttttttaagaggaaatttggaagataaactccttgatacatatatatatttttgtttttttagcagcttgttatcactggaatcaaagggaaaaagtgatctcttcttgcattggttgtatttgtatgtcacaaataaaagacactttggtcaaaaaaaaaaaaaaaaaaaagtcga

SEQ ID NO: 15466 - DNA, 327 bp, Homo sapiens
  misc_feature (1)...(327): n = a,t,c or g
gagggcggggttcctgtacattcctacttcaccagataacctgcccncaacaccacttgagcttctgccagacagatggaactctccagcatgaaaatctgcgcagcatttccaacaagcagggctctgcctgaggttgtccgaaggatgccgaggaaaaggatatcaggactggaatggctcttacagcaagatccaggtttttcattagtcaatacagtgaaggctggcatgatcatcagcttcccatccaataatatctactcatcagtgtgctgttgtcaatcagagattttcaagtatgagttctccaactcaaagaaaagt

SEQ ID NO: 15467 - DNA, 866 bp, Homo sapiens
  misc_feature (1)...(866): n = a,t,c or g
ggtgtgtgggtcgagggggtggggggcagttcagtgaagtctagaagacctgctggacaaattctaaaagagctagagctgtaacacttattcttgcatcttattaattttctatgatattttttccttcttcgtagggacttgggacaatctggctttgctgctttctaactgctaggcacctctctctaaccctcattgtcagagggaattggaggatatcacagtctgttcctgttctgatattctgagcagagaaaaggcactaacggttcctcttagctatttaattatcagaagcaagtaatctttccccagataatattttgccctagaagaagccgtgatttagctcttttattgtgcttacttggtccaaatacatctgtggggtgttttgtcatttcttaatgaatgaatcatagttataaccagggggccaagctgcccaagaggctcttcagagatcatggatgctctctttctggaagctgtggcctgatggagcagccccattccagggtcccatctgtccggagttgtgtatgtcaagtccggctcagtctttatttccaacactagccgtggtcctgtgcagtcaagctctcagctagtgtttagggctgtctgtcagaaatggttatacgtgggcaaaagaagatctgacagctcctatataccttatcttactgaattcttaaactttgaaccagttcttccacttactgacttgttaccactgctgactttctgaaaagttttccagtttttgttttttgttttttgttttccagtaggggattagaatgtttagtcctacttagtaagaaaaatattgtatttttaatcaaaganctagtgctggt

SEQ ID NO: 15468 - DNA, 433 bp, Homo sapiens
agacaatacagcacattccccaggatggcaacagctactggcttgtgcttaaataccatttcattctgactgaggtcatcatctttgagctcctgcaatgaggagctcaatagggtgggggatgctgtcctttgcctcaggtgctctttgggtgctttcataaaagagggtcagagccgccgatggggtctaggagaccctaagagttctgatggtcaggctgagaattgtgtcctcagggagtgggagctgctgcaggtctgagcaccaagggctccagcaccaggacaggagcctccagccacctccaccttgcagcccctgaaggtagcatatgtggaccctcttagatggggtggggagtgacctctgccagttcctttctgtcccgtggcttcccatctgcaggttgtagaggggaaacaagaaggct

SEQ ID NO: 15469 - DNA, 1161 bp, Homo sapiens
tttttttttacgaaaccaggtttattaaaatttctctacaagtcagaaacggccatctcactgttcacatatatacacgtatgtacaggaagaacctagtgtttctagctttcccggcagaaggccctgccagcccagagtccttagtcggataatgtatcacagatacaacagtcgagcaaccacgagagcgttagtgcgacagaggcctctgtcctccctcttctcaaagtcccatgattctgtcaaggtaatattgccaataatcattcacatttcacgtggttttagacacgcaggttattcagacagacacagacaacaaaacaagcctcaaagccagaacaaaacaaaacaaaacaaaatcgaacataggtataaaaggtaaaatatatgtacaaagtacacagtacgtgaggtatacacggcattctcacaatgcatgttagtagtttgcctaggcatagcccttaaagatgactgcctgtttttgtgccatttctcaaaatacagtatattttgtttacccgtttaaccacctgatttcagcactgtccaagacagttactgatatttcatctgaatttgttttttaatgaaagttgcaatttctccattaagctccatcttttgtaggggagtgagtttccatctctggacatatctaacagaggctggattcccacctacaaaagaagctgaagaggggatttctgccttgggaggtggcagaaagaggaaagagattggaccggatgatttttaaagttccttccaactttgaagatttggggtttgctgtttcactccagaagccgattatacagacgtattcataaaccacacatttgaaatattaacaacccaccatgcaaaactgcagatgtacacacaatgccaaaggcggaccatatctgggaggggttaaagtataattctggaagttagtctgagaatcacaagactatccaaaattcactctcttcaaagcacaaagatgtttaatgtctgctcttgggagaggtgggtgggagcctccttatctttcttctcttagacagaatgctccaccctgagatggtcttggggaaaaagtaaagggtaggtactaacatatttggaaggaacttaaaaagctaatagtttcccaatgtgccgaat

SEQ ID NO: 15470 - DNA, 865 bp, Homo sapiens
ttacgtaagaaattttggacctaaaaatcttgcattttaagacagtctttgtcagaattactttttggctctaaatgaattctgtaacatttgtattctaaattgacctttagtaaaagcaggaatggccatattcaaactggtaacctcgcaaatcctgcccaccctttcactttctgtctcaatacattgatgtcctctaacccatttcctgtcttatgtgggctttagtgccacttatcaaaattgtgtggcaaatttccttgggctaacagtaacagtttttgtcggggcttgtctagcagtgggaattctgcctggggttccatcatttttgtgactggtacttgaagtgcatcagatgattaatttcatgataagagggctttttggggtggtgaaatagacatttatggaaaatgggatacccacattaagcagggtgactacctgtttaccatacaacccacacaaagccaatacaactatagatgtgctttctttagtctgttgcctctgcaaacattgcccgtgtgtttctctatgcccttcaaaaacatcagagcagcacatcctggaagatcctatcttttgtaagtttaagaagcagcctcttgtcacagcttgactcctaggtagtgtgcctagtgaccaagagggctgctaagaaagctttctgaccacttgtggctgtcattggactgatttgcccagatgacatcaattgggaatttgaggcatgacctataaagatcagttgcttgcaagagtctcaggaaaataattgtggagttaagaaacttgaagcgatttttaaaaattacctaacccaaccttctcattttgaaaaattaaaaaataaata

SEQ ID NO: 15471 - DNA, 1189 bp, Homo sapiens
ccgacgtgcagcctggcagtgcagtgagctgtctggccttttgtccttgatccttggttaaggaaatgaccaaccagtacggtattctcttcaaacaagagcaagcccatgatgatgccatttggtcagttgcttgggggacaaacaagaaggaaaactctgagacagtggtcacaggctccctagatgacctggtgaaggtctggaaatggcgtgatgagaggctggacctacagtggagtctggagggacatcagctgggagtggtgtctgtggacatcagccacaccctgcccattgctgcatccagctctcttgatgctcatattcgtctttgggacttggaaaatggcaaacagataaagtccatagatgcaggacctgtggatgcctggactttggccttttctcctgattcccagtatctggccacaggaactcatgtcgggaaagtgaacatttttggtgtggaaagtgggaaaaaggaatattctttggacacgagaggaaaattcattcttagtattgcatatagtcctgatgggaaatacctagccagtggagccatagatggaatcatcaatatttttgatattgcaactggaaaacttctgcataccctggaaggccatgccatgcccattcgctccttgaccttttccccggactcccagctccttgtcactgcttcagatgatggctacatcaagatctatgatgtacaacatgccaatttggctgggcacgctgagcggccatgcctcctgggtgctgaacgttgcattctgtcctgatgacactcactttgtttccagttcgtctgacaaaagtgtaaaagtttgggatgttggaacgaggacttgtgttcacaccttctttgatcaccaggatcaggtctggggagtaaaatacaatggaaatggttcaaaaattgtgtctgttggagatgaccaggaaattcacatctatgattgtccaatttaaacatcaaagtctccaggcttatgctgcaaagagaatgtacggattgatcatgacattccttaccttcttaggcttgtttaaaagaaatatagcatttattgtagcaaagacttaaattttgtagatacaatatgaatcttttcatgttttattggaaatgctgttcatactttaacataaagctttcttaatgcaaaaaaaaaaa

SEQ ID NO: 15472 - DNA, 350 bp, Homo sapiens
attacctgctaatgtgttgcaacccctttgagaggatcctactagttatgatgagatgcttctaataaaagttacaccagtagaaaatgccaatatttcataaggccaggatgatgacttagatagtactaatattacaacactttaggaaagttcatttcattttatttttaggaaggacactaatagagttccataaaagaaaagtctttagtgcatgttatttattattcagggtgtagatactattttaacttccacattctaaattatagtgtgggtatcaatctatgaagtaggtgctgacaagttgtcaacattactgacttttatggtgaagtttttaaatt

SEQ ID NO: 15473 - DNA, 432 bp, Homo sapiens
gcggcacgagagtaaaatgagctatgctccacctcagcctaatgtagacagtgcctacaggactgttttcttcctcataaataggggtgcctgaagtgggtgaccttgatgatttcacatactcataagtgtctgccagcctggattcttgctctgagactgcaaaaatgcacccactctgcagatccttcaaatcagagggaggcatggccacttgagaggcatcttgggtagatgaagatgagacagagttaaatgtgccagagcactggactcggaggctgaggtccacagaaaatctcagctactgttgcgttcttaaggtcctcatttgaaagtggtagaaaataatttcactggataaggggaggatacctcatgagtaaatagcacaaccaaaaagggtggaggccaagagagggcaaaacgggg

SEQ ID NO: 15474 - DNA, 732 bp, Homo sapiens
tagagacggggtctctccgtgttgctcaggctggctgcctgcacttcgattcctgtgcttgttctggctgaaggcgccggccgctcaagcgtgtttcggcagatatttttgagaacatttttttatttttaaatacatgtatagcatgagtgatggagccaaacacaagttttgaagccaagctcttggttctgagaaacaggcccaacactgcacagtgtcattcgcagtcaacccaaccactgtctgagttcacgtgacgatttctcctgccaggtcacgggaagttgttatttaaagatggcagttattacgaaggggcgtttgtggacggagagatcacgggagaaggccgccggactgggcctggtcaggagacaccttctctggacagtttgttctgggagagcctcaaggctacggcgtcatggagtacaaagccggcggatgttatgaaggggaggtctcccacggcatgcgggaaggacacgggtttctggtggaccgggatggacaagtgtaccagggctccttccatgacaacaagaggcacggccctggggcagatgctctttcagaacggtgacaagtacgacggcgactgggtccgggaccggcgtcagggacacggggtgctgcgctgcgccgacggctccacctacaagggacagtggcacagcgacgtcttcagtggactgggcagcatggccactgctcaagggtcactattat

SEQ ID NO: 15475 - DNA, 540 bp, Homo sapiens
aattcggcacgaggtggggagtgggatccgatcccgtggggctatgtaggggaagttggtggctgcagctgccgtggttttctcctggtgtccagcagaaacggcggcggcgcaaggtgtggctgggccaacccaggatctcccaggaccctccgctctgcgcgacaaggggcccgcgcttgccaaggccgacgggcaggagtgaacgtggcctccgtgggtctgcagccccgataggccaattgtacagaatttaaaccgtctctcagatgtgtacagtagaactcaagaagacagactaccaagggtcatctgaagtcgtgattgggtcactaataacaccaggacaaagttaagggatcactactcaagcataagccccagttttcataagactgctgtgaagatgtttgatataaaggcttgggctgagtatgttgtggaatgggctgcaaaggacccctatggcttccttacaaccgttattttggcccttactccactgttcctagcaagtgctgtactgtcttggaaattggc

SEQ ID NO: 15476 - DNA, 514 bp, Homo sapiens
gcttttttaaccctttaggtatctgatcgctttgccaattttgcgttactgggcaggctaagagatcttcttttaattcagcctgcttaagacgggaactgataactgtagtgtatcctctgccttttttcttatctattggaggaagctcagatggtgtcacaagaaggatctgaagtggagcttctagtatccccaggagcgcgaagtgaacacggaaggtacctgcaggatccaattgtgtccattgatctctcagagtggctgaggataatagagtttcttcttcaaggtctcaaggtctgaagcatcccacagaatgatcctactgaataactcccataagctgctggccctatacaaatccttggccaggagcatccctgagtccctgaaggtgtatggctctgtgtatcacatcaatcacgggaaccccttcaacatggaggtgctggtggattcctggcctgaatatcagatggttattatccggcctcaaaagcaggagatgact

SEQ ID NO: 15477 - DNA, 420 bp, Homo sapiens
  misc_feature (1)...(420): n = a,t,c or g
ggaaggaaggaagagatggttgcagatgcaagtgggtctataggaagggtttcagggaatgagatgagccaggttatctgcttagaatgagggaagaaaggaggtgaaattgaaggttgagagaggaatagctgggctctgaacctgaatacagacagaggtctgcctgtggcttaacatgtgctagcctaagccaccaaggagcatgacagttttcaagtataaccgagtggtcacgggtcataagccaggaggttgacagtgaggtcaatgggacggggctggccatttggcagcagcagttccccaggagagctgtgttccattgggacacagggtagagagaatgtcagcaaaggggtgggtgattacctttggtaaaggtattctggagggtgcagaaaangggcttgaatgaaa

SEQ ID NO: 15478 - DNA, 549 bp, Homo sapiens
cgggggtgcagcgcggcagaatgagggttgattcctcggctgaccccacaatgtcgcaggagcaagggccggggtcctccacgcctcccagttctccgacacttcttgacgctctgctccagaacctttacgactttggaggtacagaaggtgaaacagaacagaagaagatcataaagaaaagggaaaacaagaagagagatgtgatggcttcagcggccttggcagcagagccatctcccctacctggttctctcataagaggccagaggaagagcgcttcgagcttcttcaaggaacttagagaagagcggcattgtgctccttctgggacccccacaggaccagagatccttgctgctgcagttcctccctcttccctaaagaacaatagggaacaagtagaagtggtagaatttcacagcaataaaaaaagaaaattgacgccagatcataacaagaacacaaaggctaatcctagtgttttggagagagatgtggatacacaagaatttaacctagaaaaagctcgtttagaagtgcaccggt

SEQ ID NO: 15479 - DNA, 990 bp, Homo sapiens
  misc_feature (1)...(990): n = a,t,c or g
ccttccccagggcccaggctacagggggacagcagggctataccaggagtgccacagagcttgcatttgggtgtgatctaatccccagtcctgccctgacctcctgggtgctcttagccaagccctcttccctgtgtgtgctagaaagtgagggtcactcccttccacacaagggagtgaattgagggtggggatctgagctctctgagcagcaaagctggacacaggccaaattgccaatcctgagtccctctgtcatgtggacctgggaagcttgtcctcatcctccatccttccccagggtggggcctgagaatnnnnnnnnnnnnnnnnnnnnnnnnnnnnnnnnnnnnnnnnnnnnnnnnnnnnnnnnnnnnnnnnnnnnnnnnngtcctaaaggaagagtcgctacattggggactgtttggacaaggagatccacggggtagacttagcgggattgtccctggggcagcctggatcctgaggctgccccgcctccttcctcagcccctccctggtcaggcgctcctggtgggtggggggggtagtccaggcttgtcttgcaactgtatgttctcttcagacccctccctggcgatgccagattcactgggctggcagattctgcccccaaacctgtccaaccagttgtttgagaggagggggtagctgggaggggcagcaggagatgccaggaacagcttcccctagcacagcacagactacagacaggggagcctctggggctgcagacactgcagacggacggacagacagatggacaacagctggaggcttggcccggccatagggctctctgcgggacagtcccagctgctagtgtcgctgttgctgctactgacccgtgtccagcctgggacagacgtgggtgagtaagggtggggattggcacaggggtaccgctgcatctcaggctgcaggacaaacccaagacctcactttgtttccaaattctcacacatggct

SEQ ID NO: 15480 - DNA, 2066 bp, Homo sapiens
atggcgacctttgtgagcgagctggaggcgaccaagaagaacttaagcgaggccctgggggacaacgtgaaacaatactgggctaacctaaagctgtggttcaagcagaagatcagcaaagaggagtttgaccttgaagctcatagacttctcacacaggataatgtccattctcacaatgatttcctcctggccattctcacgcgttgtcagattttggtttctacaccagatggtgctggatctttgccttggccagggggttccgcagcaaaacctgggaaaacccaagggaaagaaaaagctttcttctgttcgtcagaaatttgatcatagattccagcctcaaaatcctctctcaggagcccagcaatttgtggcaaagggttccccaagatgatgacgacttgaaactttgttcccacacaatgatgcttcccactcgaggccagcttgaagggagaatgatagtgactgcttatgagcatgggctggacaatgtcaccgaggaggctgtttcagctgttgtctatgctgtggagaatcaccttaaagatatactgacgtcagttgtgtcaagaaggaaagcttatcggttacgagatggtcattttaaatatgcctttggagttaacgtgaccccgcagccatacctgaagaatagtgtagtagcttacaacaacttaatagaaagccctccagcttttactgctccctgtgctggtcagaatccagcttctcacccaccccctgatgatgctgagcagcaggctgcactcctgctgggcatgctccggagacactctacctgcatctttgcctccggtgaacatgtacgatctttttgaagctttgcaggtgcacagggaagtcatccctacacatactgtctatgctcttaacattgaaaggatcatcacgaaactctggcatccaaatcatgaagagctgcagcaagacaaagttcaccgccagcgcttggcagccaaggaggggcttttgctgtgctaaattaggatttgagggtgtgggaccctcaccgaattcattgattactgaaaattgaatgttttttgggtccacatttcaaggctgaagtgtatagtgtatatataacctttcctatggaaatgtgacattgagtacattttgtgttgctgctgtgaagccattaatataaatccttggaatgacccatatctctatatgtatgtgttccccagttgtgggagcaggcactaatgaaatcctgtgcctggaatggagatatttaggtacctgaggcttagtgtcctgtggtctgcatgtaagatagatgacatcctagaacaaagaagctgttttaacttaatccccctgatcagcaggatatctgtgtgttcagtgacatcatacattctgtatctagaagtctaaaatttctgcctttctcctaaagaatgtgttcttgcattttggttgaaataacctacacagtgttaaaaatcagatacctcctttagtgaccagttcaaattttaatagcgataggtagcccctgagaaatttatcactataactccacaggaaatatgacttggaagtgctctgtgtactaaacaaaataaagcccctctttgcatttaaaaccaaagtcaaaacaaaactcttgtaatgcaattaattaactttatgtcttcccatgactcaagttttgttaaatatgcccaaaaactttgattggcagtttcttcggttaattattcctatagaatgtattttaagaaatctatacaaattggatatatgcttgggtaattctccagtttctaggaggtacctatttcctaccgtttcaagtgatgaagtgaaaataatttacattcgatagtgttactgataacaaacctacttaagagatatgttgctttttacttaagggatagtgttgatagataaattagaatgtatagataggtttgtgaaagtctaaataatggctgtatagatatgtatatatggttcacatatctggatctgtgtatttgattttgtactttaaatgtgacaaataaaccttttgggag

SEQ ID NO: 15481 - DNA, 98 bp, Homo sapiens
ctacccctgtctccccttcaaggacttctcccttgtggttttgtaaagtgcaaacttaagaataaagtgactgctgtggtttttcaaaaaaaaaaaaa

SEQ ID NO: 15482 - DNA, 327 bp, Homo sapiens
atctcttaggaccactaaaacttaggcctggggcccacccatcccaagtagatgccttcctcacctgggcaaatgggttaatcatcaaaccctggcattggctgagctaaaagcaaactggcctgcagaatgcttttggagaatggacaaatgctggcctgggagagggcattcagccctgcatctctctggaacagaatgcaaggcaatagcttatgtcaagaaaaaattcactggccccttctgacttcctttctctaaatgcctattgcataattcccattaagactcaagtgttttgggtttgttcactgcagatgacacagg

SEQ ID NO: 15483 - DNA, 5108 bp, Homo sapiens
  misc_feature (1)...(5108): n = a,t,c or g
gagcctcttgcccttgcgcagagccactgtgagaggcggtgggagccaacacccttgggggagggggcagtactgctcggcacatcccagcatcaggtcagatcattgaaattaaaaaatgtgaattaagtttaaggagtattgccccatggtgttccgaaaccttcgggagaggtttggaattgatgatcaggattaccagaattcagtgacgcgcagcgcccccatcaacagtgacagccagggtcggtgtggcacgcgtttcctcaccacctacgaccggcgctttgtcatcaagactgtgtccagcgaggacgtggcggagatgcacaacatcttaaagaaataccaccagtttatagtggagtgtcatggcaacacgcttttgccacagttcctgggcatgtaccgcctgaccgtggatggtgtggaaacctacatggtggttaccaggaacgtgttcagccatcggctcactgtgcatcgcaagtatgacctcaagggttctacggttgccagagaagcgagcgacaaggagaaggccaaggacttgccaacattcaaagacaatgacttcctcaatgaagggcagaagctgcatgtgggagaggagagtaaaaagaacttcctggagaaactgaagcgggacgttgagttcttggcacagctgaagatcatggactacagcctgctggtgggcatccacgacgtggaccgggcagagcaggaggagatggaggtggaggagcgggcagaggacgaggagtgtgagaatgatggggtgggtggcaacctactctgctcctatggcacacctccggacagccctggcaacctcctcagctttcctcggttctttggtcctggggaattcgacccctctgttgacgtctatgccatgaaaagccatgaaagttcccccaagaaggaggtgtatttcatggccatcattgatatcctcacgccatacgatacaaagaagaaagctgcacatgctgccaaaacggtgaaacacggggcaggggccgagatctcgactgtgaaccctgagcagtactccaaacgcttcaacgagtttatgtccaacatcctgacgtagttctcttctaccttcagccgagaccgagagactggatatggggtcggggatcgggacttagggagaagggtgtatttgggctagatgggagggtgggagcgagatcgggtttgggagggctttagcaatgagacttgcagcctgtgacaccgaaagagactttagctgaagaggagggggatgtgctgtgtgtgcaccagctcacaggatgtaaccccaccttctgcttacccttgattttttctccccatttgacacccaggttaaaaaggggttccctttttggtaccttgtaaccttttaagataccttggggctagagatgacttcgtgggtttatttgggttttgtttctgaaatttcattgctccaggtttgctatttataatcatatttcatcagcctacccaccctccccatctttgctgctctcagttcccttcaattaaagagatacccagtagacccagcacaagggtccttccagaaccaagtgctatggatgccagattggcagaggtcagacacctcgccctgctggcatttgctcttgtctggattaactttgtaatttatggagtattgtgcacaacttcctccacctttcccttgggattcaagtgaaaactgttgcattattcctccatcctgtctggaatacaccaggtcaacaccagagatctcagatcagaatcagagatctcagaggggaataagttcatcctcatgggatggtgaggggcaggaaagcggctggggctcttggacaccctggttctcagagaaccctgtgatgatcacccaagccccaggctgtcttagcccctggagttcagaagtcctctctgtaaatcctgcctcccactaggtcaagaggaactagagtacctttggatttatcaggaccctcatgtttaaatggttatttccctttgggaaaacttcagaaactgatgtatcaaatgaggccctgtgccctcgatctatttccttcttccttctgacctcctcccaggcactcttacttctagccgaactcttagctctgggcagatctccaagcgcctggagtgctttttagcagagacacctcgttaagctccgggatgaccttgtaggagatctgtctcccctgtgcctggagagttacagccagaaaggtgcccccatcttagagtgtggtgtccaaacgtgaggtggcttcctagttacatgaggatgtgatccaggaaatccagtttggaggcttgatgtgggttttgacctggcctcagccttggggctgtttttccttgttgccccgctctagacttttagcagatctgcacccacaggcttttttggaaggagtggcttcctcgaggtgttccacctgccttcggagcctgccacccaggccctcagaactgaccacaggttngctctggccaggagagaaacagctctgttgttctgcattgggggaggtacattcctgcatcttctcaccccctcaaccaggaactgggggatttgggatgagatatggtcagacttgtagataaccccaaagatgtgaagatcgcttgtgaaacccattttgaatgaatagattggtttcctgtggctccctccaaacctggccaagcccagcttccgaagcaggaaccagcactgtctctgtgcctgactcacagcatataggtcaggaaagaatggagacggcattcttggacttcactggggctgctggattggatgggaaaccttctggaagaggcagatgggggtcaaaccactgccttgccccaggaaggggccataggtaggtctgaacaactgccggaagaccactacatgacttagggaacttgaaaccaactggctcatggagaaaacaaatttgacttgggaaagggattatgtaggaataatgtttggacttgatttccccacgtcataatgaagaatggaagtttggatctgctcctcgtcaggcgcagcatctctgaagcttggaaagctgtcttccagcagcctccgtggcctcgggttcctaccggcttctctgcatttggtctgctgatcatgttgccataatgtgtatggaaagtgtaacacattcttactggttaaagacgactaccaggtatctaacttgtttaacattgagtttgtgtgtgtgtgtgtatgtttgtgtgttttgtatattgtttacattttgagaggtagcattctgtttcaaatgctttttgtttttctgacagtattgttgactgggtcataacattttgagctgtggtttggtggattttcaatttttttttttaaaggtcattcgctgtgctatcttcaaaaccttgagtttggcccccaatttttggcattcaaatgtttaaaagctatttatcttggtttatacaagtttcctttctcttctttttgtcatggtattctatttggtctgcagtttgaatgtagagaaagtggactgatcccccaagcgttgtctgcccccactctttcctccttgggtcccgcccattcttttactgggcagtcgagggcattggaggggaagtgactgccctcagcctcactccctggggccatgaagaaaagctaaacagtctcatggcatctcagaataatgttgggtctcccaagaagaaaggtgtaagaataacgacatggctgattaggcgaggccaggatagggctaaggccaggattcctggctggcatccagtcaccccttctcccatccttccccctcttcttccacaagtccgcagccgagacactgtagtctcccagccacagtgatgagtgccctggagactccactgacctctagatgaaggcccctggccctggttcctgttaattaacctctgggtctttgagtcccccagcacaaacttctttcctgtaccctgcggcttggggtcacagggcatgccgggaagccacagctgaggggcgcagactgaagcagtgctccacctctccttctttagctcaggggttgctggtctgtggcaggcgccacgaagtggcccctgtggctgttctcagtggcagtctcttaagttcccaccacaggcagctctttatcccctctccctacttgactctttctcttgcctgtgcttttggcctcaaacaggcctgctggtagcgctcagggcgtgaggctacactcctgccctgcctttcctgtcttcaatggtctgccagggcataacttggggaggtggaccaaagacccaggactttttgcagtagccagtcctaccccccagttgtctttttaccaattcagggtgggagagaaaactgcagcaccccagcatgtgagttactcaggtgttgggggctagaagggacagtgcgtttaaacaacactcagagctctggccttaaacctgtggccccccaagtctaggagcctcatctcttcctggcagtcatgcgggcaggaggtcctgaaagggaaaacccattcagacaactgttccccaatctaccagccatctgcaggggtcagtgaccgtggccctctccctcctctagaatgtgccacttatgaagagtgccccatggggaaaaggagactcagctgtcccttggcagcttgtgccagtatcccagggcagaagtttccacaggagcctcttgcccttgcgcagagccactgtgagaggcggtgggagccaacacccttgggggagggggcagtactgctcggcacatcccagcatcaggtcagatcactgaaattaaaaaatgtgaattaagttcatatccaccttttggggaagcaggacaaaccaccaccccaccaagtgtgtgacttctccatatcccactgcagtttccattttttaaatgggaattttcaatcccctgtgcttgtctaacgtctgctttaaaaagtttgagaccctgttactgtttgaaaatgcatgcatgttacgatgaatctccaacctgaggaaaaaaataaaactcaaaaagctttgtgtac

SEQ ID NO: 15484 - DNA, 1048 bp, Homo sapiens
gcgcgggcgggccaaggcctgcaggagcagccaaagatgtaaactatggaggagtatatgttggcctaccatctgaagctgtcaatatggtgtccagtcaaacaaagacggttcggaaaaattagaagaaaataacatcatgactcaagaatcaagagcttgctcatcagtttggaaggaatttggctccgtgggacgttgtaatgtgcacagacatttccaaggaaattctaaacagtcacccttcccttttgcattcccccaaatcttaagtgtatacataaaaccctgggtacatattgttgtggtaatagaagggaattggttaaacagtacacttgtttatggaactttctgtggccacctacgaaagacaagttaacaaactgtcatggaggctgttgttgcccagccagggccgctgcattttgacaacatttccaccctggccactcagcacatttcatggaggtcatgtcttttcactgatacttttttgatagtttttatataacaaaatccttattctatttataacttaagatgataaggcactataaattaatgacctaaaataatatatttgtctgttatcttttgctatttctacttcactttaatttttagctgtaaaattggtaaatggattcttacaactatctctttccatttcttactatttggttttcaaatttcatttaaatgtcagaatttccttttttaggaacaaggtgtatttcattgcactatttaaaaataaactcaaatttgcatgccatatgcacattttgattacatttttattttctttcgtgaaaggcatgtgcaactacaaatacttcatagctgtttgggttgctcattctacatcacgacaatctcatcatattatttctataacttttcaaggacttgcgatggatggttagtgggatatctggaaattaatttgataatgacttgtgtatctacttagtattgcaatgtaagttactcaattcaccaatgtatttcaacaattaaaacatttttatccctcttcaaaaaa

SEQ ID NO: 15485 - DNA, 1217 bp, Homo sapiens
gaggttggggtgactcagtgggaacgccatctgagcggggcatgacctatgacgcactccacgtttttgactggatcaaagcaagaagtggtgacaaccccgtgtacatctggggccactctctgggcactggcgtggcgacaaatctggtgcggcgcctctgtgagcgagagacgcctccagatgcccttatattggaatctccattcactaatatccgcgaagaagctaagagccatccattttcagtgatatatcgatacttccctgggtttgactggttcttccttgatcctattacaagtagtggaattaaatttgcaaatgatgaaaacgtgaagcacatctcctgtcccctgctcatcctgcacgctgaggacgacccggtggtgcccttccagcttggcagaaagctctatagcatcgccgcaccagctcgaagcttccgagacttcaaagttcagtttgtgccctttcattcagaccttggctacaggcacaaatacatttacaagagccctgagctgccacggatactgagggaattcctgggggaagtcggagcctgagcaccagcactgagcctgggccgtgggaaggaagcatgaagacctctgccctcctcccgttttcctccagtcagcagcccggtatcctgaaggccccagggggccgggcacctgcaatgctcaggagcccagctcgcacctggagagcacctcagatcccaggcggggaggcccctgcaggcctgcagtgcccggaggcctgagcatggctgtgtggaaagcgtgggtggcaggcatgtggctctccttgccgcccctcaacctgagatcttgttgggagacttaatggcagcaggcagccatcactgcctgcttgatgctgcactgagctggacagggggagtccgggcaggggactcttggggctcgggaccatgctgagctttttggcaccacccacagagaacgtggggtccaggttctttctgcaccttcccagcacatgcagaatgactccagtggttccatcgtcccctcctgccctgtgtacctgcttgcctttctcagctgccccacctcccctgggctggcccactcacccacagtggaagtgcccgggatctgcacttcctcccctttcacctacctgtacacctaacctggccttagactgagctttatttaagaataaaatcgtggtggtggtca

SEQ ID NO: 15486 - DNA, 806 bp, Homo sapiens
  misc_feature (1)...(806): n = a,t,c or g
aacaattcaagtaaatcctgtagctattaccacttaaaatccgtagctcaagattccgtgtttcaccaccttatacacttaagcaattatacttaagcctttttttagtcctaagtgaagaactacatcagaatcaggataagtattttgcctgggaaatttggctgcatatgaatggagaagacatttacatcctatgttctggcactttctgaaagatctaattaaacatgttgatgtgccaatttaatcaagatgagagatccctgctggtgtcaccctctagaacctgcacttggtgttttgactttccagaagaaaaaaatgcaactttggttagggggcagtggttggatcacacagttgtctttcgtttcctaccacagtaattcatatttaaatatgcttttagattagtgtggatactattgctgctgtgttgctacctgacctttttctggggggggtacctcagaaatgagcatttgagggcaagcgaaaaagccctcttcatcctccagaggcaacaaagaggcagcagaaatggggaaagattgtgagaggcagggcttgggtctagacctgggacttaggcaagatatgttgccctcaaccctggagttttcttatatgtaaaaagggaaggttgggctggactagatgaggttcaagatttgccctttctggggaggcngatatttccagngattcaaatttaatncctaaacccaaaggctttattggcttgctacagagacctgttcacntttcttgagganttgtcacccagagtttgtcccttcaga

SEQ ID NO: 15487 - DNA, 1177 bp, Homo sapiens
tttttttttttttttttttcactgctaaaatattttattttaaaatgtaccacagtgaatggatgtatccatactggttcttataaatgtacacatacacatccatatatttgacaaagtatatatatgaactggttaaagacctatccaaaagaggaaatatttctagaaagttcatgtgtttatacttcatttgacaattaaaacttatttgaactgatgaagttttagttgcttagcaatgactaataataccaatgcctgtcaataatgacaactaaattgagaactataaatttcactgctgtgccttgggtcaaaattttcaatgatggaatcctaaataagtaacagttattcctataatggggtatatattcagaaggaataaatacctgccactattaccaaaagactgttctctgtagagctgaaaaaaaggattatgccacaatacataatttttatttaaaaaagatctctttagatgccactgcaaattctgcttttactaaacagaaaggcagcaccccatttctttcttgtaaaggaggaaagtctttcataaaaaactctttgaagaagttttggtagtatgttcagagtcaaacacagcagcactttattaacaaggacagagtaatataatcacaaggaaatacttgttaagtctaaattaaatgatatcttgggcagcataaaatgaatactaacaagggcaggcatctcaatatgtctgtctcacagctgttcaatgtgaaagtagtttgtaagcaaggaaagacaagagcaacatttacaccacaaattgactgtaaaatacttcattacattgagaaaggtaatcaatggtcaaaatccataaccagaaggagacaccatttgagtatctatcaatgggccaaacagacctgttagattttaatactgcctggtatgcaactcagatactgatttcttctctatggaggaagccaatgttcatgttcttgataacagtcattaatctttctgattgagacagtccaaacccatgtgacctcagaacactgggtctaagagtgaacttcttacattgatatattttccttgagttctttcatggtgctgtatcagcatgctaccataatctgaaaatgacatggggcacaaaggagccatatatatatatttcatg

SEQ ID NO: 15488 - DNA, 479 bp, Homo sapiens
gctaggaggaaatactgaccccataaacctaaatctcacacacggttttggacgtttaaacgaatggatttaacagccttttggaattcagcctgtttgtcatgactgtccaaagtatgataatcacatgagagtgctcgttgctacggatgtcatttgactcatcagagaaaatctgtctaaaagaaaatatccatgtgaccaaatccatttcattattgaatggcttgatggatttcctttactctgattcataccaaagctgtccttctcaaccaaagcaagaaaggatcctgcatgagtcaatcccagaatgcaatttttacatcaccaacaggtgaagaaaacctcatgaatagcaatcacagagactcggagagcatcactgatgtctgctccaatgaggatctccctgaagttgagctggtgagtctgctagaagaacaactaccacagtataggctaaaagtagacactct

SEQ ID NO: 15489 - DNA, 1500 bp, Homo sapiens
  misc_feature (1)...(1500): n = a,t,c or g
ttttttttttttttttgtggtataaatttttattttaaaaagtgttaaaaaatgccttgccctcttgcctttgaacattaattattcaacctctttggaatctaagagatttgataacaccatttggatggtggtacaaggagcaaacagaactcacccaggcccctccagcaaagcctggagcctccctccattctcccttttgggctgtaggagccaaggctgcgtggtggccaagtagtaaccggacaggtgcagacaggagagccgaggctcattactttacagcagtgctcttctcaaccggggcaattttcccctttccttggaccatttgacaatgtttagagactattgtcacaactggggcggggggctggggagaacagtgcccctggcatacttagtaggtggggncagggatgctactaaanatcctacaaggaacaggacagtccccacaacagnattacccagcccgagatgccgacagtggcaaggctgagacagcctgctctgcagccccatttcaggggtgtgtatgtgtctgctagagttgaggggattcacaatcagaatcaacaacactgttatcagcccaagacaccagaatctgttccgacagccagattgaccatcaccacacccttctcgccctccctctggggagagctaagcacacagccttccttgtcggtttagcaaaatgccagtggacactgagcggcctacccagcttcagtcttctattctagttctttcatccacccccaggtttcaggtgggctttgaaaggctgggtgctagaggcacaattaccacactcagaagctgtcctttttcactctggcacacagaaaaaatatgaaaatactttcacagtacacagagtaaaccgaggaagccactcaacagtatcagccctgaggttctggtctcacccaggggtagagatcagcatttcctgttccctctccagggcactcaggctgggtgaaggtaccagaatgccaggaaataactttaaaagtcaatcaagaatttttgttgtagtcacggttagtaccaattccttgcaacaactgcctgggaaattctgatgtttcccccctccttggtacccctttaaatccattcagttaatttgaagactcaatataaattcaattcattaaaaaataatcgataatttaatgggctgaagactgcacgtggttcttagagcctacagtggctgacagagtattgggtattaacgttaacggatcctgtgatgtggcggtgagctgcagctgtgatccacgaagtctctgaacagggcttagaatctgactgcactttgtttttaacaggagcctacgtgaagaagagagcacacaattttaaaagttgattttatattctctgagtttttcttcttgcttcaacaaaactctaggaaatgccataagctgaaagaacatgaccttcctcagacatctcttctctccctttccaaac

SEQ ID NO: 15490 - DNA, 465 bp, Homo sapiens
  misc_feature (1)...(465): n = a,t,c or g
tttganttcgaanancnnnnnnnnnnnnnnnnnnnnnnnnnnnnnnnnnnnnnnnnnnnnnnnnnnnnnnnnnnnnnnnnnnnggcacgagcggcacgagacattttagatcatttcattcttcaaacagttaaaaatcttttcactccaggaaagactgttttatttcttctgctgctcactgccatgctaagtaatatgcttattctgctgtttcatgatttgtccaaattttggcactattctttggcttcctactgttgaagatgagaaattagcaattttatnnnnnnnnnnnnnnnnnnnnnnnnnnnnnnnnnnnnnnnnnnnnnnnnnnnnnnnnnnnnnnnnnnnnnnnnnnnnnnnnnnnnnnnnnnnnnnnnnnnnnnnnnnnnnnnnggcctcatcctcccctgtagctggcattacaggtatgagccactgcgcctgcccagaaattagcag

SEQ ID NO: 15491 - DNA, 2157 bp, Homo sapiens
  misc_feature (1)...(2157): n = a,t,c or g
ttttttttttggaatcattggtttaatggttctgaataaatggttaagattgatgtttccagccaagtgagatttgggtttagatatagtttgggcttaagtatcctttatctcagattaaatgagacagtgcatgtaaaccacttagaagaatgcctggaacacattaactttcattactaatgtttttggtcattcttaaacattttcacttctgccaccaccctttatgcagtctggcacatagctgtcactcagcaaatgtgagcaaacaaacactagagactttagtctgccaggtctctaacatgcaaagccatggggccaggtccatacactccctccactgagaaaaagacaaatggcttaggctacaaggtttgggtcaccaaggaaagctgtcaaataatgaagtgggtaagcagattcctaaaaattggaaccatttcagcagcagtttcatccacagggagacagagtaaatgctctctcaaatctgtctcacatctatagaaaccttactctatttatggtcttttggcatccttgctctgcctatctcacttgagatcactcctatagaactaatagaggaataaatcaaaagcaaaccagtataagtagagacgcaataaaatttggatgtcttgagttctgaggggcttgcacacacttgttaaggcatgcagtgtgtgctaggggcttcagcagggaactccactcaaggacgtggtgtaggaagcaaagacaaaccaacccaagtggtactgaagaggacaagatgggaaggacatttttattttccctaatcttcaggcaacctcaccaagctggaggtcacatgtagctgagtgtgaaaccaagaaaaatacgaagcttcaaaagtactgtgcgttgtatttcttcattctctggcaggctgggagtccaaggtcagtctaggcaggagggctgcttggcctaagcagtcacacaattttcaccgtcttgagcatatctgacaagacatacgtgtcatcccaacccctcccaggcttcctcagggtccggctccaaagcctgggctgtttctaggagctctggtgtggcaagtttttgctcagggtgcagctgacagaacaggatctcattcacttcaccctcaattcgcccggacatataggagggggaacactgccttgaggcccagccagcactgagtcttttagccccaagtctcggcacacaaggttgagaataaaaacaccttcaggagtcaagatgcttttaaccttctgtagaaaagattgctccacaaatgctgggggcggacaactcattcccagtgttgggtccttactgtcaacatcaaacattatgacatcgtagcaaggccgtgcttctcctcctcctgccaagctggcgatatagtccaggccatctgcaatgtggaccttcattcggtcactctgggagaagccaaaccactgggtggccacttccaacatggagggatcgatctccacagcatcaatgcaggactttggaaaatgatcgtggacaaagagggggaggctgcccccgcccaggccctaccaccaacaatgccagtgggatctctaggagtagctctgggtttctcaggcagggcaaggcccagcgatcatggctttgtggtgttcacaacacaggtaactcttatcaatggactgccccgggggctgcagggaggtcctccgcatcagcaggccgctgcttcttcctgtcctttttccgcttcttctgggctttgtgagacacatccttcagcaacctggcttcggactgcaccacattcctgttgctgaggaagatcagtcgacggaagtatcgcttgtcatccccttgcacatcctcaatgacatagtcaccgctcaaggggctgcagtcttggtgctgaacggtccggaccccaatgtccccacccacagacagaaaggggacctgctgctgggtgggcatcccagctggggccagctccatgactctagccgacagctcagcttggatgtggtccatgctttcatactgctgacctcggtgaagggccactgtaatcaacctcctgaagccagcactggccgccagctgtttccggccctcatccatgccaaagagccanctcggtctcccggccct

SEQ ID NO: 15492 - DNA, 520 bp, Homo sapiens
  misc_feature (1)...(520): n = a,t,c or g
gatagctctgaactcaaaatatatccttgctaagatgatatatctgttattttactgctccttagtaaaattactgcaaaacttagtggcttgaaacaaccaccatttacttgcacatgattcagtgggtgtgcatattaagctgggctcacctgtgtggttcttctgctagtcttgtgtgggctcactgctttggttgcagccagttggtggctgggtcagctttgttgtccagaatgacctcaccctcaagtctggtggttagtgctgttggttgagcctctgcctccatgtgctcttttgtccagcttactttctatgggcatctcagcagcaagaatggaagctggcaaggccacgttatgttggtcaaagggaaggggccagcgcagatttcacaaggtgggaagataacacccacctgttgagaggagcgtgaaaaagaattaatgggcatttttaagcnctgcatgacttattgaaanggccacccactcaaaaaaaannnnnnnnnnnaaaa

SEQ ID NO: 15493 - DNA, 821 bp, Homo sapiens
agctcttctctcccagtaaagaagcagagctgactttccgccagcatctgaactccatcagtgtgagtgtgtggggccgggccgcccgcgtgcgagcgtccccgtggtctggagagctcaccttcaggtgccggacgctgctcccttacagatgcagtcggatttcttcctgccaaagccccggaagcctgcggaaccggcacctgcggaagcccactggtggttccaggtcagggtcttctcaagtctgaacgtgtggcctcgtggctgggccaacccagggacacagggcttcttccctctctcacattttcatggtgtaaaatgtgggaaattcctgccccttccttccctcttgtgagtagggtaaaaatacaagtaataacagtgaacttaatggtacccagaagtaaaggtaatctttcaataacatggaaatccacttgcaaaaaagacaattatagggattcaagtccaaagaatgtcccagattgggatgtatttatggaatctcaacacctatttataaacatttagtctgtgggagcagttgccagggcatgtgggtcagccagagcccaggcctctcatgagctccccaggagtccccgaggatgccgtatgcaagcctgggggacagccagggactcagaggcacctcagaagaagagcttggcattctgacgcataaaaatacagaaagtgaggtgggaagtctgaggtaattatgggcctcagaaatgtatgggatgtgtgttattttgggatttcatgcacaggtttccttttgttagactcttagaaatctttttctcccttgg

SEQ ID NO: 15494 - DNA, 352 bp, Homo sapiens
  misc_feature (1)...(352): n = a,t,c or g
gcggaggctgggccggcgttgctctgcgctctgcggctgacggcgcttttgtctccgggtccagaggcctttcagaaggagaaggcagctctgtttctctgcagaggagtagggtcctttcagccatgaagcatgtgttgaacctctacctgttaggtgtggtactgaccctactctccatcttcgttagagngatggagtccctatagggcttactananagcccatcgcctgggacctnctggaccaccagaagccaactanccaacacagagcccaccaagggccttccagaccatccatccagaagcatgtgataagacctccttccatactggccatattttggaac

SEQ ID NO: 15495 - DNA, 2120 bp, Homo sapiens
ccggcgcggtctatggctgcgacttctctaatgtctgctttggctgcccggctgctgcagcccgcggcacagctgctcccttcgccttcgccctttccacctcgcggcagttcgaaatgaagctgttgtcatttctggaaggaaactggcccagcagatcaagcaggaagtgcggcaggaggtagaagagtgggtggcctcaggcaacaaacggccacacctgagtgtgatcctggttggcgagaatcctgcaagtcactcctatgtcctcaacaaaaccagggcagctgcagttgtgggaatcaacagtgagacaattatgaaaccagcttcaatttcagagggaagaattgttgaatttaatcaataaactgaataatgatgataatgtagatggcctccttgttcagttgcctcttccagagcatattgatgagagaaggatctgcaatgctgtttctccagacaaggatgttgatggctttcatgtaattaatgtaggacgaatgtgtttggatcagtattccatgttaccggctactccatggggtgtgtgggaaataatcaagcgaactggcattccaaccctagggaagaatgtggttgtggctggaaggtcaaaaaacgttggaatgcccattgcaatgttactgcacacagatggggcgcatgaacgtcccggaggtgatgccactgttacaatatctcatcgatatactcccaaagagcagttgaagaaacatacaattcttgcagatattgtaatatctgctgcaggtattccaaatctgatcacagcagatatgatcaaggaaggagcagcagtcattgatgtgggaataaatagagttcacgatcctgtaactgccaaacccaagttggttggagatgtggattttgaaggagtcagacaaaaagctgggtatatcactccagttcctggaggtgttggccccatgacagtggcaatgctaatgaagaataccattattgctgcaaaaaaggtgctgaggcttgaagagcgagaagtgctgaagtctaaagagcttggggtagccactaattaactactgtgtcttctgtgtcacaaacagcactccaggccagctcaagaagcaaagcaggccaatagaaatgcaatatttttaatttattctactgaaatggtttaaaatgatgccttgtatttattgaaagcttaaatgggtgggtgtttctgcacatacctctgcagtacctcaccagggagcattccagtatcatgcagggtcctgtgatctagccaggagcagccattaacctagtgattaatatgggagacattaccatatggaggatggatgcttcactttgtcaagcacctcagttacacattcgccttttctaggattgcatttcccaagtgctattgcaataacagttgatactcattttaggtaccagaccttttgagttcaactgatcaaaccaaaggaaaagtgttgctagagaaaattggggaaaaggtgaaaaagaaaaaatggtagtaattgagcagaaaaaaattaatttatatatgtattgattggcaaccagatttatctaagtagaactgaattggctaggaaaaaagaaaaactgcatgttaatcattttcctaagctgtccttttgaggcttagtcagtttattgggaaaatgtttaggattattccttgctattagtactcattttatgtatgttacccttcagtaagttctccccattttagttttctaggactgaaaggattcttttctacattatacatgtgtgttgtcatatttgggcttttgctatatactttaacttcattgttaaatttttgtattgtatagtttctttggtgtatcttaaaacctatttttgaaaaacaaagttggcttgataatcatttgggcagcttgggtaagtacgcaacttacttttccaccaaagaactgtcaccacctgcctgcttttctgtgatgtatgtatcctgttgacttttccagaaattttttaagagtttgagttactattgaatttaatcagactttctgattaaagggttttctttcttttttaataaaacactctgtctggtgtggtatgaatttctg

SEQ ID NO: 15496 - DNA, 1123 bp, Homo sapiens
ggctggcccagcttagggttttcaggaaatttggaagctgccgcagtagttggagtctaaggactcgtgacaatcttcgggtgcccttcgagagaaaaggggaggatgccactggagtcatcctcttcaatgccactatccttcccatctctcttaccctcagtaccacacaatactaacccttcccctcctctgatgtcttacatcacctcccagggagatgaagtgtattcttcactggtttgccaattggtcaggtccccagccgtgaacgtttcctagaggacctgggtaggctaaggcagtgccaggaaaaattacaaccactgctgggatagtctggagcagcttagtgtgtctgggggcagacccgaccaccttctatctttgagtgccagctacatctttgggatcagtggtttcgaggctgggctgagcagggagcgcaatgaatttgtcagacagctggagttcagtgagccagacttcgtggcaaagttttaccaagcagtggctgctacagctggtaaggactgataggcattcagaccaaagaagataaccatagctgatggagccatgactctctacaatgataactcaattcaaatgtgtcgcctaaagctctggaactggtattccaaccagctgaccgaactcactgaccagtacaggcatggttatttcaacattaatagcatgtcaactggactcctatttgtaaatgttatcaatctaagcaatccagctcatcagtctactagtttgcttctttccgagagatgtcaagtcctcaagaatttgatggcttcttctgcagctataaccacaaggaacctacacattgtaactcaagtccactgctggctcatgaaatgtgtaaagtagaaccctccttcccgagaaataagacaggacaataaaaggtggcgtttttgtactttacctggattccattgggctggttttaccactcctatcagattgtagtgtaattgtgtgatacgcaaaccattagtttacccagtgatgatttaataaaattatgaaaaatcaggagagggagataattagttgcttcctccttcacactgtttgaatcgaaaaaaaaaaaaaaaaaaaa

SEQ ID NO: 15497 - DNA, 523 bp, Homo sapiens
ctcgccgaattcttttcttgagcaaggtccaagaactctctcttggggactggatcacgaccgctttctggtaacaggagcaatacaaatggctattagtaaacgaacgcttaagtaactctagtacatctatgatgaaataccaggccacagtttttttaaaaatgaggatgttctctatatactgacgcacagtcaccaagacatgcactttataggaaattataagctcctccttgcctaaatctccttaattttgcttaataaataacaagtgaagccagaagctgtaaactcataattttaatgaagaaatgggatccagaagatggagatgtttttcattctactttattagatgaggaaaaggagagtaaatacttgtatgccagctaccacaccttttaaagttaatgttaaccctgctaagaacagcaaggagattttatatcagccaggttttagttgccagaaaccacaccagttattttagcaaagaccttataaagaagtgtactatatt

SEQ ID NO: 15498 - DNA, 649 bp, Homo sapiens
ttttttgcattgacatttttttatatttggtatttgtaagtctttaaaaaaatgttttcaggccattttttccttaaaaaaaaaaaaaagcaaccaacagcaatactctgtacaagtataacaaacattagaaatatgcatcattccaaaatagttacaggaaaattacagtttagagtccacatcaacacatcctatttgtatgtgcccccaagggagaaaaagctacagtatgttaaacacacagctgctacacagtagtctgaaaacccaggacttaaaacttttgaggcaaatcaacaacagtcaccaagacttgtttagctcaataagtacaatcaagcatttcaaaagagaaccaggctttttcatcccagatgaaaaacacacgtgatgggctgcatagctgacccccgcccctcgatccccaacccccgggagcctctgactcaacagagcacaaatccagtggagtcaattaggcggaagtctggctggaggtcacagtatggctgcagtgggcagacaccaaatgtcatttcctgctggtgctgatcatcactagatccaactttggaggcaaaaagtcgttgttcctgggagatgctatcaatggcccaaatcccccaaaccagctggccaccagtct

SEQ ID NO: 15499 - DNA, 2163 bp, Homo sapiens
ctacctgagtgaagttcatccttagtattgagtaggaagttacagtaaatggtagttcattcttacttacacacatagctaatcttttttttttcacttggaattatgttgaatgtttcattttgacaaaaaagtagactagaaggtatgttctttaagttgtcttgcatccattatataagaaagaaacaggtgagaggaagagcagaaagctgagactggctgatgttcagagcacttactcctctagaggggaaagcatgacaccgaacactaagcacacagctttttgttgttttggttttttctcccgcaaatcttaaagtgattcccatgaccttggccaaggacacttcttaaagattaatgactggcactgacattgccccaggcgggccactcctcacactggctctcagttcccagccatgcctggggctcagtcacttctattccaccctctgagactccattggtgtcacacaaggtgtcttcttggctttgattttgagaatcccctattttcacttccagatctgtcagctgccatggaggaataatagaaaaccagaaatgcgtgtagagggagatttctaaaacttcccttgtgtcgcccatagttgtagttttgggttctggcaggtggaacaccctgaaacctggaatcattctatgagaatacagttcagactttgcagactccagcccatactaactgtcatgaagcttgacttcttgtcataatgcagccatcttgggaggaaattggccatttctgcttagatgggttggcagggtcgcgctcagctttgctttctacactaattacatagcattattcaagtattgttttccatttcccatccctgatttccagcttcttaaagctgactgttcttgcaggggcccacttgcttctcctagagtacaaaagtaagggccttccttactaactgcagggtctctctattacacctcaacatacacactttgctgctactgtttgtactgtctacagtagaatttccttatcttgctcctggtagtgcattacaggccaagccaggaaatgtaaagtatttatttaaataaaaagaaaacctctaaattggtaattgaattacctccctgtagctttatagtttgtgacatttcttgaccttgctagttctttcattagatctgcgcaagatctagtcatctggttaaggattttaagcagatgcaactataaacccaagaaactgtattactattactgttggtcatactaaacctgtctatttcctgaagtatatgacccacaaggatgtggaataactaggagaaactgtttttgtacactgtacatccttagtatttttacacgtatatgatagggatgaacatgattttccttccgtacagacagcttaaataaagcactatgtcaatctgctacttctctgtttattgttgttggatgtggttctataatccccccaaattaaatcttctttaatgaaaacatgatttttaatagccccagctggtattaacctaccttgtataaaatgtgacaggaaaatatagaaataataattccttgtagctcacacacacacacataggggatcatttttacttcagtgaaatggcagtagtgcggttatgcaaactttgatgaacggctgcttctgaggggaaacgctgacctctcagcactggatttaggatggatgtactgtgaagccagggatgaaggaggtctcagaccctggggacattcagacccgaatcatctatacaacacacggtttggacccagaatctggaaggaatgtagcttttcattaacgtcttcctgataatgtactgctctgcatatttcctttcttagagtgtatttctaacaacatgtcatggcaaattaacaaacttagacgtgggtgatgtagatgggtaggatggctggactgcagtctgacttcacgttgaatcattctggatggggcctttttctgattttacctcataaagctactattgtaggaaacttgggctttgctcctgtggacgaagccaggacagagggaatgggcttttggggaccagagtgagtccaagcatgttatgtgtattgttcacacgggcccaaattttgaggggcattcttcacatgtg

SEQ ID NO: 15500 - DNA, 818 bp, Homo sapiens
attataattaaagaccacctccagaagcggcaaggaatcccctccaaaagccgccttcctagctacctgggcaaagtctaaagaaaaggattttgaatttcctcacagaaagcggctggttctccagggacgcgtcttgaagctgagacgctttgaaagccagggtgatgctcagacagtgtgccagccaaaatgacttgggggaggggagccgcttccccactgttgctcttttttaaacaaattgagttcctttttttaagatagaaattcttttcatggtcctctgaaagaagcaatagtaacaatcttatattggatcatgggggaagcaaatgtgtgtattttaagtgagttcctgcgagtcatacactgcgatgatgctccgcctttacccgttcagttgggagcttattgtgagattggatcatttccttttgagtgttcttctctttggtacaaaacctattgtgggtgacaggagcagtgttttcctgctggacccgcaagccaccagctatttcctggtgacacaagctcttctcaggcggggctgcctgcaggctcccgttttctgagcccacgctgcccacagctgaccccagcgcagccccgggcacgcggcactttacatgggggcagcttgggcccagactcctccgctgtgtagcagatgaggaaaatcaggccagaggacaacaggctggcgttttgttgggaactgaagaggaatctgttgaacacagcgaccagatgaccttccatttcaccggcggcagcagtttcagcgtgcagttcccaaaccccaaagctgaccc

SEQ ID NO: 15501 - DNA, 1141 bp, Homo sapiens
ttttttttttttttttttgagctgtcaagagaactttattcattggaaactgggccagagacccctcacgaagctgcaagcccctgggccctgggcccttctgtatttgaaccctagtgaaatgtgcacagtctgccctctccatgccagggagagacagagaggaatgccatttttctgtgtgatgtgggagtgacaggggaaagagcagaaatccggttatccctcctgagactcccagtgagctggggtgccacagggcacgttggccccaaagtcaggtgcagatgcatcccccatcccaggggtaaactcctgagactggcttttggatcaggttgggagggagcctcatcagacgatcacaggcagaggtggctctgagggcacccgagagatactaaccccaacgcctaccagggcacaggggctctggctgaacacaaaggtttaagatcatccgaaggcccctgagttgccaaaacacccaaatgacactgatgtgttgtggccgcaaaagctggggaggaaatgtgaaggaggcaggaaaaggacctatagatctccaacagaaaaaccagaagcagacaggggtaaccccagaggcatctgggtgggccctgggcaggctggaggagagcccacagcaaatagtctcagggcccttgcatagtgacatactcaccaccctcagcatcgaagggacccactgggtaaagagaagccatgttatcctgcccccacccagatcatagtcttccaactcaatgtcctggatgtatggcaggatggccacaggggtaggaggggattcagaccaggacccggagatgaggtgttaatgctgtcctagcgtgagtgcctgcgtggagcatggaggggtgggcaggcagggaaggaggcttcagaggtagacattgagggtctgcaggatgccccggcggcagagcgggcaattgcggtggtagacggggtggcgcatcaggatttcagtgcaggcctggcacaggcacagatgccggcagggcaggagcaacactgtcttgctctggtcctggcagatgacacacttcttccgctcctcttgctccttcagcaatttccaagggtcttgcccacctggaggtcctcctcattcagc

SEQ ID NO: 15502 - DNA, 6427 bp, Homo sapiens
cggtctgaaagcgacatccgctatctgcttggctatgtcagccagcagggagggcagcgctccacgcccctcatcatcgcagcccgcaatggacacgcaaaggtggtacgcttgctcttagaacattaccgggtgcagactcagcagactggcaccgtccgcttcgacgggtatgtcattgatggtgccactgctctttggtgtgcagctggagcaggacattttgaagttgttaaacttctagtcagccatggagccaacgtgaaccataccacagtaactaattcaacccccctgcgggcagcatgctttgatggcagactggacattgtgaaatacttggttgaaaataatgccaacatcagcattgccaacaaatatgacaacacctgcctaatgattgcggcatataagggacacactgatgtggtcagataccttttagaacaacgtgctgatcccaatgccaaagcacattgtggagccacagcattgcactttgcagctgaagctgggcacatagatattgtgaaagagctgataaaatggcgtgctgctatagtagtgaatggccatgggatgacgccattgaaagtagctgccgaaagctgtaaagctgatgtcgtagaactgttactctctcatgctgattgcgaccgaagaagtcggattgaagctttggaactcttgggtgcctcctttgcaaatgaccgtgagaactatgacatcataaagacataccactatctatatttagccatgttagagaggttccaagatggtgataacattctcgaaaaagaggttcttccaccaatccatgcttatgggaatagaactgaatgtagaaatcctcaggaactggagtccattcggcaagacagagatgctcttcatatggaaggccttatagttcgggaacggattttaggtgctgacaatattgatgtttctcatcccatcatttacagaggagctgtttatgcggataatatggaatttgagcagtgtatcaagttgtggcttcatgccctgcacctcagacaaaaaggtaacaggaacacccacaaggatcttcttcgatttgctcaagttttctcacaaatgatacatttgaatgaaactgtgaaggccccagacatagaatgtgttttgagatgcagtgttttggaaatagaacaaagtatgaacagagtgaaaaatatttcagatgctgatgtccacaatgctatggacaattatgaatgtaatctctatacctttctgtatttagtgtgcatctctaccaaaacacagtgcagcgaagaagatcagtgcaaaattaacaagcagatctacaacctgattcaccttgatcccagaactcgtgaaggtttcaccttgctgcatctggctgtcaactccaatactccagttgatgatttccacaccaatgacgtctgcagctttccaaatgcacttgtcacaaagctcctgctggactgtggtgctgaggtgaatgccgtggacaatgagggaaacagtgcccttcatattatcgttcagtacaacaggcccatcagtgattttttgaccttgcactccatcatcattagcctagttgaagccggagctcacactgacatgacgaataaacagaataagactccgctagacaaaagtacaactggggtatctgaaatactgcttaaaactcaaatgaagatgagtctcaagtgcctggctgcccgagcagttcgggctaatgacattaactaccaagaccagatccccagaactcttgaagagtttgttggatttcattaagtgactggatatgtaaagtcgtttaatgtggtgctaaaaagtaaaggacttttaatcacagacagtagaattatgtgttcataaattctgcttttctttccactacccttcctcccatcccatccttccttagttctgtatttgtttttcttgcctcatggtaattgatttcagacagactttaacaaaaccacattgttttggtgtaactataaggtatttgcatattggttacctatttgtctttcttttttttaaaggaacagatataaaatgttttgtttatgtaacaagggacatttataatttcaagttgataatgttttaaacagctgcttacaaaagtatttctgttaagcctatgtcagcatgttatccatgcagcagttttgaggattttatgaagaaaaagagctaaaaaggaacattaagaggaatgggatatccaggtgttctgcacatgccaaactgctgtagatagtttacactcttccattatttatacggagtgatgcagcacattttagcattcaggaggatttttaaaaaatagctgcagattaatctggaaaatgtgctaatttaataatagttacaaatttataaatttaaatccatttgaaattgttgcattatgctgggtagtatatacaaaatggttatcatcttaaaccaacttttcagagaatcttgatggactctgcctttaggcttgaattcttcaaagtctattttaatgaaatttatctaaattgcagcagtctatttgattcagctcatagacatgtaaaaattatgaatgctgttttcttatgaaacaaattgtcacagtgtagttatacattctatttttgtccccttttccctttttctcctgtatcttttaaaatttggaaactacttttccagaaggcattatttatgcctccctaataaggtattttacttatgacagatgaaaaggaaccaggatatgtttgaattttttcactttcttagtctgtgacaagaagtagaaatatcactagtgtggtataggaacttacatgttttttatgatgaaaataattctcaatgccacttgaaaggtaattgtgtctgagagctgcaaatttttcaaccacaaaatgtcacttattcctacaggctatacagaggtctttatggtttttttgttttgttttaatggcaacattgtaactgtcaaactaaaagggtattctgtgattatcttttaagcattacagaaattcaagtgaaagttatatgcttatttctattgatgttaaaaatgataatgaaagcaaaattagctgtatctgtaattttctctctagtgccaaatgaatgccttagctactcatagtgcatggtactgtaagtgaagacctgtagctttttttttttctttaatgaaaagcattataatgatgtagcagcatcagatataaacttaaaaaaaaaggtttcaattaacattttatatatggataatgctttgtaaagtgtaagagaaaggttgcagttggatcagtataaaacaatgaccaagccaaaatcagcaccctagggccttaaataaaatagagataccccacaaaatgaaatattttgaaggatgggaggggacagaaggggggactatcccccaaggatgcaagatactttttacagttgctatcattatactttgtcttcttgcttcagttaggaaggttttgatggtaaattctgtcatggtaatagatacctattttcctaacctgagattttacaaggaaggtttttaggttggcttaaatggaggtatttatttgagtgagccctaatttgaaaattaccagacttgatcctcctggtatgaatcaaggaaatactgtaccttgctcttagcaactctcagtggcctgaaagagaaaatgcacttcttcaaggtgagtgaatcatgctttttccacagttcagatcagaccctttatttttcaaactacaaggcctgcttattggacagtctaaggaatagctttgatacttggtattcagttggttccattattaatgtatattatttttatttaaacatcaaaacttaaaatatcagataatgttgcatgttttaaaaacacatttcatccctttggctacccaggaccagcactatttaagacactgcttatttataaaatgagaataatgattatatgtacatattcagacatcaaaatttaatgacattctattttgagaagggaagacaatgctgaagaaagtaaaactgttgattgaaatgctgacagggtggagaacgaatttgaagacagtggaataaactatgaactatgctaatggtaattagattttttgtttgtttagtatagtggtaaattgtgtagtatcttgctgagaatctaattctatcttgtaaaatcaatccaaatgtgtattgtgaaacacctgtataaaatcatttttgaaataagtgatctacatgcctgtttttttaaaatgtttttggtagaattgtttgaaaatatgtttagccagacccttccccaacttaatttttttttaaaaaaggaaaataggtaagaaaatgatagttctatatctcagccctctgtgaactctaggctgtctccattttgcagccactttggtcatttgatgtttactattggtatacttatgctttgaattgtaaatcttcattgatggtattacagattcaaccaaaacttctctgtcctgttcagtaattgttatataaatctggatgagctagggaggcccaggtggatgttttcattcgcaaatcatgagaaacttaagtgggttttatgcacttgatagagttggcaaaattgaactatgaagttaactatttaactcaaggaatgggcggcaaacccatcccctcgattgataaagaaggggaacatttttacattagaactgacactgaaaacatagctttttcagtccaccctggttgctctagtagcccacagcccaatcacgttaaggttctttgctgtgggaattttaaataaaccaaaccccaaagcagaccatctgtaagctttggtctgcttgtttctgagaagggttttatttcattatactaatagtggactaataattggtaattgtgagaacttaggtatgataacattgtttgaagtaaaatatgatttgggggcagcagctttctaaataccaactctgtttgacaaatgttttgaaaattaaaatttcaagtgagcaacaccctgttaagagttttcactatagttgaggcagctactttatgaataagaccactttgggttatttaagcagaagcgtttcttttttttttttggaatggggtgggatgaggagtgagttgccagacctttgattagtttgctggtttagaaacagccagtggctgaaattagtgagtaaatgaatgaaagtataaaggacttgttttttatgatagattttctgtaagaatcttaaatgttccttttcaaattagatgtgttgatgcacacatgactattctgtttttctcactgactatataacattaaaaaggggttaaagaaaacaaaactctgccttttgtgctatgaaatatttttagtccagaggttttaagctgtgtgtccattcctactctgaaaatgcatagctttgttctggatgtcatctcttgaaagtagaaaactcctatgtgtttatcacattgcagggctttcttatgtatttctggcagacttgcccaaatctttagatgggctgggttatacagcatgccctcccccaaataagggatctgaaataaatactacactattgatagtggagatatattaatttttaaaactgtaaagtaaatgtggtctctaggtttgtggtgtgtacctttgtgttaatgtgtagggaagagacagtgacttgatggttatggggagtgtatcttgatgtgtgtataggggtaagtattgcctaaattatttacagcctttaattccaggggtgagtcatgtgatgaatggcctaatcagaaaagtgaaggagcgaagatgccaagcttgccaaatgatgaaatgaacaagattttgtatctattttttatcaggtgttgtaaaatttgtgccatggcctttttgttgttgttgcttagtaactggtagaggagaaaagatgaggaaagaaactcagctttcctcacagtcttttcaaaggtacacagttggggagtaaaatctgactggcctaatcgatggaaaagaccctgtccttttcaccccatcctgcaatcctccgtgcagaggaactacactgttgtattctagtaattcactgtgatttataacaaaccggtgatgtcattctattgtgcacttttgtcaaaccatttatgtgactttaataaacatagtaaacttgctgactgcaccagaggtccattagtgatttatatattgcatgacattttctatttgagtttgacatgtagagtcatttttagtttcatggcaattgacagtcctaataactcagctaatttgaaactaacaatcttgctgtgtaaaaggaaaaaatggtgtttgtgttcagtaaatgtttg

SEQ ID NO: 15503 - DNA, 634 bp, Homo sapiens
cgatagatgaaaaatacatacatccagatgtctggtcaaggaaactgaggaaagctacgaattcctccaatacatatttggttaaaaactccaggggaggtagtaaggagaaagcaataccgtattcctttataaggaagaatagggttaaagcctgtaattgaaggacttattaaagatgggctgctcaaaccttgtatgtcctcatccaatactccaattttaccagtcaagtaatcagacgggtcatactgattagtgcaagaccttagagctatcaatcagatagtctagacgactcatcctgttgtacctaatgctatttctaattggctagaaggatggtccggtcaatagaaagaaactgtagcctcaattcttacttctatagcaactgtaataggcatactccttcttcttgggtgttgaattataccatgcatctgggaattagtaataagattaacaaaaacaactcttactaaaacccatcttaactctcctccaccttattcagaaaaaattctccttttagaaattcaatcagagcaattaagccaagaaatattaaaacagtttgaagaggaaaaactataaaaaaataagaggagggaattgtgaaaagtaaaaagtt

SEQ ID NO: 15504 - DNA, 1090 bp, Homo sapiens
  misc_feature (1)...(1090): n = a,t,c or g
agacatatccccaattttattccctttgtccaacattccgagagggaaggggcaaatgagtcaatgttgcccctcaaaaccatcaagtaggggcctttgggggtcttcagttgatcaaccagggtgatagacccctaccccttcctcatggtcctggcttgtcacaattaatgggggaaagttttccagaaggggattccgggcttctcaccgctcatcagggcaccttcccaaaacgttctcagcaaaaagtctgcacttctcagagttaaatacaggagaggggagactccttgaggagccagaagtgggtatgttctcaggggtcaagagaagggcgtctcaggctctccctgtccaccgggggtcgtcctggctccccgtaccttcgggcaagtagctcttggcttgacactgtccagcccgccagcgtcccaggccgccccaagccctcatgggggaggagcaccgacctgtctccaagcatcggaaaaggcgggcctcccttgccgtccatcacggggctctctaggccccctgcgtcgccaaggaggagtctctgacatccccaattcgtcaagctagtctcttaagacctctcaccttaggcgggttccccagtccccccatgcagtcaggcgagcctcctggctccaccacgccatcgagcgagttcggctcttcgcctgtcaccgtccgtcggggcgggtctccggtgcccccgtgctgtcgtgggggttccttggactgtcgccgtcgtcaggctgggaacccatcgctgccaggctccccggtcggggcccgcgggcgtacgaaggcgcccatggcggtggcgtggcccgagcgtagcagctgcacgcttgcgcgcccgcggcggtacaggtactcgatgcgcagcacgtcggaccgcggcaggcccgcatgctgccggaactctgcccgcatcatcgcctcggcgcccggcttcccacgcccggcgcgcagcagatcgcggtacaggctcagaacctgcctcctgntccactgtgccggctcatgaccgcggctaagcagagacgctcagcgaacgacctgcgaaccgggagccgcc

SEQ ID NO: 15505 - DNA, 971 bp, Homo sapiens
  misc_feature (1)...(971): n = a,t,c or g
catgccctcccataacctttaaggcaatctacctaaaatgcttacagtatggtgaagccttattcagaaatatttacttaaaccataggtatagaatagctaccatttctgaataataatgtaaaatgaaaacagaaacagctttcaaatttgaagagaaaagtttcccctgaccctagtcagctaacaaagcctatttctaacagtgaacttcctgaactcaagcagctgctcatgaagctttaagagttcacaggcatttcatatttcaatagttgttgaaacatggaagataaaacactgagaggatatttatcaaacacaaatttatatcaagattaactttttcaaccagcttacaagcagacttttccctttctttgttaaaaaatgaatggtatgaaactatatgttaaagatgtttctataataccttacatttacatagcgctttacaattttcaaagtgctttcacatgccatnnnnnnnnnnnnnnnnnnnnnnnnnnnnnnnnnnnnnnagcaggtattattatcctcatttcannnnnnnnnnnnnnnnnnnnnnnnnnnnnnnnnnnnnnnnnnnnnnnnnnnnnnnngtaagtgctagagctaggacctgaaatcaagttttttgactccttgtccagtactcattccactgtaattactgcctcaagttatgaataatgaactgtgtatcaaaattgaaagcttactgaagttcatttcagtgatgtcttaacagtaaagttaaatgagaaatacaagaacagtaggtctgatggttttacttgacataaaattggtgcaaaaccacttttgtctaattacttgtaaccttttggtccaaatacataaaatatgcaatatttacagcattttccttgttttgtaaatgcaatgctttaaaacacattataaagcaccttagtaaaaatagtctacaggtaaaagtacagaagaag

SEQ ID NO: 15506 - DNA, 3661 bp, Homo sapiens
  misc_feature (1)...(3661): n = a,t,c or g
ggcggctggctgccctggaacagaatgtagaacggcggtacctgcgggagcccctctggccaactcatgaggttgtgctggagaaggccctgcttagcacacctaatggtgcccctgagggcaccactacagagatatcatatgagatcacccctcgcattcgtgtctggcgccagaccctcgagcggtgccggagcgcagcccaggtgtgcttgtgcctgggccagctggagaggtccattgcctgggagaagtctgtcaacaaagtgacatgtctagtctgccggaagggtgacaatgatgagtttcttctgctttgtgatgggtgtgaccgtggctgccacatttactgccatcgtcccaagatggaggctgtcccagaaggagattggttctgtactgtctgtttggctcagcaggtggagggagaattcactcagaagcctggtttcccaaagcgtggccagaagcggaaaagtggttattcgctgaacttctcagagggtgatggccgccgacgccgggtactgttgaggggccgagaaagcccagcagcagggcctcggtactcggaagaagggctctccccctccaagcggcggcgactctctatgcggaaccaccacagtgatctcacattttgcgagattatcctgatggagatggagtcccatgatgcagcctggcctttcctagagcctgtgaacccacgtttggtgagtgggtaccggcgcatcatcaaaaatcctatggatttttccaccatgcgggagcggctgctcaggggagggtacaccagctcagaggagtttgcggctgatgccctcctggtatttgacaactgccagactttcaacgaggatgactctgaagtaggcaaggctgggcacatcatgcgccgcttcttcgagagccgctgggaggagttttatcagggaaaacaggccaatctgtgaggcaagggaggtggggagtcaccttgtggcatctccccccaccttccaaacaaaaacctgccattttcacctgctgatgctgccctgggtccagactcaagtcagatacaaccctgatttttgaccttgcccttggcagtgccccacatcctcttattcctacatccctttctcccttccctcctcttgctcctcaagtaagaggtgcagagatgaggtccttctggactaaaagccaaaaaaaaaaagaaaaaaataatttttcttttctgttttatttgctaattaaaaatggggagggggaaagtcgtccctacttcctcctccctgcttcctctcctcccctgtacgtgccccagcattctggggttatttaacaatagcaatagttctagtgaatgtgtgaaaccaagaaacactctgtactgtgtgcggacccgcagtgacggccagtaaagtggacttaactcccaagtgtgtcgcgccggacaccgggccctggacatgctgcttccatgttcagtcccttccctgcttctcgctgtctttcttttcccacctcccaccccccagttttcagattttctctcatccaataatgtaaaactatcgtgtacgggttcctccctccttttctcttctcccaaatcttttcccttcaaaggaaaaaaaaatgttcagaggtccctgtcttctgtccccatcttcctgccgatagctatcccctgtatgatgttggatgctcctcacatgctgagtttccagccttttctgaaactcagtagctggggagagggcagggaggcttcctgggccttccagcctccttccccacctccttcccaaaccctcttgggaactcctcagggacaactattgctgagtttgggtgcaccctaagatggaggccaggtagcaatggggccggcctcagagagagcgnnnnnnnnnnnnnnnnnnnnnnnnnnnnnnnnnnnnnnnncggcctcagagcgcgctgtgtgtgtgtgtgtgtgtgtcagcctcagagcgcgcgnnnnnnnnnnnnnnnnnnnnnnnnnnnnnnnnnnnnnnnnntgaccctgtattgtttgataggatccattcagtttccccaagtacctgttttcattcccatttttcccattgtttaaaaccatcacttttttgtctttgggaaaccacaggaacaatttctctggagacaaggctgtgtctctctcctggtcatttttgttccagcctcttcagactgtgcaatctttcagcaggaactccctctcttctcggtagctttgaatcttaagcttctacgggagagtggtagaactggatcatttcctaatcccatttagttgtgcttttcttcatttacttcataccccagggaccccttccccagcagcagagaccctggagcacaggagagtagggaggaggggttctgggtccatcactgccctacatgtgactatgtccaagttaagcccccaacacgagaggaaagctgctgactcccagctatagccatgggcacttggccccctgcttttcctgctcagcagagcccctcccttcagagattacgggtacttgcactggggaggtggctgctggctggcccaagcagagagctgaggcatccaagaaatgttccattggggggtgggggtgccaggtgaggtggagcattccttgtattctggcagcactgaagagccactgaagggggtaggggcagtgtaggtcctggggcagcccctttattcctttatgccccttctccctcatagcctatttctaaagtcgccttttctgtcagataaacctcaaaacttttaattttatttgagatttttttttgcttttaagaggtggattgaagaatatttgaattgactttatattatgcataaatatttatattttatctaaataactgcgctgtaacaaactttgtgttagacagttgaaactgttagagttgggggctctgctttttccccctggcaattttcccctggtataagatgtgctagattaatttcattgtgaggtggatgggggagtgaaattgtgaggtggatgggggagtgaaatctccatggttcctgctttgtgttcctctcccagctccatctctttccctagggaccaggcactcatatggcggggtggggtcctagcctcagtttgaagaagtgggggctggagcggggttgggggtggtagggatagggcatgatcaaaggggccatttcttgcttttctttcctcatcttcactgcccccttgagctaggtggattttctcttcatgacaagagtatttggtagggaaagcaggtttaaaataaaaagacaacccaccccctgcccttttgcttccctcccatcagtctggttgacaggaagaaaccacaccatcaacaccaacaagtttctgtgttccttttacagcaaaagggactttttatataaccaaatgtggtgttttagtgactttttgataatgtacagttttttgtgaatttaaatttatttctttctatatttttaggaccaatctcatttttaataaggttaaaaagaaaaaaaaagtctagcgaaaaaactcctgtttttgccatgtgatgttccacaagtgcagctgtagaaaagtgcttgtcagttgttgaataaaaaaaccacatttgatagagattc

SEQ ID NO: 15507 - DNA, 829 bp, Homo sapiens
  misc_feature (1)...(829): n = a,t,c or g
ttttttttttaaaaccgctttattcaggttggctggtagtcacagactggatcatgtatacagggcaacccacccctaggcaaagccctcggcctctcccacctcccccacgtcatcactgagctgcggcagccagcaggtgccagccaattccgaggagaattgggtccaatagaaatatttacaaataaccagggggcaggtgtgcccgtgatcgggaatcgtgagggaactgagtaccagggggcccttggctcccaacagccccaggccctggggcggacttggcacaggacccaagagggagctggggcattggggggccggcagagggggactcctgggagagccttgaaggccctcaaaggggtcctgctggtgcaaaactctgcctggggccatgggtccgaagggaaaggcccctcccttctgactcgccgtgtgacagggcagagaatcctggatccctgcatcccttganggtcgcacagggaactgaacaggaaggactcgccaggaggtggtggggcatctcgcttgttcccctaggcctccatgagtgaccctgcagagcccacttccccagaagggccctcctgggttccctgggtcttcaccaggggagaggccctagttctgctcagaagattcaagtccatattcagggaggggtcactgtccacacccccaggtccaagtgagggatggtaggaggaggnaggcgaggctggggggccccggctcaggacaggatgggggacaagcaagcaaagcaaaacactggactccacagaagctggtgacaggaagggggtgccccgggccccag

SEQ ID NO: 15508 - DNA, 460 bp, Homo sapiens
atatctagactacctatttgaaaggaaccctatcaactgtcttatgtacgttacatgattttcctacactctgtaattttgctgaggtgcaatttggaactctgcaagacctactagattgaatttatttagtgaatgctcctgaataaatgtgcattcctcttttagagtagctgtatgcttttcaaatgctatctgccgtgaattttttgcttttattatactttatggcaaaagtgatatcaagtgattgtcagacttgagggctcatagaagtgttaggtacggctctcaaagatgttacagttttttctagggttgggagaatagttgagatctggaaagcatagacattttttacactctggatagactttattcttgaagatcatcagaaatgaggttggaatttcgaggttttgagcagggggagcatcttatattcacccttaaatcgtta

SEQ ID NO: 15509 - DNA, 416 bp, Homo sapiens
cccttggtgtgaactgtttaaagagttatacaaaataaatgcatttgacactcctgattcattgctcatgagaggcaaggagtttagtgaccctatacatcatacctttgaccatatgtggagaactaaggaacataatgaagctggttggttgctcctaagttcagtggataaagtgatgaaagaaaatgatgaactcagggattctatctcccagcttcagaagcagatactgagcctcaaatctgccaagattgccctgagtgagagtcttatctcctgtagagaaagagctgaaattgtggaaaaatagacataagctcttatcatgttagtggctgacctgcaatgaaaggtgcatgcacagcctcaccatgcacagcctcgccaagtatctactgttaaagtgagggcat

SEQ ID NO: 15510 - DNA, 579 bp, Homo sapiens
tttctgtgaacacatctgagtttattctgccactgctacagggcccactgtcatttccagcccactgaggttgagggtatggccaggctgggattcacacaggcccaggatgaaagggacaccgagtgtgttggggtgggggtggctggctttgatccctaccccagtgggttggccaggtgatcagagcctccaggttccctcacacacagcctggtacatttctgccgtcaggggccggaaggactgggcccggttgtccagtacaaacagagggtcaaccacgatccccacattgaagccctcacgcaccaaccgggtcttcatcagtttgaacgtgctggtgacctccatggcgtcctggatgcggatgaaatggggggtagcgtaggcagggagccaagcgcgaacgtgctggtacaacttctccccgtcgaaagtctggccgggggctagctgcacagcagccatgcccaccttaccctcacaacctggcacgcacacgccatacacgttaacctgttgcaagaagtccacctgcgacaacacgccctccacctcgtgcgtggacacgttctc

SEQ ID NO: 15511 - DNA, 544 bp, Homo sapiens
  misc_feature (1)...(544): n = a,t,c or g
cccacgcgtccgcagaaccgggtgtctgcgattatcttcagcttggccacagagtgggtgatcagtaccggccacgacaagtgtgtgagctggatgtgcacgcggagcgggaacatgctcgggaggcacttattcacgtcctgggcttcgtgtctgcaatatgactttgacactcagtatgctttcgttggtgattattctgggcagatcaccctgctgaagcttgaacagaacacgtgttcagtcatcacaaccctcaaaggacatgaaggtagtgtcgcctgcctctggtgggaccctattcagcggttactcttctcaggagcatctgacaacagcatcatcatgtgggacatcggaggaaggaaaggccggacgctgttacttcagggccatcatgacaaggtgcagtcgctgtgctaccttcagctcaccaggcagctcgtctcctgacggcggaattgcagtgtggaacatggatnttagcagagaagaggctcctcagtggttggaaagtnattcttgtcagaaatgtgagcagcca

SEQ ID NO: 15512 - DNA, 1245 bp, Homo sapiens
caaaacttttttttttttttttttttggagtaaatacattttattcagaacaagataataaaatagcgtgcactttatttaaaaccaaccaagcactgataaaaaatatatatcactgcagctgtgattccacatcaaacctgaacagtaagaattgggcatttattcttcacatcatgtgccaagcctggcagagaaggacatccacctccactagagcctcaaaggaaaagtggcccctaaccaccaagacagggtaccctggtggagaggggcagctggcagctcaccctgctctctgcagaccacgtgaagggaaaggagctgcctgtgttcctcccgggctgcccggggtgggcactggtcagcaactccttctcggtttcaggttgtggagcgatggggagagaagtgcatgcagttgtgcagacaaggaggcgggtcctccctcctctttcagggtctctgaaacccccacagggcatataatgccccagcaaggtcccacttgcaggcacatgcctacaaagcagcagccatcttttgctttggctgatggggaatcaagattctgagagtgactgctcttttcttgacacaaagcagccacagaacactttcctacatacagtatggcagcaggcaagcagaaggccctgctggctcggattaaggcacttgaaagagacacaaggtacatcctcctcccctgcagcccccacaggcctcaggggaccctgtttccccaccctttatcctcaggtccccttacccctgcccctccctactgctgggccaatgaggaggacaggagcgtgccttaaaggaccatggtttggtgggagtacagggtaggaggatgaggaaaacaagaagggagctggagatttggccaaggagcaacttcagaaggacaggagagcacgagcattaggaggaagccaaggcagcagcagagggaagccagttaagtcatgagagaccaacggcagtgatgttttctggcgcagatgcagaagccagagggaggcccctccaaccttccctggtgaggcaggctgggagcagagaaagggttaagagagccaaccccagacagagaacctcagaagacagggccgcaaggacaggcagggggaatggtctttctctgtttctcttggctagtggggctgcggcaaggatcaatgttctgaaggttcagagacagggcaagaaaagggcagggggctggcaggagggctg

SEQ ID NO: 15513 - DNA, 476 bp, Homo sapiens
  misc_feature (1)...(476): n = a,t,c or g
ggcatgatgtcattgatttggagtttctaagtcagtatatgtgcgttggtaatcttgaggtaattttgacagatattgtcagaatggcccacacagagattgcaacccacgtgaggaattctcaggttccaacgatcccccagagtcagttctgggtttccgtggtgatgccagctctaaacggtaccccctcccccaggtggcccatcccctgcacccctgcaccccaaacgcagcccgacgagcacgggggaggcggagctgaaggaggagcggctgccaggccggaaggcgagctgcagcaccgcggggagtgggagtcgagggctgccccctccagccccatggtcagcagcgcccacaaccncaacaaggcagagatccagagcggcggaaggcagcacnagcacccccaanaaccttctttctacntgntgaccccaaaaacacctacnnttggcacaaaancccggggg

SEQ ID NO: 15514 - DNA, 1815 bp, Homo sapiens
gttttgttgttgcgagacaggggcttggtagatgtgccagaatggcctcgaagtcgtgggctcaagcgatcgctcgtcgcagcctcccgagtagcgagagtttggttttaatcagtagatatgtatttagcacttggactgctctaggcactatagggtacaagattagttgtattttatcctctcatcccagctgtgaggtaggtttgctaaagctgtaataccactaagcagttttttcaatactgttcccaaggacagataatattagcaaatcccagaagcatttctaaacacttgtaggaaaaataaagtcggacttaaaatttttagtatctttgccttttttttttttttttttttacataagttttacaagataatacatttttacagtgacctgatgtggatacaactttgcaacttggcaaaaagcaaatcttaacttacattataattaatttgctgcattttacacatctctgattctcaattttggcaagtacaacaggttaagggttctatttagtgtccccttctgatgaatatgatgatcttgaacccattcttcctcctcaagcacggtcatcctcctctgatggcaacagcagaacctctgggaaaggaacctttcggtatccagaactcccaggtggcagcccagtgtgggatttgggagcatgacaacaaaggcattttctcaacatttactaaaggagagtggggtgttctatacgctactgatggggactgtacatgaacacatttaaattgaattacaacaacattttagataggaaatatagaatcttataagaacataatctaaattataaccaattttaaatagcaaagtttaacaataaagctacttaagtgtttgaattagaaataaacagtaaaacatctgtattaattataacagagttgacatttgtttatattttatcttcagtattaaccaaaggagtggaatttagccagggttgcactttttaaaagttgtatatacttttatttattttacaaaaggaaaaaaaaagacatacttttcccataaaattccaggtcttactatgtaaaataaccatgcactacttcatgttataatcataattttagactatttccagtaggtaagtgtcataaagaaggaagagatatggcttccacagcttcaatgaggtgtaaggctagaccatattgcccatgtttttctggtaaaagctcaattactttatttactagtttagctgttgttgcaattggcacttcagtgttttgaaggtcctgggggtccattgctttcagccaagtacacagtgtgggtggaagtctggcaagcagctccattccttcttttgtctgggtgtggagaagcgcatgagccagcctttgccccgtgagcaccagcagctgagaggcaaggacctctttgtcatgaacctgtagaatggcctcttctcctaagtggtcaactccatagttgtatagttcccccacataatgccttctaacaacatcttcactaacttgaaggtgatgggctaaatccacagctagagctggccaatcttggtctttcccaaaaggagtgggtgtggcctcttctgtgggatctttgacctttgtggctgaatgttgggcctggacagctgcactgacaactttcaataagaactgttgtcgtacagaaataaaatctggatccatttccccactaggtaataactgaattgaagttaggtctttgaaaaatgcatttcttcccttactgtcaaaaagtgaaagtggcttcacggtcttcagagaaac

SEQ ID NO: 15515 - DNA, 719 bp, Homo sapiens
  misc_feature (1)...(719): n = a,t,c or g
ttttttttttctcccccctccgttatcttcacctcccttcataccccagggtaacatacccctagggtaactaataaaaaacaaaacccacccaaaagtttctttaaaaaaaaaaaaaaaagactctccggaaggattaattacacagtgaacaactaatactctatggaattcttaaactcatctcttggaagttcttaaaatcatcttttgtaaatactaacatcctcccctccccacaaaaattgcaaacaggggaaggaaatggtaggttctgcatgtccaattcaccattttgttttcataaggatccctcaatcattctgtttgcttttttaatgttagcaactattaaggcccccatgttctatggtattaaggcattgtttcctgaaggaacacactaacttataatgaacaaagaagccaggccaaagagccataggtaaaatttcaagatacaattgatttttctttcctttgggctgacaacttccaggttactaattgttttcagagcatttggggctccataaaactggcattctggggaaatgctattgtttactctttcacgtttgacaaaagcaattcccacgaaagacaagtttagccgtgggacagaatctgttaccctcgtgccnnnnnnnnnnnnnnnnnnnnnnnnnnnnnnnnnnnnnnnnnnnnnnnnnnnnnnnnnngncattcnanatttccaa

SEQ ID NO: 15516 - DNA, 722 bp, Homo sapiens
aggccggttccggcgaagttaaaccctcggagctggcctcggactgctggggcgttaccccttcggccacccccgctgaccatggcagtgtttcatgacgaggtggaaatcgaggacttccaatatgacgaggactcggagacgtatttctatccctgcccatgtggagataacttctccatcaccaaggaagatttggagaatggggaagacgtggcaacgtgtcctagctgctctctcattataaaagtgatttatgacaaagatcagtttgtgtgtggagaaacagtcccagccccttcagccaacaaagaattagttaaatgctgaagaagccttcaggaatccaaatcctgaacatttggaatgagcccagatagaaatatcgaatgcaaagctactggcttcacagagacaaccatttatgatttgctgttctgtaagagtgtggattctttctatcaactgctgatatcatcttcaggaagcaagtccataacatgacatatctggattttgtgcttagaaccttaaattggaagcattcttaattatgcatctaaatttaaaagaagataatttcaaaacagtgctttctttcccttggtttcatcattttcatatcttaaaccaaattacttcggtatctgacaacagcatcatctacctcagtcattaggatttcttaataaaaaagagattgtatttttgacttggttatt

SEQ ID NO: 15517 - DNA, 1482 bp, Homo sapiens
  misc_feature (1)...(1482): n = a,t,c or g
aattttaagaaatatgtattttgtggacttttaaagcattatttaaattaccaaggttgacatttttcttgacaaataagctgactagactatttccattcctccaggttctgaagatctcctgtcctagcatggagactctggagatcccgagactacctgaattcttagcaatatccagcacttccttaagtatcaagggctctgtccctcactgtccccattatcccagcagcccactctccagatgccattctcccctgaaccaaggctctggactctcaggacagactaacctgggccattttgctccaggccccacttaaggcataaagcagtcaagnnntctgattgcatgagccctccaggtgattctgattcatgttaaagtctgtgaatcacaggcctgagaaaaggtacaatttcaaatcagaagtaaagggacaaagttcttccagctcctatggactagtcttcagttcccatcgacacactgacgctggatccagctcctgctgtgggcagtgcatgttggcactgcagggaggagaaggccccagagacccgagaaggaaggtagggaccgtggcttcctctttctttattgggcgctttgtagatgtcacgcaggtttaaaagttacactgctaaataattatttaaaaactgaccaggacgaaggtcctggtccggagctccaaaccagaagcaaaaaggaatcggggcggtgggctggggggtactcctccaacatcaccaaaacccagaaaacgaggatcctaagctcctccgcaggccaaatccagggcttgggccctgggctaacccgcaggtgcctctgactgcatcacactcagagtaagataaccagcaaggggctggagggaacggccagccgagtccagacatggacagatgtaactggaaggaggacaggaaacagacaggtactgtccagctgtaggtaagagagtgcagctaaggcaggttgaggggcaggggagaggctgggggagcagtattgcagcaatgcaggagtgtagccccagggtcctgtcctgagcggctggtcaggttagcagctgttagttcccagatggagctcctgacccgaacccaggtagagggctcacacgttgtgggtcctcttggtgagctggggctcctcatccaccagcttggacttgaggtgctccttgtaagccaggatgtctcccaggccacttggtgattgtctgcttctcacagacccaaatttcctgtgcaacctgctgaatgagtctgaagtcatggctgaccagcatcataccaccctcaaactcattgatggcatctgccagggcgtcgatggtctcgatatccaggtgattggtgggttcatccaggaagagcatgtgggggttctgccagccagccaggccagacacactcggcacttctgcccgtctgacaagttccggattgggctcacctgttgtttcc

SEQ ID NO: 15518 - DNA, 1083 bp, Homo sapiens
ttttcatagacacaaacacaaaacactggtctttatgtataacactagtggcagatgtgataacagacccaataattagatcctcagtacaatctgggctaaaattatgagtcttcacacgaatcatataatcctttccatttgactgaaggacaaatttgactaagctgctcagcttagagctctccggcaatgtctgggtcagcaggctatctagaatgcccttcagatgatccagcagtgattgaagacagccatccttcagattttgattaaccccaaggataaataaagtttcatgaaatgctggcattgtgaaaggcagaatgtggcacttctgaaagacaggtccactgaggatgtgcagagaacctgagaggaagtctggtacttcgatgacatcctgaacatgcactaggagagaaggtctaaggcagatcttggcctggccacaggttccttcacaagcttcttctttaccatctcttccaggattcttgagaaggctaagttctgaaaatgacactagaaagtcttccacatcttgtgatgtcccaccagtcagggactcagaatttgagttatcttcatggagactaatccaaaaagcagctgacagaaagtcacaattccagaaaggaagaacactggtaccttcctgtggcagcaaagggtaggaacacttcagcctttttagcgggaaaactttgcctaattcagcaatgagtttctcatttatggttttgataggatgacatgaaggtgcttccaggaaacccctgttcaactttcctacaagtgcttctggttctggaaaggaaaaccactggttacccagtttgatcctgaagattctgggttgagaaccttcaaaaggtaagctcctggtgaagatatggttcaaagcaccttctacatgaaaggacttatcttgactcctatatccagtgcacttgtaccctgccacagccttacagctgaatggatacacgtcgcttaaaatgagcccccccagggctgccatggcaaccacttgccaactgttgtgccattctctctggggcttatccgcaggagttccac

SEQ ID NO: 15519 - DNA, 236 bp, Homo sapiens
gtaggtctggggcgcaccctgagaatctgcatttcttagaagttttaggtgatgctgatactgctgattggggttccacactttgagaagcactagtctaaaggactgtatggcttgttgtagtgaaatgaaaggaagctaggaaaggaaggaattgttgaaatggccttgaaagtaaattagagtttttcaagtcaagtaaattatctagacttcagttttgctccgtcttccac

SEQ ID NO: 15520 - DNA, 752 bp, Homo sapiens
  misc_feature (1)...(752): n = a,t,c or g
ggaaaagaaatgagtcaccatcccaactgtagcatatgacggaaacaattccagctgtggtctgtgttgacggaaacaattccagctgtggtctgtgtcgacctgtgagattcaggacctcacctgtgggctctgtccacgtgtaagggtgaaaatcccaatggatggtagtgtaagaatatgagaaacccaatctcatttggatgctgggctctgtgatggcattctgttccacactagggatttacaccatgtatgagaaagtggtaattttctataaccttcatacaaagaggagacatgggatcttacccttttctctaatcccagctaaaactgacagtatcctttctattggctgatgtgtggcatgagagtcgttattgcaactgttagttggaccaagatatatgtcacagtcttacctgtgggtagggagcaaacaggagagtcacatcacctgtattctgggccagggaatatgtcacaatcttccctgacacaagggaccaggcagaagagtcacatcacctggggtactcaggccagggaatacgtttacaacccctggcagggttgcagggcttgcaggagttcaccttcaccttcagtaataagcccagccaatatgttcaaaatgctttctgtggggcaaggccccaattacggaggagacacatcgtctgttttggttgatgccagcattttgttcacattctttccngttaagcgggtttcagggngaggaggac

SEQ ID NO: 15521 - DNA, 1662 bp, Homo sapiens
  misc_feature (1)...(1662): n = a,t,c or g
ctcctcaaacttactgatatcatatatctcaggtagtgaacataagcaacaaactgactttctatataaataagggcgaggtgacagtgtatgaatgcttttagaaaaaaagcaaatttcattttccatcatgttttgaaggatactggcttaattcagttattattctcactgttggtttacataataaacatataaaatgtattgcaaatacaaattattttcattccaatggagaagaaaattacaggctcaaaaatcaagtttaatatcaaaagaagttacacataaaggtttttacatttccgaaaatctgatagttaaaatatcccgtctggtgttgattgtgatacacttaagtgaacccctgaaaacctttattttgaaattgaagtttttgctcagaaactgggcagaacttttcacattctgacagaagataaaacttaagtctaaaaaatattcgataacttttttctcaaaaacattaagtactttagaatataaagcagaaactcttaccaagcatgtgtaccccatcagccacacctcctgtctttgggggaatttggttacttggagctctgtgggtgctatatgaatcctagagacagcaaacttctgctgtacagctaacttacaagggcctgaacccggctgatggcagcaagcctgctacagtccagaagagtgcgacttcttatatttacatatgaacgcatctgtctttccaaggctaactttgtagcattccactggtaccaaggagccaaatggtgacattctgtctaagaatttgtggttactggcttcggaatgaagttgacgctgtcttgaatgcaccagttttttcttcaggattcaagcactttttaattccaggttcatctgtgtgactgtccttggaattgaaagggatgttgctctctttacaatctgtaaggcgcctgtggtgatcttcactaagcaacaatacaatggttccgccaacatgaagcactctttccatttcttgtagaatgcttttgatgtcttttcctaacttaaactttttcccaaatggaatgtcagaaataataatatcaacactttctgaaggcaatggcaattctataacagagattttaagtaattcaattttatcctcaaggcctgcagctttcagattgtcccaagtacctagtaactgtgagtcgctgacatcagcacctacataatacacatctggccattctttagcagcttccaaaagtattgttccaagtccacacattggatctaaaacaaatgcaccagccccactgtcaggcccagtcgtgctcgagataggggagaaaagacatccaccacttgatatgtctacagaggaagcagagtcctcagtgcacagccaggtttcagtcagagccatatggtaccttaatgtcagccagagatgccattgcccacgctattgtagatcgcagtccagctgtcttgatgtaagctctgctggctagggaaaccctgaacacaggaatccccaccacagagtaaatgtcatttagatgtataaagatctgaaagaacaaacacagaagttagaatggaacaagaaacttcattaccaaattactgacaatttgaaatttccattttaaacttacatgatctatganttaa

SEQ ID NO: 15522 - DNA, 435 bp, Homo sapiens
tcttctttcaaagtcattaccacctacatgccagcggtaatgaatttcacaggctggcctgaaatgcttactccctcgaccttgccagccttggttaataggatgttaaactaatctgtgaaaaagcaaattagtgggctcttgcacccactacattagcttgtacttgatctttaaggaatcattgctgttgaaattattgttgctgctgctgctaatttttttctattccgtattctactacctgatggatatctatagccaggtaaatatctgtatatagagatctgtatctatctgtaagcagatacatcgaaccacacaaaattgacgttttgtaggccaaatatgcccaagtaacaaacttcagatggcatagcctaatatgataggatctggaattattttttaataaaatcttattcccaaaagaaa

SEQ ID NO: 15523 - DNA, 1314 bp, Homo sapiens
tgcttggagataggaagtaacacaccgtcatggcaagagtaatttatctgaaggcaaaaagtctgctgaactcaattccccgttacgggaaagattaagtccagagaacagaaccactgatttaaagtgtgacagttccagcggatcagagggagaaatactgacacgggaacatattgaagttgaggaaaaaagagccagcccgccagtctctccgataccagtttcagaatactgtgaatctgaaaataagtggtctcaagagaagcattctccttgggaaggtgtttcagatcatcttgctcacagggaaccaaagtcacaaaagcccttcagaaaaatgcaggaagaggaggaggaaagttggagcaccagcagtgaccttaccatttcaataagtgaagatgatctgattttagagagcccagaaccacagccaaatccaggtggcaagatggagggagaagatggaatagaggccttaaaattaatccatgctgagcaagaaagagttgccctatccactgaaaaaaattgtattttgcaaaccctaagctctcctgattcagaaaaggaatcctccactaacgcaccaacaagagaacctggacaaacaccagactcagacgtaccgagggcacaggtgggtcagcatgttgccaccttgaaagaacatgataattctgtcaaagaagaggcaacagcattattgagaaaagcccttacagaagagtgtggccgtaggtcagctattcacagtagtgaatcatcttgcagcttgccatctattctgaatgacaatagtggaataaaggaagccaaacctgctgtatggctcaacagtgttcctacaagggaacaagaagtttcaagtggctgtggagacaagagcaagaaagaaaatgtggctgcagatatcccaatcacagaaacagaagcctatcagttgctgaagaaggccacccttcaggataatacaaatcaaactgaaaacaggtttcaaaagacagatgcttctgtgtcacacttgtcaggtttgaatattggcagcggtgcattcgagacaaagacagctaacaaaattgcttcggaagctagttttttcatctagtgaaggaagtcctttgtcaaggcatgaaaacaaaaagaaacccgtgatcaatttaaaatctaatgccctctgggatgagtctgatgacagtactccagaaattgaggctgctttacgccccagaaaccataacaccgatgattctgatgatttttatgactaacgtgctgtgacattggtttcaaataaagtctttaaacaaa

SEQ ID NO: 15524 - DNA, 370 bp, Homo sapiens
  misc_feature (1)...(370): n = a,t,c or g
ggttaatatgtgccaggcactattctgggcactggcaatacataattaaatagaatagataagccaggcacagtgatgtgggctgannnnnnnnnnnnnnnnnnnnnnnnnnnnnnnnnnnnnnnnnnnnnnnnnnnnnnnnnnnnnnnnnnnnnnnnnnnnnnnnnnnnnnnnnnnnnnnnnnnnnnnnggaaataggtcaaataaagtccttgcccatcatggagattacattctagtgtggaagatagacaataaacaactaaataaaaatttaatgttgtttactgataaattctgagggatgctattcagtaaagacctctcggaggaggtgacatttgggaacagagattaatgaaatgaggga

SEQ ID NO: 15525 - DNA, 2658 bp, Homo sapiens
agaggacgacctgcagctacagaagtcaagattccaaaaccaagaggcagacccaaaatggtaaaacagccctgtccttcagagagtgacatcattactgaagaggacaaaagtaagaaaaaggggcaagaggaaaaacaacctaaaaagcagcctaagaaggatgaagagggccagaaggaagaagataagccaagaaaagagccggataaaaaagaggggaagaaagaagttgaatcaaaaaggaaaaatttagctaaaacaggggttacttcaccctccgattctgaagaagaaggagatgatcaagaaggtgaaaagaagagaaaaggtgggaggaactttcagactgctcacagaaggaatatgctgaaaggccaacatgagaaagaagcagcagatcgaaaacgcaagcaagaggaacaaatggaaactgagcagcagaataaagatgaaggaaagaagccagaagttaagaaagtggagaagaagcgagaaacatcaatggattctcgacttcaaaggatacatgctgagattaaaaattcactcaaaattgataatcttgatgtgaacagatgcattgaggccttggatgaacttgcttcacttcaggtcacaatgcaacaagctcagaaacacacagagatgattactacactgaaaaaaatacggcgattcaaagttagtcaggtaatcatggaaaagtctacaatgttgtataacaagtttaagaacatgttcttggttggtgaaggagattccgtgatcacccaagtgctgaataaatctcttgctgaacaaagacagcatgaggaagcgaataaaaccaaagatcaagggaagaaagggccaaacaaaaagctagagaaggaacaaacagggtcaaagactctaaatggaggatctgatgctcaagatggtaatcagccacaacataacggggagagcaatgaagacagcaaagacaaccatgaagccagcacgaagaaaaagccatccagtgaagagagagagactgaaatatctctgaaggattctacactagataactaggttgacatacctggaatatagagaacacttgagaagtttgtaatggttttcatttgaaatagactgctgaaagttttaaatttttataagcataggtttgatgttgaaaacttgttttgagggagaaaatccctttgttttaaagtaaagtaaacattatcgctaagtgtacttgtgcagtattaacagctacattatacagtaaatgtgggataaaatccatttagaaaatgttaaactgcttttccagacatggttgtagcatattttcaattagtgtgtgtatgttaatgtgtaattgatagtagaacaaagttacatttttaaaactgctacttgtataaaccttgcctcttttcccaaatactgtgggttttgtgcatagtttttacaaaccttggatttaccagactgtcttttcactgtttgtgggttttgtagaagttacacatttttatggtagataaaatgttacttctatacaagtactcactccctttttatcaaaagttaattttaatctcacagtctacattgtgctacattatccagcttctttggaacaatgtgtgctctgtatggttttttttggtatgacaactaattaagcaactgacattgaactgagaattctacaaactataaaacattaatttttgaaggtaatttagttttgtggctgggcattcagtgaagtcttaggacttctttgcagacaactgactgggtatatataggaatgaatctggctttagggttaaatcatttaaggtccttttataggcaggcactagtaactaaaactgaaaactaagtaagtttatttttgaggaatgttgttaaaaatgtctttaggaagtcactaaaacttaattggaagaaaaaatcatgatgcttatacaataaatatgaataaatgttatataaggaaactcacctatttgaaatcatggctatattgtttttattttctagattccaaaaatacaaacactagttgttccagcattgtactttgataagtctgtacattgacgtgtatggactaaatccagggtaaaatcaatgttacaaaatttaagggtatgttaactaaaggatagcatttctaagatattttgaatattagggtcatttggcacttctcagcaagtaggatacttctcatgttttgaaattatatgaatatggaaaaaaatggcttaagaccagcgtctctgtatgacattgtgtggttgaccctctgagataactgttttcatctacagaattgcatttttgcttttaaagaggtcttataatggaactaggaatcaccgttttgagagaacctgcatatataccagtcattatctgtttggtccttatacagttttaacttacttagatttattctagttaagccataagttcaacgtgtaaacttgttttcattaaagaatttttctatcaaactctgctagtaaattactttcttgctatttacaagagtaagtgatggaattctgggtttgctgccaaggaaataatttcttagttaactggtcacagaggttgtgctgttttgggaaacggggtaactaaacagtaagctcaagatga

SEQ ID NO: 15526 - DNA, 298 bp, Homo sapiens
gtttggtatttaaaatcctttttgtccatatgcttgcgtcatgtagaggttgtatgacattgagctaagagataaaccccgatcaattgagaatttattagaacttcacagtgcaatgtaaatctcttttaatttctcactaaatatggtccaggaaatttatttagtatacgcataggaaaattcagaaaagtgaatgccaatatgaatttaaaatcatgctatagtgcagaaccctcagagtttaacttggaatatagtggattttaacttcatcctcaaatctaatcattttata

SEQ ID NO: 15527 - DNA, 529 bp, Homo sapiens
gagctagcaccatgagcttcaataccctgttggtgattacattggttgaagttattgctccctcatttcgtgtaataaaataacacactactacattatggaaaacccacacataaatctaaaagacaaatattcttattaacaccatttgtatcctagaaataaattagcttccttaaaaaatcttttcaattattcacaaaatccatccttattttctgaatgaacaaggctgaattttagaagtgcaatgaaaagttcttgaggttcccctgcagtgtagacaggccttcttagtggattccgaggcgcagcttcttgtcctggtgctgctcttccttctgtgggacaggtctcaacacacccattttctctactttcaggctcattttgttcaagaccataagctcctgatggattcagctgccacgtaaatttgctaacaccttcaagctccccgaacctcatgtaagagatgtctgccttcttttttccaacatctacatctcctgcatagatttgttttatg

SEQ ID NO: 15528 - DNA, 1035 bp, Homo sapiens
tccttttcttcagagtttattttgaattttcatttttggataaccaagcagctctttaagaagaatgcacagaagagtcattctggcacttttggatagtacataagattttcttttttttttttaaatttttttttaatagtcacattcagctcgcttgctcaaaccagactcccacattgggtgagcaagatgagcccataggattccagagttaatacgtaaccgtatatacaaacagccaaaaaaccataatggtgccacagggatggagcagggaagggcatctctaacgtgtcctctagtctatcttcgctaaacagaacccacgttacacatgataactagagagcacactgtgttgaaacgaggatgctgaccccaaatggcacttggcagcatgcagtttaaagcaaaagagacatcctttaataactgtataaaatccaggcagttccattaaaggggttaagaaaaccaacaacaacaaaaagcgagggactgtctgttgtcactgtcaaaaaggcacttggagttaatgggaccaggattggaggactcttagctgatacagatttcagtacgatttcattaaaaggcttggatgttaagagaggacactcagcggttcctgaagggagacgctgagatggaccgctgagaagcgggaacagatgaacacaaaggaatcaaatctttacaaccaaattgcatttaagcgacaacaaaaaaaggcaaaccccaaaacgcaacctaaccaaagcaaaatctaagcaaaatcagacaacgaagcagcgatgcatagctttcctttgagagaacgcataccttgagacgctacgtgccaacctaagttctcaacgacagcttcacagtaggattattgtgataaaaatgactcaagcgatgcaaaaagtttcatctgttcccagaatccgagggagaactgaggtgatcgttagagcatagcgacatcacgtgcggtttcttaatgtccctggtggcggatacgccgagtcctcggaaggacatctg

SEQ ID NO: 15529 - DNA, 723 bp, Homo sapiens
gctctgtgacgttaatttgggtctttgtcctggcagtgcctctgccagtcactgtcatcgttgtgtcccccacaactgtcctcttgctagctcggcccagctttgtccctggagcccgatgctacccctgtcagacagaggctgcggcctgggccagagtcagggagtagctgctgcttcacggcgtctccactgtgcgattggcccggagccccgaagactcggagggagctgctcagggccgatgagcgcagccagaagccctggccagtgaggagctcacaggtcctccctggtggtcccgccgcacctctgcatctcctgggcgtcaccaggaaggctctgaagtcccgggctgctctcagcacttctcctgcagactgaagactctggactcattgctgattggaacaccaggaggaggttggatttctgccagtgggggatgtttctggaggcagctggtcccccacaccgcgtcctgctgagcctgccccctggattggctgtaatttgcctcgaagttcagcagttcatcttcatgggaaatttgctgagcccccaccagggaaccggatgatgaaacagggatacctcacagcttggccatttgaggcaaaggcagcttcccgagctgatgctaaagagacagactttcccttcctcccagcagcagcagtccagacccgcctggggggatgtgggggctgtccagggtgcagc

SEQ ID NO: 15530 - DNA, 707 bp, Homo sapiens
ccagtcagcgattgtcttatagcagaacaacaagaagtgaaaatattgctagaaactgtccaggagcagatccgaattctgactgatgccagacggtcagaagactacgaactggccagcgtagaaaccgaggacagtgcaagcgaaaacacagcctttctccccctgagttcccacagccaaatcagaacgagaggcgcaatttgtcttaagaaatgaaatacaaagagactctgcattgaccaagtgacttgagatgtagggaatctgtgcattctatgctttgcttcaacaggaaagagaggaaatcaaatacaaattatttatatgcattaatttaagagcatctacttagaagaaaccaaatagtctatcgccctcatatcatagtgttttttaacaaaatatttttttaagggaaagaaatgtttcaggagggataaagcttaccattaaagcttttggggtaggaattctggaatccaatttcgtttagtcccaacactgtcctctttgggctcttagggaggatgtgggggcaattcaggacccttgggccccacagtgccagtgtctcatttaaaaaacacttgcagttcctggttcaaaaagaggagagctgcatcccgcaggtggatcaccagtgagcaggtgctcttccatttggttccagtccaagcctaattttattaccaatgctatacagg

SEQ ID NO: 15531 - DNA, 1368 bp, Homo sapiens
accatagatttattttaaaagggaaaatctcacacataattaagcagtggaaaatgtgctcaatgctatggtgcgtcaggccctctgtctaccaggtttctcccctttctgcagagctgtggaccctgtacgtaccaaacaggtgaacttggtccatctttccttcttcctttttttgcacatttgcatttatatcttcctgtactaaaagaaacaaattatttataattgggggtgacaatataaaggaacaaaagatggggcaatagttgcttcctagctggagctgtaagtccatgttacagaaactcactatttaaaaagttttaaaagatttatgaaccttgtcctacaattcgctgaatacttatttgtcttttaaactcccctcggtgtatggatcatcttcgtcagaatgccgttgtttcattgtgaatcaggggaaaatgttaatcatttggagactgttttcttattaccaaatgtacaatccataagacaactgaaagcaacaactgctgggttcactgacaaagattataaaaatcatcacgttcaaagtagagtttttagccaaggtcaagaactaacctggggctgagtcagcgtctctacccacttaaataacagcgtaaaggtctttcactaaattcgttatgtggtctgtctggatgtaaacctatatatttccttttgaaacagaatcatatcctgcagactcttggcactcctgcatagctttgaccgaatgttcactctcatcgtaatggaagatttctatctatgcagataatacatgtttttaaatactgttttctgtttagtcctcaatcttcctaactcaaattggggactgaggagagagaaaggtggttacccctgttaccgtgccatattcttcttgctgcttttcaaccccacgtgattgttgattgacggttctgctataatgtgcgtgcccttcaagtttcagaaaactttcccaatcatttcacttcaatcttaattgaacccaagagtcaaagttattattttctccgaacgtgtttgtgatcttctgttatattttggggcatgttacctttatggtatataagctgtagtgcatactctttgtattgcaaaaaactggtcagtaatttatgtacatgtattccacattttagtgtgcttgaagtgacaatccatagtttgtagtagtttgttatttgtcaactttaccctgtgttttaaggacatctaaacattccttgtcctatcaagatgacaaaagcagaatgtaatttttttttggaagcttcgtgattacctgtaacaagttctgtttttaaaacgaatacaaataaagttagtaactatttttaaatc

SEQ ID NO: 15532 - DNA, 1022 bp, Homo sapiens
ttttttttttttaaagtgcaaaaagctctctgctgccctagagagaggatctttggacaggccgttcaatgcaaagtaaaagggggcagctgatggggctcaacaaagggcggtggagcgggagacaccatgctcccctccctccctccctccacacacacgcgcagaatacactcagccacacacacagaggcacgtgcacacccccttccatggctgcaggcagagggctggtgactggcttctaagcaggaccccctgactgccctgaaagttcagtgagccactggggctagacacaggcctgggctcagggggctccgctaaaccagaggcctggaggagcctggctgggaggcaggttggggcttggcccagtcctctgccgcctccagcttgggggagataggctgctccctctgaggacgtgcatcctgggaaagccttcttcaggcagaatgaagacacatggaaaagggcagtcagtgggaggcaaaagagagagggggaacaaggagatggtgcctgtctcagaatccacttgggtagcaacgaaatgggtgtgtccctggggtagacagttccagctcctctgaagagcttcaaccccaataagtgcaataaggacctcatagaggactagcaagtaagtcgggtaggctggggtgggaaaccctaattatgtgaacaagcacgagtgctgggcagaaccaagctcaagggagaggaaaggagggagagcacagttaaggacgtgaggtttgggagatctcaacagcaccagtgtgatcggcacgggtctgggacttccctgggctgctggcccctcctgcgcaagccgggagagtgtgatggaggagagacgcgcactggacaccacaagaacctggccatggagacagggccgttttcttccctgggagtttgctcagaaccaggcactgctggggaccatggatggggaggaggcacagggcccagtgcagatgaaggttgcacaaacaccccaaactgagagcccg

SEQ ID NO: 15533 - DNA, 427 bp, Homo sapiens
aagcacactgccacaaattttgtctatttcatatttgtcccctagagccagccctagcaaatgtgtgagttgggagtagttaatagtaaataagactctgactttacacaagctacacattttatacttttcataaaccacaaagtctctctagaattttttctgccttcactaaaattggactgtagccaagatataaagcaagtcatttggaacctgccgagtgagcactgaagctactttatcatgagatgtgtgttaagaaggctgcagcccacaggagtccagggaaggcggggaccacagaggcacagagtccagcacttggccgctcatgggccttctttctgcctcagaggacgggggcagagaagtgatgaagggaaatgttcttagaggaggaaatatcctttggtcctgttcagag

SEQ ID NO: 15534 - DNA, 1569 bp, Homo sapiens
  misc_feature (1)...(1569): n = a,t,c or g
aaaggtagaagtcattatgaatttattatttacacgattgttaaagtacacaaatacagtggcgatacaaacgcacagctcggagactggccgtcagtgcacagctgacacgacgtcctacctacgtctcctgcacggggcgacggggactagatactgggcaaggactgtcacaagcactccgaagacgcgacccggcgaggctcgggctggaacccgggcagcagagctgcctcgcacaaacgttctgggcactacatcgggaccacagatatttacaaagcaagcttgcgccacttcaggccacagcgcgacgtctctccgggtgggggacgtctaccttcaagaaggggtccagcaacaaagaaaatctcttaactcggctctgacccaccccaacctccctctgtacttcaacacacagctcccacccgctcaaggccccgtactccaaaacgcttacacagtaaccagcctaggattgagaaagcatccatgggctcaggcagacggccagccagctggtgggggggtgaacaactgtgttctgggacgccagccagttatggcatccggggaactctggggaggagaagggagaaccaaggtgcacaccttcgaagccctagagtccaaagggaacatcgtccatcgtgatggggtccagccgaagtgcccacgaacacagactgccctgcgcattggggttgggagcacatggccactggctaccgcccaagtgctgcggagtgagaggcgagaaggcatcctgggaacctcagggcacagcagcatggagcctggggcagcaccagctcacggaggccacctgccttctggtgggactcggccccacgcacgctgcttcacttctgaccaacagacacgcgcccaacagaaggtcacagcgcagactctactttctggccgtgaaggttctgggtccggttgggagagtcacctgctccttggcacctcagggtgggtccttctggcctgccggcttttctgagctagtcttggcacgtggcaaggacagccccgctcctggttttaagcacaggcattcatacagacggagtgccaatccgcacaggagcattgagtgctgagaaaatggactgagtgcaaaggcagcaaggcaacaaacactacagtaanccactctcggttcacagtcctctcccaagggaccagaaacgcatcttccaccttgaatcctgggactcccaattgtccctgctagggtctcaaaagcctctgcttccaagctctcagctgcctgcccacctccctggggaagaagcgcgcagtgctttgccctggtaacacccactgcacccctgccccgcggcagcctgcggtccctaactgctctccgagggcctcaagagttcctgacagcaggcatgtcaattacgggaggagggagggtgagacgccaaaatcaggttgaagaggtcccaccacacacgggcacacacacacaccacggacttttgatgagaaatctcctctccaaagcggacaataaaacactgcaaaacaaacacagcacacacccttgag

SEQ ID NO: 15535 - DNA, 503 bp, Homo sapiens
gctttttcttttttaatgagctttcttcccatttctcataaggctttaagaaaatgatgagagagaaataataatgaagactggtacaaatgcattttcaaattattgtcttggaaagtgagtatttgaacttcagaagagatagatggacagctttgatactttctctttatgcttgttatgcattaggaagtttggggctggagggagaaagcctagaattgtagcaccatgggtgatctcctgaggcttctggaaactgttcagtgaggtcttgggttctaagattgattgacttgatgctggtgaccaattgtaacctgttctcccctcctcttttctctttcagaattgaatgacagtgtgaatgaaaacagtgacactgttgggcaaatcgtccactacatcatgaaaaatgaaggtgtgaacattttagtgttccaaaacaattcagctattcctactcctttattaaaaacctgcttcgaagagtcaagatttac

SEQ ID NO: 15536 - DNA, 151 bp, Homo sapiens
  misc_feature (1)...(151): n = a,t,c or g
tgatattcaaaccatagtagtcatttttttgtgtgtgttagttttgctggaatcttgtcaattttattgatctttacaaacagtcagattttgatttgagtttttaaaaagttgtggtaggaatattacacaagatataatttggccntct

SEQ ID NO: 15537 - DNA, 817 bp, Homo sapiens
gatggcaaaatacttcacagaaactcaatgattaagttcccttccacacttccagagcttgaatgaacacaggtagccacctaaattgagcagtattgcaactcagagagaaaatcatctgaatagtaggacaagctcagaaggtacattgtgactgagggcttaaaaggagaccaaaacatggccccatcagggaagcttcttaatgcttggggggccagctaggtagggttgcttccaaaagctggagcccacccctgcctagggggttgtcagagagccacacctgcaggggaacaggtacctccgagggtgagagtcgtggtctctgggagttgttttctcacctctggcttagaagggtcaggcagaaaccacaggatgtggggtcacactcactgtccccaagtttgggaacctgaaaaagtctccattcagaacatggttgttctccctgtcccatgctatcttatcttcctaaatgactaatgaggaagcgggtgttctttttctgcactttgattcgccatctgggttctgtagggtgctctgaaggtgtgatctgccttctggctgatgtggaggaagagcaagcgccttcccagggccacagctgctcacctctcggcagatattttaggcaagcatccgtgtgtcttcccatcttcaggagaaaggtaaatgcaccctaagtgttcacttctggacctttttcaagttcacttgggactgtgtgacagaagggagttggagggaggatgggaatatttttaacactttgttttcctgtgcagaaacataataccagttttcgcag

SEQ ID NO: 15538 - DNA, 761 bp, Homo sapiens
ggctgctgctggaggccctttcctgctctcccgtccgctgtgggtggtccccagcactcctctgtgggttttaccggaaaggtggccccagctgttgacttccagtcactgtcccagacggcacaaggttttctgtaggaaagctgccattgccccggccccttttcttcctttgtcccgttgtcgaggttttttcaaatagcgtgttgttcagtatgcaaatcaattattttaagaatcgcttttgtaaatatctttgtgaatattttagtatcgtctttgataatattcaacattttcatgacctgggttatagcctttgctggtgtttttaaaatacctgggactcaatgacaaagaccgagtcttctttttttttaaacaaaaacaaaaaaagcaaccaggggctatttgtacagttgaagggggtgaacagaatgggcggctgtgctgggagttggaagaccgggcagcccgctatttagagccatccctcagtcagctgggcagggacaagccaacgccaggtagcatgtggccacccttgcccagtgtctgtggcctggcaagtggccacgccctgtgtcagaccatctgggaattaagctccagacagacttacagatgccttccttaggagttcttgcttcttgcgttgatactttgccccagaaaggcctgggattcattctggttcttatcagggtgtgtccacactctgctcacaggtggatccacggctttccagtgcggagagtcga

SEQ ID NO: 15539 - DNA, 1481 bp, Homo sapiens
  misc_feature (1)...(1481): n = a,t,c or g
aggtccagcgggtgctgtgatcttcaagtatggggtctgctggcttgtcgcggctgcatgggcttttcgcggtctataagcccccggggctaaaatggaagcacctgcgggatacagtggagctacaacttctgaagggtctcaatgccaggaagcctcccgctcctaaacagcgtgttcgcttcttgctgggccccatggaaggcagcgaagagaaggagctgaccctcacagccaccagcgtaccctctttcatcaaccatccactggtatgtggaccagcattcgcccatctcaaggttggcgtgggacatcggttggatgcccaggcttctgggagtacttgtgctcggcgtgggacatgggatgcaggctcctcaccgatatgtacaatgctcatcttaccaaggattacacagtgcgtgggcctcctggggcaaagctacagatgacttccgtgaggacggggaggctggtagagaagacaacctatgaccacgtgaccagagagaagctggaccgcattctggccgttatccaagggctcccatcagaaggccctggtgatgtactccaacctcgacctgaagacccaggaggcctatgagatggccgtgagaggcctgatccggcccatgaacaagtccccgatgctgataactggcatccgatgcctctactttgcacctccggaattcctcttagaggtgcagtgcatgcatgagacgcagaaagagctgcggaagttggttcatgaaatcggcctggaactaaagaccactgctgtctgcacccaagtgcggcgcacgcgcgacggcttcttcacgctagacagtgccctcctgaggacccagtgggacctaaccaacatccaggatgctatccgggctgctacccctcaggtagctgcagagctggagaagagcttgagcccggggctggacaccaagcagctccccagtccgggatggtcctgggactcccagggcccgagctctaccttggggctggagaggggtgccggggccagtgaatgcccaggcagctcctggggcagtggatggataaatagaagaactgctatgagctggacctgatagctgtgccagaaagtgagagcaggggcaccttttctacgtgtgacacaaaactcaagctgtaacagaaaggtcaatggacttgacccaactgagaaggaaaaacttctgtatggaggaaaagacagtaaacatgacagactgatagaaagtattggcagannnnnnnnnnnnnnnnnnnnnnnnnnnnnnnnnnnnnnnnnnnnnnnnnnnnnnnnnnnnnnnnnnnnnnnnnnnnnnnnnnnnnnnnctggctagacggcgcctgtgaatagccactgcactctagtctggggaacatatgagacccctgccatctcaaaaaaaaaaaaaattctcaataaactatgtgcccacgaaaattaaaaattaaaaaaaattgta

SEQ ID NO: 15540 - DNA, 388 bp, Homo sapiens
ggaggaagaggcacattagaaccttagggagatgtttttatattggccggggggtgcagtgctatagcagaaaggatgtagatttggagtcagactaagtttgcatcctgacttcatcctttcataacttaggcaggttgtttaatacctttaagcctcagtttcctgatttgtcaaatgtagacagtatctgctgtgccgtgtcattgtaaggactggatctttgttatgagacagcatgttgaagcctatcccccagtcacagtgatagaagttcttagttaaagacgagaatctgtttactgggcctcgagacattgcactgcaccggggaaggggcaggtagtccgtgttgctggtccttccagcttttccaggggcggaagtg

SEQ ID NO: 15541 - DNA, 695 bp, Homo sapiens
  misc_feature (1)...(695): n = a,t,c or g
gaggaacaagatcaagatgcgctttaactgagaagcccccaaggcagaggctgagaatcagaagacatttcagcagacatctacaaatctgaaggacaaaacatggttcaagcatctgggcacaggcggtccacccgtggctccaaaatggtctcctggtccgtgatagcaaagatccaggaaatatggtgcgaggaagatgagaggaagatggagcgagagttcctggctgagttcatgagcacatatgtcatgatgaaccatacatatgatagttgaggaaagacacatattctgatcatgaagnaataaacacaagttaaatatgactaagcagaaagatgggaagggccccaggaatggtgatgctaacttgggaacccacgatgcaggctctaaactcctctacaatcatcctcccttgtgagaaaaatacttgatctgaaggtcccagcaaggagccgactcacagaagaatgaagttttcacatcatgatgatttaatcttccttgacctgagcaattgacaaccccaattctccagaacctcacccgccacaatccccttaaaaaccctggcccagaacccctcaagcagacagatgtgaagcttgaggattccttcatctctttgcccaatggcattgtgattattaaactctttttctgctgcaaaaaaaaaaaaaaaaaaaaaa

SEQ ID NO: 15542 - DNA, 550 bp, Homo sapiens
tttttttttaaaaatatattcatttattcatatatatattcactttacaatactgcattttaacatacataaaaatctaaagcgtttttaagaatttttcaaagtcctgtactgatgctttggcaatctcttcacaaaatatttcatcaggaatagatactagtttgtccaaagagatgtagttaggttttgctggatcatactgtgctcttcctaaataggtaagaaacaagtgtctttctttgaccttaaacagccttgtattaaatacctgtgggaacttgacaatgatgtggtggggaatgctcatcacattgtgcacaaaatcaaacgtctcggtaagtttcattttatttgcagttaacatctttgggattctggtgatcatatgttgaatttcgttatgtttaaaaccaagttcaagacgataaaccttcatattttccttcacgggttccagacttccagttagcagccttgggagacgaactaccagatctctagtcttcttcacactaagttccagttccttctgaaaaaatccaatctg

SEQ ID NO: 15543 - DNA, 2747 bp, Homo sapiens
tgcggttccaacatggcggacgtgacggtggaggttcgcggctctaacggggctttctacaagggatttatcaaagatgttcatgaagactcccttacagttgtttttgaaaataattggcaaccagaacgccaggttccatttaatgaagttagattaccaccaccacctgatataaaaaaagaaattagtgaaggagatgaagtagaggtatattcaagagcaaatgaccaagagccatgtgggtggtggttggctaaagttcggatgatgaaaggagaattttatgtcattgaatatgctgcttgtgacgctacttacaatgaaatagtcacatttgaacgacttcggcctgtcaatcaaaataaaactgtcaaaaaaaataccttctttaaatgcacagtggatgttcctgaggatttgagagaggcgtgtgctaatgaaaatgcacataaagattttaagaaagcagtaggagccatgcagaattttttaccatccagaaacaacacagctaatgatactgtctgccagtgaagcaactgtgaagagagtaaacatcttaagtgacatgcatttgcgaagtattcgtacgaagttgatgcttatgtccagaaatgaagaggccactaagcatttagaatgcacaaaacaacttgcagcagcttttcatgaggaatttgttgtgagagaagatttaatgggcctggcaataggaacacatggtagtaacatccagcaagctaggaaggttcctggagttaccgccattgagctagatgaagatactggaacattcagaatctacggagagagtgctgatgctgtaaaaaaaggctagaggtttcttggaatttgtggaggattttattcaggttcctaggaatctcgttggaaaagtaattggaaaaaatggcaaagttattcaagaaatagtggacaaatctggtgtggttcgagtgagaattgaaggggacaatgaaaataaattacccagagaagacggtatggttccatttgtatttgttggcactaaagaaagcattggaaatgtgcaggttcttctagagtatcatattgcctatctaaaggaagtagaacagctaagaatggaacgcctacagattgatgaacagctgcgacagattggttctaggtcttatagcggaagaggcagaggtcgtcggggacctaattacacctccggttatggtacaaattctgagctgtctaacccctctgaaacggaatctgagcgtaaagacgagctgagtgattggtcattggcaggagaagataatcgagacagccgacatcagcgtgacagcaggagacgcccaggaggaagaggcagaagtgtttcagggggtcgaggtccgtggtggaccacgtggtggcaaatcctccatcagttctgtgctcaaagatccagacagcaatccatacagcttacttgataatacagaatcagatcagactgcagacactgatgccagcgaatctcatcacagtactaaccgtcgtaggcggtctcgtagacgaaggactgatgaagatgctgttctgatggatggaatgactgaatctgatacagcttcagttaatgaaaatgggctagtcacagttgcagattatatttctagagctgagtctcagagcagacaaagaaacctcccaagggaaactttggctaaaaacaagaaagaaatggcaaaagatgtgattgaagagcatggccccttcagaaaaggcaataaacggcccaactagtgcttctggcgatgacatttctaagctacagccgtactccaggagaagaaaagattaataccttaaaagaagaaaacactcaagaagcagcagtcctgaatggtgtttcataaactgaagaagttcctagtttacagttcttttacattacatttacaatagtgcttgtacaagcttgccaaagatagaatatggatcgccagtctttacatcgcactttcagttcctccatttggaattcaaaaaggggagggatcctgaagaaatcatatgttaaacatactttgacacctactgtgttataaaatatatcatcagatgtgccttgagaatagtatatgtaacattaaaaaaaagttgctggctataggaaatgttattttgttttcaaaatatggcagagatggggggtggtgggtggggtgggatccctaacgtaatattctttatgaaagcattagctgcttttgttacatttttaatatgcaaccacttcttcacctgaggaaaactagaatgaaatgcagtctaaaatattttgcactgaattgtaatttcttcattagtttagtctggaaactggtctgttttaatgtgttttttaaatgctgtatgtagaggaaaatctgcagaccactggaatacatttgttaaactctcatctgcagggacactgggcgatacttggcagtgactgttctaccttgaggctttgtttggtttatttattaaagtgtacagtatttaaaaatcaaacatagctttagttaaaacactaagctgaattagtcatgtccattcagacataacctgaactactgaaaagatcaatttccagaaggtttattctgtataaactacatgttagtcttcagtagagtatcttttttttttccttttttttttttttatttcggttgtttgatgtgcaatatgtttttgtatgcaggtagtaaataaactttgatcttccaaaa

SEQ ID NO: 15544 - DNA, 448 bp, Homo sapiens
  misc_feature (1)...(448): n = a,t,c or g
cctctttgannccctntgaanacntnnnnnnnnnnnnnnnnnnnnnnnnnnnnnnnnnnnnnnnnnnnnnnnnnnnnnnnnnnnnnnnnnnggcacgagagcgacaggatannnnnnnnnnnnnnnnnnnnnnnnnnnnnnnnnnnnnnnnnnnnnnnnnnnnnnnnnnnnnnnnnnnnnnnnnnnnnnnnnnnnnnnnnnnnnnnnnnnnnnnnnnnnnnnnnnnnnnnnnnnnnnnnnnnnnnnnnnnacctcaagttgaaatgtgatcaccaatgttggagtggggcttaatgggtggtgtttaggttgcagggccagatccttatgaatagatgaatgccctccctcaggggtgagtgagttcttccagagctggtggttagaaacaatccttgacctccctcctttctctcttgcttactctcttgccatgtaatctctgcac

SEQ ID NO: 15545 - DNA, 368 bp, Homo sapiens
aggcaatggaagggtggatagtacctacaataccctttgtagaccccatcttcactaccatcaaaatctttgtcccactaggcccccaaaaaactggcaaggaaagaaggtggaggggaaatttatggaagtagatggcttaatagttatttcttttatcttgggctgcctttctctaagttggttgtcctgtcccagtgtgaagacccatctttttgtgagaaaagacaaaagaaagcacatgtaactaccttctttgcaatggaaaaggagaaagaaaaaatcttctcctaagttgctggtttcttttattagttaataaaacaaatcagggactatgcaggtctatggggaaacctttagtctgc

SEQ ID NO: 15546 - DNA, 558 bp, Homo sapiens
gtggcagggagcgtggctgttgcagttgcttggtcctacactaggaagtcattactgaatttgtatttaagataaattcctgaaggtggaattgcgtcattaaagggcttgccactagggtttttgaaacatattactaaatttccatgttacaagatatcttccttcttgggcgtgttgaaaattaagtgatactagaatatatatatatgtgtgtgtatatatgtatatatgatggtgatgtgcttagtaaatttgtaaattttttttcttttaaggttgtagaaggaacgcctcttattgatggaagaagactcaagtatagattaaatggattctatgcttttatcctgacatctgcagtcatcggaacatctctcttccagggcgtagagtttcattacgtgtacagtcattttcttcagtttgcacttgcggccactgttttttgtgtggtcttgagtgtgtatctctacatgcgctctttgaaagcgccccggaatgacctgtcgcctgccagctctggaaatgctgtctatgatttcttcattggccgtg

SEQ ID NO: 15547 - DNA, 654 bp, Homo sapiens
cggacgcgtgggtggaggaggagatgcatactgacgccaaaatccgtgctgaaaatggaacagggtccagccctcggggtcctggctgcagcctccaggcactttgcctgcgaacagaacctgctgtcgcggccagatggctctgcttccttcctgcaaggtgacacctctgtcctggcgggtgtgtacgggccggccgaggtgaaggtcagcaaagagattttcaacaaggccacactcgaagtgatcctgaggccgaagattgggctgcctggtgttgcagagaagagccgggagcggctgatcaggaacacgtgcgaggcggtggtgctgggcacgttgcacccccgcacctccatcaccgtggtgctgcaggttgtcagcgatgccggctctctcctggcctgttgtctgaatgccgcctgcatggcattggtggatgcaggtgtgcccatgcgggctctcttctgtggggtcgcctgcgcccctggactctgatgggaccctcgtgctggatcctacatccaagcaagaaaaggaggcccgggccattcctgacctttgccctggacagcgtggaacggaagctgctgatgtccagcaccaaggggctctactcagacactgagctccagcagtgcctggctgcggcca

SEQ ID NO: 15548 - DNA, 1046 bp, Homo sapiens
ttttttttcatgtgaggtatttattttgcagccattcagttcagctgtccagtatcaggttaccaaagacaaattttcaagctcccggttaatccccaccaaagtttctactgttcggctacttcaggatggctaacatttggagagaagaggatcccccaggtagtctgtacataattcagagagaggacatcagaattttccatggttctatttcaggtattaaggtaccacagtgaagcatgtcatttgactgtggtggcaaagggacggcactgagcatggcctaacctattccccggcatttcagtccaatcagcgcatgctcgcaatgatcatccatgggtgaaaaggaagagctgaaagacacatgtgctgagcaacatttaatttctgcttgttaaacgggtgattaggcgccagtgtggcaccatccagacactgggaatttgtgccactccatcagttctgctggctctgctcattctgctttcctgcagtggatgccacttcccaaagaaccatgctccaaaaaacaaaagagaactggagaagtcaaggaaaaacttcagcaaggagagggtatctcaagtgagtctttcctcattagctggacttggctgcagcaactgtttggtttggagtagctgtagttgttgggagatggtccatctctggtgcatcaaaaaagtatgccaagcagcccacagaaagcagcatatggagcaacacaattgtcacaattgtggccaatgcaacgcgtcggttatcctcacgaacagctggccaaaatgtcattgccaagagagatcctgagatgcccagggcaatcatgactagaatccaacgaacagctttctgggggataatccacagtattgcggtggggatataaatgaagagggaatatccatagacacacacaatctccagaaatgaataggagacgatgttcataactttgctgtttctccacatgaggaaaccccagagtgcaagaggaaccagccaggcataggcatagatgatggtagctgctatggacc

SEQ ID NO: 15549 - DNA, 2426 bp, Homo sapiens
  misc_feature (1)...(2426): n = a,t,c or g
actggatgttttctgagaggccaacagagaagccgctgtctgaatagtttctgattgagttgtacttgtctctgtatcaagttgttcctttgcttctgttttatcatgtccactcaaagcaagacagttagcatcttcacttgtttcatcctcttctgttttggttttcttgggactctcttctttatgaggtgaggatgtcctcttgactcctactataggagtaggtatttttgttgctgcatttcctgaagttgctgcatttcctgaagatctaggtggtgggtttaccagacgtgttgaagaaacaactctggagaccgtaggctttggtggtggagaaatggctggttgtgtggcagtttgaggaatgctttcactcgatgtaccccctgagctttcactggaatttacttgtggcacagaaacttccagtagcctgtatgttggtcacagatgctgctgttacagctggagcaggactgtttctgccctgagagctgccagaactgttcaatggactggtcttcgtagcactagtaggtgaaggcacagacatgctgttatcactgtccatagacaagtcgaggctgttgtcattgagagctgtcaatttgacaccttctgttgaatgctttttctttttctgaagcacatgattaggtagtagttgatggagttgctttctttttacatgcattgcagcaattttcatatccacctcaaacatcttgctgtttattgcttgcctataaactgtatctgtgaaagactgaatatcataggtgagatcaacactgaggttttcagagttttctgtttttttaaacactaacccaatcacccacatcgtgcgaaattcttccttgtcgggattttctttgggtgctggaaatgactggggattcacatgagccagtgtaataaattcattcttctccaagcttccaaccaggattcggatttttgattccaccaagcccacccattccaggcgttgtttttctgttggtgcacttgctagaagtacaatataatgcttgtacttttgaaagaagtttggagcttcaaaaagtttggaccactctgccttactcagcaaaatttcatctgtgatagcaagaccttgtttaaactcctcaaccatgaccatccgtgttgaaacggacacattgtacgtggagttctgttgtgggtatgctggtgtaattataggcataagatggtacctatcactggggtttacccttgggtcccatacaggcaaattaagattgcattcttcaggctgtttcaatagcactggatttggccattcccatttagaaaataccaagaaaaatttatgtacaagagttgatgctattgcatttggataaagctggcaagttcttgctactagcatagcccaggaaacaccaccgaggaaacctaatatattggaatagatgttgtggcgtttggcccatagtttgatagctctcagagttaacctgaagttgtcaatgtttggtactagatgtaaaatttcatcggttaccctgcaaccgttaagacttcttatacatcttatatctaaattttttagcagactgtcatctcgtagatccaaatcttcaggaattgtctgcagtgctaatcttgcaaacaaaatatcaatctctatcccatcaaaacagagtttaataactggtacgaatgcctcttcaacagctcttaaatcttttacttcttcctgtaatttcaacttatcatagaatgaggtgaaaaagtcacttcgatcaacatgtcttggtgcaacacacaacgcatcaatatcagcaccttttgtatgcactcctaatctgtaagatccaaatgtaaaaatttttcctccaacattttcaattacagattgtggaagattcttgctttcactgatttctcgtatccactcttttaccaggttatttagttttcccaaaattaaaatcctgcgctgcagttcctcttcctcttcaaaaaccccaaagggtttcaatgtctcaattagtttctgtgtaagtacgcagtcagtctccttgggggctgctaagctgataggagaagtaatgccatagtgcttctgtggcggttgtgtttgttgtgatccctgtgttgtaactggaaacggcatcgtctccggcgccggcaccgcccagtcacttcccccccgcaaccgccgccgctgccgccctgggcatgatccactgaggcgggagggaggggggggcctgcctcagccctgggtccaacccctctcccgcaccgctcccgccgctttaagcgcttctcctccttccccttcgtcctaacctcgtgccnnnnnnnnnnnnnnnnnnnnnnnnnnnnnnnnnnnnnnnnnnnnnnnnnnnnnnnnnngtcaaagggtgtcaaagggggnacac

SEQ ID NO: 15550 - DNA, 386 bp, Homo sapiens
  misc_feature (1)...(386): n = a,t,c or g
agaaaacacaaaagactgttgaagctgctgagaaggcattcaagtcagcagaaaagaaaacaaagcaaacattaaaagaagttcagactgttacctctattcaaaaagcaagaaaagtatattggtttgagaaatttctgtggttcattagctcagagaactatctaattataggtggacgagatcagcaacagaatgaaataattgtgaaaagatacttgacaccaggagacatttatgtacatgctgatcttcatggagctactagctgtgtaattaagaatccaacaggagaacccatccccccacggaccttgactgaagctggcacaatggcactttgctacagtgctgcttgggatgcacgagttatcactagngcttgg

SEQ ID NO: 15551 - DNA, 825 bp, Homo sapiens
  misc_feature (1)...(825): n = a,t,c or g
atcttccatgctgtgtaatcttcttcttgaatttcctccaagcaaagagccaattttggaatcaggagccgtagagctactttgtggattaactcagagtgaaaatcctgctttacgagtgaatggaatttgggctttaatgaatatggcatttcaggctgaacaaaaaataaaagcagatattttacgaagcttgagtactgaacagctattccggttattatcagattcagatttgaatgtgctgatgaagacattgggacttcttagaaatctcctctccactcgtcctcatatagataaaataatgagtactcatggaaagcaaattatgcaagccgtcactcttattctagaaggggaacataacattgaggtcaaagagcagacactgtgcatcttagccaacatagcggatgggacaacagcaaaagatcttattatgaccaatgatgatatcctacagaaaatcaagtattacatgggccattcacatgttaaactgcagcttgcagccatgttttgtatatcaaacctcatatggaatgaagaggaaggttcacaagaacgccaggataaattacgagacatgggcatcgtagatattctacacaaactgagtcagtcaccagattcaaacctttgtgacaaggcaaagatggcactgcagcagtacctggcatgatgggagtgcccctgggcacctgcgagcatcccacctccttgtttaaggaagtacaggaaccagcctcatttgattccttctatttgcacaagtcccttggactggcgggagcctggtttgcaaaagcagtttaatnggct

SEQ ID NO: 15552 - DNA, 2211 bp, Homo sapiens
tttttttttttttttgatgctcaacaggatctcacgtttattgagaagtgattaatggtaaaaagaaaggcaatgccctttcctcattggctgaacaagaaactgaagaaacattcacgacacgttttacagtatttttctcttccaaaatgcatttctgtaaacgagtttttaccactgttctcagctttgaaatcaaattaatcctgacttaatcagtataatgtacaagaacagaacatttcttaggactcctagtactttactttgagtaacaaaaggtcagagaaaatgaaccacccttaaagacacaaccttgggtaacactgttatattctcctagacaaaaattcttcataaaaatgttcttccagttcggaaggataaaatcaaattcccactttctggggtggatgcccaaaaccttcacaactcaagtgttctccaagtgcaaatgtcaaaatgggaggaggaaagggtttaaaaattagagaaaactgtatgcacttacggacttaaaaatccgaaaaacatagtaaaaagacaaaaaaacatagcattatgctctgaaatcacaaccaaagccaaaataaaagggacatttttcacctaaactacctagagggattttttgtttagtttttcctttttcttttttttttcattttccagttaagtcctatgtcttttgtgaaattccaatacttaaactgcaagtctgcaatcgtctctgaagtcagtgaaattaagaaaaaagtcctaattctcttgaaggtcattttttcctcttaggatatgcagatgcaaccgttgctgcagtctgtgtagaactgccttttatttcccacgaccttgacgttcctttttaacactttcttcttcctcttggcgtttctcatagtgtgagaagtcatcaaaaatggaagtggtgtgcttgtagctggctataattttcaacacctgcttagccttttccagaggcacttcctgagtgtccctagagttggtcactggtttattctcgttgttctctaggcgaatgtgtcgcagttggctattgggaacgtccttcacaaaaatccacctgacatcaaaacgacccttccatttgtcctgggaccacacacctgcacatgtgttgtagtccacagcagatttcatttctgccacgccacagaagtgtccactgccgttgacactgaaaagtaagtaaacggggcctttcccgttcatggaacgataagcagcatccagtctcttgttaccatgctctgtgctgcaccaaatattatacttaatggaacggtgaatatcgtcctcagagtagctcttaatgatgaaaacccggccatgtttcagattccagtcaaaatctttggggttatagttattaatggaccgaagcttctccaacactgggtggggttctgaaggagtagatccagaaccagcctgagactgtcctactccattaccatccaccccattatgaccgaacccactgccacggttccgaggtgctacccagcgggttggctgagctgcctgttgctggactgaaagctgggcaggctgtggtggaggtggaggcaatggctgtgtctgtagccctactgatgcctgagccactggtgggctattgttagcctgctgacctaacaggctgaggagacccctgggttggctgacctatattctgaaccaaagcctgtgagggggcttttgcaacgggacccttgttatcccaagttccaatatccatgttatgctttatcgggggtggcggaagacttgaccctgcaatgcccattcttggtcttcagtttaggttgctgttttgcaggcttgctagcaatatcagcccaagatgctggttttggaggagcaatggtggctggaggcaaactattggaagccacgatgttactagtaatggacccgctaccaacagcagaacctacaacttttggaacattgcttgcaacttctgtgctacccaacttcagtgctgccatcccttggtctatagtattcatgccaggagccttattgagggtctcattggcaaaagctgactgtccatcaatcatggctccacctaaggagctaggtgcataagcataattgctactatatccagagctctgagtagactgtccctgagaactgttatttccccatgctgagaagtcaatcccactgggaaagaaa

SEQ ID NO: 15553 - DNA, 1120 bp, Homo sapiens
ttttttttttttttttttaaaatatattccatatttattcagaatatcataatcaatgcaaacacagaactctcttctcacctgtaaaagttaagtacaatactatgggctagatacataatatttcagtcgagtcttcagtattagcttgtaaaaacaaaatctacaattatagatatccatcatacaaaatatatatacaaaagcataattgtagtgtagaaagataaagttaacaaaatacaacttatgtaatttactttacacaaaaatgtattctagttaattttttccaagagcttcaccaattagtcgaatagcaaatactcttgcccttccatctggtttgaaatgacaaagcaaagcttccaaatttgcctgcggaacttcggtttgaactgcaacggggcatgttgatgttaatgctgggctctcaaagagtacttggaatgtttgaccatagaatggctctctgggactcaaaaacttcagtgagtgtgtaataaaagaattatttcgcagattgactttaagtgtccgtgattcccccacactagtcggcaggaacctgtacacatcctctggggcataaactccacgagcagtcacatcaagctgcctgtcaggtatgcgagcagaagcctctgacacagcttgtcttcggggcttaactaaatgatctattttaatgagggaatccgtggaaaggcatgcgttttcaggctcattttctgcttcgatgctttgtccagagagttggaatctcaacgtgtgtttcatgtgaggctccttaagagggtgacattcaacatcccaaaactgggcataatcccccctacctctgggcaaaaatgtgatggagactttttggatcccatggctttccagcagaccagaaataggagaacatctgaatgctgcataggtagctctaaaaacatctccactttcatcaactcccttgacataaggtggcgctaaagatgacagatgccatttcacgtctgtggtgccatgattctcgagttctagacagctctctgaagtttcaccaggttctgttgtaggaaaagtaatactcttgtttcttatttcaacttttgtggaaggcggttttgtc

SEQ ID NO: 15554 - DNA, 809 bp, Homo sapiens
  misc_feature (1)...(809): n = a,t,c or g
tttgcatgttaaaaaacatgtttattttacaatatgtacaatcaggaacatattttaaaaccattaccattaaaataaatgaagatcataaatcacaatttagtttgttcttagtgtatatactcacattaaaatataaagaacatataccaaaaagagccaaaagtgtgcattttgctaaaacctggtatatacatattccattggaaaaaagcaatcaaaaatgacttaaaccaaaactaagttcctgtgatgtgtagtaaccattatattgtttgtatgaggtagtaactaaattattttggccatgtattaatactctaagtcaaaagaaatatgaaaaggatcataaaataaggccaacaaaagtaaaaattccaagagaaatttgaaccacttcactctatggaatgttacagttcttcagtgtgatcatatgaaatgtttagtgaggactctttaataatgctaattaattctttgtgcatactgtaattctgaccacaattgcagtattctatcatggtaccgctattctgtgattcaaaaatgttcaaaggtattgtttttaagcaaagacaagcaatcttacaggattctgcttaaatataaaaagaccagttactacaacatgtggttaattataattggtttgcttcacatagaaaacaatccaaatacatttgtggagccaaatgcttatagacaatgtcacagcttacttttgtgacttaatacatcacatatcaatactctgtgcaaatataaacaccagtgtacttgcatnaaaatnaaaaagattataaaat

SEQ ID NO: 15555 - DNA, 435 bp, Homo sapiens
tcacacctaaacaaatgtttatcttgccatagtgattgaaccataggctgaattgtaaaagctgatgtttgggagtctagctaaagaaaactaagttaataggtttaaagaagcaagagctggaagggtcttctcctggaaggtgagatattggtctgtggggtgtccaagggagagaatccagtcatgggttcttagcttctctttctggttggaccagtaaagcctcttcctcatccctcttttctgctcatcactagagacaaaactaaaaaccatggcttcagtctgctaaaagccgagtggtgatgctgaagggagacacagccttggatatgcgaggacgatgcagtgctggacaaaaggcaggtatctcaaaagcctggggagccaactcacccaagtaactgtagtttgtctttattacttttaaat

SEQ ID NO: 15556 - DNA, 193 bp, Homo sapiens
  misc_feature (1)...(193): n = a,t,c or g
tgcctcttgtaccacgtgatgggactttgtcgttgggatcctcggctgcttagatctcggagccacctgtgttctggcccccaagttctctacttcctgcttctgggatgactgtcggcaggnatggcgtgacagtgatcctgtatgtgggcgagctcctgcgntacttgtgtaacattccccagcaaccaaa

SEQ ID NO: 15557 - DNA, 967 bp, Homo sapiens
  misc_feature (1)...(967): n = a,t,c or g
caatctgaagtgtgagccaccacacccagctattttttctttcgttttttaattttaaagttggggggggtctcaatttgttatcctggctgatctcgaactcccggacttaagcgatcctctggctccaagcccactaccagtctcaggtttctttactaaaagatcactacctttttttctcttatctgctgccatgtgagatgtggctnnnnnnnnnnnnnnnnnnnnnnnnnnnnnnnnnnnnnnnnnnnnnnnnnnnnnnnnnnnnnnnnnnntgtaaattaaaaaaaaaaaaatcactatttaagatactaggatggattgtgactgttgaggagtacttacatatcctacatttgactacattatttccaaaccaagtattccatccaaaggaacatactgctatcatagagaccaaggagggactgtttaaggttgccaaggtgaagcgagctgagaggctttgtcctcgtgccagtaactctgaaatctctcttaattcctgctgtccaggcagcagaatgccatggtttccccaagtaggtagctgctttagcagttaaagcccaaatgtctgttctgttgatcagaggtctctgaatttctgaagtggtgtttcgtttctggtgactgagttaatcctttacaatccctcttgtaaagtgtgcctaatagaaagaatccacctttcaaagctgcagaaccagaccgtgccctaaattgaccaacgtagctgatgtgcctcaggaagtctcttgccagctgtccctgtgaagaccccctcctcccccccagctgctgccttgcacactgaagcatctcagactgtgcaaagccgtgtagtcatcaagacagtaaatcccagggcttggttaagtgctgtgtgataacttgtttggatgagacttaacttaaaaccacttacaataaacttgggaaactaccgtcaaaaaaaaaaaaa

SEQ ID NO: 15558 - DNA, 1718 bp, Homo sapiens
agagaaaattgctgttgggatgaagctttgcagccttgcagtccttgtacccattgttctcttctgtgagcagcatgtcttcgcgtttcagagtggccaagttctagctgctcttcctagaacctctaggcaagttcaagttctacagaatcttactacaacatatgagattgttctctggcagccggtaacagctgaccttattgtgaagaaaaaacaagtccatttttttgtaaatgcatctgatgtcgacaatgtgaaagcccatttaaatgtgagcggaattccatgcagtgtcttgctgggcagacgtggaagatcttatttcaacagcagatttccaacgacacagtcagcccccgaggcctccgcatcgtactatgaacagtatcactcactaaatgaaatctattcttggatagaatttataactgagaggcatcctgatatgcttacaaaaatccacattggatcctcatttgagaagtacccactctatgttttaaaggtttctggaaaagaacaaacagccaaaaatgccatatggattgactgtggaatccatgccagagaatggatctctcctgctttctgcttgtggttcataggccatataactcaattctatgggataatagggcaatataccaatctcctgaggcttgtggatttctatgttatgccggtggttaatgtggacggttatgactactcatggaaaaagaatcgaatgtggagaaagaaccgttctttctatgcgaacaatcattgcatcggaacagacctgaataggaactttgcttccaaacactggtgtgaggaaggtgcatccagttcctcatgctcggaaacctactgtggactttatcctgagtcagaaccagaagtgaaggcagtggctagtttcttgagaagaaatatcaaccagattaaagcatacatcagcatgcattcatactcccagcatatagtgtttccatattcctatacacgaagtaaaagcaaagaccatgaggaactgtctctagtagccagtgaagcagttcgtgctattgagaaaactagtaaaaataccaggtatacacatggccatggctcagaaaccttatacctagctcctggaggtggggacgattggatctatgatttgggcatcaaatattcgtttacaattgaacttcgagatacgggcacatacggattcttgctgccggagcgttacatcaaacccacctgtagagaagcttttgccgctgtctctaaaatagcttggcatgtcattaggaatgtttaatgcccctgattttatcattctgcttccgtattttaatttactgattccagcaagaccaaatcattgtatcagattatttttaagttttatccgtagttttgataaaagattttcctattccttggttctgtcagagaacctaataagtgctactttgccattaaggcagactagggttcatgtctttttaccctttaaaaaaaattgtaaaagtctagttacctactttttctttgattttcgacgtttgactagccatctcaagcaactttcgacgtttgactagccatctcaagcaagtttaatcaaagatcatctcacgctgatcattggatcctactcaacaaaaggaagggtggtcagaagtacattaaagatttctgctccaaattttcaataaatttctgcttgtgcctttagaaat

SEQ ID NO: 15559 - DNA, 349 bp, Homo sapiens
  misc_feature (1)...(349): n = a,t,c or g
gacactttgcaaagacaaagagccctagaccggagggaggaggaggaggaagaagagcggagagagaaggaagaggcgatgtgagcttggaagggggcaagtttccgggacacccacacccctgtattctcctccgaaccccttcatgcccaaatcccggaaactccagcgtgtctccagccgtgttggtaccattttcagatttcatcttcctaaactggaaatgtcaatgagaggaaattaacacccccaagagctgcagtgagcaaatgcattgagcttgggtcaggacaattccatttggggaccagagatggacggtcactcngcctatggagatgaagaaact

SEQ ID NO: 15560 - DNA, 2916 bp, Homo sapiens
  misc_feature (1)...(2916): n = a,t,c or g
tgctgttgaggcggcggcatctttctcgaggagctctcctgggcggctgaagaaggagcttcttctccggagtgcgccggcggtggcgcctgcggacctaactagctccaggttaggccgagctttgcgggaaagcagcggacttgaaaatactggaaatctgtccggatccaaattattttgcaagccagatgagtaaccagagggcatgaaaggttgagaacatttgacttccctgcaaaccttggtatagatcacttccttttctgtaggaaaggaaaggcaccaaagagcacaatgagtacaagaaagcgtcgtggtggagcaataaattctagacaagctcagaagcgaactcgggaagcaacctccacccccgagatctccttggaagcagaacccatagaactcgtggaaactgctggagatgaaattgtggacctcacttgtgaatctttagagcctgtggtggttgatctgactcacaatgactctgttgtgattgttgacgaaagaagaagaccaaggaggaatgctaggaggctgccccaggaccatgctgacagctgtgtggtgagcagtgacgatgaggagttgtccagggacagagacgtatatgtgactacccatactcccagaaacgccagggatgagggcgctacaggcctcaggccctcaggtactgtcagttgtcccatctgcatggacggatactcagagatcgtgcagaatggacgtctcatcgtttccacagaatgcggccatgtcttctgtagccagtgcctccgtgattccctgaagaatgctaatacttgcccaacttgtaggaaaaagatcaaccacaaacggtaccaccccatttatatatgaagtattcagagccccccaggagagacggatggacagacagacagccaggttctccagtggtatctgcctccattttcctgagatcaaaaagactgtttcgaaaccaacatctgatatgtaaactgctcttttgtttccaaccccttccttttgttatctccagtttgatgctatggcgctggacccagggccctcccaggccatctctgttcctctggggtggtccagttctagagtgggagaaagggagtcaggcgcattgggaatcgtggttccagtctggttgcagaatctgcacatttgccaagaaattttccctgtttggaaagtttgccccagctttcccgggcacaccaccttttgtcccaagtgtctgccggtcgaccaatctgcctgccacacattgaccaagccagacccggttcacccagctcgaggatcccaggttgaagagtggccccttgaggccctggaaagaccaatcactggacttcttcccttgagagtcagaggtcacccgtgattctgcctgcaccttatcattgatctgcagtgatttctgcaaatcaagagaaactctgcagggcactcccctgtttcctaagaacgaaaaagtgcaataaaggccattcgttacctacttttcagcagcccacaagatgtagcactattagtgtccccctcagaggcttaatgttgcctgtggagcagtgcccatcccagcccgtttctgcccaccagttgttctcaggaaccttacccatggctccagcgtccttcacctgggcacagggacatgcaagataaatagggcagggcacgtgtttgggtgtcctctcttttctgataaaatccatcccgtgtttgccacacgccctccagtcctcagttcccactgcctaacgtctgcccccgtgtagatactgagaggtggtggcagtaattgtgggccttatcagccgctcagttccagggcttttgcccaggtcactgttgccccatgttcggagaacctgggcccacctgtcttggctttctcatccttcccaacccagtgccgtttatttcagaagcttcctggccactgggcttggatgcttcgggcttctgactgctccataggttttgactggtgaaacaggggcccagatgacaacctctccttcgctccacaggtacgcgggagcctcaggttctctcaggggcagcaaagtggcccaagctgcccctgacagcacagggcctgggggtggctaacgagagaggccttacagtgccggcatgcctcctcttccactgtcgtccttcctcagagggcctcacgccaaacaaacggccttttcgtgtgaaacatcttcagggcgggaaaggggccacttctggctttgttagcaataactgaccttcagtttacccttctgaaggagcaggactcagcacagaattcactttagacggggctgaaggagtgtccctcctctatgtgaaaagaaaattgttttattcttcattctgactttttaactgtttggctcacttccagttagtttgaatgaaaataataattttctacttggagttgaagagggcagaatccgcagctctcatcattgtgatgtgtagcatgtctgccctctgactggacatcattgccattaactttcttctgggcatcacggcaatgtcacgatgcccagacttgggagccaaggccaaccttgggagtcagtccactcataaaatatgggtnacacccattttaaaatttaagttttgtccttaaagacaacttcagtggttaattataaaagttgtgttacttcgtcctaaattaaattgatagaaagatttaaaaatgtgttttgtttctactattcagaaactgcgaactagggaaaggttggtatgaaaaaatgtctttccttttttcaatgtacatagttcaactctttctttgttacatttaaactatatccatggatatcagtctgctttggactcctctgctagtgttacagatggaaataaaaccattaatttgaacca

SEQ ID NO: 15561 - DNA, 1367 bp, Homo sapiens
ttttttttttttttgggttgaagcacttttaatcacaaacaatagtataagaccgtgaacagctcacccagtggctgttgccctcctccagccctcagctcaccctcttcccatgctccctccctgggtaccattgagtaaagagcagggtattggcagctgtccctgttgctatcaggtgattgataggaaggggatctagctagggaccacggcaatcctggccatccatccatggttctgtttctatacaacttcatcatgtgacatattccagctgtgaaagaggaacagtacagaaatgtgggactgaacttggctgctccattcagatggtccaggggtttagagtgtcaagagccaagggcaaaaaaggaggagaagtctggagtcggcataattcaagatgcagccaaatgtggaactaaggtgggttcagtggggacccagggaaggcctcatggccccagtccacaattgtgccccaaccccggcaatgaaactcacgcatatgcacaaacgcacatcaacaaacacacaaaaacacacagagcaaataacattactgaaagaacctggaggctattaaatacaaaatggcagttttctttcaaagtgaaaatatttgcttctttgatactcctcagtgccttgcagtctcccaatcacagaagagtagatatgggaagggccaagaggagtatgttgccagtggccctacaagtccatgtgtgctgaagtccctatagcaaccaccttactcttcagcccagtagctgcctcccatgtgaccattcacccgattggcaccattgctggagctactgtcacagggactttttgtgcaggtggtcacatcttcttcctctgagctgctctccacatcactgcgatcatccttcgatacatgcaagagatgaaactgtccagctcccgccaggcatagaaaaaaggaaggaggtgaggaaagagtggagagtacagggtctaatccttcctggacaggtcaccgaagaggcgaagactttggagccctaggctttttgcttggcctgcttgagtagatggggctcaccaggtttgatggagagagaacgtctgttgagtaatccctatcttccatacccaaaagaaagaagccatctttcatcctcacctttcccctgatcaaggctttcaaagcaatccgtgcaattaggtaggaccagatgacatgcagaagctgtagggtcagcagcaggccattgaggagccaccatgaagcataaggcccgattatctcccaactctcaaagagggtcgtgttcagaatccagaatggatagattcctagtcgtgtaaccataaaaacagcactgaagatcaca

SEQ ID NO: 15562 - DNA, 528 bp, Homo sapiens
  misc_feature (1)...(528): n = a,t,c or g
cctcttagacattgncctcataatgcactgacagaattcacanagctcttaatgaaacaatttaagattgatgtacgtacgtttgacttggtctcgctgtcggttaactgtaaagttagggggaagaaagacccaaaaattaaaagggtagacacagttgagagttttattttaaaaagctaagtcttataattatgaccattaacttgctttggctttattgcagtgactttccaagtttaattattcaaaactttttgaactgactgaattaacttggtatttttaagttgactttttacataaactttataaaccttttataaaaaggaaactataccattactataaatggaaaatcattttacacatcatacctagcaggtaataaaatttaaaaaataaaaattaaatattagaatgtgagaaatttattaaaatatagttctaaaaataagtttcttcctgagaagaatgatactgtttatgatgaatccatagtgaaaagacagtgacctctctttcatc

SEQ ID NO: 15563 - DNA, 437 bp, Homo sapiens
gaaaggaatatcaaaaaattagcaatcaagtggacctttccaatgtttgtgctcagtatagacaagtgagattttatgagggtgtggtggaactttctcttacggctgcagagaaaaaagatcctcaaggtcttgggcttcatttctataaacatggagaaccagaagaagacatagttggacttcaggccttccaagaaagattaaacagttacaaatgcattacagacacacttcaagaactggtaaatcaaagtaaggccgctcctcagtctcccagtgtacccaaaaaacctggtcctccagtgttgtcatctgatccaaatatgctgagtaatgaagaagcaggacatcattttgaacaaatgctttaaattgtcacagcgatccaaggatgagctctttagtattgccctttataattggctaatacaagt

SEQ ID NO: 15564 - DNA, 508 bp, Homo sapiens
  misc_feature (1)...(508): n = a,t,c or g
gggttccttccctaggaagagcactcggaataacctgctggaaatgggattccttcgctaggaagagcactcggaataacctgctggaaatgggattccttcgctaggaagagcactcggaataacctgctggaaatgggattccttccctaggaagagcactcggaataacctgctggaaatgagattccttccctaggaagagcactcggaataacctgctggaaatgggattccttcgctaggaagagcactcggaataacctgctggaaatgggattccttccctaggaagagcactcggaataacctgctggaaatgagattccttccctaggaagagcactcggaataacctgctggaaatgggattccttcgctaggaagagcactcggaataacctgctggaaatgggattccttcctaggaagagcactcggaataacctgctggaaatgagaatccttcctaggaagagccttcggaataacctgctgaaangggaat

SEQ ID NO: 15565 - DNA, 605 bp, Homo sapiens
gaagaaagggatggatcagcccaggccctctgcccggcaggagcctcccacagccaatgggaagggtttgctgtccagaaagaccatccccctggagcctggcattgggagaagtgtggctgtacacgatgctctgtgtgttgaagtgctgaagacctcggctgggctgggactgagtctggatgggggaaaatcatcggtgacgggagatgggcccttggtcattaaaagagtgtacaaaggtggtgcggctgaacaagctggaataatagaagctggagatgaaattcttgctattaatgggaaacctctggttgggctcatgcactttgatgcctggaatattatgaagtctgtcccagaaggacctgtgcagttattaattagaaagcataggaattcttcatgaattttaacaagaatcattttctcagttctcttctttctttagcaaatcagagtgacttctttaaaccacaggttgttgaaatggccaacactggtacagacacggactataaaaatctccaagcttgtgcttacacatgaagcctgacttaactgtatgtgcaacagcaatgaaattaactccagaagccttcaaa

SEQ ID NO: 15566 - DNA, 1104 bp, Homo sapiens
catgttgtttgcctttttatttggccaaatccatagcgactataactaaaccaaaacatgagctaagtaaatgaaaactactttcttctggaggtttattttggataaaatagttgaagacagactacaatgagacattgtaaaataagactagaaaataatttaagagcgtattttaagcacgggattccgacacactcataaacgtgtttgctcccagctcttacaaaagaaaataaggtttttctccatcaaaaacaacccagttacaccagtaaatcttcccagttctgaaaatctgaagcaactgatactccattaaatgtggaaacactgtctactcaaaatatttgtaatattatgcagtgacaaaaatttcccacacctatatagggttaaccatagttttcagcaaagcaacaagtgctttacttattttgtctttttcagtttatacagagctccaatttcatgaaaccatactgtgccaaaccaggaaataaacagcaacactctagcgacgcacggccaaccaaacggatactatctcctgtcctttttaccagctttcctcttcccagacagcaagtgcttgggcttcatatcaaacacgtgtctatccgcctcccctttcttccccaaccgattcatcttcttctgagcattcttcatcatagtcttggctttcttcaccatcttgacatccctaagaccagaaacgtcacgtggagttcgagagcaactcccactccgggccacagaggacgggggagcagagtcttcccgctttcttttcctagtgatgctccgggatcttcttgcctggactgcgtaatgggcatcgtctttatcgtccatgtcaacaccaagactacgcatctccttctccaaaactgtcctctgaaccttcttagcagttcgcggcatcctgggtccctgtgtattcttttctttggactccagaattttcaacttctttttctctcgaatttgctttgccagctgtcggatttccagcatctcttcgtcttcactctcagatacactgtcatactctccagcagctgttctcagctcttcttctttttctaattcttccaattt

SEQ ID NO: 15567 - DNA, 348 bp, Homo sapiens
  misc_feature (1)...(348): n = a,t,c or g
tttgaaanccgtnnnnnnnnnnnnnnnnnnnnnnnnnnnnnnnnnnnnnnnnnnnnnnnnnnnnnnnnnnnnnnnnnggcannnnnnnnnnnnnnnnnnnnnnnnnnnnnnnnnnnnnnnnnnnnnnnnnnnnnnnnnnnnnnnnnnnnnnnnnnnnnnnnnnatatcatagttttaatgcaaatatttagtgttattaaaccaatcagaaagtatctgatggacatctaccatggataaaacctgcatgaggtacaaaaatgaatgtcaagacccagactaatatgcaaataatttataatctagttaggatcgtaagagatgtattatacactttttttttttttt

SEQ ID NO: 15568 - DNA, 656 bp, Homo sapiens
agacgggatgctgtacctgggctcccgagcctcgctggcggatgctctacctctgcacatcgcacccaggtggttcagctcgcatagtggtttcaagtgccccatttgctccaagtctgtggcttctgacgagatggaaatgcactttataatgtgtttgagcaaacctcgcctctcctacaacgatgatgtgctgactaaagacgcgggtgagtgtgtgatctgcctggaggagctgctgcagggggacacgatagccaggctgccctgcctgtgcatctatcacaaaagctgcatagactcgtggtttgaagtgaacagatcttgtccggaacaccctgcggactgacctgcgggcttgcttgctgactcctctcaaagggacagagcgcccctgctccagggaggaggctcaccggaccctggggcagagctgagcttgggacaccagcgggaacagggcaccccttctgcactgacttccagatcatggttctcccttcctccctgaggacaccaaattggatgagagcaagtttgagagaagaatgaatcaactgctatccttcccctcacccctcagcccaggagggaaagggcattttctttttcatctttgaaaggcattgtgggtctgtctttaaagtgtttacaaa

SEQ ID NO: 15569 - DNA, 104 bp, Homo sapiens
tcggtgcaggggaatggggagtgcagcttcagggtacgaggtctccttttggggatgatacaaatattctggaactggccgggcacagcagcttacacctgtaa

SEQ ID NO: 15570 - DNA, 2195 bp, Homo sapiens
tcagctgcgtccggcggaggcagctgctgacccagctgtggactgtgccgggggcgggggacggaggggcaggagccctgggctccccgtggcgggggctgtatcatggaccacctcggggcgtccctctggccccaggtcggctccctttgtctcctgctcgctggggccgcctgggcgcccccgcctaacctcccggaccccaagttcgagagcaaagcggccttgctggcggcccgggggcccgaagagcttctgtgcttcaccgagcggttggaggacttggtgtgtttctgggaggaagcggcgagcgctggggtgggcccgggcaactacagcttctcctaccagctcgaggatgagccatggaagctgtgtcgcctgcaccaggctcccacggctcgtggtgcggtgcgcttctggtgttcgctgcctacagccgacacgtcgagcttcgtgcccctagagttgcgcgtcacagcagcctccggcgctccgcgatatcaccgtgtcatccacatcaatgaagtagtgctcctagacgcccccgtggggctggtggcgcggttggctgacgagagcggccacgtagtgttgcgctggctcccgccgcctgagacacccatgacgtctcacatccgctacgaggtggacgtctcggccggcaacggcgcagggagcgtacagagggtggagatcctggagggccgcaccgagtgtgtgctgagcaacctgcggggccggacgcgctacaccttcgccgtccgcgcgcgtatggctgagccgagcttcggcggcttctggagcgcctggtcggagcctgtgtcgctgctgacgcctagcgacctggaccccctcatcctgacgctctccctcatcctcgtggtcatcctggtgctgctgaccgtgctcgcgctgctctcccaccgccgggctctgaagcagaagatctggcctggcatcccgagcccagagagcgagtttgaaggcctcttcaccacccacaagggtaacttccagctgtggctgtaccagaatgatggctgcctgtggtggagcccctgcacccccttcacggaggacccacctgcttccctggaagtcctctcagagcgctgctgggggacgatgcaggcagtggagccggggacagatgatgagggccccctcgctggagccagtgggcagtgagcatgcccaggatacctatctggtgctggacaaatggttgctgccccggaacccgcccagtgaggacctcccagggcctggtgccagtgtggacatagtggccaaggatggaggcccggaagcctctccctgctcatattgctttggccctggaacgccaggcccgaaggagccccttttcccaggcttggatacaatattctggaaccccagctccacgctcttgcttccatggacactgtgccctgagctgccccttaccccacccaacctaaagtacctgtaccttgtggtatctgactctggcatctcaactgactacagctcaggggactcccagggagcccaagggggcttatccgatggcccctactccaacccttatgagaacagccttatcccagccgctgagcctctgccccccagctatgtggcttgctcttaggacaccaggctgcagatgatcagggatccaatatgactcagagaaccagtgcagactcaagacttatggaacagggatggcgaggcctctctcaggagcaggggcattgctgattttgtctgcccaatccatcctgctcaggaaaccacaaccttgcagtatttttaaatatgtatagtttttttttgtatctatatatatatatacacatatgtatgtaagtttttctaccatgatttctacaaacaccctttaagtcccatcttcccctgggcataggccatagggatagaagttaaagttcttgagcttattcagaagctggatctgcaatctgaatgctactcataacataacaaaatagtatgttaaacagctcttaaatcttactggcttaccacattaaatgatttctctctcctaactcagctcaaatgggcagccatccatgggatgagtcagaggttcagactcttccagtctgtagctctaccttctcttagggtacttagatggatcccctgtctacaaactgccagtcagcaagggaagaaaaagg

SEQ ID NO: 15571 - DNA, 338 bp, Homo sapiens
attacatttaatcctcaaatttctacaaaggaataattttgcatgattttatgattgacggagcattttcaaatctcctctaattctcataacatctctgtgaggaaggaatttttatccttattttacagatgaggaagctgtttggagataatttaagtgacttgcctggggaatctagccagtagtagagtactgattaatcaggtgctgacatctgctctgctttgtgtatgtaattcagcagtgcttcaaagatccaagaagctgtagcagatctcaatacactctcctataaaattagtggaataatcaccatggccaaaattggtatggcg

SEQ ID NO: 15572 - DNA, 533 bp, Homo sapiens
ttttttttttttgacaaccaacactctataaatttattaccaaatataacctatgcacaaacacagctaagctaatgagattagcaaagtagcagcacaaaaggtaaggaaaaacacatttaataaatacaacttggaaacgtctttttctttaaattaggttcaaatactgggagacaaacactgaaacaaaagtcttaacaacgcacttacaagccatcataacatgcagtgatcctgcgagacactgtgtccactcacagccatgttaactgggggccactccctgctgccgtaccatcatatgaatatacatttgtcagtaaaaatgtgacaaaaatgtgatgtttttccaggtttgtgtgttttcataaagttactcaggtttttagagaatgaacataggaacatgtaggatccacaatttttaatgtcatcaggttagtttgtatttacaaaactctaagaaaatagatgtgtgttatgtttggaactgctgctttgaatgcaatacatccaaataatgaagctga

SEQ ID NO: 15573 - DNA, 762 bp, Homo sapiens
taaagttgtcatccttccacagaaaatgatagaccactagaaatacacggttattttctaattaaagttcaatgtgtacgcttttaaattctgaagttatccttcttttatgatatcaaaatagccctcttttttgaaatgatggtagatcataccttttggtctttttcattgtccttacataaaagttggtaatcatatgtcagtcccagaagttttatttgacacttactggtctataaaatccaaaggaatggggatcactgcctgccttaaaggtttttttgtgtgtttgtttgtttttttgtttgcatgtgaaggatttttatgtcacaaatccagctaacagtggatctaggatctaggcctcaccgaggatgtcactgaacctgtcagccccaatgacaggcacacaccttcaaagagcaagagtgcccatcactttctaggctccttgcctgctgctcattccatcatcacggatacagacttgtttctggtttcatcttccaccagagattgcaaagcatcctctgcccagtgcttctaggaggccttactgggatggttcataagccactttcctcttggtgacagcccctgtacactgtggcatgtacggctggctccacttggtatttgttgcaggagggaagaacatctcacttttgcttggctaaagggccaccccaggagagctattttgcctcagggtcttgcagggtttctctaggaaaacagtgcatctgatagttactctct

SEQ ID NO: 15574 - DNA, 1639 bp, Homo sapiens
agatgtccctaaggtagaggtgttggaacgggagctggcctggctgaaggagcatctgtcccagctggagtcccctgtggtgttttgtcacaatgacctgctctgcaagaatatcatctatgacagcatcaaaggtcacgtgcggttcattgactatgaatatgctggctacaactaccaagcttttgacattggcaaccatttcaatgagtttgcaggcgtgaatgaggtggattactgcctgtacccggcgcgggagacccagctgcagtggctgcactactacctgcaggcacaaaaggggatggccgtgacccccagggaggtgcaaaggctctacgtgcaagtcaacaagtttgccctggcgtctcacttcttctgggctctctgggccctcatccagaaccagtactccaccatcgactttgatttcctcaggtacgcagtgatccgattcaaccagtacttcaaggtgaagcctcaagcgtcagccttggagatgccaaagtgaccagccaccccatccctcccctacccatctgtctggccagacctgttctccagagctcaattctgcactctgggatccacacccttgggacagggtgggagaggggacacatgggtgtccagggagaaggctctgtccctgccgccagaccccagtggttgccactgaagacctcattctcctgtctggaggggctgataggacccccttccgggggtccccttcaccccaccaggcttgggaggaagtgcctgcagccaggtcctgaaccataaccacccctgggaaacacatcattcccagcctcaggccctgctggaattggggctgccttatatgtgtgtttaccccttcctggcctggggaaggaggcggggagggctcctttctacctccagtgccctgagcctccagtccgtctccccctgcatgccccatgtgggaggtgctgagctccaaaccagcatcacaccaactctgacacatggatgtacctatcttggtgatgggtgggggccaagaattgagcatgacatcttccccagcagccacctcctctgagatccctcaccttctccaaaccagatccaatcaaacctcagcccgaggaaacatgctccccaacgtgctctcctgtgcttctgttttgtccccctgctggggggacaggagagggagtggtgaggccctgggcctccagagcctggctctgctttgtgctgtggcttagccggaggggacgtggccaagggtgaggtggccaaaaccagaaccagcagtctcctgccttgttccctccctggccctcaggccctccttccagggatgtctctccagctctactttatgtcctgaagctgacccgaggtcttcctatctggaatgactagagggagccaagaggatggggtgggggccagggccccccagggcctatcgtgggagagcctgggcaggatcccatcagaaaggtgctgactaaactggttgcccggacactcaacagcctccacctccctttctaccctcacagctcctggggccttcctggctctggcccagaaagtgattcatttgtaaattatcatggttttctttctgcattaaaatgctcatttccggaaaaaa

SEQ ID NO: 15575 - DNA, 748 bp, Homo sapiens
ggcacgagagactgcgaccctcttctctcagtctgccttactaccatgccgctctacgagggcctggggagcggcggggagaagacggcggtcgtgatcgacctggggagaggcctttaccaagtgtggatttgctggagaaactggtccaagatgtataattcctagtgtgataaaaagagctgggatgcctaagcctgtcagagttgttcagtataatatcaatacagaagaattatattcctacctaaaggaattcatccacatactatatttcaggcatctattggtgaatcccagagaccgccgagttgtgattatcgaatcggtattatgtccttctcacttcagagagacactcactcgtgttcttttcaaatattttgaggttccatctgtcttgcttgctccaagtcatctaatggctcttctgacgcttggaattaattctgccatggtcctagattgtggatatagggaaagcctggtgttacccatatatgaaggaatcccagttctaaattgttggggagcactacccctaggaggaaaagctcttcacaaagagttggaaactcaactattggaacaatgtactgttgacacaagtgttgctaaagaacagagccttccctcagtgatgggttcagttccggaaggtgtcttagaggacattaaagcgcgtacttgctttgtaagtgatctgaagcgaggactaaaaatccaagcagcaaaatttaaaaaaaaa

SEQ ID NO: 15576 - DNA, 761 bp, Homo sapiens
tgtctctcgctggtgctggcaaggagcttgggatctgtctcctctttcgcctcctgcaccttgagagccctgggtactctgtcacagcccctgttgccctgcgatctgtaggtccttggggacgcacagttaaggtgccagaacatcctggaagctgggaaatgaccatggctggagaaggaaagaaggtgtgttttgcctgactcagtgactatagagagaaccaagttctgcaggcctgtcacctaagtctcaggtgagtatgaattctcttgtgtttttcacagattgttgcagtggcaggaccaaggtcaaatgagttatagccaagtctacagtaagatgtggcagtattctgttttgaagccgggaccatgattggcaagcttgccacttggtcaagtgctcaccctctgaaaatgtcttccttggtctttgcctccagctgggtgccacaaactctgaactggattccaaggctttcatgaatgcacttatgtttgctgtggcagctgcattatgtcgtgggggatgtggatgcagaacctcacattctgtcgtcttgcttatgttactctcctttatgtttcactttctcaaatgaatgtcaagcaggtgattttcagattcaaaagttctaaaataaattgctcaaatttatacattatgtaaggctgttaataaaatttcttgtaggtgctacatatttgttaaaatttttggttgtaaatttttaaggctcactgtaggcagaaaaggga

SEQ ID NO: 15577 - DNA, 770 bp, Homo sapiens
aggggcccagcagcccaccctttcctctccccactgcctcctctcccttcctacactcccagctcgagccgtccagctgcggtgggatctgagtatatctagggcgggtgggcgggtagcagtgctgggcctgtctcttgagcctggagggagtctgctcctgccgccctctgccctgccagagacagacccatgcgctgcctgcccaccgtgcccctttgtccccatgtcaggcggaggcggaaggcccaccgtgccagaggctgggcaccagccttaaccctcactctgctagcacctcctccctttccccaaggtagcacatctggctcactccccactccgtctctggagcccaccagggaaggccctcatcccctgccgctacttctctggggaatgtgggttccatccaggattgggggcctctctgctcacccactctgcacccaggatcctagtcccctgccctctggcacagctgcttcctgcaagaaagcaagtctttggtctccctgagaagccatgtccctcgtgctgtctcttgcctgtcccacctgtgccctgccctccagcttgtatttaagtccctgggctgcccccttggggtgcccccccgctcccaggttcccctctggtgtcatgtcaggcattttgcaaggaaaagccacttggggaaagatggaaaaggacaaaaaaaattaataaatttccattggccctcgggtgagctgagggtttttgcaaggaagaaaaaaaaaaaaaaaaaa

SEQ ID NO: 15578 - DNA, 748 bp, Homo sapiens
gcggcacgagcggctggcggagcagaacggattgcagggtcagccatgtcatctgagcctcccccaccaccacagccccccacccatcaagcttcagtcgggctgctggacacccctcggagccgtgagcgctcaccatcccctctgcggggcaacgtggtcccaagcccactgcccactcgccggacgaggaccttctcggcgacggtgcgggcttcacagggccccgtctacaaaggagtctgcaaatgcttctgccggtccaagggccatggcttcattaccccagctgatggcggccccgacatcttcctgcacatctctgatgtggaaggggagtatgtcccagtggaaggcgacgaggtcacctataaaatgtgctccatcccacccaagaatgagaagctgcaggccgtggaggtcgtcatcactcacctggcaccaggcaccaagcatgagacctggtctggacatgtcatcagctcctaggagatggtggaagcaccccttgtcctgtgcttgtgggagactttgcggggaggaggcagcagacactggagatgacattcttccacacgagacggggcttcagccgggcatggtccctctcaagtatctcctggaggaaggggtatggggggcaggtgtggggtgtggggtgttcccggccatcagcacagcctatgaccattgcaacaacctctcaccatctgaagagcattaaaagcatttaaaaaggaaaaaaaaa

SEQ ID NO: 15579 - DNA, 1747 bp, Homo sapiens
  misc_feature (1)...(1747): n = a,t,c or g
ttcggacgaggatttttgtcattagcaagggggaaaaggccaaaggacaagggcctcttctcccattggttttcctgtgggcagaagggctgaggaagatggcccagcccgtgggggctgcgtgggtcaccacnagtggcgtagggtgcaatttggtgtgtgttccagcagtgagacggtgttattgtgaaggtggcattcatctgcggagcaaaacccagccatcggggaaaggtcaaggcttctgttgaacttggaacgtgccaggaccacgtgcaaaaacccaggggtcggttgatcatttctcagatcatttgattggcctccactttggggtatgtgaattattcatgtcccagaagaccaaaaagtgctctggttctgagatgagtattttattcgtgttctgtttccgaaacacttagcaaagaaggtccacagtgatgtgggagtcgccgcacccatctttgaagatagccagtgtccctgggatgaggtgatgatttcccgtcccaagggactctgtgaagtttaggagtacagtttgttgggggtccaaaagacaccatctctaccccacccaaataaaaatgcactcaattctgtagaacatctgctgtcaaaggccagcctgtcgttagggcatggcttatgcttgacaaaccagtaacaactgtgggatggcgatggtgggatgtgtcgcaagcaattcactagacaatcttcacatgaatgtcggtagccagggtctctcccgagggatggctttagtcttgatgaatgtgaaccatgtcggaattgttaggtagaaacctgggctgggaggcctcggaccccaggctccatccctggcttccccagccttgcgccgcaaggcaaaaccaagcgcgagatgcagctagcacccttcatatccatccccgttctcagcgggacaacaccatggacagccgttttcagagcctccagcatttgcacaccactactcaccctctctgctgctggcatgttggtagagtcatccctgtaatcaagaaatggcctgtggaatgttattgttcaacgttgtttacagctcttaaaacatggtgaggaatgcctaagtcttagtgaccaaacgtgaccttgaaagcagacatagcatgacagaccttcctagagtgtttggtcgggttcacagtgaccgagagtcaggtccagcacacacctgggaaagggatgctgccccaagggggaccaaaagggccggacgttacagggtgaaaccctctgacccctcgcgacaccgtaggacttgacttttgtttagtctttctaagaaatagatcatggagccaagtgaagtgcactttgtcaaatgtaagggtctgctttgttcttgttgcttttctgttttttaaccttttgttccgccatttaaaaaaagaaaaaaaaaaaagcttatgtttcttgtcaaatgcagaaatgttccttccgccacgtcactgaagttttgcattctggcttgtgcagtttttattgtctgtgtcagacgtacagccagacatgttctctattggcatttttccgattctgttcagatgacagcgaccgccttttcattccccccgccacctgtactcaccctcacgctctttgaagaaaaaaaaaaaaatcaccttgtgtgttgtagctcatttgtttcaagagagaatcaacagatcgatattcagtgtcttgaataaattgctctattttgatattagag

SEQ ID NO: 15580 - DNA, 597 bp, Homo sapiens
catgcttccctaataccatccccttccttctcttgctgaagcactgtcagtgacatgttttaaagaagataataaaaacagtagcacagctttacatgtgttgaatggttaggaaatatataaataccataataaacatgacattttatcttaaaaaagattgtctgcttgtggaagtggaattcagaagagttgcagcttgtgagttattatcaagtggtgcaaggagggttatccaaaatctgccagaaagttttaacagccagagtaaacgtcttttgtttaacacagaagttatgtatagatacatcttcacatatatgcacacagaatgaagtacagtcaaatagactaagaataatattgaggctagcaaaagtgatagtgttcagtgacagtcaacaatggaaattttatgcataaaaataagaaaactaattacaaacacatttaaaaattgggacaaaatatacacagcaaaatgcataaaaggcacagtttttattcattactttttatttctgaaaaaattcataactttatatgatcttttgtatttattttttatagttgtactttttctaaacaggtgaattt

SEQ ID NO: 15581 - DNA, 1957 bp, Homo sapiens
  misc_feature (1)...(1957): n = a,t,c or g
agcgttacttttcttgataagaatttacagataagacactcagagagacattgtgtcattctctatcatcactccttttaccatgtgaatagatttctctgtcttggcattcttgctgattcagacttattagttaaatcggatttttcctggaatttgaatcagatttcatttgggcaacaacagcaggggcagggtttctaaagcaggtttccccactcatctaggttgacttgaaaggaggatagagccacttacagttttatttgcttcagtgtttaatgtagatattatgtggcctgctgtttctgttgtcttgtatgtctgtgtatgcatgacatttggtccctttctttgaaatgcagcccctcttacgggttttttagtggtggtggtttgttttgtttcatatcatatcacagtttgcatggactgattatcttagttttatgataaaactagaagaaatgagggtttttnntttaatgaatagattttgaattgattctttagaccccccaaaaagtgtcagttctaatggggaaatatattccatcaagtcaaagagtaataactgctcactagttgcttttnagcatctctggtcttatcagccatgctaaatcactttaattagccttagtgattctgtggttgagtaatctctacttgaactaaacaaacatcttttgtttctgtgtgtgtgtgctgtgtgtgagagtgtgcgcgcgcgtgtgtgtgtgtgtgttttaatggagtgttgccttgaatgaatcactgggaagccagccatggtaagggctggtgaggttggggagaaaggaagagctttatgtttctctgttgtttggaccctacttgggcatgaaaaaggaagctcagttccagccccttgggatcaacgaaaatcaggagggatttctgggaaagggcagccaacttggcgcctcttagaaggatcagaggcaagatgagatggcagcctgcagagtaaatgcttgaaaaaagaggggtgattttcaatggtttgcttaagtcactgttttctagacaccaaaatagctgttttgaaactgttttaattgcttgggtagcaatgtgcactttaaacaatttggatattggaatgcagtctcatactgagtgatttgagtagaaccactgatgatgattttataaattgtgtgaagcgaatttcccatttggcaatcatttactgatttgcagtgatgaatatttttatgagaatttaaacttagcaagaatggccatggaggcaaagccttcacccagacccatcccactctcctgtgatccaggtggtccaggagcccaggacaggccttttctgtgggccctggccagacagggttacctggtgaggtgcagagagtccctctagtggccattttgtatggtagttgctaatgcagaacaagttctgtcttgggcttaaattgactgaagactttagggggaaagaatagtaaatgcatgtaaacaaatggggacactctgttcaggagaataatccgactggcatttgtggcagtttttgaaatgtaaatgtattcatgtgtgttcttgtaaatacgtgtcgctcagatgtcctttgaagtgggagggaatcaatccggggataatttcaaatggaatagagtattttgatattgttcattcagagggtgatgtgtacatatctatattgtatatatgtgatgaaaatgcattggctttttgtgcagatacaacctgctctctgtactgctgttggacagtcagtgttttaatgtttctacagttttgctattgcacgatttcatattttgcctctatgatgaacggcaaccattatttgtaactgtttagtgctgtaaagaaatattccaagtgtcattaggattgttgctgccagaactgatatgcatgaatggcacttaaaataaatatattatgt

SEQ ID NO: 15582 - DNA, 568 bp, Homo sapiens
  misc_feature (1)...(568): n = a,t,c or g
tgaaataaacaaagggggctagaacacaaaaatctatgcaaatttctgaaagctgaaattggtacccccttcagtattatcatttatactaatttctgtctaaaccagccagacatatgaggcctctaactagatccaagacagttagatacagttggatcctggacccagtccaatttctgttgtaacttccaaacctagtttggatcagaaatttgctcaaactctgatagctcaaatgcacactgatggagcttcagaatctgagagagaacttacccacaatctccagttgctttgagagagcagtggacaaaatgagtccagtgggtaccttgctttgtcacttggtgttcctgggagttgctagaagctttagtttggatcccacttctgacaccatctattaaaattaaaaaccttaagacaaattaaatttaacagaatttgantgagcaaagaagagttcataaatcaaccagcttccannccaagaataagttcaganangcttcttagacatactttatacaatngacatctctgaaaatgtgtcagttgcccaatt

SEQ ID NO: 15583 - DNA, 1231 bp, Homo sapiens
atatgctcatgttattgaagaagaacctacttattattgattgccttttgaaaatttgttgggaataatttacctgcaggatttagggatagtcagaaaattctaagaaatataattattttatttaccttctaaagccaaatattcttacacagaaaggtcctctgttgttctggttttactttgttgctgaggatctttccttcctgctggtctcttcctctcaggccactggccctgtgtgattccaccgtggctggccactgggaaggggcagcttggacccttggtcaggcctgacggcaatcaggaggcacaaggacactgaggccccatatctgatctgacctttgggggggcacagggagaggccggtggaggaggaggaggagagcagaccaggggctccctgccagcgactcccgcggtttcccctggagtcagccaggttgtaggtcgcaggcggtaacaaacctcacactcctgttccccaagtgaaaatctttaccattgtctgtgggagcgcctgtactcgtgtgtaggagcacctgtacttctgcagtcatcgagaagtcctggatcttttgtgggttacaccagcatcatgtggcaagcagaggcgacttccggaagagacaggcaggcaccgtgaggaaggtggctgtgctctcccaggtgtctcagagacagatgccttatttaaaatcagcacgacatgtgtgagatcttctgtttcctaccccaaatcctgaaaccctgcagacactggctgactgggagaggtggggtctgtaagttgtcccctagtttgctaagaaaatctaaaataatatttattatatgagttaggagagagagaatgggtccgcgtggcctcctctgcagatgtactggtctgaaatgaggttctgagtcactggccaggccagatgtgctcatgtcggtgtctggtgtctgttttgtggagaaaacagtatggtgtgttttaagctatttgtgttctgttgtaatatacttttagaaggttaattggtaaggttaaggtagcattaaccacaaagatgtttggtatttaaaaaatattctctagcaaatattggaatttccaaaatatatcatttgtacagggttaattttgaaataatacttgaaaatttcattataaatatatcctactttttatcttaagttgaagatgttatttactaaattgttcttgtaccattagaaa

SEQ ID NO: 15584 - DNA, 913 bp, Homo sapiens
ttttttttttttccatgtggttaattttttttttttagttctcatttttttctaagaaaaaagcaacaagaaaataattcagagtttatacaaaacatctttacattattttttttccaaaaagactagtatttacacaaatggcaacagaaacaaaaacaaaaacccttccgactgccacctggaaggggctggctgttctgctccctctcccacctggcactggggtgggcagctggccaggaggcagtgtggaggtggatggtgtgagggccagctccttccatggctgctctgggagtgcctgcaaggcgcactcaagtggcagtctgttagcagccgtgctggcaaggaactggggtcaaagtgcacagcgggctggcccagccccaggcagcctcttcctctttccaggccccagcccaagactgggacagcagcaggagctgggttgggtgggggttacccacctgtgctagggcccagaaaaggagcaggccacctggtcttatacccgcttaggtctccaccctgggcctctgtttccccaccaggccaaaggatgccaaaggtaaggagagaaacagggtggggggtggggggtgaaattcccagctctgcaaggcaaaatagccaatcgggcacttcactttcttcaaccccccataggtcatctgctcgaaaagtttctcctgttcccaggcaaaagccatttaagcctttaattaacgctaaatttagggaaggcggagattcccaaaattcctcaaggaagggatttttgtgtgtaagagtgtgattgattctatgtttttgcaaggttgcatgactaccctttgccaggataaggcctctaggggttcctgtagtaagttgggcactttgcccagtgaactttcctttccccaagggg

SEQ ID NO: 15585 - DNA, 2327 bp, Homo sapiens
tttttttttttttcaaaaagaacataaaactttattaagaacatcttatactgtcatcagatacagccaaagaagaacgggtaaacaaacagggaaagttcatcttcccatgtgctattgccacctcagaacagactcctgtgtggatggctggaacaacagttggcaacaaatgctctgtataaataattcattaagtaacacaatgtttcctttctatacagagaagaactgggcttacattttaagttttgatatagtgcaacaactatgaaacaagactacatccttaggagctatttcttaatagaatacaaagcagtttagtagctttatgttatttcagataatgtaatttttttaatgaaaaattcagaaaggacattctaactttcccaattagttaatttgtactgttgagttttttctctctaaagatttctcagaatcagttcagtaactatactttaaaaagatgagttgctcatctacagtgataactgacaacttagttttgtgattttgcaaatcaagatgcctgggtcatccccacttttgctgattctgaaagatttcttatagaaaaaccctgattcagagtgcatgtgataggagataccaaaatagctgcatctggacagggaggttggctattgagcacagctgattctcagattcctggttcccctctatggtccttttacttactgtagtgatggaaggagagaaggagcgcccgagaatctgttcagattgtgactccagacagctctctgcactgtatgtggagaaaagagtgatggcatccattcaaaccatagcagccctacggcaccatgcttttctcttgaggggtcagaccaaactgcactcaaagatgcatgatctgcctcaggtgcacagtggagaaaacgctcatgatttacaatttggtattataatacccccaactaatcccatttcttgagaaaatgaagtcttccttttaggaagaatgtttgctgctaaggcttaccatgttaattatcacacggctgaaaagatgacttctaaatcagactgtattgtctgtgttcagttaatacgttaaccaacaactgaagtttgtggaggattggtcgaggggtgggattcaggtttttgagtactatcacttatcacaaatctcatcaagctctttaaaaaaataatgcatttttatcataaatatttagagcagatactggcattaaaatcagtatctaagtcagaagtctgtctgaaatggtgaaaatatttcaacaaacttctaaaagatttcaaatcttcccaggagtacatagtttataaattagttttaaatggaaaaaaatatatattttgaatggataaatcaccactttagcagatcataaataaggtcaagatattgaaaataagttaacatacaagtttttgctttcacattaataataaaaactaacttacttagtatactttcataacatgtacaaccaggtttcataattgtgcatctgtcacctccccacttggctgaatctttttcttccatttcctacacctagggacagaggtacacagacatcccagggtgtgagtgtggctgctgcatgctgtgtcctagttagagcagtgttacaaatgctggtcaggatctatgattagtaacctgtgaaccacgttacaagtgaaggacattcatggttaggtggattcagttcccaggtgagctatcagcggtagtgttagggaacctaactactattctttctgtgagaaaatgcaccccaagtcccaaaagttgactaaaaactttggaataagccatgtattattagtagtgcatggatgagcactacttatatgtgtctctgttttggagagaggtcaaattgttaaaagaactatttgcagaactacttggctattaaaaataaatgtctgccttcttcatatgcaattcattgtaactataatttctaatactgagaaagaaacaatgaagccattcagactagagagacataattggcttgtgggatttttcaagatgttttattgactatctaatttgaatctacttacaaagagaagaaaaatgtctagtatgtaaagcaatgaatgaaaataaatgtttatcctaagtcattattgagtacaaatccacagcttaacaatgtgtttttaacagcaggagagcatgcaactgctctaacacacagggtcagaaataaaaggtaaaagtacatttgttttgtaactgtaaatatacaaatataaaatttaccatatctaccctgtagtgtggcactgcttaactgccaaat

SEQ ID NO: 15586 - DNA, 1568 bp, Homo sapiens
cctcttcaatcaggtggagcaaggccctctcctgtcctgccccaaggctggcacagacttgagcatgggccgggctcggaagggaagtgggttggatggcggcaggactgatgattggggctggtgctgctactgcgtttacaaactgaccataggaagagatgacagtgagaagctggaggaggagggggaagaggagtgggacgatgaccaggagctggatgaggaggagcctgatatttggtttgattttgaaactatggctcggcctggactgaggatggggattggactgaacctggggccccagtggcactgaggacaggccctcagggggaggcaaggccaaccgagcacacccaataaaacagcggccattcccctatgaacataaaaatacttggagtgctcaaaattgtaaaaatggcagttgtgttctggacctctccaagtgtcttttcattcagggaaaactgttgtttgccgagcccaaggatgcgggctttccatttagccaggatatcaatagccatttggccagcctctcaatggctagaaacacgagccccactccagaccccactgttagagaggctttgtgtgccccggataacttaaatgcgagtattgaaagtcagggccagattaagatgtacatcaatgaagtgtgtcgggagactgtgtcacgttgctgcaactcatttctgcagcaggccggattaaatttgttaataagcatgacagttattaataacatgcttgccaagtccgcttcagacttgaagtttcctttgatatcagagggaagtggatgtgctaaggttcaggttttgaaaccgctgatgggtttgtctgaaaagccagtcttggcgggggagttagtcggtgcccagatgctcttctcattcatgtccctctttatcagaaatgggaaacagagagattctcctggggaaacccctgccccattaaacggccctctcgaacacaatgggacggaatccacccacaacgcgcttggtttgcagatgtcaaagaatctgcagagggtgctactgaagatccagccttagccaatcaccacctcattgggtgaaagttccagggctcaatccaggaccacactcttattggccaggcaggggctcccacagagctttgagtaacttcttggttgtgcagtctgcaggcaatgttggcattgtaaattcctcccttgcagcctccttcatgtggtgaggggatcacttcagctgcctgctgtggacaaagaacatcaaattacagcatcacgagtgctattgttgcctgtggtggtctccctgtccaagcgggaccgctttgcagagaccagaggcatatcgcggcttgagctgaaaatgcatttgttgcagcttaggttgaattatttttcgtttgctctttcttctacacgcgcctgatggatagtgaacctattcatcaaaaaagtgcactgctcttctgtctattgtaccgacttaacctcttccacccaagtccgcatctgtgtgtatcatcaataaagttgtgtgctttgattggcaaaa

SEQ ID NO: 15587 - DNA, 276 bp, Homo sapiens
tgggaagggagaagcagacatagtcatttatgatttgaaagttggaaatttgtaccatctgtttgagtatatgcacatttaaaaaatatcatatagtaaatgcaaacatgccaagtattttataaagattaataacagacctactcttacctggcagtttacttaacttactgttttgagtcctaaacttagagttgttaatgcttatatataatctaaccaaagagttacccagtagggttttagtttttgaacttttattttcttgttgattat

SEQ ID NO: 15588 - DNA, 654 bp, Homo sapiens
  misc_feature (1)...(654): n = a,t,c or g
ttgagctcacaccgccaaaaggttatgaggcacagactttcaactgggagaactacttggagaagaccaagtcgaaagccgctccatcgagactctttaacatggattgcccaaaccatggcttcaaaggtgggcatgaagctggaggccgtggacctgatggagccccggctcatctgtgtggccacggtgaaacgagtggtgcatcggctcctcagcatccactttgacggctgggacagcgagtacgaccagtgggtggactgcgagtccccagacatctaccccgtcggctggtgtgagctcaccggctaccagctccagcctcctgtggccgcagaaccggccacaccgctgaaggccaaagaggccacaaagaagaaaaagaaacagtttgggaagaaaaggaaaagaatcccgcccactaagacgcgacccctcagacaggggtccaagaagcccctgctggaggacgaccctcagggtgccaggaagatctcgtcggagcctgttcctggcgagatcattgctgtgcgtgtgaaggaagagcatctagacgtggcctcgcccgacaaggcttcaagtccagagctgcctgtntccgtcgagaacatcaagcaggaaacagacggacttgagccttcctgcctccag

SEQ ID NO: 15589 - DNA, 4638 bp, Homo sapiens
cttttaatatggattctattcacatttgttttaaaaaccttgtaaatatgaatgtttaagacaacttactgcaagggtaattcaagtttacatgatttttaagtttgcaatgatgttttttttattctgtgtattgaaaaaaattttctgttaccaaattttacaacttctaataagactactataactttatgtaaactgatgaagatgtgctgattaacatattctgtgatatggtttacaacttttaatcataattgtccatgattttggaatgctgttatttatcagtaaatgtaaaatatttgaggcatttagccatacacacactagaactttttaaaactttgtcctatagtgtaattataaactgatgactattatcttcatacattgagtcttcatgcatcaatgaaatgaaaaatataggagtagatgtccacgcccacagaccctggtgcgatgccccacccagggccttcgccggggcctgggccttcccctgggccaattcttgggcctagtccaggaccaggaccatccccaggttccgtccacagcatgatggggccaagtcctggacctccaagtgtctcccatcctatgccgacgatggggtccacagacttcccacaggaaggcatgcatcaaatgcataagcccatcgatggtatacatgacaaggggattgttgaagacatccattgtggatccatgaagggcactggtatgcgaccacctcacccaggcatgggccctccccagagtccaatggatcaacacagccaaggttatatgtcaccacacccatctccattaggagccccagagcacgtctccagccctatgtctggaggaggcccaactccacctcagatgccaccaagccagccgggggccctcatcccaggtgatccgcaggccatgagccagcccaacagaggtccctcacctttcagtcctgtccagctgcatcagcttcgagctcagattttagcttataaaatgctggcccgaggccagcccctccccgaaacgctgcagattgcagtccaggggaaaaggacgttgcctggcttgcagcaacaacagcagcagcaacagcagcagcagcagcagcagcagcagcagcagcagcagcaacagcagccgcagcagcagccgccgcaaccacagacgcagcaacaacagcagccggcccttgttaactacaacagaccatctggcccggggccggagctgagcggcccgagcaccccgcagaagctgccggtgcccgcgcccggcggccggccctcgcccgcgccccccgcagccgcgcagccgcccgcggccgcagtgcccgggccctcagtgccgcagccggccccggggcagccctcgcccgtcctccagctgcagcagaagcagagccgcatcagccccatccagaaaccgcaaggcctgggaccccgtggaaattctgcaagagcgggaatacagacttcaggcccgcatagctcataggatacaagaactggaaaatctgcctgggctctttgccaccagatttaagaaccaaagcaaccgtgggaactaaaagcacttcggttactcaatctccagcgtcagctgagcacaggaggtggtggccttgcatgcgcagggacacgaccctggagacggctctcaactccaaagcatacaaacggagcaagcgccagactctgagagaagctcgcatgaccgagaagctggagaagcagcagaagattgagcaggagaggaaacgccgtcagaaacaccaggaatacctgaacagtattttgcaacatgcaaaagattttaaggaatatcatcggtctgtggccggaaagatccagaagctctccaaagcagtggcaacttggcatgccaacactgaaagagagcagaagaaggagacagagcggattgaaaaggagagaatgcggcgactgatggctgaagatgaggagggttatagaaaactgattgatcaaaagaaagacaggcgtttagcttaccttttgcagcagaccgatgagtatgtagccaatctgaccaatctggtttgggagcacaagcaagcccaggcagccaaagagaagaagaagaggaggaggaggaagaagaaggctgaggagaatgcagagggtggggagtctgccctgggaccggatggagagcccatagatgagagcagccagatgagtgacctccctgtcaaagtgactcacacagaaaccggcaaggttctgttcggaccagaagcacccaaagcaagtcagctggacgcctggctggaaatgaatcctggttatgaagttgcccctagatctgacagtgaagagagtgattctgattatgaggaagaggatgaggaagaagagtccagtaggcaggaaaccgaagagaaaatactcctggatccaaatagcgaagaagtttctgagaaggatgctaagcagatcattgagacagctaagcaagacgtggatgatgaatacagcatgcagtacagtgccaggggctcccagtcctactacaccgtggctcatgccatctcggagtgggtggagaaacagtctgccctcctaattaatgggaccctaaagcattaccagctccagggcctggaatggatggtttccctgtataataacaacttgaacggaatcttagccgatgaaatggggcttggaaagaccatacagaccattgcactcatcacttatctgatggagcacaaaagactcaatggcccctatctcatcattgttcccctttcgactctatctaactggacatatgaatttgacaaatgggctccttctgtggtgaagatttcttacaagggtactcctgccatgcgtcgctcccttgtcccccagctacggagtggcaaattcaatgtcctcttgactacttatgagtatattataaaagacaagcacattcttgcaaagattcggtggaaatacatgatagtggacgaaggccaccgaatgaagaatcaccactgcaagctgactcaggtcttgaacactcactatgtggcccccagaaggatcctcttgactgggaccccgctgcagaataagctccctgaactctgggccctcctcaacttcctcctcccaacaatttttaagagctgcagcacatttgaacaatggttcaatgctccatttgccatgactggtgaaagggtggacttaaatgaagaagaaactatattgatcatcaggcgtctacataaggtgttaagaccatttttactaaggagactgaagaaagaagttgaatcccagcttcccgaaaaagtggaatatgtgatcaagtgtgacatgtcagctctgcagaagattctgtatcgccatatgcaagccaaggggatccttctcacagatggttctgagaaagataagaaggggaaaggaggtgctaagacacttatgaacactattatgcagttgagaaaaatctgcaaccacccatatatgtttcagcacattgaggaatcctttgctgaacacctaggctattcaaatggggtcatcaatggggctgaactgtatcgggcctcagggaagtttgagctgcttgatcgtattctgccaaaattgagagcgactaatcaccgagtgctgcttttctgccagatgacatctctcatgaccatcatggaggattattttgcttttcggaacttcctttacctacgccttgatggcaccaccaagtctgaagatcgtgctgctttgctgaagaaattcaatgaaccctggatcccagtatttcattttcttgctgagcacaagagctggtggcctgggcttaaatcttcaggcagctgatacagtggtcatctttgacagcgactggaatcctcatcaggatctgcaggcccaagaccgagctcaccgcatcgggcagcagaacgaggtccgggtactgaggctctgtaccgtgaacagcgtggaggaaaagatcctcgcggccgcaaaatacaagctgaacgtggatcagaaagtgatccaggcgggcatgtttgaccaaaagtcttcaagccacgagcggagggcattcctgcaggccatcttgtagcatgaagaggaaaatgaggaagaagatgaagtaccggacgatgagactctgaaccaaatgattgctcgacgagaagaagaatttgacctttttatgcggatggacatggaccggcggagggaagatgcccggaacccgaaacggaagccccgtttaatggaggaggatgagctgccctcctggatcattaaggatgacgctgaagtagaaaggctcacctgtgaagaagaggaggagaaaatatttgggagggggtcccgccagcgccgtgacgtggactacagtgacgccctcacggagaagcagtggctaagggccatcgaagacggcaatttggaggaaatggaagaggaagtacggcttaagaagcgaaaaagacgaagaaatgtggataaagatcctgcaaaagaagatgtggaaaaagctaagaagagaagaggccgccctcccgctgagaaactgtcaccaaatccccccaaactgacaaagcagatgaacgctatcatcgatactgtgataaactacaaggat

SEQ ID NO: 15590 - DNA, 497 bp, Homo sapiens
  misc_feature (1)...(497): n = a,t,c or g
tccnnnnnnnnnnnnnnnnnnnnnnnnnnnnnnnnnnnnnnnnnnnnnnnnnnnnnnnnnnnnnnnnnnnnnnnggcacgagtgtgtgtgtgtgtgactatgtgtttatctcatcagcttttattgagtctctttatgcaggcttccttggcaaagaagtgaaggtctttgaggcaaggattcatggggtcctggggccagaaggaccctcgccatcagaagcagattcaaagattcaaagaccttacctctnnnnnnnnnnnnnnnnnnnnnnnnnnnnnnnnnnnnnnnnnnnnnnnnnnnnnnnnnnnnnnnnnnnnnnnnnnnnnnnnnnnnnnnnnnnnnnnnnnttnnnnnnnnnangtagctganactaccngngatgaatgagtcgccagacatgaangnttngcctgcnaatgancngctgtctctgtgatggcngacctnantaccaaccntcantgtcnatcnggnanntgnatgnggnggatgga

SEQ ID NO: 15591 - DNA, 794 bp, Homo sapiens
actcgcctcttaaggggaatcatgagattcctgaactcaaaatctggtaaacgaacctgctttgttcccagctttgtaagtttcattgtatcctaatagtggttattttaaatcagagatctataacctccccacccggtttagactgtttccctgtatccacaggaccaaactagaatgaggagcaggaatggcatgacgtataccttctcgtccctgctcgcatcgtagctcattggggtcttatgagcaggaggagcagggctgagggcatggtagaggtaagaggtgagagtctctcttaggaagtagctgagggagcaaggtatagattgaagcaggagagactgtctttgtttcttgttaccctttcctaaaaaatatccatctgtctggatagtgtagatgagaaaagctgtagggactgttcttgagttgtaggtcggtccttgggatctatgcctttaactggtctgtttgaggaagctgtagtatagctatctcaccattgcctctgtgatgacaattttctgtttctggacagaccttaccttcccctctccaactgtgccctcagttggtgtgtttttctttccctgtttgggctgcaggattattacaagtggtggctacttattcctgaacaagaacccggccctggtccccccccaggaaattgccccagatgcctccttcatcgatgacgaagcatttaagcggctgcagggcaagaggaaccgagggagagaagaaatcaactttgtggagatcaaaggtgatgaccagctcagtgg

SEQ ID NO: 15592 - DNA, 1337 bp, Homo sapiens
gtgaagagtaccctgaagtattgggcagcattcttggagcactgaaggccattgtaaatgtcataggtatgcataagatgactccaccaattaaagatctgctgcctagactcacccccatcttaaagaacagacatgaaaaagtacaagagaattgtattgatcttgttggtcgtattgctgacaggggagctgaatatgtatctgcaagagagtggatgaggatttgctttgagcttttagagctcttaaaagcccacaaaaaggctattcgtagagccacagtcaacacatttggttatattgcaaaggccattggccctcatgatgtattggctacacttctgaacaacctcaaagttcaagaaaggcagaacagagtttgtaccactgtagcaatagctattgttgcagaaacatgttcaccctttacagtactccctgccttaatgaatgaatacagagttcctgaactgaatgttcaaaatggagtgttaaaatcgctttccttcttgtttgaatatattggtgaaatgggaaaagactacatttatgccgtaacaccgttacttgaagatgctttaatggatagagaccttgtacacagacagacggctagtgcagtggtacagcacatgtcacttggggtttatggatttggttgtgaagattcgctgaatcacttgttgaactatgtatggcccaatgtgtttgagacatctcctcatgtaattcaggcagttatgggagccctagagggcctgagagttgctattggaccatgtagaatgttgcaatattgtttacagggtctgtttcacccagcccggaaagtcagagatgtatattggaaaatttacaactccatctacattggttcccaggacgctctcatagcacattacccaagaatctacaacgatgataagaacacctatattcgttatgaacttgactatatcttataattttattgtttattttgtgtttaatgcacagctacttcacaccttaaacttgctttgatttggtgatgtaaacttttaaacattgcagatcagtgtagaactggtcatagaggaagagctagaaatccagtagcatgatttttaaataacctgtctttgtttttgatgttaaacagtaaatgccagtagtgaccaagaacacagtgattatatacactatactggagggatttcatttttaattcatctttatgaagatttagaactcattccttgtgtttaaagggaatgtttaattgagaaataaacatttgtgtacaaaatgctaatttgtgtgtgttttttgaatatgacttgtaaaatgcaaaa

SEQ ID NO: 15593 - DNA, 1019 bp, Homo sapiens
cgctcccggggaggtgttgcagccatggctacggcagccggcgcgacctactttcagcgaggcagtctgttctggttcacagtcatcaccctcagctttggctactacacatgggttgtcttctggcctcagagtatcccttatcagaaccttgggccccctgggccccttcactcagtacttggtggaccaccatcacaccctcctgtgcaatgggtattggcttgcctggctgattcatgtgggagagtccttgtatgccatagtattgtgcaagtaagtcttttgaaggcataaaggcatcacaagtggtcgggctcagctactctggttcctacagactttcttctttgggatagcgtctctcaccatcttgattgcttacaaacggaagcgccaaaaacaaacttgaagttgtctgaaagcttgctctacacttttacattcatcctcacccttttttttgtggggtagaggaggtgcagtaatttactcagtgatctttctactttctagaaactgtccttcaaagctctttaagaccccctcgttagtcagttttttctcttatatgctctggttgagcttgaatagaccagttgttacttaagaaagaaacagagaaagattttagcttttcaatcctatttggcagaggacttcagctaccttcttacagtctttggctgtgttggtaccctcgtgtgctctgagctaagccacatactaaactgactttttggtttgtatacccttgctcccgccttctgatgaaaacaccttaccctcacaaccaccatctttcctctcctttccaaagctctttccaccttgctggcactaaggataaagtgacacttccactatatgtcaattccacacacatttattaggtacctgtgaggtaggatcctatcctctcaaacttccatttttcatggctacagagaaagataaggaaggatgaggcaagtgccgggaatgggggcaggctggagcagttcacacagggcttagag

SEQ ID NO: 15594 - DNA, 987 bp, Homo sapiens
tttttttttgctgttatgattagatatttattgagcaccagggagagagtcagaacattagacttatagtggaggagcagaactgaaccctggcctgtgaaataacaatttcaattaaaagctgtctggccctgaagaaagagaaatgatcctggatatagctggtcctctgagctggcagagctgagcctccctcgggtcttctggtggcaagatgccaaagttgaatagtgtctgtaggcatgatgaccaagtcctagtgctatgggcatcttccctctggtatttagagaggagtaccagaagcccccggcagagatactagaagggcccagagccaaatccagcagctggcttacttgagatgcatctggcaaattccagggcaaagccagtgactcccagcggctccagtgttggtaggcggacactttgggctatccaggaagagaggtagcagggaagaaggccatgcagaaggcaaggactgactaggcaattatgtcagcagatcctggcctaatggggcatttttaacagacacttttgccctcagtggccagaaactcataatccagaggaactgtgtccagcaggcgggcgtagttgccattgatctgggcgatgatctggtactcctgtcctatgcagggctcatcagagtagttgttgccccagattctgggaagttggctcatcactggagcagccacttgcgaagatggccaccctcatggtttctccagagtcgttggcctctctggcatgtgccctggctgcttcgtagacatgctcttgttgggattcttccgacagagcatgatataggccatggtaaaaaccaccatacagcacaaggagatgatgaggatgatggcaaagacaggcaggctctttcctggctcagcaccggtctctccaaggtagccatccatgtcattggtccagtcccagtacgtcgacttgtcgcgaatttagtagtagtat

SEQ ID NO: 15595 - DNA, 1963 bp, Homo sapiens
gaacagaactgtgtgatgaatcctacccggctttactcactgacattcctgttggagacttacatccaggggaacagctggaaaaaatgttgtatgttcgctgtggaacagtgggttccagaatgtttcttgtatatgtttcttacctgataaatacaaccgttgaagaaaaagaaattgtttgcaagtgtcacaaggatgaaactgtaacaattgaaacagtctttccatttgatgttgcggttaaatttgtttctaccaagtttgagcacctgggaaagggtttatgctgacatcccctttctgttgatgacggacctcttaagtgcctcaccctgggccctcactattgtttccagtgaggctccagcttgctccatccatgaccacagtggaccagctcgagtctcaagtggacaatgttatcttacagactggagagagtgctagtgaatgcttttgtcttcaatgcccatctcttggaaatattgaaggtggagtagcaaccgggcattatattatctcttggaaaaggacctcagcaatggagaatatccccatcatcacaactgtcatcactctgccgcacgtgattgtggagaatatccctctccatgtgaatgcagtgtgtcatctttctctgtagatctgccgtcatttgggcgtgtcagagagtcgttacctgtcaagtatcacctacagaataagaccgacttagttcaagatgtagaaatttctgtgggagcccagtgatgccttcatgttctcaggtctcaaacagattcgattacgtatcctccctggcacggagcaggaaatgctatataatttctatcctctgatggctggataccagaagctgccatctctcaacatcaacttgcttagatttcctaacttcacaaatcagctgctcaggcgttttatacctaccagtatttttgtcaagccacagggtcgactcatggatgatacctctattgctgctgcatgatgttcaagaccgacccttggctgttgttacagagatgttgggcagagctatgcaggtgtttcattgtgaactctagctttgatcatggtaaaaagttaaccttttctattttttaatggatgttataccaactattcagaggaactcatacttcaaaaatattaggaaaatctgtcttatagtttctctaataaatatctgaaatctcagtacgacatgaaagaatgtcagacccattgttattgttgaaagtcatttgatgaatggtaaattctatgaaaagtaagtgatttgcatgtataatatcaggaaaattaagcatcccaagtgtgactggacaaagagagcagatgcaccagtgcctgtgccataaagttccgaatcccccatgtgtctctttcagagctggccagaccggaaataaatcattctcataaattcagtgtgtactcagaacacatacacaacaacatagggagttgtatgactgatacggaaaacttccagaaagttttaatcaaagcagtttaattaaggtatcaaaaatatctttgcttactatcaagaagtgtcaaataggttcagcttgctgccaaaatatggatcatttatgaagcaggttcatattttagaggtgttaataaaatcctcatcggaaaagatccaaagtgcaaggatttgattataaacataatttcctagactgaaagtttttggaaaagatgcagggtctgagtcaggccttctggttatattgtgcagtttcaaaagaactatttaaaactcttgaaaactcatgtaaataaaaatcatagggtgaaaattgtatttgttaaaataccttaataatttaaaatgacctgatttcctggaaaattttattattcaaaaggtggaggcattgtaaaaaggaaatagtgatgtaaataaacatgttctctttcaagtaaaaaaaaaaaaaagtcgacc

SEQ ID NO: 15596 - DNA, 504 bp, Homo sapiens
  misc_feature (1)...(504): n = a,t,c or g
gagaatcttaccatcactgaaggtcatctagatggatgtttgcattttctgtatgatgtttctaccaagattgtcatcatctcttgtgcccaccttccccttttccagcactgacctctgtcagaaggcctccccagttctcttctacttccttccgccatttctttagctcatcagctccttcgacttttccttctccactttcacccacataccagtggaggaaccaccgggaccccagtccccaggctctcaggtgtccttcaagctcctcttgaccattctctcccctgattactgctggaggggcttcttcctggtcccctctgcctctcctcactcccattcccccacttccccaggcaggcctggaggggccttctctgcccctattcttcgcttctttcttcanggtacagtctcacagagtctactggggatctttgtcangcaaagccngctgngttnancttaaaagtttaagtactggaatcaagttgattt

SEQ ID NO: 15597 - DNA, 743 bp, Homo sapiens
gggaccgtaaccgcctccgtgcgtggcatatggtccctgcatgctgttcgctctgtatagtacttagtattcgctgaggctaagaggcctcaggtgcctgggcttctgcctttggactcctggatatccagcctagtgctaattgaatgctaagcagtggtaattcaaaatgagagggtcccctgcctctagagtcatcatctaattggggacaggcagacctagataagaaaagcagagaactactttggaaaacagtttatctgctgtaattgaacattcagctaccctataacccagttaatccaatactggggataaatcctagagaaactcatacatgtacaccaggagatgtgtacaagaatattcatagcaaccctattcacaaaagcaaaagcctagaaataacccagatgcccatgagcaagagagtggacaagtaaactggaatattcacataatagaacattatacaattgtcaaatgaactataatgatacctaaccatatggatgaatctgagcaataaaataattaagtgaaaaaagtttaatcccagaagagtaaatgtagcatgatgccctttctaaatgaaaggttttttcttttctatggagttattctttacatacaatatagttcataaattttaaatatattgtttaataaattttgataattgtatataatagtatagtcaccatcaagatgtagaaaatagaaaataggctaggcactat

SEQ ID NO: 15598 - DNA, 430 bp, Homo sapiens
gccgagtggattttaagaagacaggaagacctttgaagaggtggtgctgatttccttggctggcgggaactctgtctggctgttgcatgcatcacttttgtgtgggttattttgttcctctgtggatttggaagcatcgctgaaggagagagaggattttatttctgggaaatggaatcggtttctgagtccagccaacagcagaagagaaagccagttatccacggactggaagatcaaaagagggtaagtggcagaactttgttggttgattggattatggtgctggaattgctaagtgtgattcagagagcataggtggtcatcatcgagcatgcttgtctgtctttctctccggaaggaggtagcatggtggcttgagatttgctatgtctcgatgctgggtgtcttgacttactggtaggcaaga

SEQ ID NO: 15599 - DNA, 1053 bp, Homo sapiens
attgagtgatctttacatttgattccagaggctatgttcagttgttagttgggaaagattgagttaccagatttaatttgcccgatgggagcctttacctgtcattagaaacctttcctcatttaagaacttatgaatatgctgaagatttaatttgtgatacctttgtatgtatgagacacattccaaagagctctaactatgataggtcctgattactaaagaagcttctttactggcctcaatttctagctttcatgttggaaaattttctgcagtccttctgtgaaaattagagcaaagtgctcctgttttttagagaaactaaatcttgctgttgaacaattattgtgttcttttcatggaacataagtaggatgttacatttccagggtgggaagggtaatcctaaatcatttcccaatctattctaattaccttaaatctaaaggggaaaaaaaaaatcacaaacaggactgggtagttttttatcctaagtatattttttcctgttctttttacttggttttattgctgtatttatagccaatctatacatcatgggtaaacttaacccagaactataaaatgtagttgtctcagtcccctccaggcctcctgaatgggcaagtgcagtgaaacaggtgcttcttgctcctgggttttctctccatgatgttatgcccaattggaaatatgctgtcagtttgtgcaccatatggtgaccaggcctgtgctcagtttggcagctatagaaggaaatgctgtcccataaaatgccattcctattttctaatataaaactcttttccaggaagcatgcttaagcatcttgttacagagacatacatccattatggcttggcaatctcttttatttgttgactctagctcccttcaaagtcgagggaagatctttactcacttaatgagggacattccccatcactgtctgtaccagttcacctttattttacgttttattcagtctgtaaattaactggccctttgcagtaacttgtacataaagtgctagaaaatcatgttccttgt

SEQ ID NO: 15600 - DNA, 673 bp, Homo sapiens
  misc_feature (1)...(673): n = a,t,c or g
gggaaaagaaagagccatcaaccgtcttcatagatttcctataagccagagaattttctcagtgatcaaattctaaccaagaaactgaaatgtattcatcaaacaggcagcttttaacatctgaataaatctctataactctctagagaaaattaagttataattgtagtaccattaaactgtggaacatggaagttgaaacttaatttttgtttaataatttaaaaaccattccttagaaaggtttttgaggcccaatctgttgcagccacaatcttaccgactgggggaaaaatgcttagttacaatttttaggggggaattactgtcatgctgctgagaaatggatcctgtcttttttgaccttccttccttcctgaacgtcctctgctaatgttatttctgtgattcaaatactgccaagcacagcacaagtttttgctggaattgactttagaatggacatgtgagtgtttataataaggaaacagattctttttttcataggctctgtacttaaaatatttattatcctggaataaccatatacccccaaaaaagtacagtttgggctactgtatttaaaatttggaaaatatcctggcattacatgtttagtaggctcagagggccacttttnatttaaatgttaaggacccaaaacttctgtgga

SEQ ID NO: 15601 - DNA, 996 bp, Homo sapiens
gcagattactgtaagggcactggtggcagattgtggtggagagagggctgagtgacccagagcaaagcctgcccgggttactcgctgccacttcaggagagggattgtatcagctctcattaccttttgtcatgaggcagttcataaattaaatatgatatcatgcattatctcaaaatatttctatattaattagataattcacgatgtaaaacgtgttcatgcagaagcaaaggcggatgtaatagtcaagtatcagggaaaaacccctttaggatacccagacattaaaaatgtaaaaagtagcttataagaaatgtggattatcagatttttactatatataggttgtgtttaatagtaatttctgacacctgcacatagatgaagaaaaggcagttgttaccacttttcaccattcaaaaaatgggcttgtctcttagagtattggttaatgctttgcttatttgttaatgaagacagcattttaattttaaagcttccttttgtaggactgatggcacgggcagaatcacatttaagaaaaatggtttggaacactttttaataaaaaattgtaaaatcagtttccagtgtggtcaaaattagaatgtaaaggaaagcatttttaagaaaatacagaagcccaaatcaagggagagtaatataaaaggaaatattttaaattaagaaaaggaggtgttatagtttattacatcatgaattatgctttctgtacttacgctcttagtgaaggagataacattgaagtgagaaaatgaacattctcagttatttgcgaagttagtaaaattgcagtccctattccatttttttctgatgaaaatggatacatgagatctcatttattgctctcctcaacacctttactgtcccagattccattcacgttccaaaacgtggacagtaaaactgaagtcagataaacacagtcacaggtacaactgggagcgagttttaacatagtggtaattt

SEQ ID NO: 15602 - DNA, 1790 bp, Homo sapiens
ttcatgttttaagtcttttaatttctaattttaaatatagaaattttctattttaaacataaacaaattcttttctatttctaaatagttttactatgtgtcagtctggtaatcttgctatatgtcattataatacctggttcatgagaaagtatcactaatatcatcatccttgtcatcttcattaatcctcttcctcttcttcctcctcctcattttcagacagttcatgctcactgccgaatccttcatctctctatccagttcatacatgaaatctggatccgaactgtttgctaagagatctgtgctcatcagagtttgttccgaaaaggtgtggcttcgaaaggcatccccgaaaggcggatccattccgcttacactaggctacaacagagtgatttttattttagaaagttaaagactactttgagaccaatttatcacatatgagccccaaccccacccccactaagtaacttattcttttcagaaaacatttctatactttttttctactgtatagtatatttaagagctttggctaacactgaactgtagacttatattaggaaaatacctaaaaatagaaaaaatagagtgctgccaacgccccggtggagaagctgaggtcatcatcagatttgaaatatttaaagtggatacaaaactatttcagcaatgcagacaattaagtgtgttgttgtgggcgatggtgctgttggtaaaacatgtctcctgatatcctacacaacaaacaaatttccatcggaatatgtaccgactgtttttgacaactatgcagtcacagttatgattggtggagaaccatatactcttggactttttgatactgcagggcaagaggattatgacagattacgaccgctgagttatccacaaacagatgtatttctagtctgtttttcagtggtctctccatcttcatttgaaaacgtgaaagaaaagtgggtgcctgagataactcaccactgtccaaagactcctttcttgcttgttgggactcaaattgatctcagagatgacccctctactattgagaaacttgcccaagaacaaacagaagcctatcactccagagactgctgaaaagctggcccgtgaccctgaaggctgtcaagtatgtggagtgttctgcacttacacagaaaggcctaaagaatgtatttgacgaagcaatattggctgcccctggagcctccagaaccgaagaagagccgcaggtgtgtgctgctatgaacatctctccagagccctttctgcacagctggtgtcggcatcatactaaaagcaatgtttaaatcaaactaaagattaaaaattaaaattcgtttttgcaataatgacaaatgccctgcacctacccacatgcactcgtgtgagacaaggcccataggtatggccccccccttccccctcccagtactagttaattttgagtaattgtattgtcagaaaagtgattagtactatttttttttgttgtttcaaaaaaaaaatttttgtgtgtctgtttttttttttttttttttttgttgtttaaaaggaaggcatgcttgtggatgactctgtaacagactaattggaattgttgaagctgctccctggttccactctggagagtaatctgggacatcttagtgttttgttttgtttttttccctcctcttttttttgggggggagtgtgtggggggtttgttttttagtcttgtttttttaattcattaaccagtggttaagcccttaagggaggaggacggattgatt

SEQ ID NO: 15603 - DNA, 722 bp, Homo sapiens
gcattcattgaacatgttgggaaatacttttcattgggtgaccaaatacctacaaattcatttacaaaaaagaaaaatgaaagttacctcagaactaaactcagaaatatgtcccacatgggttcttgtaatgtttcttggtgaatgtctttatagaaagaagtgggcatgaaatgatgactcagtaattaaacacatgggggaagggaggctgtagaaaacactggattctatatttaaaatttcattcagttcactaatttgtttttactgaccaaagctttctatacctatgtagagtgtctgagaactagaagggcccatcagttgccactcggatgatccttttgtctcttttcagataaggccccagttcaacagcgtcctctgtgtcaatcagatactcccaggaatgagtgagccctgccgttttcccaagttgcccctcagcacattccagccagttccaaaacttttggcttgtttttgacacaaggccagataagctactcaaactggtttttttaaaaaaagaaaacaaccccaatctatattccttttttaatactgtgtacataacctgctgctcgaaagactaggttttcccctttccagctagttgtgttgtttctttatgtagacagctttaaatcatgtttacatgattcagccattttaaacaacctcttcctatttttttttcctttttgtacaaaaaaaaa

SEQ ID NO: 15604 - DNA, 2379 bp, Homo sapiens
gtcgacttttttttttttttttggttttagacaggatatttatttgaagttccaaatgacattagcagaattgtgatttttatgtttactgaatggtgcatgggataaaaaggggttctaaaacactttactagatcatccaaaccctacaatagacacttatgcatcaaaattcttgtaaaaggaccacttccctactccctccaccctcccctcaaaatacccatgttcacaaagaacaaaaccttacagcttaaccaacaaaaaacgtgtcatacaataattctaaggcaatggttctatgaagacaggagaggtagcaggctgaaccgcattcactgaccctatctctcagctgctcctcctcactagtcaggtttttcctgtgtaccccacttcattatttccatcatgcttacctctctgtttactggacattccccttgatctaataccaaacttagccagtctaactgtaactcagatgataatctgaccacttcctggtaagaacaaatggttaatgttgtcacagtgattaataaatacaaatatgaattaatttaacaatgaattacattttatcccatccaggcatgaagaagttaaaacctggactcactgaccctgtgttaaaatttagtgctaaatgtaagcaacaacactggagcattgttattttatcaagacacctgaacatagcaaaattaattttgttcatttttattaacataggacatactaaccaaatattatcatttaataaaatcaacgttacaaagaaactcactagcaaataaacaaacgatattcacttgactcttctcttggttgaatgattttctattaattagtagtacacagctatttttatcaatttatgcttaaactgccttatgatttcaatgaaatttcttagcttttacttgttgaataattttttcaattgggaatcttttcataattcaaaatagttcctgaaaattaatgcatccttcaatgtcttctacttaagctgggtgcatttaaaatgcaacacaattctttgaaaggagactatgacatttgagcataaagcctataagaaaaagaaatgtcttccctccccccatgcttcacagagactatatgaatgttccatactcttcatatttagcaacaggagttccttagagatcaaacagcagaaaacaggaggaacttaggccatcaatggacttgtaaaacagataaaactccaaatgtattttaagattccatcttctccacagatgagaaagtgctgaaagggctcttcaacttttctttagcgacatcctctgtgccccaattagaaaaagagttgcaggatggtagtcctccttaaacagcacagactcaatctggaaagagtggcagaaacccctctcccccaacaatgtatcccccgaaaataaactgccaagtgcaagagggacaatcttcagaataaataatattctgaaggactgacaaaacagactatttttagacaaagaacacaccaaatactccgaaatttcaggataaccatacatcaagtacttcgtgcaagtaatatttttaccagttaaaagtcattatgaaacacacattcttttaactgaatttcatatgttatataaaacttgaaaagtgtggcacatttctactattaaccattacattgttttttgttttttaaaaaaagtatatattaatcaaaagtatacattacccagaccttttgatttaaaatataactgaaggaaaatataaactctgagtaaacaggcattcttctacacaaacatgagttatttcagtaaaaaaacaacaacaaaaaagcaatttcaatgtaattaagccacctctgattaatacatattttcatgcatgtggaaaaattatttttaactagaactttaagaataagttccatagcaaacaagttacagcatttattcaataaggaatattaaaataattcattagtaaaaaataaaataacttcaaccatatacgtattataatttatcatgtacatactccaaaatccccataatttaactaggaaatttatagaacatctttttaaagtatgtcttaggaaaaccaaccaaaacaattggtgccttaactaaagagaatgtgcatacacattgctatttgacctatatgcaaaagtggaatgaaatacataggaaattaaggttactgctttcaaaaatttctggaatattagtacttaagtcaaaacacttacctgcagaataaaaacagcctgagtatttccaaagctgaagtaattttctgaatgttaaatatcacaagaatgaaaacagtctccattaagcatttacatgtggtttacagttgagg

SEQ ID NO: 15605 - DNA, 379 bp, Homo sapiens
ggcctctcatatttcataaaatatgaacttttcccggcccacatccctaggccttcctgatgcgcttgcctgctccctgggtctctctgcatggggaaggagtgttcccagcttgcaaactccagctttgcctgtgagaggaacaagcgtccctgatccagaaggtgatggagatggcgagttctgctggctcctggctctctggctgcctcatccctctcgtcttcctccggctgtctgtgcatgtgtcaggccacgcaggggatgccggcaagttccacgtggccctactagggggcacagccgagctgctctgcctctctccctctggccgggacggtacccaaggaggtgaggtggctgcggccccattcccgca

SEQ ID NO: 15606 - DNA, 778 bp, Homo sapiens
cttgagcctaaaataaaaagaaaaaattaaaaagaatcagtttttttaattaaaaaaatagaaagctgttaggctcctaattcgtggggtttttttttgtaaaaacagtttagataatcctgaatgcaatcattaacttggttgctaattacaagaatgaaaattataatggaaaaggacaaaataatataccagctggtttgttattatagtccgtgtattaaaatactattgaaatacgttaaaggtaaatttttaaggtttaaaaaaaatttagtaacttacagggatggagaatttagatgtcagaggtggggagatttatttttataaggtaatttttatcctgataaggacttaaaaaaaagttttgcaactgaaattttaaagtaaacatgttaagtacagttaaaaagtaagcattgtagtaaatagtggattctctggtgtgtattttttatctcagtgttgaaaattggaaaagaatggactgaagtctaaaaactggaataatgaaggacactaaatgcctttattgtagatactatgtttgtaagtctatagctaagcaacttaagccaaaaaggtctttcaactgaagctttaatcaacttattttggagatgttctcttcccttatctcatgcgtcatccctaaaataataagatacatgggatcaaatagcccttgccttttcaacacaaatcagttggaaaattatggtttgagtcctgttgctgccatggcttttgcttcctcagaatgggtttttataac

SEQ ID NO: 15607 - DNA, 366 bp, Homo sapiens
gtcgacgcaacagaactcagtaccaggtggcccgtggatgtccgtccctctcagcccatttggaggtgactcttgcttctctcttgatggatcagctttcactgcccacccccagggacgtgaccaaggaggttcctcctctctacccctaagcggtgagtccataggctccctggagagttcagtcatctcttctggagcaagtcacctagcagcagtgaacctccatttctttatctcaaaaatgggagtcaataatccctgccttattgatgtcactggattgtcataaaaatgacatcattatgtaaaggtctttgtaacctgccacgtactctataatgatggagatactccttatattaa

SEQ ID NO: 15608 - DNA, 1143 bp, Homo sapiens
aaacattagcttcttttaccaacctgagaaaattaggatgacctggcaaataagatcttgaataggccaaaagcaagtatcttgctgtgtgtagtctcttggttaaagtgaagaaacagtactgttcacacctttcttcactgagattccagtgtacatgagaacatatatttattgcatgattttctagatacacagtctatgcattattcatatacatttattttagcctaaagtggttttcaaatccagttcttcaagccataaatgaccaagatccaagcaatctgaatttgtttttgtgattatttgactggaatgcttcttaagtggaataactatactccgttatccacccgatttcctaatgtaattgaaagattttctattttgccacacacttggagacaataagggtttttagttttatctactcttctattgaagttaaagaaagaaaaaaagatttttttatttgtattaatgaaaagctttagtttaaaataaggagatccagaataaaaagaagagactgatctcttcaattattgtcatctgtagccaccagcacatcactcttatgtaatccccaaaggcttggcatgccgtaagtgtgtggtgggtagactgctgccggggaatcgtacttcttatttagtaatgataagacttttcattatttttggaattttaaagatgacataaataagtttaaatatcaatttggggagtaaggtttaatattgccatcgggtattgagacaggaggaagtttctgtttttctccatttagacataggtcaattaaaatatttgggtttaaaatgactaaatgctttaaacatattgtagcttaagatatatgtgttaagatatatacatgagaaactttaaaaggtaactactgtgcatgcctgatgcttaatagaatacttagtggcatcaaatgtttgcagcagtctccataattatattcagtcccttctaatactgtatcaatgtaaatgaaataaatatattcaaattggctttttgatatgcatcaagtggcattttgttcctgtgtttaatagtgatctgtatacagctgtgcacatattgtcatcacttattctagcatcactgttaaggctgtgattatgt

SEQ ID NO: 15609 - DNA, 495 bp, Homo sapiens
ggtactttgaccattctctcctgttctataaggtttctgcagagaaatgctgttggtctaattacagattcttttatatgtgacttgctgcttacctctggctagctttagaattttctctttgtctttgacttttgaaaatttgtctgtaatatacctcagaaaagacctgtttgggttaagtctcattggggatgtttgaacttcctggatccagatgtccatatctctccacagccttgggaagttttcagctattatttcattaataggttttctatgcttttcccttctcttctccttctggaaagcccataatatgaatatttttttgcctaatggtgttccataagtactgtagcctttgttatatttatttttttctgcagaaaatatttcaaacaacccgtcttcaagttctgagattctttgttctgcttgatcaagtctctccttgaaggcctgtactgtacttttcaattaattaatcaaatt

SEQ ID NO: 15610 - DNA, 420 bp, Homo sapiens
  misc_feature (1)...(420): n = a,t,c or g
gattataggcgtgagccaccgttcccagcctgatacctttatctttattatagtcaaccttttaaattgattactcattctagaaagtcctccttctcttggcttctgaaatgacgttcttctctttgatccattgcttttcagatcttcttctgcctgatccttagatgtnganantccttaggnnnnnnnnnnnnnnnnnnnnnnnnnnnnnnnnnnnnnnnnnnnnnnnnnnnnnnnnnnnnnnnnnnnnnnnnnnnnnnnnnnnnnatgaactatgatcttgctgctgcattctaacctgggtgacacagcacagggagaccctgtctcagagaaaaacnacaacagaagantcctgcagtcttcctccaacatacatctaaagngttttcattattctgcatctcttttggcatt

SEQ ID NO: 15611 - DNA, 1669 bp, Homo sapiens
  misc_feature (1)...(1669): n = a,t,c or g
aggccccctggtgcctatcaaggaccagagtgaaggggactacatctcccagcccttcaccttttaaatatgagtggttttaaaaggaaaaaaatgaaaccaggcaacagcaacaatattctgtttttaaaatagggacaagactgttgtcactttttagacatgtatcccattccttttggctctgcaatatttggggctgtagctccttccaagcccatggtagtccctccccgagtctctcccagtagaatgcagcctcccttccctgggccccttccctctcagtgacggtgactccctgggggccttctcgtggaaacccagagggctgaggactgtggccctgggctngcgggccacggtagggtgctcctcaggactgcagcactgagatggaacctggcctcagtttaggaacaggggccacaacagggcaaggaacccaccaaccttccacattagggaatacaaccagtggggccaaattcatgtgaggcatcagacccacactgtcagcccagcaggccgggctgtgtccttcagacccagtgctgcgctagactctgactcgggactccagcttgccacgtgccctctcccctcttgaatgtactctggtcttgcagtgtgctgctgggactttcttgctcagccatcactctggtcaccttgtttgctctgggtctggctgaattttctgccctgagatctgggcataaagtggatgaaacttgaaagaccttcagtgtagatccagatggccaacctgtccttgttaagttacttgcttcttgggaatcagtgtcccctgctgagctgaaaaggaaatggattccaatctcttccaacctttaaggtgatagatagtttgagcaagactggagaatggacaacactatgaagctgtggctagaaagggactgtcatgtcccatcctttggccagattgactggggatgtccggacagatgcctgcatgggtggtgagggccacatctgcacacgagccagtggctgcttgcagttcactgctgtgatgccagagtgtgttcaaaggtgactctcctgctcttctggactcttctctcaggcaagaaaggctgcaggctgcctgctatgtgatgcctgagcacaaagccaaggaactgaactaagtctttctgttaagtcctgagtttgtcattggcaggtttacttgtggccagctctctctgcccttgggtgtctgagcaggcagaccagaagaccaggcactggacctgcatgccaaagggactggtcatctcctgaggacctgtacatgaccctgtggactgttccgcacgatccggaacccactttttattcactccccatgtctttggccttcctcttctttctctttccctctgccatcctgacactgatagtttgtcatataaattccccgggttgtgtttttttttctagaaaaaaattaaaagggaaaacaaaaccaaaaaaaccagaaaccacgaataagaatggaaatgacaatggctgcctgtcatttttctgtcacgattttcctgatttggtttgttccctttgtctcagagaagcaggagatgttgatgagggctctcttcagggagcagcccatttaggtctcttttgttgtttgttagggagaatacacatctttctt

SEQ ID NO: 15612 - DNA, 1427 bp, Homo sapiens
atccctcccaaccacctatgtaaagctaacagaataaagtcatttgaagaaattcatccttggctctttagctattatctacccccatattgaagcaaataaaaaacaatgctatccatttgctgaatttatttaaacaagtcaatttagaaataccatagaattaaacaaaacttctgacatgtaaacatactgccatgttcctgaaacagatgttaacacctgataaaagttaataatctcttgttaggaaagctgtccattaataaggccagtcttcagcaaaactaaaaccattttgttcgtttagctttcctagtctgacaacgcaatactgttgaaccacagtcaaatataatggacaacattggatggatagatcagtaccattggttacagctgttaaacaggttcgttcttggcgccacataaaaacaagccaatcacatcgaataaatcatggcttttttttctttatcacaattcactaagtgatgttaattatggtccttgtcaaacacgtttggtaaaggctatttacagtgtacatggctgagcatgcactatttatagttacaaagatacctgccagtttattacaatagaattacacagtgcctgaaaatggtgaaacatctcacacatcatttaaatcaatataatttcaagcaggaaacgttccttatttgaccacaattgcaataattacatgaaaattcttataaaaacatgaatctccttcaagaaattgatgcatattctacgcactacaggttaaggcagtaaaaaaatgtattcctgataactggaggtgttgacaatgtcaattaaagctgtctgactctagtttttcattctccatcatataccaaaagtttgtgaatgatttcatttttaaagtcaacaaagtattagtaactaagaagagttgaagctggaaaaaagtaattgctagggaagggaaaaatgtaaattggattttgcctgaaagttttcaaatcataaacaatagcattatttatgagtctaagccttaaatgtataaaacaaatacatatagttcacttttcttaatttaaaatatactgtactttgaacaattcaagtaatgtaagactatcaaaaataacttcataagccatacacaagtgtcaactgcattttcagtattttaagaactttttaaaaattgtaaactaaaccatgacagtttagttaaacaaatgataaatgactttttatttgcacttgtgatttctttaatacaaattgctaccaacaaatatgtaaagatatggcaggttatgcatttgatcaaagcactttgatttaagcataaaacagattcaaatggtacaagttctgtgcataagatccaaggaattgcttactaatctgtaggcaaccctctttctaatcagaatcct

SEQ ID NO: 15613 - DNA, 900 bp, Homo sapiens
ggaaaggaaaaccttgattgcagtggtttaaacaaacagaagattggttttccacatagcatggattctggagatgggtggctaatggtattggttcaacaactccacgaaggtaggggtcacgtcttggatccttttgccttaatctcagtgctcgttacttcatggtcccaagatggctgctgtatccccaagaatcatgtctgcgttcaaggaaggaggggtggaggaagaggaagggccaaactagctggacctgtcaccttctatcagaaagtaaaacctcgtcagaagtctgtttcctgctctctccctctgcatatcttcacttagatgcccttggcccgagccagctaccattgcacctctagctgcaaacaaagctaagacagcagggaacagaattgtcatggctgaatagaccaatcgtgttccatctactgagactggcacactgcctcctgcaataaaactgggatcccattaccaagagagaaatgcagaattgtgtaccagttagcttttgctgtgtaacaaaccatccccaaacttggcagctagaaacaaaccctgtattttcccacaatcctatgggttggcaatttgggctgggctcaacagggcagttctgctgctcacacctgggatccctcatggagctaaggtcagctgttacctcagctgggcctggatggtctaggatagccttactcacttgcctggcaggtgacaggctgttggctggaattgcttggttctcctccatgtggcctctccagcaggctagctcaggcttattcacatgatggcttcaggattccaaagagagtgagagtagaagctgaaagacttcttgagttcttggcctggaactgggactaggacaggtgtcacttctgg

SEQ ID NO: 15614 - DNA, 834 bp, Homo sapiens
gggctacaaatgcttgactcagtgatgcagaacctttcagagttagctggaagccacagccctgcctcttgatgcagcctggatccagccggtgtgaagaggagaccccttccctcttgtggggtttggatcctgtgtttctagcctttgcaaaactctacatcagggatatcctggacatgaaggagtcccgccaggtgccaggtgtatttttgtacaatggacatccaataaaacaggtagatgtcttgggaactgtcattggagtgagagaaagagatgctttctacagttatggagtggatgacagcactggagttataaactgcatctgctggaaaaagttgaatactgagtctgtatcagctgctccaagtgcagcaagagagctcagcttaacctcacaacttaagaagctacaagagaccattgagcagaaaacaaagatagagatcggggacacgatccgagtcagaggcagtatccgcacatacagagaagagcgagagattcatgccaccgcttactataaagtggacgacccagtgtggaacattcaaattgcaaggatgcttgagctgcccactatctacaggaaagtttatgaccagccttttcacagctcagccctagagaaagaagaggcactaagcaatccaggcgccctggacctccccagtctcacgagtttgctgagtgaaaaagccaaagaattcctcatggagaacagagtgcagagcttttaccagcaggagctggaaatggtggagtctttgctgtcccttgccaatcagcctgtgattcacagtgcctgctccgaccaagtgaatttta

SEQ ID NO: 15615 - DNA, 663 bp, Homo sapiens
gtcgccccagcaaccaagtcgcacctggagctgtcctagcgcctagttctctcccggccgcagagctggccgcccagggggagtcgcagagtttggaagatctctctaacacctctcggccaacttcagaagtgtataagatcagctttatctttccaaatggagacaagtatgatggtgactgtacaagaacatcttctggaatctacgagagaaatggaataggtattcataccactcctaatgggattgtctacacaggaagctggaaagatgacaagatgaatggttttggaagacttgagcatttttcaggagcagtatatgaaggacaatttaaggataatatgtttcatggactggggacttacacattcccaaatggggcaaagtatactggaaatttcaatgaaaatagggtggaaggtgaaggggaatatactgatatccaaggactagaatggagtggtaactttcattttacagctgctccagacctgaaattaaagcttcacatgtagatgtgatgttaaattaaagttgaaatgtagtaattgaagcttttagttgtaaggaaagcaacttaatctgttatttgaaatgacttcatacactacccctataagtttgccaataaaaccatcacctgcttacaaaaaaaaa

SEQ ID NO: 15616 - DNA, 428 bp, Homo sapiens
ttcaaaggctcagtctcagtggggctcccagggtcaaatagtactctgggctgcagtgactagagcagtcttaggggcagaagtccctgattgctggtgtacagggttagggatctggtttagtgctgggagcttggtttcctgtctgccacggtaccactgatggcaccactctttcttccttgccttaagtccagagtcccaggccttttggacaagagatcctctcccttcatccccattcaggaactttcactggccagagacccttgctctgcttaagagaatcagggcccaacaagtttttactctttgttttcctggcctcccagggtttagtaaaatcaccaaccgcctgaccatccaaaggaagagccagttcatgcagaggctgcacagctactggacactgaagcggcagtcaccga

SEQ ID NO: 15617 - DNA, 534 bp, Homo sapiens
cggaaagcacccaggtaaccgggcaaccagatcaagaaacagaacaccccaggaagcaccacctcatgcccccttctggttactgtcttcttaggactgatctctacttggcaaccgcatggatgaattttgctgggttttaaactttatataaatggaatcctatggtgcatttttgccttatctcgttcaacactagggttggtgaatacactccaagttgggggtggagttgcagctcattcccattgcagtctgggattccatcgtgtgaatataccctaatgtgcttatccagccaacatgggcattgggggtgctttcctgttcggggttattatggagagtgtttttgtgaagatttagagcatgtctctggatgaacacatgtacacatttctgtagggtatacacctaggggtggaattgttaggtcatatatatttacatccaactcaagctctttcatgaaagaagaaagaatgtactggatggagtttgctggctcaaagaattgacagaaaactagaaggg

SEQ ID NO: 15618 - DNA, 1096 bp, Homo sapiens
  misc_feature (1)...(1096): n = a,t,c or g
gcaggcaagtcccaggccccaggccaaggcaaaattaaaattgctaatgaagttttgggcaccactgtcattgataacatcttatcaggaagacaggggtttgagagcagacaactggtctgaccaaaatttattaggcgggaatttcctcttcctaataagcctgggagcgctatgggagactggggtttatttcatccctacagtctcgaccatagaagatggccacacccaaggaggccatttcagaggcctaccctcaggggtgcattctctttctcagggatgttccttgctgagaaaaagaattcagcgatatttctcccatttgcttttgaaagaagagaaatatgactctgttctgcccggctcactgttggtcagagtttaaggttatctctcttattccctgaacaattgctgttatcctgttcttttttcaaggtgcccagatttgatattgctcaaacacacatgctgtacaatttgtgcagttaatgcaatcatcacagggtcctgaggcgacatacatccttctcggctgacaggattaagagattaaagtatatatatgcataggaaatcacaagggtattgattggggaagtgatgtgtccatgaaatcttcacaatttatgtttagagatgcnnnnnnnnnnnnnnnnnnnnnnnnnnnnnnnnnnnnnnnnnngaactaataaatgtcccatgaaaccttcacaacccatgtttttcctgccatggcttcagccagtcccccccgtttggggtccctgacttcctgcaacaatgtcctgcaggaaaagttttttctttatatccagtttttacatgatgaattatttcccaatatttcatagtttatgaggctgaattcctcttgaatttattaaatgcttccttcacatcctctgtgatgatcatgtttatttactgataaaactcaatacctagaactgcacctagctcatgatggtacctaataaatacttcaatgaaatgatgtggtgatgcatgcctatagttttagctacttgggagggtgcctgancccaggggttctagaccagcttaggcaacatagcaagcccccatc

SEQ ID NO: 15619 - DNA, 543 bp, Homo sapiens
ggcccggtgagtggcccctgctggaccgtggatcccgggcgggcgtgcgggcggcagcgtacgaggccttctactcgcccgggtgtccggtgcctcgcttctccctgggaccctgtcgtcaacatcgaggtctccaacaccaccttgctttggtgccgggcccactgactgtcctcggtgtatagtgcgaccgaatctccatcatcccgtcctcagtgtacaggatgccccagcgcccccaaccgtctccctcagcattcagggtccccaaatcctaatgccttgtcctgagcttcacagccccacattcacctgttcttggcctgccagtgagcttctaccatcatggacctattgttcgggcgccggaagacgccagaggagctactgcggcagaaccagagggccctgaaccgtgccatgcgggacatggaccgcgagcgacagaaactagagacccaggagaagaaaatcattgcagacattaagaagattgccaagcaagggcagattgatgctggtcgcatcatggcaaaagacttg

SEQ ID NO: 15620 - DNA, 306 bp, Homo sapiens
tttccctggaggagattgataagaacctgaagtcgctggagcggtgccagtccctggaggagattcagcggctgtatgaagcaggcaacctttgccagtaatgagaagtgatgctcgtggcagtgctgaatctctctgaatatgattcgaattgcagccttaaatgccagctccaccattgaggatgatcatgaaggaagctttaaaagtcacaaaacccagacaaaggaggctcaggaagcagaggcttttgcattgtaccacaaggcccttgatctgcagaaacatgaccggttttgaggagtt

SEQ ID NO: 15621 - DNA, 713 bp, Homo sapiens
aaaatggttttcaccaggctgaagtcttgtcagtgcggctttgtttctccacggaggctctggggcagaatccaatgccttttccagctcctccaggggccacctcatcgcctggccccaggccttcttgccatcttcacagccagaagcttccttgcttcatgcgcagaccctcgtgactccccttcccttataagggcccccatgattactcagggcccacctcaaccatccacggtcatctccccaccacgaaatcctgaactgaagcacaggcgccgggtcccttttgccacgcaaggtaacactttcccacgtcctggggttccaaacctggacatctctgggggctgttattccacccaccgtcatcagtgaggcgccttcaggaggggctgtgaggtcacgtgaggtcggcttcagaagggctaggtttgagtgcctggaggacactggcaggaggcgcccctgggctccatccatttaccacgcacgcactcagcacccctgagaccatccctggggcctacaggagaaccctgtacctcagcagccctgaaacctgctttccacttccggacctttctgaaatcaagacgcatctttagatcaatggcatcttactgtgtcaccggcaggcctcttctttcttagtgacgtttaaaggaaggtatcttacccctgatggcttcttggagtgaatgaaattccgg

SEQ ID NO: 15622 - DNA, 327 bp, Homo sapiens
  misc_feature (1)...(327): n = a,t,c or g
gtccctctgacctaatgtccagcagggcaagagctcaatgcctggatgtcacctccagggcctcagcaactgtgcatctctgctcaggctaccaaacaaaacaccccagacttcgtggcttaaacnnnnnnnnnnnnnnnnnnnnnnnnnnnnnnnnnnnnnnnnnnnnnnnnnnnnnnnnnnnnnnnnnnnnnnnnnnnnnnnnnnnnnnnnnnnnnnnnnnnnnnnnnnnnnnnggccgagagctcacgtgacggagacagcgcactctctggggtctcctcctgtgaggacactaatcctagcgtcgacgcggccgcgaattcc

SEQ ID NO: 15623 - DNA, 764 bp, Homo sapiens
tttttttttttttttttttcacactgcaaaacaactttttatttaaaaggccaataatgagaataatgagttgcacaagaatgaaaaccttatcccttccaaaagatcggcctatacattatgtataaagttagaataattctaaatacaaaatgccaaaggaccagcgggtccactccttcctctcctaagccatcttgacagtttcacatttcagcttccagacgtcatttctgttgcttttaagggtgcttacccagccgtggtctgtaccagacagggtagttggcacagcgtaggcactgccagcaggcccttgggagcttggcgaggtgggagccttgagaaatagctggctcggacccatggcggggtttgtgtgtcaactccctggtcctcagagaatccgagccacgggagagcaaacgctgcttccaaaaccaaaggaggaattttgcaatcgtttagacgggttataatagaatctcattcagatcttgaaggttatcggtgctttctgcaggtttttattcctcaaaaatgcagccaagctttgctgtgcttatcttggtggatctgagctaggttgggctatcttttcctaattcaattgccttttttttgcaaggaagggggtttctggtccatcggagggatcaagggcatggtcctcacgtctcgtcaggagacaaaaatagacattcagcagacagaccacagccatgcgcattgcgaccagcgtcgtttggctattttagtctctt

SEQ ID NO: 15624 - DNA, 367 bp, Homo sapiens
ggggatgtttccttatttttcaggtggccaagagcatgcttttctgatttataactattattagccaccccttacagggtattttttacctagttattatacaccaaagctctcttacaatgcggagtaatttctgataccgcaaaactcaaaaccatcagataatgcaaaacagaacagagcctttgattttgagagggaactatttgcttttaatttctggggtttcatgaggaaaacaggtttttccccaaaacagggtctgtggcacctcctctatttttcccaaggagtcccatgctacccagaagttatctcagggcctttcatgcatgcactaagagtggcaagacaaaaaaaaaaaaaa

SEQ ID NO: 15625 - DNA, 430 bp, Homo sapiens
ggcacagtagtactgaagggaggagaggtgctgcttccgccggccgcggccacctcttttccgacttcggtcttcaccttctcattctcctttttcttaggcagcctgctgtattttgccattgagaggtcatgctcattgctagcgagtccaaatagatcctttaaagtgcttacttctgtgagatccttttctcggaattgtatgataggtagaaccattgtgtctgccaactgtttagccagctctgtatggagaagattaagctcatccaccactttggaaaaatagtggagtgttgaaattacttcttcatcacctttgccaagagcaaagttctgtttttcatatgccagcagttgcttagaaagctgttgtgtggccaggcacatctcattctgggctccatagaccgctgcattgctggagc

SEQ ID NO: 15626 - DNA, 157 bp, Homo sapiens
gaatttttggtcaaaagtcaaaatagtattaggaatattgaaattattgatagctttcataatctcagcttttttgaacttccacaatttttggaatatgtcataatttttttccctgtttcaaatgtgttcagaggaaatagaatgtaaaacatca

SEQ ID NO: 15627 - DNA, 395 bp, Homo sapiens
  misc_feature (1)...(395): n = a,t,c or g
ggataggaaattccatactactaatttgacctttcttagtgaaaacaaacatcttctgtttaaccaacttgagtgtatcatttgtacaaaataggatttttggtaaagatcattaatgatgtannnnnnnnnnnnnnnnnnnnnnnnnnnnnnnnnnnnnnnnnnnnnnnnnngaactcttnnnnnnnnnnnnnnnnnnnnnnnnnnnnnnnnnnnnnnnnnnnnnnnnnnnnnnnnnnnnnnnncatgtatcactttgtatgaacatgtttccggtgtaagtatctgggagtggaactgttgcaaatttatgtttaacattttgaggaattgccaaatttttctcccctaaagtggntgtaccattttgtattcctatcagaaatatatggggc

SEQ ID NO: 15628 - DNA, 318 bp, Homo sapiens
tggatgccaagaggctgcccaagccctccaaggtcaccctccctagagcattccagttaagactggactgggctcgtactgccgggtcaggagacttgatttcaggaaacaaagtccaactctgggcaggagagggtagaaaagtcaaagggcaagagcctagagacacttctacttctcaccacattaaaaaagacacattttgttttcatacatcatcatttgtgggggaaaaaatctttaaaatctcacccctataaacaagaccctgtcaagctctgattggagaaatggaaatacatggcaacctttccagga

SEQ ID NO: 15629 - DNA, 634 bp, Homo sapiens
  misc_feature (1)...(634): n = a,t,c or g
gctccggagctggtgggccanccggccgtacacttgaagcgtgacttcttcctggccaatgcgtctcgggcgcgctcagagcagttcatcaacctgcganaggtcagcacccgcttccgcctgccacccggggagtatgtggtggtgccctccaccttcgagcccaacaaggagggcgacttcgtgctgcgcttcttctcagagaanagtgctgggactgtggagctggatgaccagatccaggccaatctccccgatgagcaagtgctctcagaagaggagattgacgagaacttcaaggccctcttcaggcagctggcaggggaggacatggagatcagcgtgaaggagttgcggacaatcctcaataggatcatcagcaaacacaaagacctgcggaccaanggcttcancctanantcgtgccgcancatggtgaacccaatggnacttattggaaatgggaaactgggccnggggggtttaaaaacccgtgnggaacccaaatccggaantacctngtcaanttccggaattttgcctggnggncnantttgaaaatttcgtttncnncctggngcnggnnaaaaacaanttccgattttcaaaactctggganaaaaangggtngggt

SEQ ID NO: 15630 - DNA, 3461 bp, Homo sapiens
  misc_feature (1)...(3461): n = a,t,c or g
gaatgagtagttttcaacgtaatctgtttattctggcctataattacaaaatggaacagatttcaaaaggacgtaatactccactgtgcgacagctttgttttccggaaagttcgaagcttgctagggggaaatattcgtctcctgttgtgtggtggcgctccactttctgcaaccacgcagcgattcatgaacatctgtttctgctgtcctgttggtcagggatacgggctcactgaatctgctggggctggaacaatttccgaagtgtgggactacaatactggcagagtgggagcaccattagtttgctgtgaaatcaaattaaaaaactgggaggaaggtggatactttaatactgataagccacaccccaggggtgaaattcttattgggggccaaagtgtgacaatggggtactacaaaaatgaagcaaaaacaaaagctgatttctttgaagatgaaaatggacaaaggtggctctgtactggggatattggagagtttgaacccgatggatgcttaaagattattgatcgtaaaaaggaccttgtaaaactacaggcaggggaatatgtttctcttgggaaagtagaggcagctttgaagaatcttccactagtagataacatttgtgcatatgcaaacagttatcattcttatgtcattggatttgttgtgccaaatcaaaaggaactaactgaactagctcgaaagaaaggacttaaagggacttgggaggagctgtgtaacagtttgtgaaatggaaaatgaggtacttaaagtgctttccgaagctgctatttcagcaagtctggaaaagtttgaaattccagtaaaaattcgtttgagtcctgaacccgtggacccctgaaactggtctggtgacagatgccttcaagctgaaacgcaaagagcttaaaacacattaccaggcggacattgagcgaatgtatggaagaaaataattattctcttctggcatcagtttgctacagtgagctcagatcaaataggaaaatacttgaaatgcatgtctcaagctgcaaggcaaactcccattcctccatattaaactattacttctcatgacgtcaccatttttaactgacaggattagtaaaacattaagacagcaaacttgtgtctgtctcttctttcattttccccgccaccaacttactttaccacctatgactgtacttgtcagtatgagaatttttctgaatcatattggggaagcagtgattttaaaacctcaagtttttaaacatgatttatatgttctgtataatgttcagtttgtaactttttaaaagtttggatgtatagagggataaataggaaatataagaattggttatttgggggcttttttacttactgtatttaaaaatacaagggtattgatatgaaattatgtaaatttcaaatgcttatgaatcaaatcattgttgaacaaaagatttgttgctgtgtaattattgtcttgtatgcatttgagagaaataaatatacccatacttatgttttaagaagttgagatcttgtgaatatatgcctgtcagtgtcttctttatatatttattttttattagaaaaaatgaagtttggttggtgatgcatgaaacaaaatagcaagagagggttatagtttaatagtaagggagataacacagcatgtgtagcaccagttgataattggtctctagtagcttactgtcaaaatgttcaatgaagtcttctgttcatctgttgaaactaggaaaatacccaaacttaaatggaagaattctgaaagagaggatagaatttaaagaacaagagtatataaagttattctttgaatatttcattgactatatgtacattgagttatctatatttgtaaacaaattagtcatggaaaattattctatcccaaagtctccttttagtctagataatcattatttcattttaaaattagtgtttttcatagtttgcactgatgcgtgtatggatgtgtgtgagtcagtggtagcttatttaaaaagcaccttatcctttctcccataacctttgtacactaaaaaatgaaagaatttagaatgtatttgatgatagcattctcactaagacacatgagaatttaactttataaccgcgtgagttaagatttaattcataggttttgatgtcattgttgaagttatttgtaattcagaaaccttgcttgtgtgatacatagtaagtctcttcatttattactgcttgtctgttgttatatctggattatcaaaagcaatagtgcaccaattaagatgtgctcaaatcaggacttaaatcataggcaccacatttttcatgtcagactagttactttgttgattctcagttactgtaggcatcaaaaggcaaaatcaaaaaaaaaaaancnaaaaccaannaaaaaaaaaangaacctaggtctgtgtaaagtaaggggagtgttaggagcagccaggactgtgtagtgtgtgtttggttgcatcacaaacatcgtatgtggagacattgcaatacagtgttttttgttttcaacttttcttgtattcttgtatatttgtattatgttttgaatgcttttctcttttcataattaaatattaatgtttgggataactgccaagaagaagtaaaaatattgaatggaacttctatatgaggatgctgtgatctaaaaattaaatctcagtgggcggagagaatttgtttctgatgccttgtctttagaataattgtttgctttcagatgattaaaaaaaggagattgtatctaggaaaaaagtgtgaatgcttcaaaggagagatactgataattgtgacttgaaatagtgtcagatgaattatgtagctgatcactgatggaaccatctaatgaggcaggcttaaactctatttagtttcgtttgttttctcatatgaagtttataattcctttcagtcctaaaatgtcagatgccaggtgtcaaatgccacagtagaacgtgaaattaagtagagtccccttttaaacaaatttctctgtaagcaaaactatctttagtgacttaaaaaataatatcctctaaaattaccctttcaagaggaaaaaactgttcaatgaaaaaaccactcaattatgactcatataagaaatactggtttaaccaggagatatttggggagcaaaattttaaggaatttcaaattgctaaatctaatacaaatatctgacaataagatacagatctaaaagaatggttcttaagaacctattgtttactgggaataaactaagctctatgaagaattcgtaagcattacatgttccagtaagtttagcaacttagagccaagactggtggccacctccatttatttccccactgctcctccactgacatccttcttagcagaaacttcatgaaaaagtttttgctgacacagaacaaacctgaa

SEQ ID NO: 15631 - DNA, 1188 bp, Homo sapiens
tttttttttttttgagtgagcccgctagtttattcaatactaggaataagccggtataaaatacatttttagaaaattcacttggagataaaaaatcttgtccccactcctcccccaatcccacacatctgtgctcttctgcctgagttaattcagctttgctgaggcctcctgcaagagcttgagcagggggtcgtcagccctgagggaaaaggtgagcgtgcgctgctggtagtgcctagggtcacactccaagttctcgatcacctcagccagcaggtgggcccgttcaggcctgaggccgggggcctcgaagcccaggggcggtgaagtggcacatgcaggtggtagtaggagggcaggtagtgcaggtatactcgcagatgggtctcccttcatccggtagccgttgcaggatggcctcctgcccctggtggaggatgttcctgagcagcggcaagtgctccggagtaaggtcgcgtagggatctgatgccccggcgatggcagatggcgatcaagtacaagtcatcgagctgctgttggttccacttgaggtcagggatgaggacaaaaccatcagagggatctgggttctcgaaaacaatccggtcccgcttcagcccttcttgtcgagaatgttatacacccactggatgctgaggctctgggactcccaggtggggtaaagtaatattcctgtagtcatctcccgtctctcggatcaggcggaggtccctggcgcaggtacttctgcaggtgtttctctgtggcagggtaaaccacggtcgtctttacatcattcagttgtcttggagggaacaagtgataggtgctgtagatatcattggagaactgcaattggagctcagggctgcccgtcaggagctgagcccacctgttccacctgaaatggcgtcttctccaggatcacaacggcatcctctccatccccatccccagaggcctcattcaccttcccgtgtagaaaaatgattttgtcccgcgcagactccctcagcaccttctgcagtctgaagccggagaacggtaagcggacaggagcacaggtaccatttccaactcctgcctccttttcctctgtgctggcggcgtgggcctcctccacgtccaattcgcgcttcctcttgcctagttgaggagctgcgtccgccatgctgcctcgtgc

SEQ ID NO: 15632 - DNA, 466 bp, Homo sapiens
gtgacactgtacccatacaccagccagaaggacaatgagctctccttctctgagggcactgtcatctgtgtcactcgccgctactccgatggctggtgcgagggcgtcagctcagaggggactggattcttccctgggaactatgtggagcccagctgctgactgcccagggctctctgggcagctgatgtctgcactgagtgggtttcatgagccccaagccaaaaccagctccagtcacagctggactgggtctgcccacctcttgggctgtgagctgtgttctgtccttcctcccatcggagggagaaggggtcctggggagagagaatttatccagaggcctgctgcagatggggaagagctggaaaccaagaagtttgtcaacagaggacccctactccatgcaggacagggtctcctgctgcaagtcccaactttgaataaaacagatgatgtcctgtga

SEQ ID NO: 15633 - DNA, 2015 bp, Homo sapiens
taacgttctgcatttaatttctgccagggagacacttttgctcaccagcaagaacacagcccgaggaagggacccaataacctttcaaaatgcaaactgctgcctgcggtgagggcccagggtcctccacggagaggacaggcatcttcctttcccaccaggaaggagtcagcctggagcctctgctatgtgcaaggcggtgtgcaagcacacggcttgcagctctttgctgtctcttctttctctttggggctggactgggtgtgcgttctggtgctgatgctttgggccctgtgagggctgagctagagaagtgtagatgttagatgtgccagtaccatcctgcgcctcccaaggcattgcccccacttcacttcacatcgggcatctcgacccgtttcaattacagcaacgaagaaggccacgctaagcgtgggtcttgggggaagcccggaggcagtgctcggcacccgggaacgtgctcaggcctcggtggggccgggcaggcagggcgggagctacgctgaaggcgcccgggttctgctgcagcgcatctggtaccatgtcttcattctcctcctggcagagggagcacatggagtagacgagccgctgcagggaagggaaagtgagcgcgtggcacagggctcgctgctggaaccctgccagggcatgcagacgcaccgggctaggtgtccctgccccgggatcctccagctgtctgctcggcatacccgagccaccgcaggaaggatccagcaggatgtagtggacctcatggtagcgtggatccgagggggagaccgccaggaagtcctcctcagccagttcacagcaagagacgccagcccgggccagcagcgtggcccatggatgccagccgcttggcatccaggtcaaaggcaaagatcttcccttggttcttcagaagagcagccaagtgactggtcttatttcctggggcggcacaggccatcgatgacatgggagcctggcgggggtccagcagcatggctgggagacagctggccctgtcctgcagaatgaggtgtccggcccggtacagtgggtgttcatgcagatctgtctgggcgggaaacaccagcagctccggcatcaaggggtccaggagaaaatgcttccccttgagggctcgtaagtcatcgaggctgccagggaagaaccattcattcatcatttcctgaatttctccctgccaggccctatttcaacggtccattcatgcaacaaatgttaccacagctatggagaaatcaacagggtgataagggaatccgggatccgcagttgagggaatgggttgtcaagccagacttatgggtcaggagccccctctactgtttaccagcagtgggagcctgggcaagtgattcaatctcaagccccactggcatctctgtaaaatagtaggtgtgaggattcaatgagccaatatatccaagatacttacgtgccacaatttaataaatgttagctattcctgttgaagcataaccttggagaaaggttactttacaggggggtgaggagtggggaagtgagagctgagctcattcttgatggatgaggagttagtcatgtgaggcgcttaggttaaaactacattcactataactcagtaaagcagtcccgcccactctccgacccatgcagaaataggcctagagagtcacatgtctcagttcagaaatctatcgaagtggcagagctggaattcaaacacaagcagccgttctctgctattccaccctggtgtccaagcaacatggtagggcagaaggaagaggatcttacaaagagtaagggaaagggagaggggcagaggctgcttctcagagccaccaaaggacaaaataagacaggtgtgagcccagtggaggaggcacggggcagagaccagccactgttgctggcacgctggtgcacgtagcactgtggcagatggacctggagaggaagcaggagggacagcacaatggagccaagaaaggacc

SEQ ID NO: 15634 - DNA, 306 bp, Homo sapiens
ataaaacctttagagaatccaataatagtaataacatcctaccactgaatgaacgcctacacccagtgagaaagcaaaaaagagaaagagaaatgagagtcagtgtgaaagacagagaataaatgaatgaaagaaaagaaaagataaagaagctggactgccattacagctttccatttcagtaaccttgtattagtaatcaatcataccactatgcatattgcaaatatttacttgctaggtcagcattatgacacaggtcttgactttcctgggtttctctttagaagcctatttgaaaacaac

SEQ ID NO: 15635 - DNA, 379 bp, Homo sapiens
caaagtccaagagatgaattatattcagaaaactctgttcaagatagggtatgattacaaattggaacagatcaaaaagggatatgatgcacctctttgcaatctgttactgtttaaaaaggtcaaggccctgctgggagggaatgtccgcatgatgctgtctggaggggccccgctatctcctcagacacaccgattcatgaatgtctgcttctgctgcccaattggccagggttatggactgacagaatcatgtggtgctgggacagttactgaagtaactgactatactactggcagagttggagcagctcttatttgctgtgaaattaagctaaaagactggcaagaaggcggttatacaattaatgacaagcca

SEQ ID NO: 15636 - DNA, 582 bp, Homo sapiens
cggcacgagattcttaatgctaattttagcaccttttatttattgggttttttctggcataaaaagtaaagccttttaattgaatcatgccacctatatgcctatattattaatcctatgtgtaaaaaaaatgtacagctttttttgggtttgttttggggtttggaagggccgggttattttttatttcctgtttcagtttttgtgcatagactttcacaatagctccaaggcagggacagcgggtttgggggttgggagggcagtttttggaatgtaaatttaggacttttaaaaaggtgcgcacagcttctgataaatttataactagacttaacctaatcatgtctcgttccagttctcttttctctgagcccttttcaaagtctcctctctttctcctgtcatccttttcctttcctgtccgtgtatctccgtttcttcaacatgacaagcatacagacttgaacacccctccggtgttcttccgagaactgtgaagtccatgttcatccaaatgtaaccaaaaaagaagtcacccctacatgtctgaaaaactggttggcttctcctctggaactt

SEQ ID NO: 15637 - DNA, 397 bp, Homo sapiens
cctattgtcctcagccctcactagagtcctagatacgcaccgttttattttctttttttggtgtaaagattcagttaaaaaatatcttccttcagacatctgctgactacaggaaattattgtcatagcccatgtgaaggtcataatgagactaagatgacgttttaaaactcctgaactctgtagggaaaagcaagtagaagctattattcttactcgctggtaacatactgtagatagctccaggactgagacccgaggcccggaggacacacttagtgttctccctatgtcacagtcctacaggccagcaaaagtgagtacaactgtcccagcatgtcagttacacatactggccctaaatgttcagcataatttaaaagggaaagaaaaaagt

SEQ ID NO: 15638 - DNA, 873 bp, Homo sapiens
aatgaagtctacatttagccgtcggttttatctttcttaaatctttgacctaaacttttgtaagagcagctaataatttctaagattttccctgtttctttttcctacctttccttttctcataactgattggagaaattaatcagaagtcaaatacaagggacttcataatctagaaaccagataatcagctcccaagtcatgtagctaactatgcatttaaaataagtctgtctctttagttcttaagtcatatatttgtttgttaattacagtaaatgaactttaattggggtttttaaaagacagaattagcgaagtctaatttttataatgaaataagtttttgatattgctctacttggacgattttagtgaccaaaactatggataaaactgcctaagcataacattaatatatttagaatggcattcttcagtgctagtatttgaaattggaattagtacattgtgcattcttagtagtctttatccctagaatcaattctctcagcatcaccaaactgaattggtgaaatagtgctaagattctgggcaataggaagattagtgaatatgatacattgattccagggtgccagggattggctgacattaaggaccagctggctatggtcctcaggctacggtcctcagtattctagtatttgagtagtggaggtaaatccaaaggcgactggttatattttacttctaaatgtgtgctgaagtgtctcttgttcaaaaattctttgatatttagagcttcaagttaccacatttaaaagtaaagactttgcacggtggcacacacctataatcttagcacttttggggaggccccagtggatggtccaatgcagtcaggatttt

SEQ ID NO: 15639 - DNA, 592 bp, Homo sapiens
gactagttctagatcgcgagccgccgcccaggaaggggatgcggaaacccctggctcggtggagcggagaggcaggcgggcaggagcgaggacggcatgtcccaggccccgggagcacagccgagcccacccaccgtgtaccacgaacggcagcgcctggagctgtgtgctgtccacgccctcaacaacgttctgcagcagcagctctttagccaggaggctgccgatgagatctgcaagaggttggccccagactcccggctgaaccctcatcgcagcctcctgggcaccggcaactatgatgtcaatgtgatcatggccgctctgcaggggctgggcctggccgccgtgtggtgggacaggaggaggcccctgtcccaagctggccctgccccaggtactgggcgtgatcctgaacctgccctcgcccgtgtcgctggggctgctgtcactgccgctgcgccggcggaacttgggtggccctgcgccaggttggacggtgtctactacaacctggactccaagctgcgggcgcccgaggccctgggggattgaggacggatcagggggccttcctgtgcagctgcgttgg

SEQ ID NO: 15640 - DNA, 1248 bp, Homo sapiens
cgcggacctgcagccatggcagtcaccgcccaggcagcccgcaggaaggagcgcgtcctctgcctgtttgacgtggacgggaccctcacgccggctcgccagaaaattgaccctgaggtggccgccttcctgcagaagctacgaagtagagtgcagatcggtgtggtgggcggctctgactactgtaagatcgctgagcagctgggtgacggggatgaagtcattgagaagtttgattatgtgtttgccgagaacgggacggtgcagtataagcacggacgactgctctccaagcagaccatccagaaccacctgggggaggagctgctgcaggacttgatcaacttctgcctcagctacatggccctgctcaggctgcccaagaagcgtggaaccttcatcgagttccggaatggcatgctgaacatctcgcccatcggccggagctgcaccctggaggagaggatcgagttctccgaactggacaagaaagagaagatccgggagaagttcgtggaagccctgaaaacagagtttgctggcaaagggctgaggttctctcgaggaggcatgatcagctttgacgtcttccccgagggctgggacaagcgctactgcctggatagcctggaccaggacagcttcgacaccatccacttctttgggaacgagactagccctggtgggaacgactttgagatctttgccgacccccggactgttggccacagcgtggtgtctcctcaggacacggtgcagcgatgccgggagattttcttcccagagacagctcatgaggcgtgaccggggcccacatctgtgtgtcgtgacttctgaagagtttggcctaggcctaaagagaggtcctggtgttggatagatgccagggcccctcctctggcccaggacgcctgctgcaagcccacccagatggggccagagtctgtgtggacaaccgtccccagccagtctgctcctagtggcactggcttcgtcctcccagggcccagagtgttccccatgctccacctggtggcccaggccacagctgctgcttgtatttcggtacagaagaggtttctttctgcaccaggaggaggcgtgctcaagtatcggtacgagatctagcctgccctgcctgcctgccctgggcgatgaggtacggtggggaaggtgcctattttagagaactttgtcacagtattaaagttcccagaacaaaaaaaaaaaaaaaaaactcgagactag

SEQ ID NO: 15641 - DNA, 395 bp, Homo sapiens
ggcggtgtggaaaaagtatgtcggcaagtcagctggtttcccagtgcaggacgcgctgacagctcgagtgagcggactgcccaggacttcggaactagacgagttctgtagaaatcctgtcaaagaatatgaagaaaaacagagaaagattctgcaatagagagagagaatttgtatataaatttaaagtaggaagtcagtgcttagaactgagagtgccactcaaatttcctgttcaagagaatgccagtcatttgcatggacgtctgatgctgctgcacagtttaccgtgctttatagaaaaagacttaaaagaagctctgactcagtttatagaagaaagaatccctcagcgagttatgatagagatgctgaagcatcccctggcagctgtg

SEQ ID NO: 15642 - DNA, 1497 bp, Homo sapiens
ccacgcgtccgggcgagaggactgagtgtgctgagcccccccgggacgaacccccggctgatggagctctgaagcgggcagaggagctcaagactcaggccaatgactacttcaaagccaaggactacgagaacgccatcaagttctacagccaggccatcgagctgaaccccagcaatgccatctactatggcaaccgcagcctggcctacctgcgcactgagtgctatggctacgcgctgggagacgccacgcgggccattgagctggacaagaagtacatcaagggttattaccgccgggcctgccagcaacatggcactgggcaagttccgggccgcgctgcgagactacgagacggtggtcaaggtgaagccccatgacaaggatgccaaaatgaaataccaggagtgcaacaagatcgtgaagcagaaggcctttgagcgggccatcgcgggcgacgagcacaagcgctccgtggtggactcgctggacatcgagagcatgaccattgaggatgagtacagcggacccaagcttgaagacggcaaagtgacaatcagtttcatgaaggagctcatgcagtggtacaaggaccagaagaaactgcaccggaaatgtgcctaccagattctggtacaggtcaaagaggtcctctccaagctgagcacgctcgtggaaaccacactcaaagagacagagaagattacagtatgtggggacacccatggccagttctatgacctcctcaacatattcgagctcaacggtttaccctcggagaccaacccctatatatttaatggtgactttgtggaccgaggctccttctctgtagaagtgatcctcacccttttcggcttcaagctcctgtacccagatcactttcacctccttcgaggcaaccacgagacagacaacatgaaccagatctacggtttcgagggtgaggtgaaggccaagtacacagcccagatgtacgagctctttagcgaggtgttcgagtgggctcccgttggcccagtgcatcaacggcaaagtgctgatcatgcacggaggcctgttcagtgaagacgggtgtcaccctggatgacatccggaaaattgagcggaatcgacaacccccagattcagggcccatgtgtgacctgctctggtcagatccacagccacagaacgggcgctcgatcagcaagcggggcgtgacgtgtcagtttgggcctgacgtcaccaaggccttcttggaagagaacaacctggactatatcatccgcagccacgaagtcaaggccgagggctacgaggtggctcacggaggccgctgtgtcaccgtcttctctgcccccaactactgcgaccagatggggaacaaagcctcctacatccacctccagggctctgacctacggcctcagttcaaccagttcacagcagtgcctcatcccaacgtcaaggcccatggcctatgccaacacgctgctgcagctaggaatgatg

SEQ ID NO: 15643 - DNA, 238 bp, Homo sapiens
gataaaactttgtttaaaaaaagcaggagaatgatcagcattaaaggatgaattgtgtttatttttaaaggagaagagatggaatagttagtggcctgaggactcataaggtaggcttctggggagttgacaatgttctggttcttggtttgagtgatgggtaaactgaatatttgctttgataaatcctgaccacatgttatcactttgggtcgttctttatgaatggtaatttttc

SEQ ID NO: 15644 - DNA, 739 bp, Homo sapiens
tttttccaatttttccaataatctgctttattagggccatcacaataaaagtttggggcaagaagccatgcataaagtgtttctaaagtagtgaatgttttctgttctgtatctttttttcttcttataatttctttacaaatgtcagatatttctcttcatatttttgttctaggcttctgtgcgacgatagtccatttttttaatttgttttaactgacaaaaattatatatatttatcatgtataacattgttttggaatatgtaagttgtggaatagttaaattgagctaattacacattatttcatatgcttatcattagatattccattttaatggcacttgtttttaaaaatgaaacagagttttaggcacaatagtcagttacttctggctctgctttgtggagaaaggtgtatggactgaaatctctgcactctccagataataactttctaatgctttaagataactagattgtttttaactgtctggaaattaaaagagaccttaaaaaaaattcacaagtgtaactagtgtatgtagaaataaccctaattttagggatatgcacataaaaatgacattctgatatcaaaaataacagtttcactgtcccttctcagtggctacacacctagaaaggtgccatgtgctgtcactggaagtaccacacttgcatttctgtgttgtgatgtcatgtgcagaaacccttagttagagcttgcaatttagc

SEQ ID NO: 15645 - DNA, 1333 bp, Homo sapiens
tttttttttgccctctcatcccatttattaaagaaacagtaagaaaagatacaatgcaggaaaaccaccaaccatccttgcacaccaggccgaacaaagcacagtgatttcttcccttcatcccccacccccaccctaattcccatattcccatccacatcagtttaaattttgaggttctttgattgattgggagtaccagtgaagagggagttggatgagtagaggggccttaaatctggccacctctaagtcccaggagaagggagctgcaggcccagtcagtcaagcagaaactgcattcggtgggtctttctttgaagtggttgtccatctccctgttctgtgttcaagcccccagggaaaggtatggcagtagaggatgaccaggtccaagctgcccaggtcagagctacggaagcatggtccgttcaccaacgccacgtttctagagagcagtgagctgattctccaatggtgagcaggggactacatgtgaactgggacctgcaggccaatgtatccctgaggaaaagtccacaagaacaattcaagaaactagtaagaaacaatgggcagaaagctgtgggacgaaagcacagcaggcttctgggaggctggagatcctttctctcaagggcaggattattcccacctgccacagttcacatgccacaaataacatctcaccttcagtcaagaaaaacgcaaaggaaaaagatggctcatttgaacttgagcccaagctatgttcttcagactgtagctccacaactacccttttacctaagacagcccctgccaagaaccacagtgcctagaaaccaaggtggtcctggagggaaaatggtgtttaagggggcaacattccatttgggtacattgcagccattggaccccctggtctggggaaagcagctgggtttgtgccagggaggctccccactctaggaaatgggacgaaactcttgcctgcagggccattcatccttggaaaggaagctgggttgagacccagggtcccagttggccttgtgaaaggagctgggttgatacccacagggccagctggagaagggcccagatgcccggcagctggcctggggaaagtaacttgaccagggcctaatgggccagtagaccttgggaaggtagttggacttggaccctgcatgccagtggcccttgggaagttagctgggttgtgccaagtggcccagaggctcttgggaaaatggttggatttgagccctggaggccagcggacctttggaaggtagctgggtttgatgccaatcgtgccagaagactcgagaaaatggcagatgaactc

SEQ ID NO: 15646 - DNA, 913 bp, Homo sapiens
catgttttttaaattcacatgtttgtatgagtacttttgcgaacgaggcatgaactgctaggtattattaagaatgaatgatttttgcatttaagttgtttgaaggcatgtattttgaaaaatatctgttacaaatttataatttcaagacaaattgaatcttattttataatacttttggaatttcattaataaggctaaaatttgaggaatataactaattttcagccttaagacatttaagtttggaagtccttgctattcaacagaataacaagaaaacttcagaatgtatcactctcctgaaaaggaggttattaataagcccttttatttatggttatagttttatttatagtctcaaaattcctaaagcaatgctacaaccattgaatttgccatattttgtatcagtgctgttaatttgctgttgcctcaagaaaaagtgctttttctccatggatgaggctagaccctaagaagtaattaagtcaatgtaaatcaaatggaagttttcccatgaactaagcatttattagttccctgattagactggaagaagaaaccactatttcatgaaaagcatggaatattatattttattgttcataattaatgaataaaattgatatgaatgaatatagtgttctttgaattagtaaacagtacatctgtgacaatcatttttaacaagctctacttgtgttctttataaagtgtgattttcagaaagcaaacaacacaattacaaggttgaatctgaggaaaataatccttgtgccatagaagtatttacgaaattgcatttcattgttatgttttattttctgatacatgatgttcaattttatctttaggtaatattttatatcatagattaaaatttatagtgaactttaaaaaaaaaaaaaaa

SEQ ID NO: 15647 - DNA, 853 bp, Homo sapiens
ttttttttggaagtccacaaggcattttattccacaggaagaaaaatgatgactctgatatgagaaccagactcaagagtcttcacacactggtgactgtaatagtgtttacataatagagaaccagatatttttagaattttatcaagcagctactatggtattttgaggcccagatcatacttacaaacaaagtggccctggagccttcagaacattgcgatgagcacccaccaagcagcaagacactcttgggatttggggaaggggccgcttgtctgttttccactgtgtagtgaccaggcccaggggctggggaagcactggcctggctcacccttcagtgagcacagagaagcagcgacagccagggagtgacacgggtcggccaactgtgctgggtcaagggactgggtagctttggatatctccttacccaatttactcttattccatttattttactttcctcagagacgaactgtgtgtttgaagcagaaagaaaagcagtagaaatgatcttaacaaagtcttaggcattgctggctgaatatcagtttacaaagagacggggcatttaaggagccaggggcagggcctgtttcctccaaagctttggatgttttcctggtgagaaccaggaggggatgtcaaatgcccctgaaaccttctggccttgtctggcccagggctggcaggggcaggggagagctgagaagtggagcagctcgcagttggccctcccatctcccacccagccccgccctaggtggtctttggattccattttaacatctgcctctcctaaggtgcaaatgtcaaagtgcttggttgtgcaatcacaggagatggg

SEQ ID NO: 15648 - DNA, 292 bp, Homo sapiens
cacagatgaaaacatcaaaaggaaatgggtattagcaatgaaaagacttgatgtgaatgcagccggcatttgggagcctaaaaaaggagatgtgttgtgttcgaggcactttaagaagagcacaatctctggtacattacaagtgatcaataaatgagtgaatattccatgcaagtatttagaaaatagcttgtgctgtaataaatgtatgtacaaagttctctggaaacacagaagagggaaggccattgtgtctaaaaggagtcagggagtcgacgcggccgcgaattcc

SEQ ID NO: 15649 - DNA, 1118 bp, Homo sapiens
tggacataaacatccaaaacaagaagctggagtctctccttcagagcatggagatggcacacagtggctctctgagggacgaactgtgcctagactttccatgtgattccccagagaagagcttaaccctcaacccccctcttgacacaatggcagatgggttatctctggaagagcaggtcacgggggaaggggctgacagggagctactggtaggagatagcatagccaacagcacagatttgttcgatgagatagtgacagccaccaccacagaatctggtgacctggagcttgtgcattccacccctggggctaacgtcctggagctgctgcccatagtcatgggtcaggaggagggcagtgtggtggtggagcgagccgttcagaccgacgtggtgccctacagcccagccatctcagagctcattcagagtgtgctgcagaagctccagggacccctgtccctcgagcttggcgtcccctgatggagtctgaaccagactccgatggagagcttcccagagtccctctctgccttagtggttgatttaactccaagaaatccaaactcagccatccttttgtctcccgtggagaccccctacgccaatgtggatgcagaagttcatgcaaaccgcctcatgagagagctggattttgcagcctgcgtggaagagaggttggatggtgtatcccactggctcgcgggggcgtcgtgaagcagtactggagcagcagcttcctggtggatctcctggctgtggctgcccccgtggtccccacggttctgtgggcattcagtactcagaaagggggaacggatcctgtgtataacatcggggccttgctcaggggctgttgcgtggttgccctgcattcgctccgccgcaccgccttccgtatcaaaacctaaatagaagttgttgttaccgtgtgccaatgtgtcccatgtgggttgtgccaggtagagaaacaggaagtcaatcatctgtgacagtctctattctgtcgttttgctccttggtatttgatttgcactatatttagttgaagcctgttcactgtttaaaaccgggggtattctttcaaaggcatggagacctggttccagtaaa

SEQ ID NO: 15650 - DNA, 319 bp, Homo sapiens
gcgaccagttcctgtaggctagctttgaactaaatcctaggaggaatgcaaagtacagctatgcctgtgtaaacggaagattgggtgtgtgcgttgggggggtgcattccagagagcactgtgtcattggcagaaacttccacacaggaggcagaaacaatacaggtggtttgaggatgttttccaagatgggattcccacccctccctgagggagtcacttcctccatctcctgcagaacaaggtgacacagattccctactccggccaagggcaaggaaccactctaagctcttcagtcactctaatccagaaactg

SEQ ID NO: 15651 - DNA, 326 bp, Homo sapiens
cgggtggcatggcggagaaggatgacaccggagtttgacgaagaggtggtttttgagaattctccactttaccaatacttacaggatctgggacacacagactttgaaatatgttcttctttgtcaccaaaaacagaaaaatgcacaacagagggacaacaaaagcctcctacaagagtcctaccaaaagtaagaacgcatgctcattctttctggccgaatcttttgcactttaccttactggctattcagatacttcttaagcacttccatatcctccctcacactggtaagactatttatttcatcaatagtacaaaactttt

SEQ ID NO: 15652 - DNA, 747 bp, Homo sapiens
  misc_feature (1)...(747): n = a,t,c or g
agtacttcggggactgaaaggctgcaacctgcatcaacccactcaaatggtagtgtctgtgaaaggcctgcaaaccacagtgctaaggcagtgccggacaccatgtgccttgaggacagcatgtggagattgcaccagcggnagctctgagtggcatgtggtgcagcaacatgaaggcagtgtgtggactccaatgcctatgtggcctccttcccttttgggccagtgtatggaatggtatacgatgaggcacctgcccccctgaaaattgttcaggctactgtacctgtagtcattgcttggagcaaccagggctgtggctggtgtactgatcccagcaatactggcaaagggaaatgcatagagggttcctataaaggaccagtgaagatgccttcgcaagcccctacaggaaatttctatccacagcccctgctcaattccagcatgtgtctagaggacagcagatacaactggtctttcattcactgtccagcttgccaatgcaacggccacagtaaatgcatcaatcagagcatctgtgagaagtgtgagaacctgaccacaggcaagcactgcgagacctgcatatctggcttctacgggtgatcccaccaatggagggaaatgtcagccatgcaagtgcaatgggcacgcgtctctgtgcaacaccaacacgggcaagtgcttctgcaccaccaagggcgtcaagggggacgagtgccagctatgtgaggtagaaaatca

SEQ ID NO: 15653 - DNA, 507 bp, Homo sapiens
cccggacgaagggggagagtagacagcagaaccagcggcggcggctaagcagagactgtagtagcggcgacacgacgacggcagcgatggctggggcggggcagcccggggactcccggtgcaggaggacccgtggtcccgggtcctggcgctggcatcccgggcaaaagcggcgaggaacgcttgaaggaaatggaggcggagatggccctgtttgagcaggaagttctgggggctccagtacctggaatcccaactgctgtgcctgcggtgcccactgtccccacggtccccacagtagaagcgatgcaggtcccagcggctcctgtgatccgcccaattatcgcgaccaacacataccagcaggtccagcagactctggaggcccgagcagctgctgcagccacagtagttcctcccatggtgggtggccctccttttgtaggccctgttggctttggccctggtgatcggagtcacctggacagcccagaggctcgagaagcc

SEQ ID NO: 15654 - DNA, 849 bp, Homo sapiens
gtgcagctctgaggtaaacttttatttcttggctgacaggacttccacacccatgctcctcctggcaccttttactctgcccaagcagtggcagcccagtccaaaaggtgcctgccatggccaaaggggttggggagtcacttcacattccaggctggaggagtgagaggacttgggggtactcctcccaccccattgccagcaagaggccatgactcacctcaaccccaagtcctgcatcctggtgggaagtgacaatgcctcctcccagctctccatacctaatggggtcatgaccagacagggtaggacccaggcccccagcttcagttggtaacggtggcctccacggctgccccctgtccaggtgacaaccccagcccccatgatggggcagcaaaggtctcttctcctccttggtcctcagcaacagacagagccctccacaccaggcaggacagaggcaaagtcagaagcagcagcggtggcagggaaggagcagccagcacaggcccagggctctcctgaagtcatttaagctgtctgccatgcggctctgggactggccactaggtgggcgtaggcggctgtgatacaggtacttggacacctttctgtcctgatgctagctgatacttgtctttggctgctgcccgctccttggcatcaaaataccagacagtgatggcgtacctggtggcataggctggcttcacctcgtgggggttccgccggtcagaccagaaaatgagcaaccggtcaaagagtggctcgatgttggctaccacgggccggccctcagggaagatctgcagcaggccgccatgcaccttaacgtcccagttctgc

SEQ ID NO: 15655 - DNA, 562 bp, Homo sapiens
cgtcagactgtgaagcagggcagccctactaaagacatcgaaattcagttccagagactgaggatttccgaggacccagacgttcaccccgaggctgagcagcagcctggcccggagtcgggtgagggtcagaaaggaggagagcagcccaaactggtcccggggcacttctgccccattaaacgaaaagccaacagcaccaagagggacagaggaactttgctcaaggcgcagatccgtcaccagtcccttgacagtcagtctgaaaatgccaccatcgacctaaattctgttctagagcgagaattcagtgtccagagtttaacatctgttgtcagtgaggagtgtttttatgaaacagagagccacggaaaatcatagtatgattcaatccagatatgggttaaattcctcattttacttttaaactggtggtaaagtggaaattgcaaaaaaaaaaaaaaaaaaaaaactgttcattcctgggttttgtgcagtatacattttcccacaaaatggttgtaaagatttaagttattttaatttattgtggatcagaaac

SEQ ID NO: 15656 - DNA, 236 bp, Homo sapiens
ggtgggctatgattgcattattgcattccagcctggacaacagcaggatcttgtctcaaaaaaataaataaaaatttagaaataaagttttattggcacacagccatgctcattcatttgcacattgtctatggctgcttttgcaccaagaatagcagtgttgaatagcaatcgaggctgtatggcctgcaaagccgaaaatattaactatctggtcctttaagaaaaagtttgcc

SEQ ID NO: 15657 - DNA, 286 bp, Homo sapiens
ggaagaagggaagatacaaagaggtggtctccagaagacagtcagacaaataacagagccttagaaataaaaccttttgggctgggtggcccaggttctcaattgctgcctctacaggaaagtctttgggttcggaggattccagaaacatgaaggagaagttggaggacatggagagtgtcctcaaggacctgacagaggagaagagaaaagatgtgctaaactccctcgctaagtgcctcggcaaggaggatattccggcaggatctaggagcaaagagtatct

SEQ ID NO: 15658 - DNA, 479 bp, Homo sapiens
cccacgcgtccgtacaggtctggctcttgtaaccgtgatcaaactgttcatgttgtctgctacatttttgtctccatccatttttcctaccacctcctgaaggctatctgatagtcagtcacattagcagccccaggcagcagacaacaggaaagttaggaaatttgtgtttcgtgtcatttttaggagcatctgataaaacctccagcaggttttaggaagtattcatgtatttttctggttactttctgtcatctctaattgaactcacctgatgaaggttcagtgttctggggccagaatttatgattttagatcaccttctttggaaccttagatcactgtgttttgaaatcatgagtttgcttttaacttcatagggtcaactttaaaatgatatgcactgttaattttaaagcatttgctgcagataattaaacttagaagtgcctttgactttaggatacaaatattacaga

SEQ ID NO: 15659 - DNA, 863 bp, Homo sapiens
gagataagttctcactgcgttgcctaggctggagtgcagtggtcattcacagacacacacatagcagactacagactacagccttgaactcctggggctcaagtgatccacccacttctgtatcctgagtccctggaacggcaggtgcacaccaccgcacccggcttggatgtgatcttttgtccacattcttttccaattggttcaaaggtgtaggtgtgccttttgcatacctgggaagggccccattaggctcgactcctcatttttctccattcaccatcagtttgagtctgaattcataggcatggcctggacagatgcagcaaggggccagttccaaggcagaattcagggtgaactcgattcctataggcttgggatgaatggctgctgggacatgaggcttgggtgtgagatgccccgtcgtgctgctgctcattggttcttagttcagagaaattctgggacccttcctcctcccggcaccacgttttcagtgaatggttctttgaagaggaaccctggtccataggaactgagtgaaagcaaggccaagtatgtccacccatggggacaaacgtcccagcacaaaggggtctcaggcctgcaaggcccaagtggacgctcggacaagggcaggaaggtatttgctgattctccttctccatgtgacgtgtctctcaacccacaccagctaggggagcctcccgcagcttcagttcccctttgacgcccacacagtgttatgcaagcaccgagcccagagtcccgctgggccagtggtgtcctaattgtcttggtgacaaagagcaattttattttaaagcaactgaatcctttccccctgttttgtgtgccag

SEQ ID NO: 15660 - DNA, 437 bp, Homo sapiens
tataattaattgtactatatgctgagtacaactaaaaactctgaatattatacgtaaaacacaagaagactctgaaaggtggagagaataaggcagaggagctagggatctcaggacccaaataatgacactgcagtagttccctgccttttcttttagcctcatatattccataattagagctaaagaagctgataacccagaagtgcaatggccacagacaaagaaagcgccagcaaaagcccagtcttttaaatactagtagagggacaccatagcaagacagaaaactttttgagaataaccattctacttcaaccaaacaccacagaaaaaaacattggtcacactcatagctgcaaaggccaagtagggatcctagatttccatcctcaccaagctgttatgaggcaccctaacacctcctccactggaat

SEQ ID NO: 15661 - DNA, 3989 bp, Homo sapiens
ctgggtcctgtgtgtgccacaggggtggggtgtccagcgagcggtctcctcctcctgctagtgctgctgcggcgtcccgcggcctccccgagtcgggcgggaggggagagcgggtgtggatttgtcttgacggtaattgttgcgtttccacgtctcggaggcctgcgcgctgggttgctccttcttcgggagcgagctgttctcagcgatcccactcccagccggggctccccacacacactgggctgcgtgcgtgtggagtgggacccgcgcacacgcgtgtctctggacagctacggcgccgaaagaactaaaattccagatggcaaactcaatgaatggcagaaaccctggtggtcgaggaggaaatccccgaaaaggtcgaattttgggtattattgatgctattcaggatgcagttggaccccctaagcaagctgccgcagatcgcaggaccgtggagaagacttggaagctcatggacaaagtggtaagactgtgccaaaatcccaaacttcagttgaaaaatagcccaccatatatacttgatattttgcctgatacatatcagcatttacgacttatattgagtaaatatgatgacaaccagaaacttgcccaactcagtgagaatgagtactttaaaatctacattgatagccttatgaaaaagtcaaaacgggcaataagactctttaaagaaggcaaggagagaatgtatgaagaacagtcacaggacagacgaaatctcacaaaactgtcccttatcttcagtcacatgctggcagaaatcaaagcaatctttcccaatggtcaattccagggagataactttcgtatcacaaaagcagatgctgctgaattctggagaaagttttttggagacaaaactatcgtaccatggaaagtattcagacagtgccttcatgaggtccaccagattagctctagcctggaagcaatggctctaaaatcaacaattgatttaacttgcaatgattacatttcagtttttgaatttgatatttttaccaggctgtttcagccttggggctctattttgcggaattggaatttcttagctgtgacacatccaggttacatggcatttctcacatatgatgaagttaaagcacgactacagaaatatagcaccaaacccggaagctatattttccggttaagttgcactcgattgggacagtgggccattggctatgtgactggggatgggaatatcttacagaccatacctcataacaagcccttatttcaagccctgattgatggcagcagggaaggattttatctttatcctgatgggaggagttataatcctgatttaactggattatgtgaacctacacctcatgaccatataaaagttacacaggaacaatatgaattatattgtgaaatgggctccacttttcagctctgtaagatttgtgcagagaatgacaaagatgtcaagattgagccttgtgggcatttgatgtgcacctcttgccttacggcatggcaggagtcggatggtcagggctgccctttctgtcgttgtgaaataaaaggaactgagcccataatcgtggacccctttgatccaagagatgaaggctccaggtgttgcagcatcattgacccctttggcatgccgatgctagacttggacgacgatgatgatcgtgaggagtccttgatgatgaatcggttggcaaacgtccgaaagtgcactgacaggcagaactcaccagtcacatcaccaggatcctctccccttgcccagagaagaaagccacagcctgacccactccagatcccacatctaagcctgccacccgtgcctcctcgcctggatctaattcagaaaggcatagttagatctccctgtggcagcccaacaggttcaccaaagtcttctccttgcatggtgagaaaacaagataaaccactcccagcaccacctcctcccttaagagatcctcctccaccgccacctgaaagacctccaccaatcccaccagacaatagactgagtagacacatccatcatgtggaaagcgtgccttccagagacccgccaatgcctcttgaagcatggtgccctcgggatgtgtttgggactaatcagcttgtgggatgtcgactcctaggggagggctctccaaaacctggaatcacagcgagttcaaatgtcaatggaaggcacagtagagtgggctctgacccagtgcttatgcggaaacacagacgccatgatttgcctttagaaggagctaaggtcttttccaatggtcaccttggaagtgaagaatatgatgttcctccccggctttctcctcctcctccagttaccaccctcctccctagcataaagtgtactggtccgttagcaaattctctttcagagaaaacaagagacccagtagaggaagatgatgatgaatacaagattccttcatcccaccctgtttccctgaattcacaaccatctcattgttcataattgttaaaacctcctgttcggtcttgtgataatggtcactgtatgctgaatggaacacatggtccatcttcagagaagaaatcaaacatccctgacttaagcatatatttaaagggagatgtttttgattcagcctctgatcccgtgccattaccacctgccaggcctccaactcggggacaatccaaagcatggttctttcactcaacaggacgccctctgattatgatcttctcatccctccattaggtgaagatgcttttgatgccctccctccatctctcccacctcccccacctcctgcaaggcatagtctcattgaacattcaaaacctcctggctccagtagccggccatcctcaggacaggatctttttcttcttccttcagatccctttgttgatctagcaagtggccaagttcctttgcctcctgctagaaggttaccaggtgaaaatgtcaaaactaacagaacatcacaggactatgatcagcttccttcatgttcagatggttcacaggcaccagccagaccccctaaaccacgaccgcgcaggactgcaccagaaattcaccacagaaaaccccatgggcctgaggcggcattggaaaatgtcgatgcaaaaattgcaaaactcatgggagagggttatgcctttgaagaggtgaagagagccttagagatagcccagaataatgtcgaagttgcccggagcatcctccgagaatttgccttccctcctccagtatccccacgtctaaatctatagcagccagaactgtagacaccaaaatggaaagcaatcgatgtattccaagagtgtggaaataaagagaactgagatggaattcaagagagaagtgtctcctcctcgtgtagcagcttgagaagaggcttgggagtgcagcttctcaaaggagaccgatgcttgctcaggatgtcgacagctgtggcttccttgtttttgcctagccatatttttaaatcagggttgaactgacaaaaataatttaaagacgtttacttcccttgaactttgaacctgtgaaatgctttaccttgtttacaatttggcaaagttgcagtttgttcttgtttttagtttagttttgttttggtgttttgatacctgtactgtgttcttcacagaccctttgtagcgtggtcaggtctgctgtaacatttcccaccaactctcttgctgtccacatcaacagctaaatcatttattcatatggatctctaccatccccatgccttgccccaggtccagttccatttctctcattcacaagatgctttgaaggttctgattttcaactgatcaaactaatgcaaaaaaaaaaagtatgtattcttcactactgagtttcttctttggaaaccatcactattgagagatgggaaaaacctgaatgtataaagcatttatttgtcaataaactgccttttgtaaggggttttcacataaaaaaaaaaaaa

SEQ ID NO: 15662 - DNA, 496 bp, Homo sapiens
ctcggctgaattcaggacctgggaatacagggttcagagaggagaggaggaagatggtgacatgatttggttagaagcacaagcaaactgatcagcctcccagacctgccagcagatgctgtgtgagggtgatggagcacggggtcacacccctggccccaagggccactggtctccctggggcttgcagtgcagaggcctcagggtgtctgggattgctggggaggcctgtgctgccccctggtggcgcttcctggcgctgcgccctgtccacagtcaccttaggtccctttggaaacattccatttgacttttccctgttgtttgaaatcccatgtttccctaaacctctagcctgttgttctttccctaattcattgcacaagctcctttgcttttagtgttaccgctcattgcctctctaatcctgcctgatgtgtttacagaagcttctgatttgcattgaacatgctctaactgcctgtgctacttatta

SEQ ID NO: 15663 - DNA, 663 bp, Homo sapiens
  misc_feature (1)...(663): n = a,t,c or g
gcggcacgagcaggaattctgaatcttagaacttttttattgaaagagatcttagaagccatctaaccaacccagactgcttaatgattgtctgggttcacatagctatgggtgatagaaaccgggattcgttgtgaccagtaattctccattctttctccctaatgtgcagcacatctccagtacttctgaatagattacacagcttttctttggctagtttgggggcttgacctgatgcaaaaaggaatttttttcctctgccaacaaaatttctcactgcactgcttgctacacagacaagattcaaaataaaagtaatggtnnnnnnnnnnnnnnnnnnnnnnnnnnnnnnnnnnnnnnnnnnnnnnnnnnnnnnnnnnnnnnnnnnnnnnnnnnnnnnnnnnnnnnnnnnnnnnnnnnnnnnnnnnnnnnnnnnnnnnnnnnnnnnnnnnnnnntgttacatgaaaaacatatttgaaactgtactgccatttgtgtaaaacaaggtatgtggtgtgtgaacatcttatttgcatatgcatataattatctctaaggatgcacgagaaaccagtgataattatgcctccaagaagaggttcaactaggtgggctgcttagaatctagttttgtattatttggacttttgttcacatta

SEQ ID NO: 15664 - DNA, 1383 bp, Homo sapiens
tttttttttttcaaaaaaggcaacagatgttttattcttcaatgcaaattactgtattcaccacaagctaaagaagagaacatgtatcctacatatatatttatatatatatatattttttgtgtgtgtgtgtgtgtgtggatttatggaagactaaagacacggaaaaaaatccagcaccccaacatgtacagccaggaaggaaatcagttctgtaataggacaggtataatgaactacaaacaagaaggggtggaaaaagaagaaaaaaaaatgtgcattgagtttaagacactgtaaaactcagaagacatatttactattcaagtataaactctgtaaggacttggcataaattgaaaggcagctgctgaggtacaccattataaaagaagttctatgaatttacaattctaccttccaatttcctgggagaaaaaaccaaactcttgaaggtcttcaccagagaccctgagagggattaacacttttgatgaagacatagtcaataattcatgattgaactattcaaaaacatgtatttatttagaacaatagaaatacgtgttctcagactgtcctctagagtttttgagactattagttcaagagtttcaaagtatattacttgtaaaaacaatactgattaaaaaaattttttttaacaaaaaaacagaaatctgatttgatggtaccttgaaaataccctaaataccaaattttctccaacctaacattacagctaatttaagaattcctccttcattggtaaaacattttttcctcattaaatgtgggtactgaaattggatagaaacactatgaatgtgaaaataccaccaattttctgcagtaaaaaaaaaaacccaaaaaacaaaaaaacaaacaaaaaacctagaatgttctttggaatcactgaaatatcacaaacttgggttttttcttacagtctgtgcaccttctttcaggttctctgttttgcttgtagtactgactgtgtgaatctaatttttatagattcaagtcttgcaatgcaatatccatgcttgacacaccggtgtctctgaccagtgagaagttatgcataacccagaaacgctgtcatttacatctccataaagacttctgccccaaataaaaacttcagaatgacacaacacatcctgtgttaaacaatcaaatgaacccaacaagggggattccagtgtgatttcagtacttgggagggcattgtctgctatggtttctcatggaagtaccacaggcctggctgctagcattcagctttccttggccttaaaagggattttctcagggctggcaagttggattagattctaagagaattttgtctttgacaaactaccatttttagcataaaat

SEQ ID NO: 15665 - DNA, 329 bp, Homo sapiens
tgatagggtatctcccactgtactccacaaaatggccaatagcttggagatatccttaataagcgacaatgagttcaagtgcaggcattcacagccggagtgtggatatggcttgcagcctgatcgttggacagagtacagcatacagacgatggaaccagataacctggaactaatctttgattttttcgaagaagatctcagtgagcacgtagttcagggtgatgcccttcctgggacatgtgggtacagcttgtctcttattcatccaccattgctgagagtggaaagagtgctggaattcttactcttcccatcatgagcagaaa

SEQ ID NO: 15666 - DNA, 516 bp, Homo sapiens
  misc_feature (1)...(516): n = a,t,c or g
gtagaaaagttgagggcaagaaagttgtttaggataaaggggatttaggataaagcagggatttacccacaacctctgtggttaccaagaacagggtgggaggcagccaaagggattcaggtggaggtagcaggaaccgggagggaagcctgtctcagagcagcagatgcggctttagggatgcaggagcttgaggatggggaccaaaaaaggggcgagtgctggaggagagaaactggcagagccacggaagcagaaaaggacaacttgttgagcaagaagatttgaagggaaaggacctgtgtcttgagacctgagcgggcaggccggattcccaaccgattacagacaaacccacaaaggaagcctgtggagagggggtagtggcggaagggctctaatgaaaacaattttgcaaccttacttatagcgttctccaaccttaaactaatagctattctgcacttttnaatatagcattggctccagagaagactctgaaatctttatttttac

SEQ ID NO: 15667 - DNA, 964 bp, Homo sapiens
tccttcgccgtccctcgccgtccttcgccatcgcacgccaccgcaccccatctctcgaaatctgcagacatcttgatttttcccacgctgtctgtcaggtctccgccgccactcgacgccagggcgccgggccttgtgggctgtgctgcacctcggacggcttcgcaccagccagcgccctctctctcctgcagcactctgatctgcaccccctgaggggcttccactgtccgcggggtgagaatgcccctgggagtgtaacatgactgccgccccatgtgtgtgagaggcgtcctctgggagagcatggatcctgaggtcccaggattgtcagctgacctctgtcctgtgtgcccagtggccccaggtgacgtgtcttcaagaagaggctgagctgcggtgcttgtaagagtcatgtgctgttcctggggcttggatgatgtaggggaagcaaggtgaaagtggtatcccgtggtttccacgttctgtcctgctgtggggctgtccctcacatgctttcagtggctgttgcagaggaagagcctccggaaatctgcgtgggtctcagccttagatccaaggacagtccaaggaagtcctaagaccatggagttggtgatctgggatctgggtttgctgatatttctcaccgtgaatctcttggtggtgtttgtgggcacgagaggggcagagaatggagagtgaggctaccacatgaagcgtcaccagagctgctccctgctgcctgctcagagcaccccggatccactgttcaatctgcacaagattcggggtccagacatgggagacttcagctgcctcagaggaccgtggacagggaaggccagcctcgcatccctctgtccatgcctggaatgactttaataaccaagagttttatttttgaatttgtagctgtcgttcactttttacccacccattcaataaaccttacagaattgca

SEQ ID NO: 15668 - DNA, 527 bp, Homo sapiens
ccgggatcgcgctgatgtggccccaaccccgcctccctccccgccccgcgatgtcggaagaaacccgacagagcaaattggccgcagcgaagaaaaagttgagagaatatcagcagaggaatagccctggtgttcctacaggagcgaaaaagaagaagaaaataaaaaatggcagtaaccctgagacaaccacttctggtggttgccactcacctgaggatacacccaaggacaatgctgctactctacaaccatctgatgacaccgtgttacctggcggtgtcccttcccctggtgccagtctcactagcatggcggcatctcagaatcatgatgctgacaatgtccctaatctcatggatgaaaccaagactttctcatcaaccgagagcctgcgacaactctcccaacagctcaatggtcttgtttgtgatctgcgacatgtgtcaatggggagggccctgcatcgtctgctaacctgaaggatctggagaaacaacagaaccaagaaattacggatcagttgg

SEQ ID NO: 15669 - DNA, 487 bp, Homo sapiens
tagccctggtgttcctacaggagcgaaaaagaagaagaaaataaaaaatggcagtaaccctgagacaaccacttctggtggttgccactcacctgaggatattcaggacattctgaaggtgctggtgtccgaccttaaccgttccaatggggtagcgctccccccattggacaagtggaagacacccaaggacaatgctgctactctacaaccatctgatgacaccgtgttacctggcggtgtcccttcccctggtgccagtctcactagcatggcggcatctcagaatcatgatgctgacaatgtccctaatctcatggatgaaaccaagactttctcatcaaccgagagcctgcgacaactctcccaacagctcaatggtcttgtttgtgatctgcgacatgtgtcaatggggagggccctgcatcgtctgctaacctgaaggatctggagaaacaacagaaccaagaaattacggatcagttgg

SEQ ID NO: 15670 - DNA, 412 bp, Homo sapiens
  misc_feature (1)...(412): n = a,t,c or g
gtgccatcaaagcgctctcaaccgaacgtctcgggaattttctgggaagttaagaatttccaataaatcttggactactctaaaatgcaccagaaattacgtggtcacactcgtgcagtgaaagaaggctttggcagtagcataagacattaagcagaagtaggaaatgcagtgaggaagaagttgtaatgttttcaacagctgccactatggatctaggatgagagctttccacatgttgttaagaatgagagacagattactccaaggtagggcctgcctgggtngccctccctgtgagaaggtattcttcctgctccattgacatcaggcttattagccatgtttctggatttggtccatttcatcataaagagaacatggagcagggcttgcagctgatcttcaaagg

SEQ ID NO: 15671 - DNA, 1341 bp, Homo sapiens
  misc_feature (1)...(1341): n = a,t,c or g
ggtctctgtctctattcatgcgcctcgtggaaaattaccttggtacaatggtagcctctaaatagactgcctcgcaagctattccagaggtcatggaacagaaagccttataaaccaaataaaaattctcaaaatacattggtttattgaaccaatttgcaatacacagtgaggaacaaggagaaagcaatgatagattaacactgttagtgtaacgtgccagtggagtggaaagaccgcaacacctgaatcctgggttttgtaatgtttttatgtcctgactcacattctgtcacatacgctttcccctaatagtcgggttacaaaaaggaccagagtggccgcttgagccagatgactcaatcagatgaaatgtgcctgaggccaacgatgtacacttgctctatagaagggtgtcaggggcaagtacacttcaccacagcaatagcttgcctattagtctgctgagcagtcatgaattttattgtatttcttgggtaaggacaggccagaatgagtgtcaccagtgggtaattgaatcaacttctcacacatactgaaggctttatatgtctcatgcatacttagtgtatcatgaatatttggtatctttgtggcttttcatatttttagtgcttcatgaatatttggtatctcttgctcctttctatctgtggtcacacatacacgctctattaactttgcctaataagtctcctaggttactaacttacttacctaaatgtaacacaatgaattccagctttctcatttgttctataccagaatgggaaatttccccaaatcagaaaatcacatcctaacaaagaagtctgtctaagacagtacatctcctgttgaacttgcatctttccacaggactttctgtttttagggatgagactattctctgcttcatcaaggaaagagaaatgttcagggttgtagggatggcacacttattagttctgcctgtctgaaaggttcctgcaggacagtttggtcagagctgcaattcttagtccatggtctaatgcttgagtatctcttctttccctttcctgtctcaggaatcagctgagaattcattcgattgtcatgcctctagccccttactgtgatttgttggttgcactttcatttgctttagttctagaatcacctgttgactcctcagacttcacctaactttggaaactctcttttggaggcttctcatttccccctaattctgtgctgcctgagccctagaattttcccaccaacgaaattaattccagggtaagatcctaaaggttggctgggaatctaaggttggataatntaaaaccaataatccta

SEQ ID NO: 15672 - DNA, 359 bp, Homo sapiens
agcagacacacaagcagacacacacatatatacatacgcaattgtatatatatgtgaactttctcagcatatatataaaatacacgtgtatatgaggatgtatgtgtatatgtttatacacacaggagtcagtgcccatgtgtatggaagacaaatacacatacatatatacattttgcagctatggacaatttaccacaggatgcatattaaagaaagtcatagtttttttcttttttaattgaagggacaagtatccatctaaatattatgccttgaggaatgagggcgtgaaacacaatatcatccccaaatgtgtcttgtatttatccatagttaggtgttttagttttaaaatt

SEQ ID NO: 15673 - DNA, 494 bp, Homo sapiens
tagattgtaagcaaaagaaatcaaggtcaagatctggaagcaagaagaaaatgctaacattacctcatggtgctgacgaggtttacattctccgatgcaggttttgtggcctagtctttcgaggacccttgtctgttcaggaagactggattaagcacttacaacgacatattgtaaacgctaatcttccacggactggagctggcatggtggaagtcacgtcactacttaaaaagcctgcctccattacagaaacttcattttctctactaatggccgaagcagcttcatagaaccaggaaaccttttaaatagccagtttgaattggatgtaaatttgaaattctttttttttaagccacattaaattatctgtttataaatactaaagcaggaaaatggggggaaagtgaattacagtgacatcagagcaaattgaatacttaaaacagtaagtagtctatatattttatatagggtgggaagatgtgttt

SEQ ID NO: 15674 - DNA, 1408 bp, Homo sapiens
ttttttttttagaattatttgattttattaaaaaagaatcattgtctacaaactgttttctaacaatgcaaatacagtaagcaagtcatctgcaatatcaaaatattgtttgtaaatcactgatggcaccaacgatttgaggaatttccaataggacacatattgagaaaaagcaacagattataggcattaaccaaattttaagatcagaaaattataaaaatcattaagtttaaattatccaattttcaatagcttaaatccaatcatcaggaattcagaagcacccaatatgtttgaagttgcacaaatgcatatggatgataggaaagtaatccccatgcaatatcttaagtgttgctatcagatatatttaagtgctactttacagattaagctgggtaaaatcaaaatatattttacttcccattagattttaaaacaatcacaataatttatcaacagttgccatttcacagcaattagaaaagaggagttgatacaagttgaacagaaaggtatcttttcttcttttaggaaataaacatatatatatatgtatatatatttcacatacacacataacattatctttaaaattccaagtggttacttttgtattataaaaaaattatctccctatggtcaaaatactgaaaaagcgcaaaggctgaaaaaagaaaaccacatttgccactttaaaaaaatacattattgtctcagtggttctatttatttaattgattataaagtattatgactcccagtactgtactgggacctgatggaattaaatacacccctttctcagtctccagaaaggatactcctaacccaccctaaaatatgataaaataaatgcccctattctgaactgttaaactgggaaataaaccatgcccacctggaaacaatataagtcataaaagtttacataatgtctattgctgcttttgtggtaaaatggcagggttgactagctgtgacagagaccgtatgggctgcaaagcctaaaatatttactctctggcccttccacagaaagtttactgacctcctgatctagttcaccaagtactgctctagttacctaaaagagttaatgcacctcaagaagatttgagcatgtggtgcaagaataacttgcatactgggtttgttcattagcatgtaatgtcaaaccacaccttgaagtggtgctttattttgggcgaggaaataatttgtatacactttcaggaaatacctataaaagtcaatttgaaaaaaggaaagaaaaaagccaaatttaaaaaaaagcctgcctatgttcttttaatatttttatattattgtgaggaaagggtgctaagatgattgttctgtcattcttttagtttttctttagtttataaatgtttcttttgtt

SEQ ID NO: 15675 - DNA, 451 bp, Homo sapiens
  misc_feature (1)...(451): n = a,t,c or g
gagggcaccttgacaggtgctggaaaagagaaggcaaccgttcatcctatttctttgcttccagatgaagaaactgaggcccatggaggagtgacttttgcaaggacactcagaaagtgagcaacagaattaggatttggattctgcccctggccagtgttattttcatcagcacctggcctcttgatagagaagaagccatcctatctgaccaacttcaggctagtcttagatgagccctaggctgcagtcagggccctcgggccactccagatctccttgattctgccttgattccatgtttccctggaggctgtcttgcctcttcagtgggtgcccctgnaaatgccgaggaacccagaactgactggacagtcatggtccacagatctcctagggcagggagcagtcatggcattgggcagtggagagaggctgcttagaacaaccg

SEQ ID NO: 15676 - DNA, 1619 bp, Homo sapiens
  misc_feature (1)...(1619): n = a,t,c or g
ggctgatcacccgaggggaatggcagtcggaggcgcaggacaccatgaagacagggtcatcgaccaacaacaacgaggaggagaagtcccggctgttggagaaggagaaccgtgaactggaaaagatcattgctgagaaagaggagcgtgtctctgaactgcgccatcaactccagtctcggcagcagctccgctcccggcgccacccaccgacacccccagaaccctctgggggcctgcccagggggaccccctgagccccccgaccggcttagctgtgatgggagtcgagtgcatttgctttataagtgagggtagggtgagggaggacaggccagtagggggagggaaagggagaggggaagggcaggggactcaggaagcagggggtccccatccccagctgggaagaacatgctatccaatctcatctcttgtaaatacatgtccccctgtgagttctgggctgatttgggtctctcatacctctgggaaacagacctttttgtctcttactgcttcatgtaattttgtatcacctcttcacaatttagttcgtacctggcttgaagctgctcactgctcacacgctgcctcctcagcagcctcactgcatctttctcttcccatgcaacaccctcttctagttaccacggcaacccctgcagctcctctgcctttgtgctctgttcctgtccagcaggggtctcccaacaagtgctctttccaccccaaaggcantctccttttctccactgtcataatctctttccatcttacttgcccttctatactttctcacatgtggctccccctgaattttgcttcctttgggagctcattcttttcgccaaggctcacatgctccttgcctctgctctgtgcactcacgctcagcacacatgcatcctcccctctcctgcgtgtgccccactgaacatgctcatgtgtacacacgcttttcccgtatgctttcttcatgttcagtcacatgtgctctcgggtgccctgcattcacagctacgtgtgcccctctcatggtcatgggtctgcccttgagcgtgtttgggtaggcatgtgcaatttgtctagcatgctgagtcatgtctttcctatttgcacacgtccatgtttatccatgtactttccctgtgtaccctccatgtaccttgtgtactttcttcccttaaatcatggtattcttctgacagagccatatgtaccctaccctgcacattgttatgcacttttccccaattcatgtttggtggggccatccacaccctctccttgtcacagaatctccatttctgctcagattccccccatctccattgcattcatgtactaccctcagtctacactcacaatcatcttctcccaagactgctcccttttgttttgtgtttttttgaggggaattaaggaaaaataagtgggggcaggtttggagagctgcttccagtggatagttgatgagaatcctgaccaaaggaaggcacccttgactgttgggatagacagatggacctatggggtgggaggtgggtgtccctttcacactgtggtgtctcttggggaaggatctccccgaatctcaataaaccgagtgaacagtg

SEQ ID NO: 15677 - DNA, 1170 bp, Homo sapiens
ttttttttcagatgcaaaatgacaacatttaatcgggatgataaggaaataagacttgacaagaaaccatagcccactgcagactgttcacgatgtcagatggttcatgatttttttccaggtttgatacagaagaatcagtttgttacaagaaatgcttctccaactcttctagtaattgctttgtctcactcggaaactgaactactgtcgatgttgtaaaaagctagggcatattcttctttttcatagtaatcgtagaccatgcctggggctggctgaatgttgaacacaaggttgctctgctcaacagaaaaagtgaaactgtctgctcgaccaaaaacattttccaagtagaaaagaacatggtcattcttgacttcagtcttcatcacttggcccttgttttcaagctcttcaatggatgacatggttggagtaaatcctgatagcatttttacatctataaccaccatactggatttattgcgaattccagtgtatttgaggttcactgtgaggtcaaaaacagtcaaagagtagttctttactatttccaaggaaagagaaaatccagatgccttcttaggtaggagaacattgtacttaagggtggcctggataaatgtacaaccgtgtccttccacatctactgtgtattgtccaggtgcctgtgttacttctgaacgttggaccagtaggcggttatgaccgttaacctggaaaatctcactggatccttcactgctggaggactgtgggttttaggtgtccaagaagaaagctcagatcttccagcagaaggtaccttacttgggatttactatccgacaggggtctggaggactgtgggtattaggtgtccaagaagaaagctcagatctgccgacggcaggtaccttacttgggatttactatccgacaggggtccgaacgcagcccgggatcagaaagaaagcaggtcgtttgcaatctaccggagcctaagaccagaaggcaggtgagagaattcttaggagctgtggggttttgtagactgtggatcccaaactttgcagtattagccaagactttgtatgcggtcaccaagggggcggggaccgcgaacctttggaatgcagatcccaacaacagcaagtctttcatgagttaaaggaaaaacttctggca

SEQ ID NO: 15678 - DNA, 1002 bp, Homo sapiens
ggagagagccctgaggcaaaaacaagcttgccatgttccaggaacagtgaaaggacatccattgacctaatactcaaagctgctgtcccaaagacaaagcaaaggggacccagctcccttgggtggctcctagatgctctgctgcctgaccaccagagggcagcagtgctccttctcttccaggcctgagcagaaagtggatgctcatgaacgttttaggagctggggttttgtccttcagatgctcaaagcttgttcatgggcttggaggcatgtttagccctttgggatttgtaaggcagagaattccaatttcttaagcctagtaagaaatgagcaaaaacttcaatatatatgactcaggcaagaaatcagcatctgtggcaaatactagaatgaaatgcaagaaagctcactgcaaggaagtctccctccctgcagattccaaggctggaatctttttcttctggctccaggcagcacagacagggcctagcctggagagggtggacaagatgtcctctcagggtcttcaatggccaagtccaagcccactgcagaatctttctgtctacccgtaagtatcctttcctgagttccaggcaaagctggggatgttagcctatgactgtcatctgacttggaaggtacacctaggggccggggggaggtcagcaggggagtttgggagccacttctccccccacgtggcactggagtgtgaactggctcattctggacaccagcatggagccagcacgggaacaggggggcagcctagagcacaagctctatctgtgtccttcagagctcctgggaaacatgatgcgccctcatgggaatggcattttgcatatcacacaggctgtcctgggagtcaggcagactggattgtcacgtgcggtgtgcatgcagcagcttgtgcactgcagtggacctgtggaccatttctcaaaggtgcacaacaaataataaatgtgtccttctttgtttttaaaaaaa

SEQ ID NO: 15679 - DNA, 1419 bp, Homo sapiens
  misc_feature (1)...(1419): n = a,t,c or g
aaaacaacatgatggtgttggtgtcgcgtgctgtggagcatccgagtgtgccagagtctccagaattcgtcagggtcagatcatatgaatcccaaatggttatccgtccccacaagtcatttgatgagaatggctttgactacttactaacatacagtgacaatccccaaacggtgtttcctcgctactgtgttagttggatggtttccagtggcatgccagatttcctggagaagctgcacatggccactctgaaagccaagaatatggagattaaagtaaaggactacatctcagctaagcctctggaaatgagtagtgaagccaaggccaccagccagtcctctgagcgaaagaacgagggcagctgtggccctgctcggattgagtatgcttgacaggctttgggataagaagggacaaggtgcttctagccctgtctcagtccgttatcactctgctgtagaagggggacatgccacatgtattagaaggcatctgctgtaacttcccagtgcaagataattcaataactgatgtcccatttcattcagagcccttattgctcttatcaaaacagaagaaggctacatttgtgggagtgttgtcatattctcaggccaactgttttgaaattcggtatctcactgagctaatctggaacaaacctctcacctcaggccagaaggggatgacctccatttgcttctctgagtagtttcctctgctgacattccaaatcccaccatcgattgtgcagcgctttggatttccttcagttctccaggtccacctggaaagtatagttggccagttgagtctctcaaatgaggggctactgggagtgctcttggtaacaatcatgatgtgaatgggtgtgaacgatacttggctatgttaagtgccttgtccgcaccttgcttttatctctagagacatgaagttattattaatttttttttttttnaagnanananggagtttnactctgtttcccaggctggtcttgaactcctgggccatgcctggccagggacatgaatttgtacaaagaaatttccctccctgcctgcacaatatcacccattgactcaccttatccaaagcaagtttcctgtgaatcggccagttcttctatattcattggatcattgcctccttcctaaccttccccatttaccaagaacactgggagactaatccttttagatagtagcttttttggatggctcaaaacatcacatttaaatttagtttaaaaattttttaacttttgtgtcaaatagggagttgagggaattgaggcaggatttctaccccagttccgattgttataggaaaacaccattttggattcagggtattatttttttcatattttcagggttttgaantgttacnttttcaggaagggctaaa

SEQ ID NO: 15680 - DNA, 6051 bp, Homo sapiens
cgggtcctcagcctggaatcaccccttgagaaggaccccagagtcctcggcgcccagtccgtcccccgaggcagggcactgaaggggttaagtcccctggggctggattccgccttccggcttttcccagaccccagagccggtccctggaacactgcagtcctgagctctgggatggagcccgagactgcgctgtggggcccggatctgcagggtccggaacagagccccaacgatgctcacagaggtgccgagagtgaaaacgaagaggagagccctcggcaggaaagttctggggaggagatcatcatgggagacccggctcagagtccagaatccaaggactcaacagagatgtccctggagagatcctcccaggacccctctgtcccccagaaccccccaaccccactgggtcactccaatcccttggaccaccagatccccctggaccccccagccccggaggtagtccctaccccatctgactggaccaaggcctgcgaggccagctggcagtggggcgctctcaccacatggaacagccccccagtcgtccccgccaacgagcccagcctgcgggagctggtgcagggccgcccggcgggggcggagaagccctacatctgcaacgagtgcggcaagagcttcagccagtggtccaagctgctgcggcaccagcgcatccacacgggagagcggcccaacacctgctccgagtgcggcaagagcttcacgcagagctcgcacctggtgcagcaccagcgcacgcacaccggcgagaagccctacaagtgccccgactgcggcaagtgcttcagctggagctccaacctggtgcagcaccagcgcacgcacacgggagagaagccctacaagtgcacggagtgcgagaaagccttcacccagagcaccaacctcatcaagcaccagcgatcccacaccggcgagaagccctacaagtgcggcgagtgccgccgggctttctaccgcagctcggacctcatccagcaccaggccacccacacaggcgagaaaccctacaagtgccccgagtgcgggaagcgcttcggccagaaccacaacctcctcaagcaccagaagatccacgcgggcgagaagccataccgctgcaccgagtgcgggaagagcttcatccagagctcggagctgacccagcaccagcgcacgcacacaggcgagaagccctacgagtgcctagagtgcggcaagagcttcggccacagctccaccctcatcaagcaccagcggactcacctgcgcgaggacccgttcaagtgcccagtgtgcggcaagaccttcaccctgagcgccacgttgctgcggcaccagcgcacgcacacgggcgagcggccctacaagtgcccagagtgcggcaagagcttcagcgtcagctccaacctcatcaaccaccagcgcatccaccgcggcgagcggccctacatctgcgccgactgcggcaagagcttcatcatgagctccacccttatccgccaccagcgcatccacaccggtgagaagccctacaagtgttccgactgcggcaagagcttcatccgcagctcccaccttatccagcaccgccgcacgcacaccggcgagaagccctacaagtgccccgagtgcggcaagagcttcagccagagctccaaccttattacccacgtccgcacgcacatggacgagaacctgttcgtgtgctccgactgcgggaaggccttcctggaagcccacgagctggagcagcaccgggtgatccatgagagggggaagaccccagcgcgtagggcccagggcgacagcctgctggggctcggggacccctccctgctgaccccgccgccgggagccaagccgcacaagtgtctcgtgtgcggaaagggcttcaacgacgagggcatcttcatgcaacatcagaggatccacatcggagaaaacccctacaaaaatgcagacggcctcatcgcacacgcagcccccaaacctcctcagttacgatccccaaggctccctttcagagggaattcctaccccggggctgcggagggcagagcggaggcccccggacagccccttaagccgccggagggtcaggagggcttcagccagaggcgggggctgctgtcctccaagacctacatctgctcccactgcggagagagcttcctggatcgctctgtgctcctccagcatcagctcacccacggcaacgaaaagccctttctctttcctgattatagaattggcctaggggaaggcgcagggcccagccccttcttaagtgggaagccctttaaatgccctgaatgcaaacaaagctttggcctcagctctgagctgctgctgcaccagaaagtccatgcaggcgggaagagctcccagaagagtccagagctggggaagagctcttccgtcctcctggagcatctcaggagccccctgggggccagaccctaccgctgctcagattgcagggcctccttcctcgaccgcgtggccctcacccggcaccaagaaacccacacccaggaaaaaccccccaatcccgaggacccccctccagaggcagtcaccctgtccacagatcaggaaggtgagggcgagacccctacccccacagagagcagcagccatggggaagggcaaaaccccaaaaccctagtggaagaaaagccctatctgtgccccgagtgtggagccggcttcacagaagtcgcagccctcctgctccataggagctgccacccaggtgtctccctgtgaaatgggtctggagaccaggggcctcgctctctccagagaggaacactggattttttcccccaaaaaaattacatggggaagggaggataaccctatcagatggtagtggagtggaggagaaagaaccctgggaaaaaatagtgcttttacatcagtgatgagaaaccctataaaattgttggtgggaagcacttataaggcagtagagaaaaactgttgggttagaaaccctataaatatgtaggaaaaaaaaaagccctttaagtctgtagcagaaaaaccctataaaccatagtggataaaagccctattaattgtaggaagaggtcccaatatgtctctgaacaaccctataaaattgtatcaaaatccttaggaaaatcctatagggtcggggaagtaccgcaatggcactgacccgggagtaacgaccctcagatgatgcagaaaacacctctccctcactgttccacaatgttctctcccagcagccctggacagttctcatggaggaagatgctcagctgggggagtggtgtgggaactgggtggaactgaaaaggaagaaaataggagaaaaataagtgaccaggggctctggagcccccagaggagataagacagagactaggaagaaaaggtcccactcactgcactggggtccttggggtttgaggacaatgttagatgcattgtgtgttttagggaaagaggcctatggaatcccttatcaaaaccccaaaatggggaagaaaaaacaaattggcaagcctttttaaaggctgaagtttggggtgcagaaacatggtcagtataagaatactgagaaaccaccacaaaaattagggggaagcagggggcagtttctgttagattgctttgaggggagcaaaccaaggtggggaaactgctcacatggaacccagctaactccaggccccttcttgcttccggaagcttgcgaaactgcaagtagcaggcaggtcccagctctcagagtgcaagggttctccccacaccaggcaggaccaccctttctccctgcccagccagggacttctactctgcaaggcctccagggatggcggttgcctcccaccacattctcaggtctcaccttcaggaggtttttcctgaaatctaactgccgccagtggcagctcatttcctcaaattctgtcctcagtggagagggagaaccgctgctagtcgacctccaaagaataaagcccttcagagacttagggcctgcgtgtgggcctccccagccttctccaagtcatcagggccacagaatttcttagaaagctttgattagccagcaacttgattttaaacttcagctattcatctttgttggtagcaaggctgccccgcaggataaggcagccctcctccctggtggggatccagacaccccacagactgagccacaggtccctgaagagtccgcagaggccgtatcaccctcttcaccctggtacctggagccctccagggttgtgagatccagcccaatctcagccttgagatggatgggatggattccactcacttggctcccctctcctccttggccagaaaccttcagaaggaatcagaaggatgagaaagcctcccttgccaggcccatctcacctcccacaccacacagttacacattcataaacagccaagcctgctcacaggcctgggcatatgtggctggggagagactgttgccctatgagatggtggaagacagaaaactcttgaatgaaacatctgtaacaagactcccactccctaatcctggagaccccttcaaaaggagaggactctgctcagcgctgggtcagaaaggaagtgcttgccaaccccagtaatgcgctgtcctggagtaagaggactgagatgccagctgtggggcccgtcaggagtcacgtctcaagagaggggtgacccagatttttgcaaagctgtggaagagacctctaattccatgacctaaagtttcacacaacctttatgcaaatccttcgccatttgtctatcctggccccagcaggatgaccctcacatttaaaaggatcaaaatctcaaacattgtgggaggaaaacgccaggcctgctggggagagggagaaggcaggcctcaggattgtgcggagaaccatgttgccatctgcataacgccccagcctatccaagtgccaggaagggaagcactactgaggggggtgctgcctgtgggtctcttcctaacagaacgccaacgaagggggtgccctgtaagaatgagaagtctgccaagtctaaggagatgtccccctccccaagatggtagcagaaactgaagttgtaaagacaaacctctcgcaaagccagaagcagatgctctcaaaaacaggcctaaggaatctgttcccagaagaggcctggggagcagcttttggggctcagaggccagtctggggggaggcaggcagtgtgactgaaggccggcgcaggcctgtttcggactagggtgtagcatatttagtaggatgctcacatgttgtagggatgggtgagggctaaggggcttggctcttgtacgggatggatgatgtgagcgcacagttcgtagggtcaggcgtcttgcggtaggaaaggggcagggttcgatacctctggggtgtggcgtgttctctcttgcccacctccccaagctcctttaaccaggagcttccctcccagagtgagctacgtcttgggaggattgaagcagggaggtggcagtggctagagttgctcagatcggctcagatgaaggcccaggggtcaaagcatttgctcaccacaactgagtctggaaggcactgtgcagccaaaccctcttgtccaatcacatgcaggccccaggcccctcagaaacgccctggtggagggaggagcccaacagatagggtcagggagtcagtggggaaagcagaggggagagcttagagtgaaacttgaaactgctatggacatggaggtcagatgggaacttggaactgggcatgaatcctgaatggtggggaaacttgaagccatcacagccaagaggtggggttccatgacctgccctgaggtcagcagctcccagactcctttgccctcactagggaagccccagtcaccggacttgtccccatggagtgaagagaggccccatttttgagtgttgtgtgtccaaaacagtgttgtgtcactggtggtcatgttgcttagttgaagagaataaagggaataagatttcctggg

SEQ ID NO: 15681 - DNA, 1700 bp, Homo sapiens
cccggggcctagatgtttattttataaagcactgtaattttgtagctgatgacaaaaggcagccaaatgtttttgataaatcagtggcaactgtatttttgtcttttgaaataactctgaaaacatcaggacaacatagatttcaacctgatagcacaccacacacagtgagctgttgctttttaaattctgaagccttgtcaggtttgcttcctagatttcaagtgtttaaaataattctatctatgaaactgaaggatgaagcagatctctgactgacatgtaaaaaaaaatgccctttgagggtgtatggtggagataaatgtttctgaattcagtaaaattgattcctaagtatattatcctaatcctgtttgctacagttggtataaaaaggcatgaaatatgtattcaatacctcttatgtaaccaaaaccatttttaattagcttttaaggactgagagagcatcatgttcaactggcatgcagtctgcctgcattgccaatgaagtcctcaactgtttaatattttgaactaatattatttataatctatgaatttaatcttttttgaaagactttaataatttgagtctctgagaggatactttcaatttccatgggggacttatttgttggggatcttaaataagattccttttgatctaccggaatatacatgtacagagtacatttggatcatgttggaaagaaggcaagtgaaaaggtcagagatgaagtagcgaagttatggaatatccgtggaaaggatactagtttgtgaaatggaaagagaccagttatagtaccccaaaagcaaaacaagcaggagatgcaagagatgccccaaaaggacaaagcaacaattttctgttgccacctttataccggaagactctgttgtagaagaaaagaaggctttggtgcaccttatgtgggaggaggaggggcagggcatgctgatgctgagcgtacaggcagacaagagcgtagcctgctgttgcctccatcactatgaaatgacttattttacctgaaggacccatggtttatgttcctctaattcctttcactctccctaagccctctgagagagatgaagatagatgattttattgctactaaattgaagggagcactatttctttttgtcttttgttagcaaaaaattgcaaaaagaattgtacattcttgctaaaaataaataaataaataaaaaattaaaaaaacaagggacctaacaaaactcagcagtgttactgtattttttaaaaatatttttatagactcattttcaggttattaaatgtaagagaaacagatacccctcttttttaaagtaggtaaatcattgatgatttatattaccaatttttagaagtaattttctagtaagcttgtggcatcagaaaatactagaagatttttttagttaaattagttagaacatttatgaatgaatataataaatattttttcagaataaaatatggaccctttgtgtttactaatagataaagccagatataattttttgtttttaaggccacaaaatatggcctttgttaaagaacactaaagttagaaatctaaagttagagcaactttttaatggctatttcctattattgtaagtgttaaaacccctgcagaattcttgataaggtgctatttatactatattccttattatagtac

SEQ ID NO: 15682 - DNA, 414 bp, Homo sapiens
cggacgcgtgggcggacgcgtgggttctttttggcttaatctttgttgaattgaaaatatgtataactcttctgctgaaagtgtagcaagtacagtcatgaaattttgtggtcttcctgacatgttcttccagcataacgttgccacctttagttggaaacgtatccttatctaataattaagccctggagaaaaattaatttatatattttattaattacataaggacattgttattagctaagcagagtaagtaaatcgaaataaaactttaaaaatgcctttatggagagaatgactatctctgaaagcttgtttttaatgatgataaaattcatgatcagaatttgtttctgtttgctttaattcaggggtcaaaaactgaaataccatcagaggcccaggaggggctag

SEQ ID NO: 15683 - DNA, 1328 bp, Homo sapiens
ggaagggacagtcggccgcagaccgcgctgggttgccgctgccgctgccgccatcgtgccagcccctcgggtctccgtgagggccgggtgacgctccagaatgggagacaagccaatttgggagcagattggatccagcttcattcaacattactaccagttatttgataatgatagaacccaactaggcgcaatttacattgacgcgtcatgccttacgtgggaaggacaacagttccaggggaaagctgccattgtggagaagttgtctagccttccgttccagaaaattcagcacagcatcaccgcgcaggaccatcagcccactccagatagctgcatcatcagcatggttgtgggcccagcttaaggcggatgaagaccccatcatggggtttccacccagatgttcctattaaagaacatcaacgatgcttgggtttgcacccaaggacatgttcaggctcgccctgcacaactttggctgacctcctctcagctaggcactcacgctgtttcctcctccctcctcttcccaatactattcccactcctccagatgctccaaatatcatgcacaaatgagcagggcccgcggtgggagtgggcgcagtgcgctgctgccactgaggtgttgtgcatgatgtttggatgctagactagttgcatctgacgggagaagtttgtgttgtaccagcgcatgccttggaaagacttaagtaatgcaaaaggttgtcctttttgtttttttttttttttttaatctactgacaagttgctctagtaacccaaagaagtgaaggagaaagcagctgcctcaccgcccagacattgatttgttcagatgtttcaatgcctcatgatacaataaaaccacaaaaattttcttaacagtttaaattgttttaattagtttactagttggctgggcatcagaagctacccagacccgttgtctctctcatgtttcaccctcccacttctgccccaactctgaatacctgttgcagggagaaactgctgaagcagcactcccagctaggcctctcagaagccgtgtagggcagttctctcccactccacaggggcgactggtctttggaaagcagggcaggaagagctcaggtctggcctgaagcttctctcactgaagcctgtgcagtcagttctgatacctcctgtgacttctgctctgggtaggttcagggccctagtagcaggagagatgatcctgaatcctgttgaagctggagaggccttggcaaaatggctcatcacgttcaggccctccgggctgagttgttcagcagttattcaagggaggggcc

SEQ ID NO: 15684 - DNA, 1631 bp, Homo sapiens
aatcacttatgaaactgttagcccttaatatgcatcacatttgtggttccatagtgcttctcctttgcttgtttgatctctgcatggcagcagtggggcagctccacatttggagcccatactccaaaatgcagagcactcttctcacagcacacattcccagccccaaacaaaacctgaattttcaactctgcccattaaagtgaatgtatccctgtaatttagtatgtacttattatgggaaaatgtaacaaaaggcagagaagtgtgattttcattctgtattcacaaattgaagcaaatcaacagcaaatacagcaggattcagggaggcttagtttacaacgtactttgtacctcctgccatttaaattattttgccactctgggcttctgaaaacacaaagggagatacagccctccaactatgagccttgcagagagagacaaaagggccagaggtcctgggatggaatactagagcccccatcttctcatgctttggaaacctgccagagcgcttaccctgctggaagattaatgaagactccattctgtgtttcataacagtagcgttgttttctccatcaaaaacagagggtcacagaaatgtgctgaaaagatgtggtccagcaaggttctgtagtcccacctcagtgcctgtgggctgtgtttttcactgtaacaagcactttggtaaactagaaagaataaaggattctcaggatgtgttcaaagctaagagagttttcattttaaaaagaaacatacatactcactccatggctttcctcatcctcctctcttttttcttcttggtgggaagctggatgcggggcatgcatcattctgtatggacaaatgtgttatgtccacccatactcttgtgacaactccccagcactgtcctggcaataccatgctggccttggtagtaaaactccttggtatctgtgagagtcctctttttctatgccctagactacttttaaccacttttctctggaatgactcccacatttggttgggtattgaaagggtaacagcaaaatgatgattgtggagatggatctattaggtctcatgttggtcccctggttgaaactattttcaaaaaagccccaacaatgggcctgtcaccttgctagtcatccattcttaatgcctatttatcagccctctgaggtcatataaaagttgcaccttttgaaccaagtatttgtatttactatgggaaaggtgtggactacagattcgtattatattattttaatggattttaagtaatttataagtatgctgagtgtaaattttttttaaaaactgtattataaaaggacatatcctgtgaaatataacattttactgtttaatagaataattctataagaagaatgatttatctcacccacggaactgattacattccggatgcaatcaataggcactttgtaatttcctttttgtttttttttctttgctggggggttgaggggtaacaagataccatctgtataaagtgcagtttgtgtcactcaaaatatgcactgtatggctacacaaaagcagcttgatgaacaaatcaccccatggctcattaaagaacaaagcttccagaaaaaaaaaaaaaa

SEQ ID NO: 15685 - DNA, 1733 bp, Homo sapiens
tttttaaaggttgggagatatttattttctttaaacaaggtcataaataacaaaaaacaaagtaggtcccagactccggaccatgcagcaggataggggttggaggttgttgaagtggaaaggtggagggggctacacatcacctaagacagtcacagaaaagatgggcttcaggacactgccccttcctgcccttggaaatggcgtgcctgggcaatagggacaggccacagtgctgtgtcgaggcagctggaagaaggcaaagactggggatgccaggctgtaatgtttctgtgtggagtgatgtgaaatccacaaatggcaaagagaagctgtaggtttgaagaggcaagggggcactgcacacctccaggaaccagttatgaaaatggttaaatttgatgattaaaaacaattccataggctttggcctgtggctttgtgcatgggctgtatttaacctgggttgctctgtggcaggtgagggcgcaggaggcccctggagcagcctggcctcagcccagggcaggtgcccagacatgtgggagtgggacagtgggctctcccagatgggaggccatgtgcttggaccggctggacctgattttcaggctcgtttcttgtgatgctatccaccaccaccgctcgctatggctaaggatgggatcttggcctctctgggtcttccaaacctggaagagtacgactgggataaaacggtacctgactagtgttttatttgaaagggaaaaataaagaccaccccatgcattgtccatcccatgaggcagggctgggccatgccaagacaatctcaaggaatggaggtccctgagcctgggaagacatttgaactcagatgtatcgcctgatgctaggaagaggggctcagtatggcaaatctggaggctttaccctaggcaacgcagggagagcaggcaggagctaccccagtacagggaagggaaaggagcaggggcatcacagtggcctctggtgcgaacgtatttacaacagagctcgatgttgaggaggggtggacagcaggtcactaacagccaggaaacacacactggaatccaccgatgggttctgcaaacctgtgccggatcaggaaagtggcaacagcttcagctaccttgtcaggggcatcctcatggactgcatggccacactggggtaggacctgcatctggaacttcccttgcatctggccaatggtcagatctttatccaatctatcaacaccagccaagagcagcaatttaggaatgggacaactaagaaagagattggataagcctcggaaccagccgtcccagtatttttctgtttttgccagttcaattctccaggtgtatggatggtctttcttggtctccatgtcatcttcctttttcctcttgcttatagactcacttccttcctcatcttcttcttcttcctctatgattccttccactatagattttgagccttctggacttgtaattccttcacactgtttgacttggccaaccattgagacacgggcagactccagatttcgaatctggccactcttcacactccattcaatagcattctccagagacttgaaggttttaggacgaccccgtaagaaattctgcatgctattaagtgcatccatagctgtaccttctacaacatcaatcatgcacagacccaagaggcttggtaccatggttggatgatgctgtgtggactgcaag

SEQ ID NO: 15686 - DNA, 512 bp, Homo sapiens
  misc_feature (1)...(512): n = a,t,c or g
gctggctcctgccttcagattgtgatctttccaggttggtagatcagcttaggtagaacagttctcggtgagggccagctacatacctggctaagcgctgcccactgcagaaaagctcatcacccgggacctgatctccaggactcagaagcacttggaggaaggcctattcacttagaagcagttaccagtgctgggcagtgtcctccaagtgccagaggagtgctgtggagaaaagaagtccatggaagccaggagatgggcaagattttgcctcttcaaggtgaatgcggcttcaaggggctatctttgtgctcctgccccacctggggcccatcctggtctggctgttcactcgtgatcacatgtctggttggtgtgagggcccgaggatgctgtcctgggtgcccatttttacaaagtcttatttgcttgttacagacagccatctaattctgtcgttgggttatgcttcctaaccgggttttggaaggacctgggaggggtntttg

SEQ ID NO: 15687 - DNA, 759 bp, Homo sapiens
cagggcttgaggaacccgcgccatgaagtgcgtgtttgttaccgtagggaccaccagctttgacgacctcattgcgtgtgtgtcggcgcccgacagtctgcaagtgagtgagggaggcgagcaggcggcggcttggctcgccacccgccatctccggccatactgccagccgcgttagccttgcctgaccgtcgcgctcggaaagaaacccccgcaactctaccacagaaaatcgagagccttggttacaaccgacttatcctgcaaattggtagaggaacggtggtacctgaacccttcagtactgagtcgtttactctggatgtttacaggtacaaggattccttgaaagaagacattcagaaagcagatcttgttattagtcacgcaggtgcaggaagctgtttggagactctggaaaaaggaaagccactcgtagtggttataaacgaaaagttgatgaacaatcatcagctggaactggcaaagcagctacacaaagagggtcatctcttctattgtacctgcagcacgcttcctgggctgttacagtcaatggacttatcaacactgaaatgttatcctcctggccagccagaaaaattttctgcatttttggataaagttgttggattacaaaaataaacactaaactctcaacactttaaaagcaacccccaaattcaacctatgtaatgtgattaaatcaaattaaatacataatatatatttacaaaataaaaaaaaaaaaaaaaaaaa

SEQ ID NO: 15688 - DNA, 825 bp, Homo sapiens
  misc_feature (1)...(825): n = a,t,c or g
cattcctgaacccctggtatgaggccagcctgctgcccatctatgcagtcactgtttccatggggctctgggccttcatcacagctggagggtccctccgaagtattcagcgcacctcttgtgtaaggactgactacctggactgatcgcctgacagatcccacctgcctgtccactgcccatgactgagcccagccccagcccgggtccattgcccacattctctgtctccttctcgtcggtctaccccactacctccagggttttgctttgtccttttgtgaccgttagtctctaagctttaccaggagcagcctgggttcagccagtcagtgactggtgggtttgaatctgcacttatccccaccacctggggacccccttgttgtgtccaggactccccctgtgtcagtgctctgctctcaccctgcccaagactcacctcccttcccctctgcaggccgacggcaggaggacagtcgggtgatggtgtattctgccctgcgcatcccacccgaggactgagggaacctaggggggacccctgggcctggggtgccctcctgatgtcctcgccctgtatttctccatctccagttctggacagtgcaggttgccaagaaaagggacctagtttagccattgccctggagatgaaattaatggaggctcaaggatagatgagctctgagtttctcagtactccctcaagactggacatcttggtctttttctcaggcctgagggggaaccatttttggtgtgataaataccctaaactgcctttttttcttttttgaggtggggggaagtangagggtatat

SEQ ID NO: 15689 - DNA, 1273 bp, Homo sapiens
  misc_feature (1)...(1273): n = a,t,c or g
tacctcttcaggatttattgggtcagggaagggcctggccagagaatctgtcctgaggtgtccctggtactgcactcctgagtttctccctgagttgtctgccgctccttgttcagccataccaccatggggtgactctgtcaagcacctgggggtcctgggtgcccagcttgccaagtgatcttgggcctattccttgccctccctgagcctcagtctctcatcctccatgggaggatggtaattttcctgaaaaagacagggccgggcccacccagggtccacttccactcagcatcttggattccagggaagcagacagcgttcaggtcctgcccttctgtgactccctggcaggccactgcttcttgaagcctttgtctctaagcttctgtccagctcaaacccacccaggtgccagggtctttggacaccagggagccaggggntccacattccctggcaggagtaggaggttgacatgaagcaggaggccgatgcacaggcccaggtaccagagtatgatcaggaggagctgggcttcccccactgttggggtagaacttgcgcaggctggagtccaggaggaaatccaccgacctgtcaatggggtggataatgatggggatggtcaacagcccaagcgcggtggtggtccacttgcggacagccaggggccagcgggtggcagtgcccaggacatagagagaggcagcacacacgcggttgatggtgaagcccggaatggccacagaggctagagcctgccatacaaaggtgtccaccacagccacagtcaccctggcgctgcggcctgcttcagggctgggcacctctccagccttcttgcctttgtcaatggcatccgccagcacgtaggagctggccacgccatagctcagccacaccaccgccgctggcacaagagagcggaaagcctcgcccaccttattggcatagcccaggtatcgcacccacgtgtcccggtagagatcgcgctctgcgccccgcggctgcggctctgacatgactctcccgccacgggccccggccactacagccggtactggctccactgcagtctccgccgccggcacttgggtctgcccggccgggacccgccgaaagtcccgcgccgaaggacaggtcaggaaatctccgccagcagggagcgtctgcaaattccccccgcgcaccgaagcccctctcccaggctcgggttttacagactggttttcgtcacgttttctctgagctgttggcgctaatcgcc

SEQ ID NO: 15690 - DNA, 500 bp, Homo sapiens
gaaagatggcgtcctcggagcaggcagagcagccgagccagccaagctctactccaggaagtgaaaatgtgctgcctcgagagccgctgattgccacggcagtgaagtttctacagaattcccgggtccgccagagcccacttgcaaccaggagagcatttctaaagaagaaagggctgacagatgaagagattgatatggccttccagcagtcgggcactgctgccgatgagccttcgtccttgggcccagccacacaggtggttcctgtccagccccctcacctcatatctcagccatacagtcccgcaggcttcccgatgggcgagattacgggcgccctggccattcatcatggcaggcattgcatttggctttcaccaagctctacaagaaatacctgctccccctcatcctgggcggccggagaggacagaaagcagctggaagaggatgggaggccggtctctctgaagctgaagtggcagcgtggcccagac

SEQ ID NO: 15691 - DNA, 924 bp, Homo sapiens
gtggagaactggtatcaggaaagggaaccaggagtagtgatgaagatgatggtggggatggggacagaggacataggggactgtccctcttgaactctgcctttgggcacatgggagatggggacaggaaagatgataacagtggaaccctgtgaagaataggagaatgggaattctaaaataccagttcccaaacaaaccatctctccattggaaaaggagctgttgcaaaccgtgttcatttaagcttctgatgaaaagcaatgtatgtttataagcttgcaagtaacagacaagatgttccaaggccgatgaggaaaatatcgcttccctgtctctgcctctaccttgctgtgcctctctggctttagcagcattggatgttgaattggtttggttcatttctctgaagtcggactgtcaggaggagccagaggttggctttctgggatgtgaaggggacagtgtcagcctaagcctctggagatgcttaggatgctgaattttaaccccttctttcactgcatggcccttcaaacagggattggcaggctccgcgagttacagagtgggtgagtcttggagagaaccaacgactaaggtagcttagctctctgctttgttcttgggagccaagagaatgcaagatcctggtgggtgagcagtggtatgaagaggggacactggtgggtgaacagtggcatggaagtcactgatgcagcctctggccctcagtctccctatcggcaaagtggggggctcttcctatccctaaagagtttcatccctgacaggtggatgggtgaaagatccagagagtgggggtgaggggtgggccctgaagactttttgtctgtagctcttgcatattgagtgtataaacccggcttctggaccaacccaagatgaataaactggggcaga

SEQ ID NO: 15692 - DNA, 1168 bp, Homo sapiens
ctttgtttttatggaacatttttattacatgcctttataatttttcattgttcacaccctgtactgaaacctttttctcaaataccaactcttggctatgttaaatttgtagactttaaaagatgttatctaaattaatggtttaaatatacaaattgaaaatattttctttttagtggcaattttaaaagcaggccttaatatgggacctgcttttaaagtaaaatatgtggtactatgaattactaaattgctatataccatgtaatagtgagtatagctaatatttagtatgccttttaaaaattttggactgcttttcggttttaacaaattctccacatgtgaactactcaagaaattttccctttttaattgcctctatagcactcataagagctagggcattaggataaactagaatattttatgtttatgaatacttgtataaacttaaaagtgttttgatttcccacaatttcccaaaggaatgtttatttattaagagttgtgttgataatttaactgttacaatttcagcagttgaattcagtgaacactggttgaggagtgcctatttctaagcactgggtgtaagaagaaaagacacttgcaaaggaagagctaggattaacataatttctttggtttttctattgcttgttattattatgtaaaaactgggtggcagttcagaaggaagattgtggttacagaagagtgacaaccaagaattttttgatcattaaatcaaattttgtaaacagtggcaggagcgtggacttaaaacaaggcttgcttatttggttttgtcaaagttttacgaaaatatatgatatatatttatactaaaactatataatccttagatttaggaaagcaatcagttaatgtctttagcacactaaagcagtattaaacacaggtacaagttggaaattgtagaaaacggaaagaaaacaaaagacaaaatgtctatggtagggaataaaagagtttaagatattatgtaaaattatgtgtattttcttctcttttacataaattgtttgtgaaaagtgtgctcaacttttttacaagagtgatattaacttggatttatttttcaatataatttggagaccctttgttatccaaataaaattgatgagtttctgtgcctgtattc

SEQ ID NO: 15693 - DNA, 575 bp, Homo sapiens
gtttaaaaatgtggtagcataatgtcaccccaaaaagcattcagaaagcaatgtaactgtgaagaccagggtttaaaggtaattcatttatagtttataactccttagatgtttgatgttgaaaactgctttaacatgaaaattatcttcctctgctctgtgtgaacaatagcttttaatttaagattgctcactactgtactagactactggtaggtttttttggggggggtgggtagggatatgtgggtaatgaagcatttacttacaggctatcatactctgaggccaattttatctccaaagcaataatatcattaagtgattcacttcatagaaggctaagtttctctaggacagatagaaaacatgaattttgaaatatatagaacagtagttaaaatactatatatttcaaccctggctggtagattgcttattttactatcagaaactaaaagatagatttttacccaaacagaagtatctgtaatttttataattcatcaattctggaatgctatatataatatttaaaagactttttaaatgtgtttaatttcatcatcgtaaaa

SEQ ID NO: 15694 - DNA, 2090 bp, Homo sapiens
aagaatattggccccttgaattctggaagttcattgaagagtctgaaattagggacttatttcaaatttggacatggctagtcgaggcgcaacaagacccaacgggccaaatacgggaaataaaatatgccagttcaaactagtacttctgggagagtccgctgttggcaaatcaagcctagtgcttcgttttgtgaaaggccaatttcatgaatttcaagagagtaccattggggctgcttttctaacccaaactgtatgtcttgatgacactacagtaaagtttgaaatatgggatacagctggtcaagaacgataccatagcctagcaccaatgtactacagaggagcacaagcagccatagttgtatatgatatcacaaatgaggagtcctttgcaagagcaaaaaattgggttaaagaacttcagaggcaagcaagtcctaacattgtaatagctttatcgggaaacaaggccgacctagcaaataaaagagcagtagatttccaggaagcacagtcctatgcagatgacaatagtttattattcatggagacatccgctaaaacatcaatgaatgtaaatgaaatattcatggcaatagctaaaaaattgccaaagaatgaaccacaaaatccaggagcaaattctgccagaggaagaggagtagaccttaccgaacccacacaaccaaccaggaatcagtgttgtagtaactaaacctctagtttgaactagctggaatagtcttctgcttcctaaatgttaataacaatggaattggagcatttaaccagcccagtatgacttccaaaagaagagacttatgatagagtcaagtttctaatacagaattattttaagtgttttgaacttaatttttaataacatgcatgggtccctctcactaatgtttcaacaatagggaaaaatgagaactatgtggacacttgtttcattggaaggttagggggaataatttctcatcactaggaatatagacaaatgactgtctgggcccacacagttaaccagcccatttctccacactggtacagtagtcacctgtgaaaaaaaaaattggaacttactaatttgggcttttcaaaaacattctttgtttagaaggagattctaaagttatttatgatgcttagccatagtattcaggcaaatgttcatttctcctggtacctgtatttaaaatgtacattccacattttaataaattaaccacaagaaaataatcccacatatacaaggtcaggggtggggaagagtattaatggtatcttaattatacccagtctggttttttttttaaatggggtaaaaatcaaatgcaaccccatcttgttttaggaattttgagaactaataaatgcaccttaatggtcagtgttcctttcaaacatgtgagttctttaacaaaaatgaaataaaccaggtgtctgtgatttctaattaatcaccgctggccattacacaggttttgttgtttggggtggggagggggcttttgttcccttttgacataatatagtcaatgcactaacaattatgtatattcaaacttgattattttaaattcgatcttcagctgtactgtaaatagggtactgcattgtagtctccatatctgtattacttttctgtaatatttaagagttgcttaaaagcatacaaaatgtactgttactaaaacagctaattatttctctctccccctttgacaggaaggggcttcagttgttcctccatggctagaaccataataaacaatgtaccccgtaatttgtaacataaagtattgcaatatgttagtaacaatcttgcagccttcctttccaaagttcattttattttgatcagttcagtatattgcactaattattttaggtattttcattatatgaaagctaccatgtgtcagagatgatttaatctatttaagtgttggactgctaggagaacttgtacatttatgataatgcagaattaggaaaacggttcaccagtgtttagttttatattgaggtgctcaggttggaataaagtggtataaaaagcaaaaaaaaaaaaaaaaaaa

SEQ ID NO: 15695 - DNA, 1014 bp, Homo sapiens
tcaggagaatcagcatatacaggttatgataggctcccaccatttatgcttcttcactgatagggttgcattactttctgcagcagactataatacttcatatagtactgctgtgtctcaactggaaaggtcaggaattttaatgttacgttgtggtctttgaaaactgttaggcctagcaatagataaatctcaaaattaattttaaaatctgtattgacaagaataggtaaaattatgaccaggaatcattgttacccttagttccaagaggtggtttttgaaagagcaagaggaaagaaaaaagaaaagaaggaaagaagaataaagaagagaaacgtcgtaagaatcggtttgcagattgattggttaaaagtgtttttagcacatccccaaccctgaaaacttcgcattaagagccaagcacaatgttggtagctccaagatattctgactgtgttctcagaatgaggggattacccatcactgggtattccttcccaagtagaaactttagattttcactggtaatacacattgccaagttttatgggaaatctgaatatactgtgaaaatgcatatctggttagttgtctgctgcccagatcttatcaataccagtaactaaccagtatttaacataaaatgatacaaataaaggcctttttctatttcagtgagggtacatttttcttgatatatatgtactttaaggatattggatctgtttatggatctgttttaggaaacagatttgcaagggataattgtatatatagtagtatttaggtttatttcaaattcatcttagggatgcctagatgcataatttttaccaggacatattgaaaatattgcaaagagatagccagttatattatcccattcattagaaattaccagtgtaactaaacataaatattccagtttagagtgcttaaacgtagctatctttcttaaggccaggagggtaactttgtggtatctaaagggcttaaatttcagaatgcaga

SEQ ID NO: 15696 - DNA, 2077 bp, Homo sapiens
cggaggctcgcgagatccgcatgaaggagctggagcggcagcagaaggaggtagaagagagaccagaaaaagattttactgagaaggggtctcgtaacatgccgggcctgtctgcagccacgctggcctctctgggtgggacttcctctcggagaggcagcggagacacctccatctccatcgacaccgaggcatccatcagggaaatcaaggaactcaatgagttaaaggaccagattcaggatgtagaaggcaaatacatgcagggattgaaagagatgaaggactctctagcagaagttgaagagaaatataagaaggctatggtttccaatgctcagctagacaatgaaaagacaaacttcatgtaccaggttgataccctaaaagatatgttgctggagcttgaagaacagctggctgaatctaggcggcagtacgaagagaaaaacaaagaatttgaaagggaaaaacacgcccacagtatactgcaatttcagtttgcgtgaagtcaaggaggccctgaagcaaagagaggaaatgctcgagaaacatggaataatcctaaattcagaaatagctaccaatggagagacttccgacaccctcaataatgttggataccaaggtcctaccaagatgacaaaagaagagttaaatgccctcaagtcgacaggggatgggaccctaggaagagccagtgaagtggaggtgaaaaatgaaatcgtggcgaatgtggggaaaagagaaatcttgcacaatactgagaaagaacaacacacagaggacacagtgaaggactgtgtggacatagaggtattccctgctggtgagaataccgaggaccagaaatcctctgaagacactgccccattcctaggaaccttagcaggtgctacctatgaggaacaggttcaaagccaaattcttgagagcagttctctccctgaaaacacagtacaggttgagtcaaatgaggtcatgggtgcaccagatgacaggaccagaactccccttgagccatccaactgttggagtgacttagatggtgggaaccacacagagaatgtgggagaggcagcagtgactcaggttgaagagcaggcaggcacagtggcctcgtgtcctttagggcatagtgatgacacagtttatcatgatgacaaatgtatggtagaggtcccccaagagttagagacaagcacagggcatagtttagagaaagaattcaccaaccaggaagcagctgagcccaaggaggttccagcgcacagtacagaagtaggtagggatcacaacgaagaagagggtgaagaaacaggattaagggacgagaaaccaatcaagacagaagttcctggttctccagcaggaactgagggcaactgtcaggaagcgacaggtccaagtacagtagacactcaaaatgaacccttagatatgaaagagcccgatgaagaaaagagtgaccaacagggagaggcattggactcatcgcagaagaagacaaagaacaagaaaaagaaaaacaagaagaaaaaatccccagtacccgtagaaacccttaaagatgttaaaaaagagttaacgtatcagaacacagatttaagtgaaattaaggaagaagagcaggtaaagtctactgacagaaagtcagcagtggaagcccaaaacgaggtgactgaaaatccaaaacagaaaattgcagcagaaagcagtgaaaatgttgattgtccggagaatcctaaaattaagttggatggaaaacttgaccaagaaggtgatgatgtacaaacagcagctgaggaggtactagctgatggagacacattagattttgaggatgacaccgttcaatcatcaggcccgagggctggtggtgaagaattagatgaaggtgttgcaaaagataatgctaaaatagatggtgccactcaaagcagtcctgcagaaccaaagagcgaagacgcagatcgctgcaccctgccccgaacatgaaagtccctcacaggacattagtgatgcctgtgaaagcagaaagtacagaggaggtgtgagatgtcagaacatcccaagt

SEQ ID NO: 15697 - DNA, 464 bp, Homo sapiens
  misc_feature (1)...(464): n = a,t,c or g
tttgaaatccgttgncnnnnnnnnnnnnnnnnnnnnnnnnnnnnnnnnnnnnnnnnnnnnnnnnnnnnnnnnnnggcacgagaacggcataacaatgacacagttgactttggggactcgggnnnnnnnnnnnnnnnnnnnnnnnnnnnnnnnnnnnnnnnnnnnnnnnnnnnnnnnnnnnnagagtgcactnnnnnnnnnnnnnnnnnnnnnnnnnnnnnnnnnnnnnnnnnnnnnnnnnnnnnnnnnnnnnnnnnnnnnnnnnnntaaaaaaaaaaagttaatctcatctggaaaataccttttcaagcaacatgtcgtctggtatttggccaaatatctggttactgtgacctagtcaaggngatgtgtaaagttatccatcacaaacagctagattcattccacctacacttcaagggatcgccttgaagaagtcagtatttttgcaganatgcgtctcc

SEQ ID NO: 15698 - DNA, 1537 bp, Homo sapiens
cgcgctctccggccgcgggcatctcccggcccggctcgcagcagccgccgccgccgcgcatttccctgaagcctgggctcttgaagacgcatcactggagcagatggataatggagactggggctatatgatgactgacccagtcacattaaatgtaggtggacacttgtatacaacgtctctcaccacattgacgcgttacccggattccatgcttggagctatgtttgggggggacttccccacagctcgagaccctcaaggcaattactttattgatcgagatggacctcttttccgatatgtcctcaacttcttaagaacttcagaattgaccttaccgttggattttaaggaatttgatctgcttcggaaagaagcagatttttaccagattgagcccttgattcagtgtctctatgatcctaagcctttgtatcccatggatacttttgaagaagttgtggagctgtctagtactcggaagctttctaagtactccaacccagtggctgtcatcataacgcaactaaccatcaccactaaggtccattccttactagaaggcatctcaaattattttaccaagtggaataagcacatgatggacaccagagactgccaggtttcctttacttttggaccctgtgattatcaccaggaagtttctcttagggtccacctgatggaatacattacaaaacaaggtttcacgatccgcaacacccgggtgcatcacatgagtgagcgggccaatgaaaacacagtggagcacaactggactttctgtaggctagcccggaagacagacgactgatctccgaaccctgccacaggttcctgggaagactctccaggaaatggaagatactgattttttttttaaatcacagtgtgagatattttttttcttttaaatagttgtatttatttgaaggcagtgaggaccagaaggaagttttgtgctttggcagactcctccatgttttgttcccttccccctgagtatgcatgtgcctgttcagagtctccagataccttttttataaaaagaagtctgaaaatcattatggtatataatctacccttaacagagcttttcttattacagtgctaaaatgatttctgataaaatggtccctaactcaactagaaggctaaaaatacaagaatgaaagaataagcagagtactcatgatgcctttgagaaaaatcaaaacatcatgtagggtgacctagtttccaaaccaataaataagtagtattgtaatattaaaggaaaactgttccaatcatttaaaagtacttattaagtactgctttttacagttatgacaactgtttctttctatgcatataaatcaaggaaccaaatatctgtagccatggaaatgtctgactagaaatatttatattgaattctgaatacaaaatgtccctgtggtagaaaacttactctttatgcctggtgcagtataattcccaagtgtactgtctaccagaaaaaaaaaacaaaactaataaaaaatgaaatatg

SEQ ID NO: 15699 - DNA, 456 bp, Homo sapiens
cggctttggtgcttgctggagcccaggccttcaggttgcagatggttctagagcattgcctttgcaataaacagtgtttttgattcttgactgtttttactcacatcattcccttttctgagttgcattatccccacctggcaggtgaactaacgggctcaagaggagtggattctggtggcctcagtcccctgtagggcctacaggcttgatctggagccttttggggacaagaacctaatgtttgtttcctgcagtgctgagaggggtttggggtagcctgggatttcatatccttggagtcagataccttctcactggataaccttcggctaaccacttagctgccttgagtcttctaaaactgggataatagtccctccattgtgaggactaaaaaaacttaaatgcacaaaaggggcacggcaggaggcctggcttcctgaggtaaatgcc

SEQ ID NO: 15700 - DNA, 469 bp, Homo sapiens
gtaaccgctaacttgactgggatgaactagtttgcttgtgtgtagagagtgtattgcttcctcaggatttcactgttttcatctccttttccatcttagtctttattccttaagaccaaaaactgtaatatcctttagaaatgctctagaagatctgtattgtgtagaatgatcatgtatttataaatattttacaagtttagattataaaatgaaaaagaaggtcatgtgttttggggggtattttgcatgttcggatttttttttcccttcaccgaacccttctgattctttcaaactattgccaggtagttgttagtgtttctaattggactcttaatatgaacttcaagaagctgttaccagttatcggctctgtcatctgaaattttaaccacttaatttaaagttacaattttagaatttgtttttgttgttttaccttaagaaacacaataaatcactgttt

SEQ ID NO: 15701 - DNA, 956 bp, Homo sapiens
  misc_feature (1)...(956): n = a,t,c or g
tcacattgacatggtgggtgccctccaccttccgcaggtcgctgccatggcccacagccaccatgcagttgatgcagagtagctgcacgtgctccactgggaactgctgccgctggttctcccgctgggctgcctgggccgcccgcttggtcaaggctgcctgctgcagatcccggatcttggccttggtactcggcctggtccatttatctgcacagcagccactgcctgctccatcagcgtctccagcgcctcgttgaatcantcncgcttcagctcccggctaccttnagttgctacaaacgcgtatacactctggantcgcccggcnacgccctggcctggaccatggagatttcattggtcaagagcccataacgcaccaccacattgcaatgtgggatgtccagcccctcctccgcaacactcgtggccaccagaaggttcagggttccatcttggaacttctggatcacttcttgctggtccctctgggtcatgtgggtgctctggctgctgttcccagccccaatcagtagctgggcccggatgtccacagtctgcaggccctgctgctgctggagccagagcaggagggagtgtgcgctttggcgggtgcgggtgaagatgataccccgagggctgttagagctactgaactgcctttgcaggatcttttccagcatctccagttttggattctctgggccatgagttgccaagtgggccagctcattcttgcggtcatcgaacaggccagcagccggcgctctggcacacaggatctgggttttagtgacgtgctccctgtgatagaaatcctgcagcgcaccaaggcatccacggcgcggacggtgtcatggatgagcagcgcgtcattgtagcgcctcaggtgaagcgcatacacccgttgctcctgaagcccagccaaagccgcagcctcactcagcttcacg

SEQ ID NO: 15702 - DNA, 574 bp, Homo sapiens
tttttttttttcaagtcaaaattgggtatcttttatctgtttcttcgttgtggtgaagaatgttgcctggattccttccatctaaagacttgattgttagacctgtggcagaactctagatctgactttagccttggggaagcaaagaggacaaaacctaaaagctcaactttctgcatggtatgcatgattcaatgagctctttctgctttggagtctgttggcttggagactcggatatgatagggcttcagttcctcaggagggacagaatctggggtattgctcatgaggtcatgtccccggaaggactttgggaaggctatgacatctctgatgcttggagatccagtgacaaggcatatcagtctgtctaaccctaaggcaattcctccatgagggggtgccccataatctaaagcctggagcagatgggagagcattttcacatcctcctttagtaaggttgccaggatataacgctgcagctctgcattgtgaattcgaattgaaccacctcctatttcattgccatttaaaaccaagtcatagtgttggctacgggcctttttgc

SEQ ID NO: 15703 - DNA, 589 bp, Homo sapiens
  misc_feature (1)...(589): n = a,t,c or g
cctcgtgccacgcctgagctgctggctgtcatgactgccatgggcaatgccctcgccaacagcgtctgggagggggccttgggtggctactccaagccagggcctgatgcctgcagagaggagaaggaacgctggatacgggccaagtatgaacagaagctcttcctggccccactgccaagctcagatgtgccactggggcagcagctgctccgggccgtggtggaaagaatgaactgcggctgttggtgatgctccctggcacatggctccaaagaggaggtgaatgagacctatggggacggggacgggcggacggctctacatctctccagtgccatggccaacgttgtcttcacgcagctgctcatctggtacggggtggacgtgaggagccgggacgcccggggcctgactccactggcatatgcctcgcgggccggcagccaggagtgtgcagacatcttgaatccagcatggctgccctggggagggctgtgcttagcgcctacccccaacagagagncctccaatggcaccaacccctctgctgagctgcaccgtagtcctagcctcctatcaagcccag

SEQ ID NO: 15704 - DNA, 3136 bp, Homo sapiens
accacaccaagcagcggctgggggggggaaagacgaggaaagaggaggaaaacaaaagctgctacttatggaagatacaaaggagtctaacgtgaagacattttgctccaagaatatcctagccatccttggcttctcctctatcatagctgtgatagctttgcttgctgtggggttgacccagaacaaagcattgccagaaaacgttaagtatgggattgtgctggatgcgggttcttctcacacaagtttatacatctataagtggccagcagaaaaggagaatgacacaggcgtggtgcatcaagtagaagaatgcagggttaaaggtcctggaatctcaaaatttgttcagaaagtaaatgaaataggcatttacctgactgattgcatggaaagagctagggaagtgattccaaggtcccagcaccaagagacacccgtttacctgggagccacggcaggcatgcggttgctcaggatggaaagtgaagagttggcagacagggttctggatgtggtggagaggagcctcagcaactacccctttgacttccagggtgccaggatcattactggccaagaggaaggtgcctatggctggattactatcaactatctgctgggcaaattcagtcagaaaacaaggtggttcagcatagtcccatatgaaaccaataatcaggaaacctttggagctttggaccttgggggagcctctacacaagtcacttttgtaccccaaaaccagactatcgagtccccagataatgctctgcaatttcgcctctatggcaaggactacaatgtctacacacatagcttcttgtgctatgggaaggatcaggcactctggcagaaactggccaaggacattcaggttgcaagtaatgaaattctcagggacccatgctttcatcctggatataagaaggtagtgaacgtaagtgacctttacaagaccccctgcaccaagagatttgagatgactcttccattccagcagtttgaaatccagggtattggaaactatcaacaatgccatcaaagcatcctggagctcttcaacaccagttactgcccttactcccagtgtgccttcaatgggattttcttgccaccactccagggggattttggggcattttcagctttttactttgtgatgaagtttttaaacttgacatcagagaaagtctctcaggaaaaggtgactgagatgatgaaaaagttctgtgctcagccttgggaggagataaaaacatcttacgctggagtaaaggagaagtacctgagtgaatactgcttttctggtacctacattctctccctccttctgcaaggctatcatttcacagctgattcctgggagcacatccatttcattggcaagatccagggcagcgacgccggctggactttgggctacatgctgaacctgaccaacatgatcccagctgagcaaccattgtccacacctctctcccactccacctatgtcttcctcatggttctattctccctggtccttttcacagtggccatcataggcttgcttatctttcacaagccttcatatttctggaaagatatggtatagcaaaagcagctgaaatatgctggctggagtgaggaaaaaaatcgtccagggagcattttcctccatcgcagtgttcaaggccatccttccctgtctgccagggccagtcttgacgagtgtgaagcttccttggcttttactgaagcctttcttttggaggtattcaatatcctttgcctcaaggacttcggcagatactgtctctttcatgagtttttcccagctacacctttctcctttgtactttgtgcttgtataggttttaaagacctgacacctttcataatctttgctttataaaagaacaatattgactttgtctagaagaactgagagtcttgagtcctgtgataggaggctgagctgggctgaaagaagaatctcaggaactggttcagttgtactctttaagaacccctttctctctcctgtttgccatccattaagaaagccatatgatgcctttggagaaggcagacacacattccattcccagcctgctctgtgggtaggagaattttctacagtaggcaaatatgtgctaaagccaaagagttttataaggaaatatatgtgctcatgcagtcaatacagttctcaatcccacccaaagcaggtatgtcaataaatcacatattcctaggtgatacccaaatgctacagagtggaacactcagacctgagatttgcaaaaagcagatgtaaatatatgcattcaaacatcagggcttactatgaggtaggtggtatatacatgtcacaaataaaaatacagttacaactcagggtcacaaaaaatgcatcttccaatgcatatttttattatggtaaaatatacataaatataattcaccattttaacatttaattcatattaaataccgtacaaatcagtgacatttagtacattcacagtttgtgccaccatcaccactatttagttccagaacatttgcatcatcaatacattgtctagagacaagactatcctgggtaggcagaaaccatagatcttttgtgtttacagctatggaaaccaactgtaccataaagatagttcactgagttttaaagccaagccacatcttatttttccaaggtttaatttagtgagagggcagcattagtgtggagtggcatgcttttgccctatcgtggaatttacacatcagaatgtgcaggatccaagtctgaaagtgttgccacccggtcacacaacatgggctttgtttgcttattccatgaagcagcagctatagaccttaccatggaaacatgaagagaccctgcacccctttccttaaggattgctgcaagagttacctgttgagcaggattgactggtgatgtttcattctgaccttgtcccaagctctccatctctagatctggggactgactgttgagctgatggggaaagaaaagctctcacacaaaccggaagccaaatgtcccctatctcttgaatgatcaagtcacttttgacaacatccaggtgaatataaaaacttaataaagctgtggaaaggaactctt

SEQ ID NO: 15705 - DNA, 1172 bp, Homo sapiens
ggcgaaacgattgagacaccagctggacgtcacgcgccggagcatgtctgggagtcagagcgaggtggctccatccccgcagagtccgcggacgcccgagatgggacgggacttgcggcccgggtcccgcgtgctcctgctcctgcttctgctcctgctggtgtacctgactcagccaggcaatggcaacgagggcagcgtcactggaagttgttattgtggtaaaagaatttcttccgactccccgccatcggttcagttcatgaatcgtctccggaaacacctgagagcttaccatcggtgtctatactacacgaggttccaggctcctttcctggagcgtgtgtgggggcaacaaggacccatgggttcaggaattgatgagctgtcttgatctcaaagaatgtggacatgcttactcggggattgtggcccaccagaaagcatttacttcctaccagccccccaacttctcaggcctcagagggggcatcttcagatatccacacccctgcccagatgctcctgtccaccttgcagtccactcagcgccccaccctcccagtaggatcactgtcctcggacaaagagctcactcgtcccaatgaaaccaccattcacactgcgggccacagtctggcagttgggcctgaggctggggagaaccagaagcagccggaaaaaaatgctggtcccacagccaggacatcagccacagtgccggtcctgtgcctcctggccatcatcttcatcctcaccgcagccctttcctatgtgctgtgcaagaggaggagggggcagtcaccgcagtcctctccagatctgccggttcattatatacctgtggcacctgactctaatacctgagccaagaatggaagcttgtgaggagacggactctatgttgcccaggctgttatggaactcctgagtcaagtgatcctcccaccttggcctctgaaggtgcgaggattataggcgtcacctaccacatccagcctacacgtatttgttaatatctaacataggactaaccagccactgccctctcttaggcccctcatttaaaaacggttatactataaaatctgcttttcacactgggtgataataacttggacaaattctatgtgtattttgttttgttttgctttgctttgttttgagacgga

SEQ ID NO: 15706 - DNA, 2283 bp, Homo sapiens
atggtctggctgcactcagtgccctcaagcaagggctccatggaggctggcccttacctgccccgagccctgcagcagcctctggaacagctgactcggtatgggcggctcctggaggagctcctgagggaagctgggcctgagctcagttctgagtgccgggcccttggggctgctgtacagctgctccgggaacaagaggcccgtggcagagacctgctggccgtggaggcggtgcgtggctgtgagatagatctgaaggagcagggacagctcttgcatcgagaccccttcactgtcatctgtggccgaaagaagtgccttcgccatgtctttctcttcgagcatctcctcctgttcagcaagcttcaagggccctgaaagggggggtcagagatgttttttttacaaagcaggcctttaaagaattgctgatatgggggctgacagaaaacatcggggacagcggactctgctttgagttgtggtttcggcggcggcgtgcacgagaggcatacactctgcaggcaacctcaccagagatcaaactcaagtggacaagttctattgcccagctgctgtggagacaggcagcccacaacaaggagctccgagtgcagcagatggtgtccatgggcattgggaataaacccttcctgggacatcaaagcccttggggagcggacgctgagtgccctgctcactggaagagccgcccgcacccgggcctccgtggccgtgtcatcctttgagcatgcccggcccctcccttcccggcctttcgccggacgcctgctccctgcctgcccgcgtcgaggaggaggcctgggatctggacgtcaagcaaatttccctggccccagaaacactttgactcttctggagatgtgtccccaggaccaagaaacagccccagcctgcaacccccccaccctgggagcagcactcccaccctggccagtcgagggatcttagggctatcccgacagagtcatgctcgagccctgagtgaccccaccacgcctctgtgacctggagaagattcagaactttgcgtgcagcttctcctctcagcacactttgggctgggatggcagtggggcataatggagccctgggcgatcgctgaatttcttccctctgcttcctggacacagaggaggtctaacgaccagagtattgccctgccaccactatctctagtctccctagcttggtgccttctcctgcaggagtcagagcagccacattgcttgccttcataccctggaggtggggaagttatccctcttccggtgctttcccatcctgggccactgtatccaggacatcactcccatgccagccctccctggcagcccatgttctcctcttttctcaccccctgactttccctgagaagaatcatctctgccaggtcaactggagtccctggtgactccattctgaggtgtcacaagcaatgaagctatgcaaacaataggagggtgtgacaggggaaccgtagactttatatatgtaattactgttattataatactattgttatattaaatgtatttactcacactttgcctctaaggagctagagtagtcctctggattaaggtgataaataacttgagcactttccctcaaccagcccttaactagaacacagaaaataaaaccaagactggaaggtcccctctacccctcccaggcccagagctagctgactgtgtatgagcctgggagaatgtgtctcctccacagtggctcccagaggttccacacactctctgaagctccttctcccacactgcacctactccttgaggctgaactggtcacagacaaactgggatccagcacagtccagcagttctcaaaatgaggtcctcaggccacagtgcgtgagaacttgcttggctgtttgttaaatgctaattcttgggccccatcagagctactgcatcgaaacctgggggtaaaaccccaatattctgcatttcttatcaactctttgggtgataactaagtgtctgaagaggtgactatttcctgacagaaggacccaaagagggaagcaggacataggtaggcagacagacacagggccctgtgcctcaagacacctgtttattggggacacgactctgcaatagggatgacaggaatcgtaccaaaaatagcgacgtctacaggcgcgcctgatggggctagaagggtacagtgcccccaaccctcaccccttgtacaaaaataaactctcacgcctatggaccaaaaaaaaaaaaaaaa

SEQ ID NO: 15707 - DNA, 910 bp, Homo sapiens
atttctaaactgtaaatgcttgaaacgcaagttggacattttctatactatgtgtaaaatgccaggttatacctctattttctttcttcctaatggtcattgaaatgagcttgtttctctacattgagcaagctacattttattttaaatgagtcaggtgcatgttcagatgtctgtattcccaatacattgcatgcagcctgagcacaagtatgccttcaccctctgggctcttttcctgacaccaaacagagaagtccacagctacaagcacaaggggcttgacaggtagggccttgttttattatgaacaaattcaccagaaaaccattcttgaggaaccagccactcccatagcatttttagtcttagggaagaaaattggcagggaagaaaaattggcagacaatgggaaagaggtttggtcaacctgcataagtggaataaagtcattgaagtacttgcaaaaagaagagggaggtttccctctgaaggaatctagaccattttttaatatggagaataactgtaccccatgttagaagtgctctttagccatatttcaagatccagatctgaacccatactgtgcagaaaagcacaagagcgcttacagccaagagccctgggaggagttgagtaacaggctgagatccggtcaccaagcatcattagttagcactgaaattctcccaggacacaaaacaaatgtatggaaacatcgcaatacactatcatttactcacatgggacaaccacctaagtccatagcaaaactttacagatctagatgttatctcaagtcaggattccagatcaacatcctccatgtggagatgagacaactgaggttcagaaagttggagtgacttatttgccccagctagctaactggaattagagtctgggt

SEQ ID NO: 15708 - DNA, 1071 bp, Homo sapiens
gcgtcgacttttttttttttttttttcagcgtctcttaaaattttaatttgttctgacgacgaaactaacacagcataaggacttaagccctcaagctaggcaagacactgatggcccttggagaaagcaccagggcagctggcaggaggcgctaagatggattcttggtgggaaaggaatgaggcacacacataaaccgtgggaaagacttaggtgtcagggcccaagccagaagagggataaggatggactgttccagccttagtctgtgcttaaaaagacagaaatgcccttctctggaattatgagggagaggtctgagggaagggaggcaggcagcttactacttgccctttcactgacctatagcatctgaggcatctgagagcaaagttaaatagaatgaggctggtcgcaagcactgggaagaggtggcggtcctcgggtttaaggagccaaaccctgggcttggaattcagctcccagggccagagcagcatctctcttctgcggaggaggtcacctgagctcacaggactgggaatgtcggctttggaccctcctgatccctggttgttgagattcccttgtgtctcaaaagccttggagcagtgaagtatctctccaggattttctttcccaatcagtcagcagtcaactttcctggaagaatgtcctttctacccaatctgcccaggagggcgggaatgtggccggccctcaggaagggcctctgggtggcctctgcatccctggctggagaatgcgcacagtttgcagaggctcagaactcccaatcgtccacctccagctcttccaggtttgttaccaggccaaagattccactgtggtcctgagactggctgccctcaaaattggtgatgggggtgacaggacgaagcaattcgggcaaagcctctgaggcacgtcgcttgatctgcttgaagaaagagtggttcaggagggtgctggcactgggcctggcatccgggttgcgctgaaggcactgctcacaaagtggtggaagtggggggagaaggttcggtggtaggggtgggagggcgagtcac

SEQ ID NO: 15709 - DNA, 1929 bp, Homo sapiens
tttttttttttttttttgacttttaaaaaattatttaatttagtagttttttttttttggaaaaaaatcaataaggcaaaaaaactgaaaatatatatagttgtgttttgttttcatgtgactttattccacctgaaagattctaaacttcttccattagcgggaatctgattgggatcagccagaaatgtagtgcagatggtgaaggaagagaaggggataaagcagagaagtccaatttagttggggaattctcactctatccaaagccccggatgaggtcactgcttttatgagcctccttgaaagaagccttgacataatccctggcttattttgggaataaggttcttaggaggaaattccccagcagtcaaagtcactcctctcccatgtttatcacaactaggaaggaagggataggggaagaaataaaagtattaatttacccagtaaaaccaatttccccatagggatggcttcctttggaatggtatttcccccaggacccacgctggctgaggctcagcagttaaggaacaaaaacaaaaaatactaacaaaaagcatacaaggaaggcacctcaatttgtgatcctcaaccaagggtgggttgcacaggggatatttctcaacaagacaacaaaaacaaatactgcacaaacagagaaggaagccagggccccacaggagcaattatctgatccaccccacatgacggtgctttaagccccacatcctaggaagaaagttcttttggaattcaggcctatgcgccggacagagcagaattaaattggaagttgccctccggactttctacccacactcttcctgaaaagagaaagaaaagaggcaggaaagaggttaggatttcattttcaagagtcagctaattaggagagcagagtttagacagcagtaggcaccccatgatacaaaccatggacaaagtccctgtttagtaactgccagacatgatcctgctcaggttttgaaatctctctgcccataaaagatggagagcaggagtgccatccacatcaacacgtgtccaagaaagagtctcagggagacaagggtatcaaaaaacaagattcttaatgggaaggaaatcaaaccaaaaaattagatttttctctacatatatataatatacagatatttaacacattattccagaggtggctccagtccttggggcttgagagatggtgaaaacttttgttccacattaacttctgctctcaaattctgaagtatatcagaatgggacaggcaatgttttgctccacactggggcacagacccaaaatggtactgtgccagaagaagagaagccagaaagacaatgaaggatggcattaaggggggttgggaaagcaaaagtggctagtagtctttttccatcctgcctgtgttctcagaagctctccgcctgaggaagtccataaaacccctttgtgaggagaatgcacccccttaccaatgaccaaagtggtctccagttgctattaaagatgatggagaacaacagaggggtgtttgatgcaagtaaaaacagaaacttccaagaatgtaactctgaatattccagccctatagaacaatctctctcacaggtgttccaatatcgcagttatctccgcgtggacactcccattaaaccgacccgcgcgtgtgaacacacttgatgatgttatacctaagctccactgcaaccattcacaatgcctccattggtaagtcttatgtgtttctttttaagggaacttctaaattcggctcttgcttttaacagcaccaaaatgcccctgaatcataatcttagccagatcttggctgagcaggatactacaaggggagggtgagtgacattgtcttaaatgggggcagagggagaaagaagagccaagaatacttgtcgacc

SEQ ID NO: 15710 - DNA, 1759 bp, Homo sapiens
tgagggtcacgtcggtggttacgggttttaacaacttgccggacagatttaaagactttctgctgtatttgagatgccgcaattattcactgcttatagatcagccggataagtgtgcaaagaaacctttcttgttgctggcgattaagtccctcactccacattttgccagaaggcaaggcaatccgggaatcctggggccaagaaagcaacgcagggaaccaaacggtggtgcgagtcttcctgctgggccagacacccccagaggacaaccaccccgacctttcagatatgctgaaatttgagagtgagaagcaccaagacattcttatgtggaactacagagacactttcttcaacttgtctctgaaggaagtgctgtttctcaggtgggtaagtacttcctgcccagacactgagtttgttttcaagggcgatgacgatgtttttgtgaacacccatcacatcctgaattacttgaatagtttatccaagaccaaagccaaagatctcttcataggtgatgtgatccacaatgctggacctcatcgggataagaagctgaagtactacatcccagaagttgtttactctggcctctacccaccctatgcagggggaggggggttcctctactccggccacctggccctgaggctgtaccatatcactggaccaggtccatctctaccccattgatgacgtttatactggaatgtgccttcagaaactcggcctcgttccagagaaacacaaaggcttcaggacatttgatatcgaggagaaaaacaaaaataacatctgctcctatgtagatctgatgttagtacatagtagaaaacctcaagagatgattgatatttggtctcagttgcagagtgctcatttaaaatgctaaaatagatacaaactcaattttgcatagaaaggtgtattttgaatagttcccatgttgtgttctcacattagagtaatttctgtattaaaccatgaaaattgcctttatgagtgatacccatttgagggcctctaaacccttcaatttggtactcacgtgaagagggaaagcggaagatggtaatttttttttacggatgatatggcaggatgattggttctgatcttaccggctagtggtcatttttaaaaaacttgtaccctcttatctgaaatcctgtttctggaatttggccattttaagtgattttgtttgccctcttctataatattcctacttcccataataatgactgatttatttgtaattcaggtatttataaacctattggctacaaagactttgttaaacattatccagtggttttcgtgaaatggaattatgtttatttttatgggatttgggtaaattttaaattgtctagaaaactgaaatttcagttgtcagttgtggaattcagtttttcaattgtggaaatttcctgccaccccaacagtatttttgtgtgttaattaattttgcaaaatgagaatcatggtgtgacactcatctaatttatcttgttgtgatgttatggtcataataaggagaaagagggtttaatttttcttgtatttggtttcctggtggtatcatagtgtaattttagtatttgaaaatcagtgtgattccttaatggccaactgaagattgaattgccgctaacaaccatatcgtgttagtgaattttcaatatggaccaggaaggcatatgtattttggaacttggagtggaaaaggttggagttacagacttttggc

SEQ ID NO: 15711 - DNA, 1931 bp, Homo sapiens
tttgtcgtgctcctggcgttggtggcgggtgttttggggaacgagtttagtatattaaaatcaccagggtctgttgttttccgaaatggaaattggcctataccaggagagcggatcccagacgtggctgcattgtccatgggcttctctgtgaaagaagacctttcttggccaggactcgcagtgggtaacctgtttcatcgtcctcgggctaccgtcatggtgatggtgaagggagtgaacaaactggctctacccccaggcagtgtcatttcgtaccctttggagaatgcagttccttttagtcttgacagtgttgcaaattccattcactccttattttctgaggaaactcctgttgttttgcagttggctcccagtgaggaaagagtgtatatggtagggaaggcaaactcagtgtttgaagacctttcagtcaccttgcgccagctccgtaatcgcctgtttcaagaaaactctgttctcagttcactccccctcaattctctgagtaggaacaatgaagttgacctgctctttctttctgaactgcaagtgctacatgatatttcaagcttgctgtctcgtcataagcatctagccaaggatcattctcctgatttatattcactggagctggcaggtttggatgaaattgggaagcgttatggggaagactctgaacaattcagagatgcttctaagatccttgttgacgctctgcaaaagtttgcagatgacatgtacagtctttatggtgggaatgcagtggtagagttagtcactgtcaagtcatttgacacctccctccattaggaagacaaggactatccttgaggcaaaacaagcgaagaacccagcaagtccctataaccttgcatataagtataattttgaatattccgtggttttcaacatggtactttggataatgatcgccttggccttggctgtgattatcacctcttacaatatttggaacatggatcctggatatgatagcatcatttataggatgacaaaccagaagattcgaatggattgaatgttacctgtgccagaattagaaaagggggttggaaattggctgttttgttaaaatatatcttttagtgtgctttaaagtagatagtatactttacatttataaaaaaaaatcaaattttgttctttattttgtgtgtgcctgtgatgtttttctagagtgaattatagtattgacgtgaatcccactgtggtatagattccataatatgcttgaatattatgatatagccatttaataacattgatttcattctgtttaatgaatttggaaatatgcactgaaagaaatgtaaaacatttagaatagctcgtgttatggaaaaaagtgcactgaatttattagacaaacttacgaatgcttaacttctttacacagcataggtgaaaatcatatttgggctattgtatactatgaacaatttgtaaatgtcttaatttgatgtaaataactctgaaacaagagaaaaggtttttaacttagagtagccctaaaatatggatgtgcttatataatcgcttagttttggaactgtatctgagtaacagaggacagctgttttttaaccctcttctgcaagtttgttgacctacatgggctaatatggatactaaaaatactacattgatctaagaagaaactagccttgtggagtatatagatgcttttcattatacacacaaaaatccctgagggacattttgaggcatgaatataaaacatttttatttcagtaacttttccccctgtgtaagttactatggtttgtggtacaacttcattctatagaatattaagtggaagtgggtgaattctactttttatgttggagtggaccaatgtctatcaagagtgacaaataaagttaatgatgattccaaaaaaa

SEQ ID NO: 15712 - DNA, 879 bp, Homo sapiens
tttttttttttttttttccatgcagtcaatctttattatagcagtattcgcatattcacatcaagtacatagaactttttttgccttttatataatacagtttttaaataactttacacagaaataaatttcttcaatctgaatttcagctatctttttttattctccatgctttctatccaaactgaacaatattttctgttatacaaatttacatgagaaaaactccaaagtacaaatgaagggacctgagcaggaaagagaaccaaagtatcaggaagtgggtatgggggagaattaaaaaaaataataaaagattcaagcaaacattgagaataggggaaaagagggagacatcatccatttgactgaaaataaatgtcttttttatgaattgaaaaataagctttaaaaatagttactccattgtaatttttgcaaagcaggtatagagaggtctgtggacaattaaaaagtccccatcttttcaactggcacgccccagactccacgagaaccttttcaatgcttgagtggaaactgaagtgtactaaacccgaacctttggcagtaacagaaaagaggaatgtgtgtgtgagtcgccataaggtttggagtggtgaaacaggaaccgtgaattcactgcagttcaaacaggaagcatctccctttcctctcccttacaggagtcatgtcctcaaaccaaggaatacatgaaaaggggggatttcctttttcttggtctaaaccaaagagcaatgacaactactgaataaaattcagagacacatgttgatgaatgatcaaattcaatcccctgatcagttgtatgatcctatcttaggaaaggcagcaattgccatgttgaggaaaggatcc

SEQ ID NO: 15713 - DNA, 453 bp, Homo sapiens
cttaagaaagctcatttgaagattgtaaatgttagtaagtttccccatattttcctctaggacttccatggtttaatttgttttgtttaaactaggaattggcattcacatcctcttttgtcccaggtctcagaggtcccttgtatcttatagagcagtattgttttatgttattttcccatgtataatttaaaaacaaaatacgttgttcaaaacaaaatacagtggcagcagataatggcagtatctctgtaactgctggtaaactgtatttcatagtgaagtgttcataaactaaagagtcattgatttggtttcctggctaattaaaatctgaattccatttgaagttccattgaaatcatggttttactctataagcagtggatgttttttcccaacctttctgatatttttttccttcctgagacagggtcttgctctgtcacctgg

SEQ ID NO: 15714 - DNA, 337 bp, Homo sapiens
atggttacaaagtcacagtcccttgtgcccttcagaaaaccccagaggcccccaaatacgagtgggaagagagttgggaaaaactgaaccagactcttccaatggccattaaagagaaaattcagcaacgcttgcctttgtctttgaccctgagaagttaagggacacagattgtggcgccgtgatggaacatggagggaaggcatggtgtgcttcctgcagagatgcctctggagtccctgtggccacgggatctcactggacccctcttcaggcaccttgatggggctcagtggggccaggccgaagggtggaagtagaaaagcatcaacaggct

SEQ ID NO: 15715 - DNA, 1205 bp, Homo sapiens
  misc_feature (1)...(1205): n = a,t,c or g
ttttaatcattttttggttatgccaggtgtctcctgtgtgtccctccagatccctctccagccctagaaacctgagctctataaatgttgcctctctccactcatcttctctttggcttcaggttgagttcagccaacagatgcccctgtaggatttggacacagggagccaggggagaggggcatcagctgcctgggttagcagggctgtgatgattcttctacctatgactctcagtgctgttgcctcttcctctggatcttggaagcttccatgctgagggtctgaaggtgggctccctgcctcccactgatgtccttagaatcccatcctcacctaatacctggtattgaacactgcctttcttagatgtcatttaggctctcgtttcaattcccagtatgcttcctgcaaagacctcgatagatggactgaggggaatagtgcaaggtcctcccatccccagtattgggatctaggggcagggggtcccagctgtgcagtaggttaggactacacttccatcatcaaagccacaggagggaagaggtgaggatgaaacacactagaattgacttagaaaacacactggccaaatcttagctatttgaggaatgtagggagaaaagccaccttctctctctatgtctgaaggttcccatggctgtcctcctttttcccnaaggggcaaactttccatcagggcatcttctgtgcctctgaggatcattttccaattataggcaatggtagtacgtgtttcagtgcagaatgagatagagttgtttaatttgacaataaagcgatgcgtcaaaaacctcagtcaacacagtaagtgttttcttgttttcctgctgaccaacctaattctggtttcatacagggcagccaggtgcccacctaaaagactgcacttctcaacttccagttgtttctatggataatggttggaagcagaaattgggttggggcttccagataatcccccctcacagggactgcttcaagagaaagggatgccctttggttctttctcctttccactgcctggaatgtgatgtctgacactgtggcagccatactggcataatgaggccaactctctgccatgctaagagtggcagagctgggaattgaaaagagcctgctaggccttgggttgcttccccttgatcggctcattacttggaagagaacacaccct

SEQ ID NO: 15716 - DNA, 615 bp, Homo sapiens
attttatacaaggtgcctcacctgctgtaaccatagattcaaagttgctccatgaaagtaataaatgaaaaatggtgattttttagcatgtaaattttaggaaatttccccagttacgcttaatggcttgatttagtgtgtatgttatttttgaaaacatatgttgggatgtcacaaatggacttagcctacagagatttatattcaacttttgaccagagagttccattttaatgtgacactgagagtaaaaaactatcttttcctccttacctatttctcttcctacattctcggccaggaggaaggcactgctacatacccagtcttccccagcagagcctgagcagctctgttttccttctacttcccctcttctttcacatctcatgaccaagcacttcctattctgtctcccaaatgatcacagactttttccctcccacttttgtcactgccactgcccttagcattactctgcctttagagaaagtctcttaatttgtttggttgcttccttcagtccttattatacagaccactacacacacatctgacagagacttttcaccttttcatggttcaatgactgaaattcccagaataaaattaaaa

SEQ ID NO: 15717 - DNA, 379 bp, Homo sapiens
  misc_feature (1)...(379): n = a,t,c or g
ggttgtgccatgctgctgctttcgtgggctgaccagaaaagggtagaaggattgacgtttacgaagtttttgaatcaggaggcaaggtcgccttgtgcccccaaaaggatagaaaaaggcctggcaaactggagaatcgcgtccttacggtgcctacatatttatagtacgaattaaactgctcaaggggtgctaggtttgtctgcagtccgtttctccctcatggtggaagacgcgtggggaaacttggtatcctgtgttttccagttgaaagcttgtgaaaattcgctttatccttgaagttcagaattttcaccaggatgtatgaaaaccctgtctcgatggatcaactggcaccacccanatggataaactggct

SEQ ID NO: 15718 - DNA, 1203 bp, Homo sapiens
gttcgcaaacttgccggtgaaaaacagcaacagatatgatgtggaaatgacagatgaactcgttgggttacctttttcctctcatacctattcccaagcctctgaattgcccacagatgctgttgattgtatgagcagagagcttgtgtcccttactagccgaaatcctgatcaaagaaaagaatctttgtgcattagtatcactgtgtccaaggtagacaaagaccagccttccaatttaaactcctgtgaagacccagttccagggatgttgttttttttgccacctggtcagcacttgtcagactattcccagttgaatgaaagcacaacaaaagagtcttcagaggccagccagcttgaagatgctgctgggggtgacagtgcatctgagggaaaaaagtggggtctgctggagccatttgttaccgccagcctcttctgtgggaaagtacattaccagtgcttgagggcatccagttggaagaagcaggtgtcgcatgacttcccgggagaccaggttttaaaatccagcagctttttggagcctcagcagtacatggcttttctgccccaccacattatggtaaaaatcttcaggttacttcccaccaagagtttagtggcccttaaatgtacctgctgctatttcaagtttatcattgagtactacaatatcaggccagcagattctcgctgggttcgagatccacgctatagagaggatccttgcaaacagtgcaagaaaaagtatgtgaaaggggatgtgtccctgtgccgatggcaccccaagccctattgccaggcattgccctatgggccagggtattggatgtgctgccaccggtctcagaaaggattccctggctgtaagctggggcttcatgacaatcactgggttcctgcctgccacagctttaatcgggcaatccataagaaagcaaaagggactgaagctgaagaggaatactaaagtccatgtgagaggcaacaaaaggaccggtttctaaagctgcaaaacacctagatacaccgttcaaatgaggcgtagccccctgagtcatcactctagaagaatctgtacatcatcaggactgcattgctcaggcattttcttaaactcttaaatttacggagcttgtacaaaaaaattggtctttgttgtttatagtggcatctcatgtttttgaccccgggtggtat

SEQ ID NO: 15719 - DNA, 531 bp, Homo sapiens
cgctggcggctccgcgcacgagctttgttttttcggttgggcatgctgcttaccgcaggatgatggaagcgacggcccgtacaaagacagaagcgttggtttcactgagtcagtgctgattctctcaaatagagcttgaaggataaatcttcatttttgtttcaacaaaacttcgaaacaaaatggaagaaaataatctacagtgcagtagtgtggttgacggtaattttgaagaagttcccagggagacggcaattcagtttaaacctccactatacagacagcggtaccagttcgttaaaaatttagtggatcaacatgagcctaagaaggttgcagacctgggatgtggtgatacttcactcttaaggctgctaaaagtcaatccatgcattgaattgcttgttggagtagatattaatgaggataaattacgatggagaggggattcgttagctcctttcctgggggattttctgaaacctcgggatctgaatttgacccatcacattgtatcatgggctccgtttg

SEQ ID NO: 15720 - DNA, 2165 bp, Homo sapiens
ctcccaggtgcgcgcttcgctcccggagccgcggaactcggcggccgccatggcgtccaacatggaccgggagatgatcctggcggattttcaggcatgtactggcattgaaaacattgacgaagctattacattgcttgaacaaaataattgggacttagtggcagctatcaatggtgtaataccacaggaaaatggcattctacaaagtgaatatggaggtgagaccataccaggacctgcatttaatccagcaagtcatccagcttcagctcctacttcctcttcttcttcagcgtttcgacctgtaatgccatccaggcagattgtagaaaggcaacctcggatgctggatttcagggttgaatacagagacagaaatgttgatgtggtacttgaagacacctgtactgttggagagattaaacagattctagaaaatgaacttcagatacctgtgtccaaaatgctgttaaaaggctggaagacgggagatgtggaagacagtacggtcctaaaatctctacacttgccaaaaaacaacagtctttatgtccttacaccagatttgccaccaccttcatcatctagtcatgctggtgccctgcaggagtcattaaatcaaaacttcatgctgatcatcacccaccgagaagtccagcgggagtacaacctgaacttctcaggaagcagtactattcaagaggtaaagagaaatgtgtatgaccttacaagtatccccgttcgccaccaattatgggagggctggccaacttctgctacagacgactcaatgtgtcttgctgaatcagggctctcttatccctgccatcgacttacagtgggaagaagatcttcacctgcacagacccgggaacagtcggaagaacaaatcaccgatgttcatatggttagtgatagcgatggagatgactttgaagatgctacagaatttggggtggatgatggagaagtatttggcatggcgtcatctgccttgagaaaatctccaatgatgccagaaaacgcagaaaatgaaggagatgccttattacaatttacagcagagttttcttcaagatatggtgattgccatcctgtattttttattggctcattagaagctgcttttcaagaggccttctatgtgaaagcccgagatagaaagcttcttgctatctacctccaccatgatgaaagtgtgttaacccaacgtgttctgctcacaaatgctttgtgctgaatccattgtttcttatctgagtcaaaattttataacctgggcttgggatctgacaaaggactccaacagagcaagatttctcactatgtgcaatagacactttggcagtgttgtggcacaaaccattcggactcaaaaaacggatcagtttccgcttttcctgattattatgggaaagcgatcatctaatgaagtgttgaatgtgatacaagggaacacaacagtagatgagttaatgatgagactcatggctgcaatggagatcttcacagcccaacaacaggaagatataaaggacgaggatgaacgtgaagccagagaaaatgtgaagagagagcaagatgaggcctatcgcctttcacttgaggctgacagagcaaagagggaagctcacgagagagagatggcagaacagtttcgtttggagcagattcgcaaagaacaagaagaggaacgtgaggccatccggctgtccttagagcaagccctgcctcctgagccaaaggaagaaaatgctgagcctgtgagcaaactgcggatccggacccccagtggcgagttcttggagcggcgtttcctggccagcaacaagctccagattgtctttgattttgtagcttccaaaggatttccatgggatgagtacaagttactgagcacctttcctaggagagacgtaactcaactggacccaaataaatcattattggaggtaaagttgttccctcaagaaacccttttccttgaagcaaaagagtaaacacgggcccagcggtggaaccagccattccttgacaagccagcagcctgcgtcaggagaagggctcctcgccaacccacccacacgctcgtctcactcaattcaatgtcacacttctgcctcttgcaaaattgctggaaaaagtaataataaatatagcta

SEQ ID NO: 15721 - DNA, 542 bp, Homo sapiens
aaaaagaccataagcatctggagcacctgcaagagcctgtgcatgggctcggcgtgactgagagtcctccgccttgcccgagcatcaggcaggccctcccaagacccctcaagatgctagaatgggactttctgcaaagtttaaacatctgtacaggatttagcttctttggtggcgaacttggattgtgatgccctcaggaagtctggtttcactctttctgtcactgtacgtcagcattcatgaaggacttgtattttctctgccttgtgaggtttggagacttgaaggaggacaaagtgacgcgtcatgatggagccagctcagacgggcacctggcacacatcttcagacatgcggccaaggagctgttcaacgaggatgtggaggaggtcacttaccgagccctgaggtgtggggcagtatccacagcctgtctgtgcctgtggttagcacgtgtgcatggtgtgcctgtatggatctgtgcatgtggcggttctatggatggagtttacactagtcaaaatcaaaaggactttttt

SEQ ID NO: 15722 - DNA, 1751 bp, Homo sapiens
tttgtgtttaagagtttattaggataggcacataacagaaagctcaaaggacaacaaagctgcaccttcctaaaggctgaccctcaaagcaccattttgttagaactcagaggagaagctcgatctctgagccttccctcctcacagtttgggaaacatgcacaggatgaaggtaaatcctgcatagaaatcttgtaattccagaattagtcaaacaaatttgaaatacacacatttaaaaatacttacattctcatttagcattcatgaagtgattactgacatttacaattacatctgacatcacagagcaagcctttgcagggatctaattcaagcttaagccaaatctatgcaaagaacttcagctcagaggaatagtgggcaaaatctgctgaaaagaactgcttgccaccttgcagataagagcaacagcacaataaagggattccagagcttctacctaaaatagaagggcattatctacaagaacagaccaaaacacaatttatttttaaacaagcccttcagtgagtatttgtctcaggaatctagtatgaaaatagtgtctttgattagtgaatatatggagaattcggattatcatctctatttttagttgagaaaatgcacaaaccatatagatttaaaccatgggttttgcagccgaagtagagacagatgttttctgggatcatatctcagattcccaagctaaagctattgttcaaggtgatggaaatatgtagggggcattaaaccattttgcagctgctagaaagctgtgttttcctgttttcctgatttagacaatggagaagctaagaagagaaataataggaaaggctttcctatgttagttttaaaaagactgtgttatttttaattcaatttttttttgtcaaatctcatctctgttctcctagttttcacagaaatatttacaggaataaaggttgaaacaaaagtacctaatgatcatctccatccatcgaaagattgctcagggataagacactcaaacaagggcttgtgatgaggatggaaaagacaaagcaacttgaagagaaaaaaaaattcttttaaactcagttcatcctgcaaaatggacataacacatgcatataaaggtttgactttttaattccacttttttgcctgatcgcagggaagatggcatgtggctggcccttcctgaagccttgctcctccaccactggctaacagacaggcctccaggtggccttgcaaggccgacagtgaccgcagcccacttccccacatccttaatcagagcctcatgcagttcatccccacattacccaaacataacgtcgtagtgctacacgtagatgtgttgcatcatgatgctatggcaatgacgatgacgcttaggtgtgtgggccaccgaaggcagagaccagatgtggttggtcttgcctggaagccaagctgttgagcaggggtggagtccctctacagaggatgctcaccaagttctaatgcattgtcgataactgtcctgccctggtttttctgcattcctcagattatctgtgggaattgtcctcctgcatcctttctcaaatgacaaagaagaaagaaagagcagtgatggcacctgaaattcaggaatgagtaggcatggcgagctgggtgtgtgagatgttctctctttacattgtctgctttgagatgtgggatgaggggagggagagagttggtcctgaatatattcagttttttccaag

SEQ ID NO: 15723 - DNA, 900 bp, Homo sapiens
tttttttttcaattttcagggtctttattttttatattgtatacctaagttgatttcatcaacatacaagccaaacgaagatcccatttcaattagatataccactcaagagaatctccaaagatcttcacatttttccatcttctaaaacaaggattgacaaactttttttctgacaaaaaccagacagtaaataattaggctttgtaggctttaccatctctattgcaactactcatttcaaagcagccacagataatatataaacagatgagtatagctagttccaataaagctttatttgtgaattctgataattttcacgtcatgaattattagtctttgatttcttttcccaaccatttaaaaatgcggaaaccattcttagcttacagggtatataaaaacaggcagcaggctggatttggcccacatgctgtagattgccaacccatgctacaaaatataccttaaaagcctgtcacctcaaaatttcaaatcactgcttcccaaagacttaaagtgattattcaaatcttcctcagtaacttcttttagatcagctggtttccattttggactctggtctttatcaattaaaacagctctaacgccttcatgaaagtcatgacctctcatacaagcttgacttagccgatactccatagttagtacttcttgcaaggtctttgaagacccctccatgagttgccttagtgtgatctttagagatgttggagacattttattaattaccttcaattgctctagggcaaaagatgaaccatcttgctgtaagttttcaataatttcttccacagtattggctgaaaaacaactgtttattttgtccatgtgttcctcaagtataaaagacttgtctcgatcaatcttagactg

SEQ ID NO: 15724 - DNA, 419 bp, Homo sapiens
  misc_feature (1)...(419): n = a,t,c or g
gatccattgttcttgtatgacttaacccctggttctaatacaggggccgctctcctcagcctcctgcttgaagaggatgaagatgacttttgatgatacccttgttgctattgacacctgtaagtctttggagtgtgcatctaattctgccttacagtcagtatggggaaattgtggtcttgaccttcaccagaatccctgctgggcaccgtccaaagacattgttagtccacatgtgagacacggcttaactctggagcaagagtactggtttggaggcaaaagacctactcccaactctagcagtgggaccctgggcaagtcattctacttctctgagcttcccttcaggaaggagtaaatctgctgactaacctcagaggattttcagggagactcctcannggatataggagcaa

SEQ ID NO: 15725 - DNA, 1564 bp, Homo sapiens
ttttttttttttttgagcggttttcttaagtgtctttaatactccactcagggcagcccctccctctactgagaggctcttggctctggccccaagagcagctggaaggccctggcctgagcttcaccacttgatgtccaggctgtgtgtgccacgctcctggctctggtacgtggtatgcagcacctctcgggccttgggggagttgatcccctccagccactcctggtacagctcctgcacgtgtgcactggactccggacgccgcacagggatgtcagcgtaaatgccttccatctgccgcagcagggccttatccgcatgtccgtctggagtctgggcttggcctctgccatttaagcatcctccagcacaggcgaggacctccacaaagtggaatgggaacttgcccttcttaagcttcaggatcatgttctggatgtttcgaaagccataggctgcagcaaagcgtaacaccacctctccgttcttctcaagggtgacctcttggaagtctttgtttctcagggctcggtaagtgacctcctccacatcctcgttgaacagctccttggccgcatgtctgaagatgtgtgccaggtgcccgtctgagctggctccatcatgacgcgtcactttgtcctccttcaagtctccaaacagagtgtcgacggcagcatctctcactgagaggtcaccttgctccattatttgagcaatttcacctgatgttaacacgcagtcagcgccccgggagcccatgcaaagccagggggaaggctttccctgaagagcctccagcttcttgtcataacaaggggccaccaatgacgtggaaaatcttctctggagacaggttctgctgtctggcgaaataatccttcaccaaagagcccatgacctgctggggggacttggcggtgcagaggtgggcagtgatggggcgaccccagcacccgctcgggcgtatcggacccagccaggacaggcagaggtcagcatgggcagggtgcgttccctccctcactgtgctggcgatagcgacgcacgaattctttttgactctcccaggatactaaaatccgcagctatcgtcgtatcaaatacatagtgcaccccaagacttttgaggaaaccacagagtcttctggatgcatcagttacactgaggttgaatttagcagcaaaataaggcaaagattgaggacacacagacactaaccagcactttgtgctttgaggtatcacatttcttgttaaggttcagaacgcggaagaagtccttggcattttgctgggaaagttggactccttcctctgcagtcatacagctgtcacatgccaggcagtcgctcaaaaatatcttggcatcagccaacttgtggaattctcccttctctccattttcctgggctggactcggtgcatcggctgacacattctcttggtcatcagtttttgttttcttactacattccttgcgcgtgcagtgctcacacttcatctggagcgcggcgggcgggaggccgggcgcctcagcctcagggaagcaccggctcgtgcc

SEQ ID NO: 15726 - DNA, 435 bp, Homo sapiens
  misc_feature (1)...(435): n = a,t,c or g
cggacgcgtgggcaagtagatgcccctgtgtgtgttttcccttgccttgtttcctgccttatatcttgtatttcgacttattacagagttgagggttcttgcttaatttagatcaagtataaaatttgtatgacttcaagtctcattttatctgaaaggtttttttctcngtgacaagttgggaatgatgnggngatttanaatgcagtattggccaagtccaagttgtcaacttaagcgtcngtttaccaaagaccggnaacaggggcccaaacatgtccagtcctcttcttccctctgctggaacctttggggacactcaagggtacagtttgacactgatctggccatgaggctgnccagagaaagcactgcttctgtatncncttgnggnantggaacaataaaccngtcaacctgnaaaaaaaaaaaaaa

SEQ ID NO: 15727 - DNA, 384 bp, Homo sapiens
gccactttaggcgacgtcgtcatcgacttgtacaccgaagaacggccgcgtgcctgcttgaatttcttgaaactgtgcaaaataaaatattacaattattgccttattcacaatgtacagagggattttatcatacaaactggcgatcctacagggactggccgtggaggagagtctatctttggccaactgtatggtgatcaagcaagcttttttgaggcagaaaaagtcccaagaattaagcacaagaagaaaggcacagtgtccatggtgaataatggcagtgatcaacatggatctcagtttcttatcaccacaggagaaaatctagattatcttgatggtgtccatacggtgtttggtgaggtgacagaaggcatggac

SEQ ID NO: 15728 - DNA, 61 bp, Homo sapiens
  misc_feature (1)...(61): n = a,t,c or g
acctcaggtgcaaccccctgcgtggtnctctgtggcagccttctctcattcagagctaaaa

SEQ ID NO: 15729 - DNA, 1706 bp, Homo sapiens
tttttttttttttgttttaatttccgaatttattaaaatgattaacctcaatactgcaagtgcatgtacaaaatatttgtaaaaaatgtttttaatgaaacgttaaagaacttacctcaaatgctgaaaaagtcctttttcattctttcagtacaaggaatacattgtatctcaaaagtattacaactcagcaaaaacaatttataacagtaatttgaaaatgattgaaaattgaatactttacatatatttctatgatcatctcctaattcttacaatgccaaaatcttaaccaatcattgcataagctcaagctaagagttttattgaatgcaacctcttctaaactggtcaacggtgtgtggctgtcaccattccacacggtgaagttctacagcagatccggaacagttccgaggcccctacctttaccaacggaaattaggtttccctagaaggcatcaacagtggctgctgagtgcttgtgcataccgactcctgagaggcagtgatttactaccaaatgtcactgctttgagacccatgggaaggttgcctccaaagaggaggccatgataaaattaaaacatcaaaaataagttactaaaattcagctgaaaaatgaaaatgggaaatgtgttttgtcactttttaagatcgaaattcccaaaatagctatcgttggtattcaaataaggtttaagatttagtctctgaacctcttcaaaacaccccaaactaaggtgggaatacaagaggtgacccgctgccctccagcacctccagacacagggtctaccttcatcttcctcagtggcaggggttcacatttctatgcagggaccccatgagggctggacgtgctctgcaaagtgctccgggtgcctcggacaggtgctcctgagaggctgtgtgggctgccctacttcactgttgaagacctccagacgcagtgaacgggggtatgggtgggtgtggaagaaggtctaccacatgctttccaaacgcctgaggagttcgactgcaccacaacaaacaaggatgagactatgtaagactgcagaagtagttccttagagaaccaggagaaaacaatctactttctaaaaatgttcatgagtcttaatttctatttggaacctatgggcaatcaacagtcttaaggagcgtcattgaaacaatatccccccaaacctggaaactagtaggaatcaattagtagtaacagtaagcattgagattttctccactggacttttcatgaccttcagattccttttcatatttcaagacatgggctactttcctatagacactatacaaatcccctgaattgatttttacttaggaacactgtatatcagaaagtacaggtacacatttcccagaaataaagagacctactggtgtcaaacacctgttacagatttatattcccaaattctctgtccaatgatttgcaaaataatccagagaaatgaaaagaacctggtattgaacataaagtagtaataaaaatttgctcattaagttaattaaaattaatttctcaaagtgcttcaaaaaacaaattaaatctgactcctttttgtttaactgataatatagtcaaaaaaatctttgatgttttcataataaactaacataaactaacataagccaagaactcccactgatgcagtgcttaaaactatatatttataatt

SEQ ID NO: 15730 - DNA, 205 bp, Homo sapiens
  misc_feature (1)...(205): n = a,t,c or g
gaagggttaccctcgatccctctaaacggcagaactctaaccgctgtgtttcgggcgcctctctgccccagggatccaagatcaggtcgcagacgaacctgagagaatcgggggacctgaggttacaagttgccatctaccttgggatcaaacggaaaccgccccccggntgctccgattcccctggagtgtgaagctgaccagc

SEQ ID NO: 15731 - DNA, 232 bp, Homo sapiens
ttctgtgttcggtagcacctgctgtccttttagctcattctcggttgacattaggagcaattctaattcctttattcgcttttccttctcagggtcttcatcattatagtgtctctgaatggctgcggcactcggctgagggacattgactatatttacatgtaacgctacaggggatggaacatgactggagacattttgtgcttcagaaatgtgggtaataggaatagtc

SEQ ID NO: 15732 - DNA, 146 bp, Homo sapiens
atgtgacttgcattagctttttttccccacttaaatttaaacacgttttccattttctcaggttacttttttttttttttgatatgaaatctcactctttttgcccagggtgaagtgcagtgactgagatgggccactgcactcca

SEQ ID NO: 15733 - DNA, 2164 bp, Homo sapiens [sequence omitted]

SEQ ID NO: 15734 - DNA, 162 bp, Homo sapiens
ggcacgagagaatgtagaaagattgtataatcattacatgtttaaagtagatggtgaaagcctagctcggcacctaggacggcacaaagtaaatccttaacaaatgcctgtaagtagtgggtacttttgtaaagaaaaggctccatgtttttgttgttctgg

SEQ ID NO: 15735 - DNA, 481 bp, Homo sapiens
  misc_feature (1)...(481): n = a,t,c or g
ggaggttgactgtagcagcaccaacacatgtgccctgagcgggctgacccgcacctgccgccaccgaatccggctcggggactccaaaagccattactacatctcgccatcttcccgggccaggatcaccgcagtgtgcaacttcttcacctacatccgctacatccagcaaggcctggtgcggcaggacggaggcttagggcgcggcccaggcctgaaggggagctctgagacagagcaaacacccacccccttgtggccatcctgtgccttgttcccggtggcctccctattggactactaggaggggctgggcagggcctccataggcacagaattgccccaaagccttgttaagatgagtcaagacccctccccgcttctccttcctttccccttctcctccccttataaaggcctccttgtaccttccttccacccgncttaccctgngttctggaggcctgnttccaaaaaccgt

SEQ ID NO: 15736 - DNA, 315 bp, Homo sapiens
gcgtcgacatgaatgtaattccaagaatagagctaagggaagaattaaagagtcaactatgatttagaatcgtatatcattagattgtgagttctctgactttggcaattcaaaagctccaccattggtaagtgagaaaggataccttaaatggaatttttagcatcttttgagggacctcgggggaaattaaatgacatgaattagttttttacatcgagatgttttaagaccttaattttttatttgttgcattacatcactcataccttgaaaggaaacaattttgattataaaagtggcttatagagagaa

SEQ ID NO: 15737 - DNA, 6617 bp, Homo sapiens
  misc_feature (1)...(6617): n = a,t,c or g
ttttttttttttttgtgatctctcagcagaatagatttattatttgtattgcttgcagaataaagcctatccttgaaagctctgcatcatgggcagtgagctcagtggtatctggaggacagggcactggccactccagtcaccatcttctgccatcttctgccaggaagcctgcacctcaggggtgaattctttgccgaaatggattgccaaaacggtcaccagcacatttcccaggagctgttgagatgaaaggagacaataaagatgaacccatagtgagctgagagctccagcctggcctccagataactacacaccaagcttccacccagaatcaagcctatgttaacttccctcaaagcctgagattttgctttcccattaaatgcaggtagttgttcttcttgcagcactagtcactggccataatttaaatcttgttatcttcttgccaccatgaaccctgtatgctgtaggctgaagacgttaaaagaannnnnnnnnnnnnnnnnnnnnnnnnnnnnnnnnnnnnnnnnnnnnnnnnnnnnnnnagctgactttcaaaatctactccagcccaaatgtttcaattgttcctcacccctggacatactttgcccccatctggaattaaaggatataagtttgtaatgaagcattagcagcattttatatgtgtccagctgatataggaatagccttagcaatgtatgtttggccaccaaagttccccactttgactgagccaatatatgccttctgcctgcatctttttaacgaccatacttgtcctgcctccagatagatgttttaaaacgaataacaaaaataggggaaaggtgaaagttctttctaccgaaatctaataaagaaaagtcattttcctcatttccacctctcttttctcaaagtcaaagttgtccatctagattttcagaggcactccttaggccctaaaacattgccactgggtctcagcccagttagtcctctgcagtttcttcactcccaaccccagtatcttcaaacagctcacaccctgctgtgctcagatcaatactcagttgtctaagttgcctcgagactaaaggcaacagtgctgaaacatctcctggactcaccttgaagttctcaggatccacatgcagcttgtcacagtgcagttcactcagctgggcaaaggtgcccttgagatcatccaggtgctttatggcatctcccaaggaagtcagcaccttcttgccatgtgccttgactttggggttgcccatgatggcagaggcagaggacaggttgccaaagctgtcaaagaacctctgggtccatgggtagacaaccaggagcctgtgagattgacaagaacagtttgacagtcagaaggtgccacaaatcctgagaagcgacctggacttttgccaggcacagggtccttccttccctcccttgtcctggtcaccagagcctaccttcccagggtttctcctccagcatcttccacattcaccttgccccacaggcttgtgatagtagccttgtcctcctctgtgaaatgacccatggcgtctggactaggagcttattgataacctcagacgttccagaagcgagtgtgtggaactgctgaagggtgcttccttttattcttcatccctagccagccgccggcccctggcctcactggatactctaagactattggtcaagtttgccttgtcaaggctattggtcaaggcaaggctggccaacccatgggtggagtttagccagggaccgtttcagacagatatttgcattgagatagtgtggggaaggggcccccaagaggatactgctgcttaattttttttatagcctttgccttgttccgattcagtcattccagtttttctctaatttattcttccctttagctagtttccttctcccatcatagaggataccaggacttcttttgtcagccgttttttaccttcttgtctctagctccagtgaggcctgtagtttaaagctaaagcatgtaccaatttttgaaaagttcagggattgtgaaatgtgttttaggcataggtccaggatttttgacgggacaaatcttagtctctttcagttagcagtggtttctaaggaaaaagtgctatacttctttttgaatatactctttgtgacttttgccattatctcttaatttctcaatagtgcagtgaaaacaatttctataaagccacagtttcagcgcagtaatagattagtgttacataatataagacctaatgcttacctcaatatctacttatccgtacctatttgaaataaatcatgactgtttcatcttagaaaaatatttgattccatattcaggtatgtatgtatacaccagatgatgtgtatttaccactggataagtgtgtgtgctggctgatgacccagggttttggcgtagccttctatgctcagtaaagatgatggtagaatgttctttggcaggtactgtggattagaattaattatcttgtataaatgctaggttcacttctcagggaatcttactctaagacataagatgtgcgtgtacatggaaaacaactctaaagaggcaagggttgtttttattgactaatagtccacacactattataactcgaatattagtgtactttagacagctttatttctaacacagcgctgtttctgacatattggaccattaacagggtaggaagtatttatggtggttttttggttctgttttgcttttggttagtttgtttttgtttttctctgaaagtgatccatgatctctaaccttgctagattataatgccagaagctctggaattctggcttatcggaggcaagctgtatcttcaaattagtttatcccctaagctatcaggttgattgaaattattataatattggtgaagttctttcatccttcatgatcctgtgtaaagcttatatctgctcattgatacagatggctaaaaggccagaaagannnnnnnnnnnnnnnnnnnnnnnnnnnnnnnnnnnnnnnnnnnnnnnnnnnnnnnnnnnnnnnntgaaataaaattaaaaggaaaaaaatgccatggcaacatcaggaagttatctttnnnnnnnnnnnnnnnnnnnnnnnnnnnnnnnnnnnnnnnnnnnnnnnnnnnnnnnnnnnnnnnnnnnnnnnnnnnnnnnnnnnnnnnnnnnnnnnnnnnnnnnnnnnnnnnnnnnnnnnnnnnnnnnnnnntcaattttttataaacttgttttactaaaaaaaaaaaggacaaagaaagaaagtgcgaattgtgaaatggtagtgagtgatggcatttgaagtgggtcctttatgatttgatggaggccaggcagaagacgtttggagaaagaagttcctgaaagtaggaagggcatgtggaaaactctgaggctgaggaaaaaaaagaaagaaagaaatataaagaaagaacttgacatttcactgtatataaacacattacaagcctaaagtacgttgaagaaaaaatagaattcaaagttagacagaagggctcaggcttactatttgcatcttacagatgagagtagtagagttggtattttattctgaaacacagaggacaagtggagatttgtaaacctgagataaacatggtttctaatccactgaacacggaagcttatttttttctctttcttcatctgccttacttagtgcaaggnnnnnnnnnnnnnnnnnnnnnnnnnnnnnnnnnnnnnnnnnngattttttctcacttttctgctggttcctggtcagggctctcttcctgggttgcaggtggctgacttcccactgtgtcctcaccagaaggaagagaaatggctaatctctctgcttctgatgaggaaaataattctatgatggggatctgctctcatgagctcctctaaacctgattacttttccaaagcctcccccacaaatggagccaattgggagttggggattcagcatgtgaattttctggagacacaagcgttaagttcataacaccatcacattaaactaaactcttgcttattaacatgcattaactttcaattatataagaactccagtgaatctgccttctcaattaatgttatacaaattcttcacactatattttcatctgaccgtgctgttctgctgctgagacatgacacgctgatgctgacttgtgagcttctgcgggctcatttccttcacctaagtccccacctccctagaagcttacaatgaggtctcctccttgaaatgctgtgaccagtctgtagacttaagggtatgggattaatttcacctctttaggcatgcgtcaacacttaaaatgaaaagttccttagtaaagtaaggatcacttcattgtagttaccgtggaaagaaaaacctgtttcctgctctgatctctaacacctcaacctccccgtagagcctcacaagggctgagaaaagccagatgccgttggaaatagtattgcccctaataaaatagaatggctatccctgcctaaaccttgacttcctaaagcttggaacactttttcttcgttgagccccttcctcgctgctgtgctgcaatccagggaagggggttcagcccccttcactgaacctttccccatctcttccaaaacatctgtttctgaggagtcctgtcctatagaggtctttcttccaaccagatttctcctgcaccttttactcccacttgcagaactcccatgtacaagtttctttattgcctagttcttttatttgctcatcaaaactcacatctaacgtaaacaaaaaagtgtggagtgtgcacatgacacaaacacacatagccatgtataaatacacataaacacatccctcaacataaaaccctttgtggctcatatatttaaaaagacataaaaaaagaactgaagacaaccatgtgtgatctcttagcagaatagatttattatttgtattgcttgcagaataaagcctatccttgaaagctctgcatcatgggcagtgagctcagtggtatctggaggacagggcactggccactccagtcaccatcttctgccaggaagcctgcacctcaggggtgaattctttgccgaaatggattgccaaaacggtcaccagcacatttcccaggagctgttgagatgaaaggagacaataaagatgaacccatagtgagctgagagctccagcctggcctccagataactacacaccaagcttccacccagaatcaagcctatgttaacttccctcaaagcctgagattttgctttcccattaaatgcaggtagttgttcttcttgcagcactagtcactggccataatttaaatcttgttatcttcttgccaccatgaaccctgtatgctgtaggctgaaaacgttaaaagaannnnnnnnnnnnnnnnnnnnnnnnnnnnnnnnnnnnnnnnnnnnnnnnnnnnnnnnnnnnnnnnnnnnnnnnnnnnagctgactttcaaaatctactccagcccaaatgtttcaattgttcctcacccctggacatactttgcccccatctggaattaaaggatataagtttgtaatgaagcattagcagcattttatatgtgtccagctgatataggaatagccttagcaatgtatgtttggccaccaaagttccccactttgactgagccaatatatgccttctgcctgcatctttttaacgaccatacttgtcctgcctccagatagatgttttaaaacgaataacaaaaataggggaaaggtgaaagttctttctaccgaaatctaataaagaaaagtcattttcctcatttccacctctcttttctcaaagtcaaagttgtccatctagattttcagaggcactccttaggccctaaaacattgccactgggtctcagcccagttagtcctctgcagtttcttcactcccaaccccagtatcttcaaacagctcacaccctgctgtgctcagatcaatactcagttgtctaagttgcctcgagactaaaggcaacagtgctgaaacatctcctggactcaccttgaagttctcaggatccacatgcagcttgtcacagtgcagttcactcagctgggcaaaggtgcccttgagatcatccaggtgctttatggcatctcccaaggaagtcagcaccttcttgccatgtgccttgactttggggttgcccatgatggcagaggcagaggacaggttgccaaagctgtcaaagaacctctgggtccatgggtagacaaccaggagcctgtgagattgacaagaacagtttgacagtcagaaggtgccacaaatcctgagaagcgacctggacttttgccaggcacagggtccttccttccctcccttgtcctggtcaccagagcctaccttcccagggtttctcctccagcatcttccacattcaccttgccccacaggcttgtgatagtagccttgtcctcctctgtgaaatgacccatggcgtctggactaggagcttattgataacctcagacgttccagaagcgagtgtgtggaactgctgaagggtgcttccttttattcttcatccctagccagccgccggcc

SEQ ID NO: 15738 - DNA, 533 bp, Homo sapiens
  misc_feature (1)...(533): n = a,t,c or g
ataatttgaatcctttgannnnnnnnnnnnnnnnnnnnnnnnnnnnnnnnnnnnnnnnnnnnnnnnnnnnnnnnnnnnnnnnnggcacgagctttgtagtctaagcagaattgtatgtgtgtgtggtgggggtggcaggggagcctgggatatgaacattttaaaggcacttaattggatcagagaaagattcctggaaggcatttagtataggatgtacaaggaaagataggattatgacaggaaaagaaaagtcttagattaaagaaatgtgtagcagagttgtgactcaactgtcagatcggttttctgagctttggtagcaaggtggggccacccccagcctttgagtatggatacttttttgctgagagtggatgacacagagcttagtttagagaacaggggttagcctccttcctaatctaatgtctgtggttgtaattattatatacaattatgagaaaaataaaggtctattagaaatgtgtgaaaagtaagcttaaatattttgtctttgntataatcaaaac

SEQ ID NO: 15739 - DNA, 1091 bp, Homo sapiens
ataaatttgggctgatcctttggatactagatcttgatttttttaatgtattttttccggttttctcatttctaatctttgtttatgcctttggctttacagttttaaagtattggattcacctatatactaaccagttgatactagtacaatctttatgtatatttatttcatttccagatttggggatttttaatacaaaaggtacttgataaatgctatattattaataaataatgatgagcgtttttacattattaatctagtctttcaatcttgtatttgctccctaaaaatctatttcagttgcaaccgccaacccaggaaagtgcctgtcgtgcacaaactcaacattcactttcaccacctgtagaatattacatccctctgacatcactcaggttacccccagctctggggttcccttcattatcctgtggaagtagcggtagcagtttcatccaacacggctgtgaattctcctgccttgtcctatagactcagcattggtgagtccatcaccaaccgacgagattccactacaaccttcagtagcaccatgagcttggccaaacttctacaagagcgaggcatctctgccaaagtgtaccacagcccaatttcagagaaccccctccagcctctccctaaatccctggctatcccttccacaccaccaaattcaccatctcactcaccttgcccttctcctttaccctttgagcctcgagtgcatctctctgaaaattttttggcctctcgaccagctgagacattcctccaggagatgtatggcttgagaccctcccggaaccctcctgatgttggccagttgaagatgaacttagtggacaggctgaagagactggggatagccagagtggtcaagaaccctggtgcccaagagaatggaagatgccaggaggcagaaaatggtcctcaaaaaccagattctgctgtttatttaaattcaggtagcagtttattaggtggactaaggaggaatcagagtcttccagtcataatgggtagctttgctgccccagtttgcacatcctcacccaaaatgggtgtcctgaaggaggactgag

SEQ ID NO: 15740 - DNA, 513 bp, Homo sapiens
  misc_feature (1)...(513): n = a,t,c or g
attgganatntgaanaccgttatgacnnnnnnnnnnnnnnnnnnnnnnnnnnnnnnnnnnnnnnnnnnnnnnnnnnnnnnnnnnggcacgaggattgggatcctggcctgactgcagagcaaaatacaccatttggtgcatcctggcaccggcccacatgtgtggctctgcagagaggcagcgggcttttctcatctctgcccccgtccgccgcttctcattccacccccacactccctggaagaacaggacccagagtaaccctgcatgtgctcgggctcctagagtggggctgagcagctttctgtcccactgagcctccctttccaggttggggcaggcaagtggattcgacaggctgccagaagactgcaaggtcattgggagttttaatctgtgactgtgtcatgaaggacatttgtactcgaattcatggagtgccactcctgatgggagaggaggcccatgacagtgacagtcatgctagtgatcgcggacaccacaccatgctgc

SEQ ID NO: 15741 - DNA, 429 bp, Homo sapiens
  misc_feature (1)...(429): n = a,t,c or g
ttggnntttggannacnnnnnnnnnnnnnnnnnnnnnnnnnnnnnnnnnnnnnnnnnnnnnnnnnnnnnnnnnnnnnnnnnnnnnggcacgagtatttaagaaggcctccttcagttatctgtccccactttcttctaatattgtgaatagtgatagcaaataactcagttttctccctatgagtattttctgtccacttttatatttattgtcaaatgtatttagtactcatgtgcttattgttcaaccaaagtctatgatagagcagtaaaggagtgaagtctcaacagggaactatttgagcttcctttataggtccttagtttggtgaattagagatgttggtcctatttggataccataggtaggctctgacattctccgcagacctgagttttctaggcaaataagatgggatttggttatca

SEQ ID NO: 15742 - DNA, 781 bp, Homo sapiens
ttttaagttcaatctccatttatgaaacacaaacacacattttagtctacttagatattaagtcctttcatgtaaaatttgagatagaaaagtaaatggtatatttcttgacagagctgaatttcatggttttcacctaaaaaaaaaataacatgctcggcttgtttaatgttcaagccatttttcacaaatacttaccatctagcctaagctgcctatcatcaaatcttatatgcctggtatcatctttgatgtagttgatatcagtattgcctaagttgttgaactggaatgtaaacaatcgttttttgtgtcccgtgagttgacctttgcaagtatcctcagtacataatccatttcagaatcattatctcctccaactgaatcttcagactgactgttttcattctctgagggaagttcttgatcctggctggattcatcatctggctcatctgtttccatttcacttggtgagccttcttcatgtatgccatttgggccattcccattaatattttggtccttacagcagtgtagggaaccttcagtttcttcagtttcagtagatattttgacatatcggcacattctcaagagcaggagattataaagtttgtcttcagtattgtttcgtggtacagccataagaaagggctgaccaaaaagtgaagaaccagtatggtgggtataactcgagtgtctgaatttttctcttaggcaaacaggaataatcacgtgctctgtatcttctgtcctattgatgttaatttcaaacacg

SEQ ID NO: 15743 - DNA, 512 bp, Homo sapiens
  misc_feature (1)...(512): n = a,t,c or g
ttganncctaatngctatcnnnnnnnnnnnnnnnnnnnnnnnnnnnnnnnnnnnnnnnnnnnnnnnnnnnnnnnnnnnnnnggcacgaggatttgtaacacagcgaatagattaaattagtaataaaaaaaaaaacctacctgcaaagaaaatcccaggccgagatggcatcactggtaaattctaccaaacatttaaagaggaattaatactaattagttaacaccaattaatatctcttacaaaacagaagaggagacatttcccaactaattttgtgagaccaatattaccctgataatcaaaaccaaatgaagatatcacaagaaaagaaactatataatggctccattaaaaattgagttcaagtatgttgtagtttggttatgtattattcctcacggcattattaaaaggcgtgtcgaggatgggcacagcagttcacacctgtaatcccgcctttgtgagccaaagtggccaggttacttgaggccnggagttcgagaccagtc

SEQ ID NO: 15744 - DNA, 1099 bp, Homo sapiens
gacatgggtcacttactttaataacaatacatataccatgttaacaccatggaatgcaaattcagattagacaagagaatttcacaagtgtgatagccttctgtatattatataaaagtttgggtatactgtctggccaaaccagcttgctttagttagatgtcttattattaaagttacctattattgttggaaataaactaatttgtatgggtttagatggtaacatggcattttgaatattggcttcctttcttgcaggcttgatttgcttggtgaccgaattactagtgactagtttactaactaggtcattcaaggaagtccaagttaacttaaacaatgtcacctaaatgcacttgatggtgttgaaatgtccaccttcttaaatttttaagatgaacttagttctaaagaagataacaggccaatcctgaaggtactcccctgtttgctgcagaatgtccagatattttggatgttgcataagagtcctatttgccccagttaattcaacttttgtctgcctgttttgtggactggctggctctgttagaactctgtccaaaaagtgcatggaatataacttgtaaagcttcccacaattgacaatatatatgcatgtgtttaaaccaaatccagaaagcttaaacaatagagctgcataatagtatttattaaagaatcacaactgtaaacatgagaataacttaaggattctagtttagttttttgtaattgcaaattatatttttgctgctgatatattagaataatttttaaatgtcatcttgaaatagaaatatgtattttaagcactcacgcaaaggtaaatgaacacgttttaaatgtgtgtgttgctaattttttccataagaattgtaaacattgaactgaacaaattacctataatggatttggttaatgacttatgagcaagctggtttggccagacagtatacccaaacttttatataatatacagaaggctatcacacttgtgaaattctcttgtctaatctgaatttgcattccatggtgttaacatggtatatgtattgttattaaagtaagtgacccatgtcaaaaaaaaaaaaaa

SEQ ID NO: 15745 - DNA, 516 bp, Homo sapiens
  misc_feature (1)...(516): n = a,t,c or g
gtannccntaaaaatntgaatccctnnnnnnnnnnnnnnnnnnnnnnnnnnnnnnnnnnnnnnnnnnnnnnnnnnnnnnnnnnnnnnnnnnnnnnnggcacgagnnnnnnnnnnnnnnnnnnnnnnnnnnnnnnnnnnnnnnnnnnnnnnnnnnnnnnnngcaggaagcatagggcctttacaaatgttttttaaagcgtctaaaacactttacacatgacgggtactcaataaatactttgtgagtgagtgagcagtggcagggaaagccctttgtttcataataaacccagtggcatgggagcaggaagtacaattccaagttgggtcttgaaattcatggactaaagaagaagtcatgtcctgcctcaccaagaaattacccgtggacatctggcaaaccggggggcatgctgtagggacaagacacagttctccatctcaggaaggaggattagacaataaaaatgaccgtggcggcccctggcaatttaatctgctcacgaatgtgagctg

SEQ ID NO: 15746 - DNA, 464 bp, Homo sapiens
gcggcaagtgggatgtggcctccgcccatgattgggcacctggtcaggctgggagatccaaatagcacccagtgggcagctgtccgacccctggaggggcaagccaggaaagaaacttagggcccgctgtgaccagatgtccctcccagttgggaagactaaactggtttggccaatatctcccaggattcccctgtccaaattattcctgggatctgacccatttcctggaaaggggcgagcctgggttttgaagttcaaactagagtttaaatcacaactctgcccctaatcccacgtaaccctgtgcaccttatcctctgagccttcgtctcctcgtgtgtaagcctgctaactcctgagagactggacaagatgccgtggagagccttggctctgagtagctctgctgctggacagttcagttggcagtccccaaacgtaaggcgtaagagtttaagaag

SEQ ID NO: 15747 - DNA, 2881 bp, Homo sapiens
tttttttttgccagagttaaactaaataacccatgttatgtgtacaaaatcccctttgttgaaaaataaggggctttctaaactaataaaaaaggaagttttcaaaaattatagtttattaaaacaacttttttggcaaacaaagttacttcaggtgaggaaattttatactgtgaataaaattccaaatgaatcttttcttaaaactttttaaaaaattatgtgccagtgtatactaatgctatagattcttgtcttagaagtttttaaagcattctgttaatgcccactgaaacaatgggactccaaaaatatagtcaataatcatgataaaaaattataatatggattatcaagtgaagcaggtattgagaaataaaaattctcacttgctcactggcaatttctttctaacagatattatggagaaggcctgaagtaattcagacagatagctgtttatggtgaattataataatacttcatgagggcagagctaattaaaactagtaattgcttaaaattcaaagccatttctggacatataaaatgagagatgaatctgaaagtttttcttttgtaaaacctctttccagttcttaaagtccagtttgctacatcccccaatctgatctaccattgcatattaatgatcaacttaaatgtggtatttagatgtgcaatgtcacattgttataataataattataaaaagactttatttaggcctcaactttctcctttttttttgttctttttcagaaaagaaggagtgcggaatttcttctttttcttggatggcgattttgaaggggagccttcaggtgacaggacttcttcgattttctctggagacttaatagtaatctcgatgttttctatggttgtacttgtgcttaacctactcactcgcttagcaagctcatcttcaacatcatgcatatcatccttgccatttactaccatgacaggcacttccatggagatgaagctcttggaaaacagctcatggttttcttctaggccttgttgtttacgttcgattgtcctcttatactcttcaagttctccttctgtgagatgactaaatgggttaggaggagctggtgggccatgatcatcatcttcaaattgcatagtagaaggtggcttatccacaacaattccagcaagcaactgagattgtggtcctgctgttttcaagtcatatcgattttgttcccgaatcttatttctcttttctagtacctcattcgggtttgtgtttaaaggaacaaactgatttggatcttcaattttgataggtgttccaccactaactttagatgagtcttctgctttcatccacgtgattttggttcggggactggtttctccgttccgagactcctcaggcacattcactttcatgtaagtatttggtgagttcagccatcttgttttttcacgctgttgcctctgtgccatgtatttgagaggagagagtggcactgtatcgtcttcaaaggaaaaagcagtcacagttgctgggatttccacatcactcttgtgcctaggcttctctcgaatgagaggatgcctgtaagcatagcctgttctataccccaagttgtccagagtcctcataagcccttcaaactcaatttcgccaaccttccatttttgatgggaacccatattcacacctcctccaccagacgctgctacagtgtaagtgaaagctttatacttctgaaagtccagtacatggagattgtctactccacctgcacctgctagggcctgcacctgaatctcacaggctagttgcacattaaaaatataatgaaaagcctcctctaatgtttctccaagtgcaaccacaccatgattcctgagtaccagcaccttacaacttggtcccagaaccttctgcagttgaattctctcctcctgttcttcaagtgacccttggtagtcataataggcaacatctcccagaagaagagactcttgagaaattggaaggatcccacatttcatggaggatacagctgctgttgcaagggtatggatgtgtatcacacacttaacatcaggacgtgttgaatagattgcagcatggggactgaatcctgtatggtcaattttcaaattggtacttccctggtcaaccacttctcctattatattgactttcaccaaattggaggctgtagcttcagaaaaagataggcctctgggaattattataatgtggtcttgctccttacttattcttactgagatataggtatttgccaggtgtgcccatccaaacaagtctacaagtctgtaccaggctggcaagtttacagcgagtaagtttttctcccttcacatatgaggatgtatctgcaccaggaaggtcattgataggtgtgaccatgccaagactgagaggaggtgaagaaaaacccgagaaagaattggccatgatgtaatctgcaatctgctgtaatgctagtaatccagttgggttgtggcctttcttcatctgttcttgaataaggcattccaagtcttcccgaaaggcaggactttgcaggatctgagtaactcgtttcctctgctccatcatgttgaagtcttgtcgtagatcaggagacatgttcctctccctaatgtattctgggtcattttcattgatgcggtcaaaatatctctctttgtgaggcatgctgggaggaggaggagtggtaatcacgccttggctggcatctgagctcatgttttaagtctgtggattactcttgttatctcgcagcgcgtagccggctttgtgtttcccctccctccttctcggcagccgcccgggctgcagcagccgccggatccgccgctgcggcgcttcccgaattca

SEQ ID NO: 15748 - DNA, 947 bp, Homo sapiens
ggtacaggtgaaccctgtatttgggaggttaactcaggaagtgagggcataaggtaaaacaagagagaggaaagccattaagagtatgttaagtcccttcagtaggccttgggaacctctgagaaaagtatagattgcccaagacaaaagactggcagggtgatcagtccaaagcatttattaggagaatgtacttaatgagtgggctacagcgtatcctcacaacagacagtgagagagagttgttctacctgggtatatccaaaacaagggggtcagggtatggagtttacgagggttcaaggtatttggttcagggccagggccagtttttttcagtgttttgggcaacaacctgaataccttttcaaggctctggcttgggctcaagcctgcaggggaaatgcaactggccaggtcacagggcaatcaagttactctgtgtttctttgtcaggacacagaaaaaaagtggggaagctgggggaccctacaaggatccttggcaggaaagcagggattgtgttcatttgagggtttcactgtcagtgagagtctcagcttccatgcaactgtccatcacggctgcaactgaaatcagagctgggacacagcgcaccagaagctaaagtcttgatgccatcaaaggacatccctgccccattcacatctctgtcacgtccactaatcggcaaaaggagaaaagtgagagaagatgacctaagtgtgactgcagcaggcagctctggaaaatgaagccagagcagtgagccagcccctcctccgaccaaggaggaaggaaagagcaggtaagcaggaaggccagtgtcccagacaggaccctaatgatcctgaatccatgtatcaggatccatcctctccttacacccttcctggacacactctcacctctcattttccaaagccctgccatgctgccatcccacc

SEQ ID NO: 15749 - DNA, 1593 bp, Homo sapiens
  misc_feature (1)...(1593): n = a,t,c or g
cccagctcggtgctgccgccatcttcttggaggacaggaggagaggcgaaggctccccctccccgtgatcgctccgcactcccgccaccacctgccctcccgcgaccgcctctctcctcctcagtgggcacttgtctccttctaacaaacggccttccccccactccagttacccaccgcaaggcgaagattctcattacctgttccactcttataagcataagaaaaccgagctcataagacgaagcttcacaaaagatgtctaagcaacagccaactcagtttataaatccagaaacacctggctatgttggatttgcaaacctccccaatcaagttcaccgaaaatcagtgaaaaaaggttttgagttcacactgatggtggtcggtgaatcaggtctaggaaaatcgactctcataaacagcctattcctaactgatctgtacccagaaagagtcatacctggagcagcagaaaaaattgaaagaactgtccagattgaggcttcaactgttgaaattgaagagcgaggggtcaagctacggcttgncagtggtagatacccctgggctatggtgacgctatcaactgcagagattgttttaagacaattatctcctatattgatgagcaatttgagaggtacctgcatgacgagagcggcttgaacaggcggcacatcattgataatagggtgcattgttgcttttactttatttcaccttttggacatggacttaagcccttagatgtggcgtttatgaaggcaatacacaacaaggtgaatattgtgcctgtcattgcaaaagctgacactctcaccctgaaggaacgggagcggctgaagaaaaggattctggatgaaattgaagaacataacatcaaaatctatcacttacctgatgcagaatcagatgaagatgaagattttaaagagcagactagacttctcaaggctagcatcccattctctgtggttggatccaatcagttgattgaagccaaaggaaagaaggtcagaggccgcctctacccctggggtgttgtggaagtggagaacccagagcacaatgactttctgaagctgagaaccatgctcatcacccacatgcaggatctccaggaggtgacccaggaccttcattatgaaaacttccgttctgagagactcaagagaggcggcaggaaagtggagaatgaggacatgaataaagaccagatcttgctggaaaaagaagctgagctccgccgcatgcaagagatgattgcaaggatgcaggcgcagatgcagatgcagatgcagggcggggatggcgatggcggggctctcgggcaccacgtgtaaggtgatgtgcacatatcaagaagtcagagaaaacactttcctggataaaaaagaaaacattccagatgcatgatccagctgtgtgttttcaatcccttgggagggtgccatccacattttaacagtacctgtgccgtgagaatttaatttttaaaagactttgatgtgtttttgtatgaagtacttttaaccgtatgtatttcattgctgtgtcacactcctgtgttttgtgaggtgaatgtcttcc

SEQ ID NO: 15750 - DNA, 694 bp, Homo sapiens
attctctcccaggccacaagacatttcctgctcggaaccttgtttactaatttccactgcttttaaggccctgcactgaaaatgcaagctcaggcgccggtggtcgttgtgacccaacctggagtcggtcccggtccggccccccagaactccaactggcagacaggcatgtgtgactgtttcagcgactgcggagtctgtctctgtggcacattttgtttcccgtgccttgggtgtcaagttgcagctgatatgaatgaatgctgtctgtgtggaacaagcgtcgcaatgaggactctctacaggacccgatatggcatccctggatctatttgtgatgactatatggcaactctttgctgtcctcattgtactctttgccaaatcaagagagatatcaacagaaggagagccatgcgtactttctaaaaactgatggtgaaaagctcttaccgaagcaacaaaattcagcagacacctcttcagcttgagttcttcaccatcttttgcaactgaaatatgatggatatgcttaagtacaactgatggcatgaaaaaaatcaaatttttgatttattataaatgaatgttgtccctgaacttagctaaatggtgcaacttagtttctccttgctttcatattatcgaatttcctggcttataaactttttaaattacatttgaaatataaacc

SEQ ID NO: 15751 - DNA, 6535 bp, Homo sapiens
caagttgtggaatgtaaatcttttattaaaacagttgtctttccacagtagtaaaggctttggcacatacagtataaaaaaataatcacccaccataattataccaaattcctcttatcaactgcatactaagtgttttcaatacaattttttccgtataaaaatactcgggaaaaattgataaataacaggtaagagaaagatatttctaggcaattactaggatcatttggaaaaagtgagtactgtggatatttaaaatatcacagtaacaagatcatgcttgttcctacagtattgcgggccagacacttaagtgaaagcagaagtgtttgggtgactttcctacttaaaattttggtcatatcatttcaaaacatttgcatcttggttggctgcatatgctttcctattgatcccaaaccaaatcttagaatcacttcatttaaaatactgagcggtattgaatacttcgaagcagaacaggcaatgtgcagccctcatttatgagaaaaccctcaggaaactcccagggtgatgcttggagaagctgtgagttgagctgaagctggagaacttcctccagagcaaagggcttaagaaagaaagaagaactctaagctgggtctgctaacatcactccagtttagatggatcttggcagagagacatgcttgttcctctggattggaaagatgatttactctcgggaatcttctctgtcagcctgtacatctaaaggcatgaagcactcaattgggcaattaacattagtgtttgttctctgatggtatctctgagaatactggttgtaggactggccagtagtgccttcgggactgggttcacccccaggtctgcggcagttgtcacagcgccagccccgctggcctccaaagcatgtgcaggagcaaatggcaccgagatattccttctgccactgttctcctacgtggtatgtcttcccatcatcgtaacacgttgcctcatgagggtcacacttgaattctccttttccgttcccaagacatgtgcagctcatcatctggccattttctccctgacggtcccacttctctccaatcttgtagttcacaccattgtcatggcaccatctagatgaatcacatctgaaatgaccacttccaaagcctaagcactggcacaacagtttaaagcctgattcagacattcgttcccactcatctccaacggcataatgggaaactgtgtaggggtcaaagcacgagtcatccgtaggttggttcaagccttcgttgacagagttgcccacggtaacaacctcttcccgaaccttatgcctctgctggtctttcagtgcctccactatgatgttgtaggtggcacctctggtgaggcctgtcagagtggcactggtagaagttcccaggaaccctgaactgtaagggttcttcatcagtgccaacaggatgacatgaaatgatgtactcagaagtgtcctggaatggggcccatgagatggttgtctgagagagagcttcttgtcctacattcggcgggtatggtcttggcctatgccttatgggggtggccgttgtgggcggtgtggtccgcctaaaaccatgttcctcaaagatcatttgttgcccaacactgggttgctgaccagaagtgccaggaagctgaataccatttccagtgtcatacccagggtgggtgacgaaaggggtcttttgaactgtggaaggaacatccaagatctctggtccatgaagattggggtgtggaagggttaccagttggggaagctcgtctgtctttttccttccaatcaggggctcgctcttctgattattcttcagggcaatgacataaattgtatattcggttcccggttccaggccagtaatagtagcctctgtgacaccagggcggggccgagggaccacttctctgggaggagacccaggcttctcatacttgatgatgtagccggtaatcctggcacgtggcggctgccatgataccagcaaggaattgggtgtggtggccaggaaacgcaggttggatggtgcatcaatggcagtggaggcgtcgatgaccacaggggagctccgagcattgtcattcaaggtgtacaggtagatcttgtagtcagtgcctggttgtaaacctgtgatggtgtagcttctgacatctggcttgatggttctctggattggagtctggccattggctggaacggcatcaacttggaagccagtgatcgtctcagtcttggttctccagctaatggtgatggtggtctcagtagcatctgtcacacgagcccttcttggtgggctgacattctccagagtggtgacaacaccctgagctggtctgcttgtcaaagtgtccttaagagcatagacactcacttcatatttggtggccaccataagtcctgatacaaccacggatgagctgtcaggagcaaggttgatttctttcattggtccggtcttctccttgggggtcacccgcactcgatatccagtgagctgaacattgggtggtgtccactgggcgctcaggcttgtgggtgtgacctgagtgaacttcaggtcagttggtgcaggaatagctgtggactgggttccaatcaggggctggctctccatatcatcgtgcaaggcaaccacactgactgtgtactcagaacccggtctgaggccttgcagctctgcagtgtcttcttcaccatcaggtgcagggaatagctcatggattccatcctcagggctcgagtaggtcaccctgtacctggaaacttgcccctgtgggctttcccaagcaattttgatggaatcgacatccacatcagtgaatgccagtcctttagggcgatcaatgttggttactgcagtctgaaccagaggctgactctctccgcttggattctgagcatagacactaaccacatactccactgtgggctgcaagccttcaatagtcatttctgtttgatctggacctgcagttttagtttttgttggtcctggtccatttttgggagtggtggttactctgtaaccagtaacaggggaacttgaaggcagccacttgacactaatgctgttgtcctgaacatcggtcacttgcatctgggatggtttgtcaatttctgttcggtaattaatggaaattggcttgctgcttgcggggctgtctccacggccagtgacagcatacacagtgatggtataatcaactccaggtttaaggccgctgatggtagctgtagacttgctcccaggcacagtgaactcctggacagggctatttcctcctgtttctccgtaagtgatcctgtaatatctcactgtgacagcaggagcatcccagctgatcagtaggctggtgggggtcgcagcaacaacttccaggtccctcggaacatcagaaactgttgattgttggccaatcaataagggactttcctctctgccattaagagcaacgatgctgaccacatactctgtgcctggagtgaggttggtgagggtgatggaattccgagagtggggcacccgatcttctcgaggtctcccactgaagtgctcgggatgatggcggatcctgtagccagtgatggtggctcgaggagcaatccagtgcacagtaaaagagttggcagtaatatcagaaaagtcaatgccagttggggaatcaagacctgttttctgtcttcctctaagaggtgtgctctcatgttgttcgtagacactggagacactcactacatattctgtaccaggcaggagatttgttaagaccactgcattgtctgaaggagaaattgacaactctgcaacatcttcctcatttttcacaggtgagtaacgcaccaggaagttggttaaatcaatggatgggggtggagcccaggtgacacgcatggtgtctggaccaatgttggtgaatcgcaggtcagtgggaggaggaacagctgggatgatggtatcagagatagggacactttccttgtcatccttgacagtgtaaacactgacattgtactccaggccgggactcaggttatcaaaagtgcaggagctctgatcagcatggaccacttcttccaaagaatttccctgctggccgtttgtaggggttgtggtaattctataaccagtaatgtctggggtggtgctcctctcccaggagactgtgagcactccagtgtcagggtttgcctccagatgcaagtttgttggtggagacaatggtgtcaccactttgtttacaattggcgcatctctttcctgtccatctctcaggacttggatggtgtagacgtattctactcctggagtcaagccggacacaacgatgcttcctgagtctgaagtcacttctcgtggtgcctctcctccctggcttggtcgtacacccagcttaaaaccaattcttggagcaggcgtccatgtgatcacgatggtggtctcagtcacctcggtgttgtaaggtggaatagagctcccaggctgcagtgtggtaaagactccagtggctttggggctctcttggttgccctttatggccacgagggatacggtgtactcagatgcaggctgcagattcctcagggggtacttggagacagagggacccacattgtactgcctgggctggcctcttcgggtaaggcccacggtcagtcggtatcctgttatctgggcccgaggtggagtccatctcaccaggacagtagaatcagtttcattgacaaactggaggttagtgggagcatccagtttggttgtctgttgagcagtcagaggcttgctctccctcccatggctcactgcaaagactttgaagtaataggtgaccccaggggacagcccggtgacttctgcaaaggtgttcctgctgatgggcagcctctgcccgtgctcgccaggcaggttgacggggatcacatccacacggtagccggtcactgcactctcaggcggtgtccacatgatggtgaccttcacgtctgtcacttccacaaactgcaggtccctgggagagggcactgtatctgagcgtggggtgccagtggtttcttgttgaatgacaacaggtgtactttcttgattttcttccacagcatagatagtgatgttatactgaacaccaggttgcaagtcactgagggtgacggagtttgcagtttcaggaaggttgagttctgtgctgctaccttctactgatggcgaatagactattctgtaccctgtgatgggagcctggggtctgctccagcgaacaacaattgaggtgtcatcaacttggtccacagtcgggtcaggaggggcatcaggcgctgttgtttgtgaagtagacaggatcaaactctgctccccatcctcagatatctgatagacatttacaatgtattttcggccaggaagcaggtcagggatgttccacagaagtggctgtgcttggaagatccaggtactgtggctcatctccctcctcactcagctcatattccacccggaatcccgacacggtgtcggaagctgagacccaggagaccacaaagctactggctgtgatttcggtcacagattcagaagtggccacaagaggagaaaagggagtcgtctctcctgtcacggtgttgctggtcacaggtgtgctggtgctggtggtggtgaagtcaaagcgagtcacttcttggtggccgtactgctggatgctgatgagctggccctcgtataccacaccaggcttcaggcctttgatggtgtaggagtttaagtggcctggtatggtagcttccttccaacggcctacagaatttttaggtctccacctgagaatgtacttggaaatgtgagatggctgtggtgcattccactggatggggtgggagttgggctgactcggagtctcagtgataaatacttcgacaggaccacttgagcttggataggtctgtaaaggttggcaatgccactccccaatgccacggccatagcagtagcactggtatctgacaccatgcacatacttctcccatgaatctccaatttgataaaacgtcccagtctctgaatcctggcattggtcgacgggatcacacttccacctgccccgaccctgaccgaagcatgtacagttcagcatgtgcccctcttcatgacgcttgtggaatgtgtcgttcacattgtaagtgatgtcatcaacaatgcactgatctcgaagctgcgagtaggcaatgcatgtccattccccacgaccattcccaacacacgtgcacctcatcatgtgacccatgtcatgctgcttatcccactgatctccaatgcggtacatgaccccttcattggttgtgcagatttcctcgtgggcagccatggggcagaacccaaacttctggtcggcatcatagttctgtgtggtcccacaccacttcatgttgtctcttctgccctcagaagtgcaatcagtgtaattgtggttgttgtataggaaggggaagtggcacaaggcaccattggaatttcct

SEQ ID NO: 15752 - DNA, 524 bp, Homo sapiens
  misc_feature (1)...(524): n = a,t,c or g
cgttnnnnnnnnnnnnnnnnnnnnnnnnnnnnnnnnnnnnnnnnnnnnnnnnnnnnnnnnnnnnnnggcacgaggagagctagcaccatgagcttcaataccctgcagacatgaaaaagatactaagggaatactaaatcagctctacacacataaatttgacaatgtagatgaaataaagcaattattcaagaaatacaaactacttcaccttgcccaatttgaaaaaggtaatttgaatcatttcctacaactattaagggaagtgaattcataatttttaaactccagtttttttgagaaaaagaaatctttagacctaaatgagttcactggagaattctatgaaatgcttaaagaataattaatactaattctacacaatttcttccagaaagtagaataggagagaacatttcttaatttattttatggagcaactactaccttgataccaaagccagagaaaatgagcacaaaaagaagattacaggctgggtatggtggctcatgcctgtaatccc

SEQ ID NO: 15753 - DNA, 3112 bp, Homo sapiens
atgggcggcgagtggggagcggggccgggagtggagcagccgccgcggcggactggaccgagcctcgccggcgcgcacctgcccgcagcgcccgcggacgcgcagcgcggcccgagcgcgacgacctgccgagcggcggccgaggcggcggtgtgggcgcgtcaggccgcgacgagggcgctgagacaaatttacatgtattggagaccagaccagaagcccttctgaattaagatctcacattcttgaaggtggcattgaagagcactaagatcggaagatgagtgagcttgaccagttacggcaggaggccgagcaacttaagaaccagattcgagacgccaggaaagcatgtgcagatgcaactctctctcagatcacaaacaacatcgacccagtgggaagaatccaaatgcgcacgaggaggacactgcgggggcacctggccaagatctacgccatgcactggggcacagactccaggcttctcgtcagtgcctcgcaggatggtaaacttatcatctgggacagctacaccaccaacaaggtccacgccatccctctgcgctcctcctgggtcatgacctgtgcatatgccccttctgggaactatgtggcctgcggtggcctggataacatttgctccatttacaatctgaaaactcgtgaggggaacgtgcgcgtgagtcgtgagctggcaggacacacaggttacctgtcctgctgccgattcctggatgacaatcagatcgtcaccagctctggagacaccacgtgtgtccctgtgggacatcgagaccggccagcagacgaccacgtttaccggacacactggagatgtcatgagcctttctcttgctcctgacaccagactgttcgtctctggtgcttgtgatggtttcagcccaaactctgggatgtgcgagaaggcatgtgccggcagaccttcactggccacgagtctgacatcaatgccatttgcttctttccaaatggcaatgcatttgccactggctccagacgacgccacctgcaggctgtttgaccttcgtgctgaccaggagctcatgacttactcccatgacaacatcatctgcgggatcacctctgtctccttctccaagagcgggcgcctcctccttgctgggtacgacgacttcaactgcaacgtctgggatgcactcaaagccgaccgggcaggtgtcttggctgggcatgacaaccgcgtcagctgcctgggcgtgactgacgatggcatggctgtggcgacagggtcctgggatagcttcctcaagatctggaactaacgccagtagcatgtggatgccatggagactggaagaccattccaacttggacgcgttaccatgagagcatatcctatccaaccgtactaacgtggacaccctacacctcccctcagaacttcaaaagggcaagatcttttttccttcacttattgctgaaaccaagagcacaattcccattgagagaaagatctctgtgctgtaaactaaaacaaattgtgcattccttccggggccatcgtctttgttttcttttttgtcttgaatgaattttaaaaggaaatatataataaaaatgttaaccagaaggtaaacttggagtgtaattgtcagacagacacacttttccaccagtgtatttgaattttagaccagtgaccctgttttgtggcattcatgcaaaacatgctgagggctttgttcatctgggtcatcgtgtccaaatttcagtcatgtttgtagcaagattttggaagcattgcatatttcctttttaaaatgtattcctttgtgttcaacagttaatcaaaaccagagagtctagggcagcctctctgatgttgtcaatgatgtaaattcagtccctggtttttaattttctgtctgatgtcacagatcattgttgcacacaaacgtggcatagaaaagaacatgttcagaagccatggggccaagcacatgcgggggacggtctcaaatgcgtgatcagagaatccttcacctttgctgaaaagtgagctcagatccagcaccatgttcctcctgacccatcctgtctatcttctcagttgagtttttaatctcactttggggtttccttgtgaagttgggagggaagtttataatagcctaacactaccccacccccaactaggaggaacctctgttttcaagagagatgcctgtcctgtgcttggatagtcagtcaattatttgtgtatgaaacaatgtacaaatcaatgttttgaaaataatgatctcagactttctaagttaaattttaaaaattttgattgtttgccatattgggtgggtttactccttagaatcgcatgctgtagaaatgctcaaaagtgcatatgggactcagtcccttaggtgttctttttcttttaagaaataacctcttacagttgtaaccattgcggctctgtccacttctcgttgctgctctgtggcacatatcgggaagcagtacagcgcgcggctctacacgcttgggtagcgggataagtcactgttttctttatttctttaaaaaaaaaaaagttctgttgcaaacgactgctgttggattctgagggtggggagggagagagagggagggagagggagtgaagagcctgccctcctatatggattcttcagggccctccacatctgaggtggctcattcccatcacacacagattgtcctggtgttcatttcaaggccagtgttcagcagcagcgtttggaaagcaggttctgtgggaccccccgccccgccccccgcactccttcatagcagcagtagtggcttctccatcctgttttctgcaacattctatacaaaactgtgctgtgaccttgcggtaggcctggatctggcaaagagaatacaaatgaaaccccttctttctctttccgtccaacaactctgtagagctctctgcacccttacccctttccaccttttgtatttaattttaaagtcagtgtactgcaaggaagctggatgcaagatagatactatattaaactgtactgttatttaagatgtaataaagcagtttgacatgagggaaaaaaaaaaaaaaaaaaaa

SEQ ID NO: 15754 - DNA, 2599 bp, Homo sapiens
aaatggagaaatcagaatttcagaaggaaatggaacacacgggaaatgaaaacatttctctgcaaaacaaatggagaagcactgctcttgtcaggtgcaagtgtggaaacagttgtgcatattttgtacactgcccatatggtcaaaatcgtatccttagacacaaatcgcctggcgcttgcactgaatttttgaaaatgcaagatttctgaatgataaattaacccccccaatttttttttttttttttttaaaaaagctaattttgcagacaggtttacatgtaaaaggctaggtatttagccacctcagcattgattagttttggatgtctaagctctgttacacatggcttcccatggcttcactctacaaaacatatttacaacgtgaaggatacatctacaagaaatctacatttcaagggttttacaaatcaatcttgtatctttcccctgaattgactctcacagaccccgtccccttgtcatttcctttgcccagcttaacggtccaaagtctacttaaatgcagctcaaaaatgttaagattgggcaacagatttacagttcctgttctcaaaaccatgtgcaattattcacatcttcacaccatgaaggaattctgattttttagcttttcaagttccttaatttgttgtctcaaaaatagtatcctttgctctcgcaaagttgcttgaatttcacatactcggactaaagatcttaaattttttaattcagtacaaatttcggacatgtgaatagttcccatgttatgcgcttcttcgcgtaatcttgatgcctgcttctctgcatgatctgcaggccatccttgaacgtgttttatgagattttcactgaagtgtgctgctagtgccaggcgttaatgaacacgtggatcgggccagaagaattctgtggtacaactgttgcatttgatgcattactactattagaagtatgattgggacccaggtgatggacttctctggctacttgagcgctgaagacttcgaggagagacaggttcatgaccttgctgcttgtcagcagttacaggctgctgtgtggctgactgtgacactggtccttgcttaactactggagtactaacctttggctgtgatgaaacaggaggagtactgatcaaaggtttgatagggactgtgttagtttgaggtgtgccttattccttggagaaacatatgatcttggggatgacgcatcagatgttaaagacatcggagactgattagatggctgggcttgtgtagagagctgagcagcttgagaaatcagagacgttatgttgaaagcagatggtccagcagtaagaaacttatgaattatagactgcagtgaggcttgtgtcacagctgctgtaagaacttcatttattttagatatgtccacattagaattattaagctgcagcgtggcttgcaaagcaggaagcaattgtctaagaagatttgggtcctgaagtaagggaggtattggcgactgtggaacacggagaaacagggaccgctgaagcagatgttggaggtgcagatgtggggttcagtccagaggcagaagacgtggaaggagttgtgcaagaatgtgatacgggtttgtctcctgatgtagattcttttctttctgttttctgtgcagggacagaagatgtgggtgtaggcagttttgataaagtagatgctccattagcatcaaatgatttctttggctggtgatcagactgtagcgtaaatggactagaaggaacagtgcttggggtagcagttggatgaaccactggtttgatggggtgctgtactggcgtagaactactgtgagtctctgctcttggcagtctgtagtctctgtcattgtgtctgcttgtttgagacaaaatattctgtgggagcaaactactggcatcactggaatgcttgtcttccattccactggcaaacccactagtggctgttgcttgcatcacctctcttctgtaatccctatcttttgggaagctgttgactgccatcttgtttgcttctttttgtctctgttctctttcaagccactcttttggtttttcccattgtgaaacttctgttcgacaattgtagtagtactttttcccagaagagctaatatgctcagaccagtcatctgcagaatcataaggtgcatctgaagttttgcttgggttattgcttggattagaagaatgtgaatttgaactatgaagagcactgtggttgtgtgaattttcttgtggagagtaactggtcccaccatccctctctctaactctgtgagtatgcacatttttggccttactgtgacctgtgctgtcactgtatttgttttcaggactatcagatctccgcaacattttatttggtggtgaaggatctccggcgtctcgccatcttttcatgtctgtgatcaccgctactggggtgactcttcgatgaatacttaagtgcctggtaaggctgcgagtcccccctccggtcgtgacagccatccactgagtctctgctgtttcctcgcatacattaccatcaatgcccggcctgtgagtgtgtgtcggggaggggggagag

SEQ ID NO: 15755 - DNA, 1074 bp, Homo sapiens
tcagcctggcctcctgtatggtggatctgtggaacatgactgtagcgtccttcgtggcattgggtattacctggagagtcttctttgcttggctccatttatgaagcacccgttaaaaatagttctacgaggagtgaccaatgatcaggttgacccttcagttgatgttcttaaggcaacagcactccctttgttgaaacaatttgggattgatggtgaatcatttgaactgaagattgtgcgacggggaatgcctcccggaggaggaggcgaagtggttttctcatgtcctgtgaggaaggtcttgaagcccattcaactcacagatccaggaaaaatcaaacgtattagaggaatggcgtactctgtacgtgtgtcacctcagatggcgaaccggattgtggattctgcaaggagcatcctcaacaagttcatacctgatatctatatttacacagatcacatgaaaggagtcaactctgggaagtctccgggctttgggttgtcactggttgctgagaccaccagtggcaccttcctcagtgctgaactggcctccaacccccaggggccagggagcagcagtacttccagaggaccttggcaggaactgtgcccgggctgctgctgggaggaaatcctacaggggtgggatgcgtaggactcgaccaaccaaagcctgggctactactcatgacccttgggacagcaggatgttaccaaagtcctgctaggcccctctctctccctacacgatagaatttttgcggcatttgaagagctttttccagattatgtttaaaattgaaaccaagccatgtggtgaagaactcaagggtggggataaagtgctgatgacctgtgttggcattggtttctccaaccttagcaagaccctcaagtgataaccatcacaagataaggccccagtgcctacagacaaagcagaagctgccacggacaccaatgggaccaagtccaaatggattaatccaggacagaatagccacttgcttaattttctgtgaagaaatatcaatatacaaataaaagacatccctgtaaaaaaaaaaa

SEQ ID NO: 15756 - DNA, 1558 bp, Homo sapiens
tttttttgtttttgcagtttctaagtcattactttttattttgaaggatttgtgaaactcttcacatcatggtgagagtttgtatgattaataagaagcagctttttcatgaaatgcttggaggtgaacgagttctcagcctgtgagatccgaccatcccattaactttgaagtttctcttgattaatagaagaaaaaaggggagggtgaagaaaaggaggaacatgctaaaaaccttatgacaatcatccaaaatgtgaggaaagaacaaccgattcaccaactccactttttctattttacaactttctacatctcactcttgattttggccttccctggctgaaacagcctggcagtccctagagcccctgagaagagccctggttctccaaaagacagaggaggagaagccctgcaggatgcgctggaccactttcccagagaactgacagtccgtgctccccaaaagtttgaaccaacagcctaatgtgaaaagaaactgcactgaaaggtaaaggaggaaatggtgatgaactgggcttatgtgagaatgtctatattttcataagacagccccagaatctttctctcagttacagcctcaggcaaaccacgttctggttggtgggttctgcagggatctctcccaccactgagcctctagtcccaaaaccatccttgacaacatcgtgtgtctgttacttccctttgcccacctccaggccacctggggaagcccacaggcagccaagaccctgaaatgaaatgaacacaaagtctgactcggtaagtattagtttcaaacagaacactaaagagaaaagttgaagctgcaatgtgtgtttaaggcagagccccagcagatccgtgtccacccatgtgccaataagacaatgggcaaagcctacaaatggcaagagcaaaaatgggactattaatgcgtgtggaaaaggccttaatagttaagttacagctaagaatgtcatgtcttgggttagaattttcatttttagcaccgttaatgtattcacttaaatctatgttagcaccttgtctccaggcagaacaacaaaccatccaaacattttaaacattgggggaaacacgaaggggagggttaaagagagaatccggtactgtggaaggagtggatttagatcacaagatccttgtcgatatccttctgcttgatgccgaagcagccggcccactcatccagggcgatgtacttgtcattgtccaggtcacaggtctcgaaaaagcgggtggtgcaatgctccatggggatgaggggagcacgcagtggagccagctcggtgtgggagaggtacccgtcaatggggtgctggtccagctggccgaactgccagtgtacagggaagatgtacatgttatagttcttctcgaagtcccgggccagcagctccacggggtggtctcctgcctccaggcgcttctcattctcatggatcttcttcacccgcagcttctgcttctcagtcagaaggttgttgtcctcatccctgtcatacagggtgacccaggacgttcttgc

SEQ ID NO: 15757 - DNA, 333 bp, Homo sapiens
attttgtatagtaatatatatataaaatgacctgtcacaggttggctttcatagttttacctttcctttttgggtggtgcccttgggtctctactactgtctttcatcactcccaagaaattgagtagtgcagccaggatcaggaccagggattggcaaatgttttttgtaaagggccagataggaaatattttgggctttgaggactgtgttatctctgaaatgatcttgttccagtgttaccatgtcaagacaaccatagatagtatgtatacaaatgaacaggtatggctgtgttccagtaaaactatggataaaaacaaccacattgca

SEQ ID NO: 15758 - DNA, 560 bp, Homo sapiens
  misc_feature (1)...(560): n = a,t,c or g
tttgaannntctgaaanccttnnnnnnnnnnnnnnnnnnnnnnnnnnnnnnnnnnnnnnnnnnnnnnnnnnnnnnnnnnnnnnnggcacgaggatttggcttgataaatacatatttgaataaactacctttagttgtcttctttagatgtatccatgatgcattaaatatatttgatcttcaattgatttgtatgaaatgtgagaagaaacaaagaaaacttgattagccataattcatgaaaacgatacactgtttgcagttgtcataaaactgggagctttcccaaaattcttagagtttaacctttttttttgtttctaatttcatctattttaaagtattgtctgaaattgcttgatattctggaccacagatgatggccagcaccatgggttgcanactggggcactgtgatcccagcaggacccatctgcctggccctgcttgctgtcgcgggaacacctctgcgcaccacggaggccgaggggctcgcctgccccgacgcggaggccgaggggctcgcccgcccgacgccgggggcaaaagtctttacaaag

SEQ ID NO: 15759 - DNA, 2173 bp, Homo sapiens
gagtctgtcctcggagcaggcggagtaaagggacttgagcgagccagttgccggattattctatttcccctccctctctcccgccccgtatctcttttcacccttctcccaccctcgctcgcgtagcattggcggagccgtccggaggccactcagtcccattccatctcctcgtcgtccttcggagccgagccgtccgcgcccggcgcgcggcggggagcccaggagcctgccccggcccctggggaccgaagagctgcagctcctcctgtgcggtgcacgatctgattttctggagagatgtgaagaagactgggtttgtctttgggcaccacgctgatcatgctgctttccctggcaagctttcagtgtcatcagtgtggtttcttacctcatcctggctcttctctctgtcaccatcagcttcaggatctacaagtccgtcatccaagctgtacagaagtcagaagaaggccatccattcaaagcctacctggacgtagacattactctgtcctcagaagctttccataattacatgaatgctgccatggtgcacatcaacagggccctgaaactcattattcgtctctttctggtagaagatctggttgactccttgaagctggctgtcttcatgtggctgatgacctatgttggtgctgtttttaacggaatcacccttctaattcttgctgaactgctcattttcagtgtcccgattgtctatgagaagtacaagacccagattgatcactatgttggcatcgcccgagatcagaccaagtcaattgttgaaaagatccaagcaaaactccctggaatcgccaaaaaaaaggcagaataagtacatggaaaccagaaatgcaacagttactaaaacaccatttaatagttataacgtcgttacttgtactatgaaggaaaatactcagtgtcagcttgagcctgcattccaagctttttttttaatttggtgttttctcccatcctttccctttaaccctcagtatcaagcacaaaaattgatggactgataaaagaactatcttagaactcagaagaagaaagaatcaaattcataggataagtcaataccttaatggtggtagagcctttacctgtagcttgaaaggggaaagattggaggtaagagagaaaatgaaagaacacctctgggtccttctgtccagttttcagcactagtcttactcagctatccattatagttttgcccttaagaagtcatgattaacttatgaaaaaattatttggggacaggagtgtgataccttccttggtttttttttgcagccctcaaatcctatcttcctgccccacaatgtgagcagctacccctgatactccttttctttaatgatttaactatcaacttgataaataacttataggtgatagtgataattcctgattccaagaatgccatctgataaaaaagaatagaaatggaaagtgggactgagagggagtcagcaggcatgctgcggtggcggtcactccctctgccactatccccagggaaggaaaggctccgccatttgggaaagtggtttctacgtcactggacaccggttctgagcattagtttgagaactcgttcccgaatgtgctttcctccctctcccctgcccacctcaagtttaataaataaggttgtacttttcttactataaaataaatgtctgtaactgctgtgcactgctgtaaacttgttagagaaaaaaataacctgcatgtgggctcctcagttattgagtttttgtgatcctatctcagtctgggggggaacattctcaagaggtgaaatacagaaagcctttttttcttgatcttttcccgagattcaaatctccgattcccatttgggggcaagtttttttcttcaccttcaatatgagaattcagcgaacttgaaagaaaaatcatctgtgagttccttcaggttctcactcatagtcatgatccttcagagggaatatgcactggcgagtttaaagtaagggctatgatatttgatggtcccaaagtacggcagctgcaaaaagtagtggaaggaaattgtctaagtgtcttggaaaaattagttaggaatttggatgggtaaaaggtacccttgccttactccatcttattttcttagccccctttgagt

SEQ ID NO: 15760 - DNA, 1479 bp, Homo sapiens
  misc_feature (1)...(1479): n = a,t,c or g
ctacccagaatgctcagattatagctgctgttaccttttattgagtacccacaatgtgctaggcaactgtgctagatacttttacataatctcatttannnnnnnnnnnnnnnnnnnnnnnnnnnnnnnnnntttgctccattttacaaatggagaaatcgaggcacaaaagattaaacatcttaccaaagtctgcacagccacttatatgctggagctagaatttgaacccaggtgtgcctccactttttaatactagaccaatcttttcacgggggaagtttcctagattaacaccctcacatcttttaagaccattccaaaacctgcgttctgttttgcagaagccctcactgtgtttctgctgccctgaaacagtggaggcagacaaaggtgagtgccaagtgaggaaccataagaagtggtagatctctgtggagtgccataagaaccctcaagagccttaacaaaggtagttgggggagaggggaagaggtgtttcagcagctctgctcccagcagccatttcctctctccagggcaaaggggtggggctgcgaggccagctgaccaagaaacccctccagcttcctccaagtccaagtccagcatctttcctacaactattctgccgttccacttcgtcttcttccttgcctcactctatgtcatggttacccttaccaactggttcaggtaagatggagtgggccttagatactctcctgaagagctagctattttaaggaaagagcaattcaaggccattccagacacacatgggtctgccattatatttggtgaggaggtagaacaggtctaaaagctaaggcccttcatattctctaaccagagcctttggttacacagctatgagggagcagaactggaaaagaccttcatcaagggtagctgggccaccttctgggtcaaggttgcctcatgctgggcctgcgtactcctctatctggggctgttactggcaccactctgttggccccccacccagaaaccccagccccttatcttcgaggcgccgccgccaccgcatcatatccccagataacaaatatcctccagtctaagtccttttcacaaactggggttcccctgacattgtactcctagagttggctcaaggggagctgtccagcccagctcaatacctcaaggacacacagggagttatctccgtttgggctgaagtcaatactatgaactggaagaagtggtcaaacacagtctaatgtgctgggcagagtgtctgactcactggagctactgttacatctgcatcccagctcaagagcctaacacccaaatcagcagctcaaagaaccaccgctgatcccagcagacagtgtgcaccagccctttcctggctcttgggcttcttatatccgtgtnccagggctgaactccttattttcctttctccanaggcagagccgagtcttcagtccctgttggtctttcccc

SEQ ID NO: 15761 - DNA, 512 bp, Homo sapiens
  misc_feature (1)...(512): n = a,t,c or g
tttganaccttatgacnnnnnnnnnnnnnnnnnnnnnnnnnnnnnnnnnnnnnnnnnnnnnnnnnnnnnnnnnnggcacgaggatagtgtttggtatcttcgtgctcaggatccagatcatagacagcaatggatagatgccattgaacagcacaagactgaatctggatatggatctgaatccagcttgcgtcgacatggctcaatggtgtccctggtgtctggagcaagtggctactctgcaacatccacctcttcattcaagaaaggccacagtttacgtgagaagttggctgaaatggaaacatttagagacatcttatgtagacaagttgacacgctacagaagtactttgatgcctgtgctgatgctgtctctaaggatgaacttcaaagggataaagtggtagaagatgatgaagatgactttcctacaacgcgttctgatggtgacttcttgcatagtaccaacggcaataaagaaaagttatttncacatgtgacaccnaaaa

SEQ ID NO: 15762 - DNA, 1118 bp, Homo sapiens
ttttttctttaaaagcaatttatttctgattacaaaatacaggtgaggagcatgggcgatgcctgtaaccccttggttgtgcatcttcccagtctatttctgcttctagaaataccctgtgtacaacagcaagctcatgctgtccccaagtgcttgcacattctaacagctgcagagtatatgaccaggtggaaagtccaacagatgccccactcacaagatagggccctccaatcagtcttctggctccctttcactcatagtaactggttgctcttcctattggtcatagataaatgacacctgcacaattctccgagtgctttcaagcaacttcgggaggcagtgactaagaccctttccttgctcccagcttcctatgtcccagggctgcctgtggcacctggactgctgctgcccctgggtcccgtacattccagggcaacaatggaggaagggcaggcaacgcatgaggaattaacagtctttattgggctcagaccaggagtccgtgggtcttgaggacctctgtgtatttgtcaattttcttctccacgttcttctcggcctgtttccgtagcctcatgagctgtttcttcttccggtagtggatcttggctttctctttcctcttctcctccagggtggctgtcactgcctggtacttccagccaacctcgtgagccaggcgccccagataggcaaactttcttgtaggcttcagacgcacgaccttgagggcagcaggaaccaccatccgctttttcttgtcgtagggcggtgggatgccgtcaaacaccttgagacggtccagagcggcctggcctcgcttggttttgtggggcagcatacctcgcacggtccgccagaagatgcggctggggggcccaagaagtggtaggggcctcggaaagggttggtgttcatccgcttggcgggaggaaagcccaggtacttcaacttgtttctgtagaaattgccagaaatgttgatgccttcacagcgtacgaccaccaccttccggcccagcagtacctgtttagccacgatggccgccaggcggcccaggagatggcctcgaccatcaagcaccaggacctgcacctccgccatcttcg

SEQ ID NO: 15763 - DNA, 363 bp, Homo sapiens
gttttaaattggtaacttaagcttccttggcacgatacaaaatacctcttaaagacagcaggcttttttatttgtaggtgtgaggaactggctttaacttttttctcctcctagtttgcatgttttccttctctcgtcttctgaactgctggcaccagcagtaatacatactgataaaatcaaaattgatttttaccagtggccagtttatggctagagagacgacttatacctccataacacagaagggggaaaaatgaagaacctccagtgatccgtgaaaacctaaacgctttcaaacaaatcccaggaacagaattgctatcgaaagatatcattgcccagtttgcaggctatgttgag

SEQ ID NO: 15764 - DNA, 436 bp, Homo sapiens
  misc_feature (1)...(436): n = a,t,c or g
tgganatccnnnnnnnnnnnnnnnnnnnnnnnnnnnnnnnnnnnnnnnnnnnnnnnnnnnnnnnnnnnnnnnnnnnggcacgagaagctacatgatctttttaagagatagtgaaaagcattgataagatccagtgtcccttcatgataaaaacattaaacaatagggaaagtttggaacttccttaacttgttaaaaagcatctgtaaaaaaacccacggttaacatcatagtggaggattggaggttttcctgctaattcaggaacaagatggacccctcctggcatttctattcaacattgtactggaggatctagtcaggaaaatgaagcccatttttttttttcaaataataaaagcatcgaaattggaaagggagaagtaaaatatacncggataacatgatttaatatgtagaaaattctaagagattc

SEQ ID NO: 15765 - DNA, 456 bp, Homo sapiens
ctgaaatgcactggtattatataagtgactcagctctgttccgtaagaaaaccacgcttttcttatcgaccttgagtagcagacagtgatataagagcatattaaaaccctctttaaggtcaagcccaaattccacagcttgctatctatcattttagtttgcttttccaatgttcattggccttgagagttgtaaatacacaagtctgtcctcgattcacttttctcttttactctagtgagtatttcctgttgttttccttttgacttgattttaaaatgaccatttcaggggattcatctagatttctatgtgagaaaaaaaattcaggaacttggcatctctggctgggtttgatgagtagcagataggtagctctctagttaagtaacgtggggagcagaggttataggtctttgtagattagaaaacgttaaatgcattaacttggtggt

SEQ ID NO: 15766 - DNA, 543 bp, Homo sapiens
  misc_feature (1)...(543): n = a,t,c or g
ttttgaancccttttganttggannnccnnnnnnnnnnnnnnnnnnnnnnnnnnnnnnnnnnnnnnnnnnnnnnnnnnnnnnnnnnnnnnnnnnnnggcacgagcagcatcggagcccaattttactctctgagcaatcctgcttcctttcctgcccccttcccaagagcaatccctgataaacttcccgcatgctaatctccatctcagagtctactttccaaggaagtgggcctataacatagctcttccagtttttgttaacaattctagaacaggggtcagcaaactttttttttttttnnnnnnnnnntcnnactccgtcnccaggntgnattgnaggggcccaatnttggntaantgnancctttgcctccngggttnaagnnattntccngcntaatcctcccaanangttgggacnacnnngccaccanncccanttaattttttnatttttaaaaaaattgggttttnccatgtgggccagnanggnctngnntctggacctngngatccagggntncntgncntcccaagggg

SEQ ID NO: 15767 - DNA, 1111 bp, Homo sapiens
catcacttcacaagaagaatttgaatcctcactagaaggggtacccatcctcttccagttcatacttcccatatccaacaacctgaaagaggacaaagacaaaagtgaaaaatatgctgaccagatttaggggtttaagagttctgatgataaccacccaaactcactcagtaaatgacaaccctagaatgggatggagttagttaaacatactcacatgaacgctgagcattttacttcgctgccctctatgggccttgaaccagttgaccaggtctgattttgagaatgacttcagtgcttcaatctcgtgggcagggcggtcaaagaggtactcgctgtgtaacccacttcattccagtttctatccacctctcccccaaggtggggtatctcacactctttcagttgatgagagctgtgacctgggtgttgaatggctcttcagtgaggttctcaatcttctcctcaaaggctagaagaaactcttctatcttcttatcgaacacttcagaattgtatttggttggctgagtcccccagtgacagaaaatctaggaatccgggatgtgttctacaggtaggggtagacatggtacccaagggtctgcttggttcgaaggaagtcaaaacaaggttcttccatgtgcatcacaagcagctccataagcgtatattctcttagactcctggtacctgactggtagtacacagtgacttcagagttggcatcacccttgttcagagctttcactttgcatagatggtggcccactgggcagctctaccacctggaacctgcacaggcatctcctgctccagaggcttgaagtttagtttgtcaacaacatatttcaggaaatccatagattctgtgcttgtgacattcccttgtaccaggccctccacaaagagctgggatttgaattctttgacgaagctcagcagagactcaagggaaaggccgtccatcaaagcctggtacttgtcaatcatagaccaacgggcatattccaagattaaaagccgtacatctttggccaaagtctcgggcttgatgaggatgttaaagtaggtcttcttcaactgctcagttatcattgtaaagaca

SEQ ID NO: 15768 - DNA, 556 bp, Homo sapiens
gaaaagaaggagaatagaggagctgctggctgagaaaatggctgttgatggtgggtgtggggacactggagactgggaaggtcgctggaaccatgtaaagaagttcctcgagcgatctggacccttcacacaccctgatttcgaaccgagcactgaatctctccagttcttgttagatacatgtaaagttctagtcattggagctggcggcttaggatgtgagctcctgaaaaatctggccttgtctggttttagacagattcatgttatagatatggacactatagatgtttccaatctaaataggcagtttttatttaggcctaaagatattggaagacctaaggctgaagttgctgcagaatttctaaatgacagagttcctaattgcaatgtagttccacatttcaacaagattcaagattttaaccgacactttctatcgacaatttcatattattgtatgtggactggactctatcatcgccagaagatggataaatggcatgctgatatctcttctaaattatgaagatggtgtcttaggtcccaagct

SEQ ID NO: 15769 - DNA, 383 bp, Homo sapiens
gggtccggcccaggagaaggaagtcgctgaaggcagtggccatgctggccgtggaaatgggaggcggttgcagggggtctatggggcccggtcctggatactcggcaggaagccgtgtctgcagaggctcctccctgcctcaggtggccccgttcaaccccagccgtgcccatctcctgccaccgcctgtcggtgggggtttaaattcggtgtggctttctggggtgcagctcagcacccccccttatgcagactgggagggggtcgggcagtcccctcagccacgaggaccctggatgggttctagttcacttgggaccgtggggcctggctgcgtactgagtgggtgccccacagtcaaggccaacgggggctccccctgc

SEQ ID NO: 15770 - DNA, 231 bp, Homo sapiens
caagccacacagctgcagcaactgcagatactgcgggctgagcaggagcagtggtggcgcctgccctgaggctgccctgcgatggcctgggtgggagagctgggtcaccggtgccgatgctctggccctccccaatacgctgcttcgtcccactgcaccgcctggctgagggcgttaggggctgtgcctcttgtgagggccatttgggacctccctggggcactgcacaat

SEQ ID NO: 15771 - DNA, 675 bp, Homo sapiens
tttttttccttgggaagcaggagtttatttttatccttttgtaagtattaactcggtaatcacaacaaacacggagcaatctcaatgctgtttatccggaggacaagtctgcggggtcgtgacgattcttttcttcttgaagtttttccttttcctgaatctcataatgattcttggccatgattctgtcttttcaatgactgtggcttctactcgaacaagatcctttccgaggagtggcttgccaagcagcgtgaagttgtctgccccaaccagcaggaccttctccagtcgaattctctctccacacgcaaggtctagttcatttccaattaagatcaggtcttcagaggtcaccttccactggcggctggcaaagtgcaccacggcaaagagcctgccatactgccccgtgacgatcatctcattcaccttcttcacgacctctgcatggtgtctggtctcctcaactgggtctggcagaacaacttctggccaaggtggtgaactcagggatgttttaggaacatatcctggtagatatgaagtgctctgtgaattgaaccttcgagaagcagaccaaagggaggctgctccgggccccgaaggtctcaggatgctgtggctgcacgcggacgccagccgccctaaggtgaccgtcagggaagatgctgc

SEQ ID NO: 15772 - DNA, 593 bp, Homo sapiens
gcacgagggcgaatcgtggttctcttttcctccttggctgtctgaagatagatcgccatcatgaacgacaccgtaactatccgcactagaaagttcatgaccaaccgactacttcagaggaaacaaatggtcattgatgtccttcaccccgggaaggcgacagtgccctaagacagaaattcgggaaaaactagccaaaatgtacaagaccacaccggatgtcatctttgtatttggattcagaactcattttggtggtggcaagacaactggctttggcatgatttatgattccctggattatgcaaagaaaaatgaaccccaaacatagacttgcaagacatggcctgtatgagaagaaaaagacctcaagaaagcaacgaaaggaacgcaagaacagaatgaagaaagtcagggggactgcaaaggccaatgttggtgctggcaaaaagaaatgaagtgtctagcagtgagctggagattggatcacagccgaaggagtaaaggtgctgcaatgatgttagctgtggccactgtggatttttcgcaagaacattaataaactaaaaacttcatgtgaaaaaaaaaaaaaa

SEQ ID NO: 15773 - DNA, 1674 bp, Homo sapiens
gcgccgcactcggggatcatggcccaagttgcaatgtccaccctccccgttgaagatgaggagtcctcggagagcaggatggtggtgacattcctcatgtcagctctcgagtccatgtgtaaagaactggccaagtccaaagccgaagtggcctgcattgcagtgtatgaaacagacgtgtttgtcgtcggaactgaaagaggacgtgcttttgtcaataccagaaaggattttcaaaaagattttgtaaaatattgtgttgaagaagaagaaaaagctgcagagatgcataaaatgaaatctacaacccaggcaaatcggatgagtgtagatgctgtagaaattgaaacactcagaaaaacagttgaggactatttctgcttttgctatgggaaagctttaggcaaatccacagtggtacctgtaccatatgagaagatgctgcgagaccagtcggctgtggtagtgcaggggcttccggaaggtgttgcctttaaacaccccgagaactatgatcttgcaaccctgaaatggattttggagaacaaagcagggatttcattcatcattaagagaccttttttagagccaaagaagcatgtaggtggtcgtgtgatggtaacagatgctgacaggtcaatactatctcccaggtggaagttgtggccccatcaaagtgaaaactgaacccacagaagattctggcatttccctggaaatggcagctgtgacagtaaaggaagaatcagaagatcctgattattatcaatataacattcaaggaagccaccattcttcagagggcaatgaaggcacagaaatggaagtaccagcagaagatgatgattattctccaccgtctaagagaccaaaggccaatgagctaccgcagccaccagtcccggaacccgccaatgctgggaagcggaaagtgagggagttcaacttcgagaaatggaatgctcgcatcactgatctacgtaaacaagttgaagaattgtttgaaaggaaatatgctcaagccataaaagccaaaggtccggtgacgatcccgtaccctcttttctagtctcatgttgaagatctttatgtagaaggacttcctgaaggaattccttttagaaggccatctacttacggaattcctcgcctggagaggatattacttgcaaaggaaaggattcgttttgtgattaagaaacatgagcttctgaattcaacacgtgaagatttacagcttgataagccagcttcaggagtaaaggaagaatggtatgccagaatcactaaattaagaaagatggtggatcagcttttctgcaaaaaatttgcggaagccttggggagcactgaagccaaggctgtaccgtaccaaaaatttgaggcacacccgaatgatctgtacgtggaaggactgccagaaaacattcctttccgaagtccctcatggtatggaatcccaaggctggaaaaaatcattcaagtgggcaatcgaattaaatttgttattaaaagaccagaacttctgactcacagtaccactgaagttactcagccaagaacgaatacaccagtcaaagaagattggaatgtcagaattaccaagctacggaagcaagtggaagagatttttaatttgaaatttgctcaagctcttggactcaccgagacgcc

SEQ ID NO: 15774 - DNA, 536 bp, Homo sapiens
  misc_feature (1)...(536): n = a,t,c or g
ctcctgaatncccantnnnnnnnnnnnnnnnnnnnnnnnnnnnnnnnnnnnnnnnnnnnnnnnnnnnnnnnnnnnnnnnnnnggcacgagaaattttagtgtagcacttttgaagctttaggatttttttttttttaatgccttagtttggacttttccatgttttttcagggtttataatagtaaacacataggaaaaatttttactaaaggctctattctaaacatggggactgcaaaaaaaggcaaaagttggtagtgggttttctggctcatgattacccaaaagagaaagcagggggcaaaacatgaggtgacgtttgaaaaaagcaggctggccaacccctggagggaaggagggactggtgggagagtcagcagggccctgggcaccccccaaagtttgccatagtcanatgccctggnttcccacagnttctcatccatgcaggctttcctgcacttccacccctgcaggttctgctgaggngacncacaggggtttatctcaaaagggctnttacctcacataaggg

SEQ ID NO: 15775 - DNA, 880 bp, Homo sapiens
gctgagatgaaggaatacataacaaagttttctttagaacgtcagacttgggatcagctcttgcttcactaccagcaggaggctaaagagatattgtccagaggatcaactgaggccaaaattactgaggtcaaagtggaacctatgacatatcttgggtcttctcagaatgaagttcttaatacaaaacctgactaccagaaaatattacagaaccagagcaaagtctttgactgtatggagttggtgatggatgaactgcaaggatcagtgaaacagctgcaggcctttatggatgaaagtacccagtgcttccagaaggtgtcagtacagctcggaaagagaagcatgcaacaattagatccctcaccagctcgaaaactgttgaagcttcagctacagaacccacctgccatacatggatctggatctggatcttgtcagtgactttatgagagtttctgccacaaggtgcccaagaggagaggaatgggaagagtgccccagcacgtggtgactgcgtgatttctgctcgttgcctttgaagataactggcaggactgactgtagaacactttgacttttttcaaaaagtgatggaatttgtacatccaaatgaatattgtatagacaattttcccaggaatgtgcaaaatgcttgaaagttcaaacttcttttttgaaatgatcttcagatccagtggcccattcttttatctttatcctgtgaaggtgtttttcaggttttgaaacaatccaaaaatcatttaggaccaagtctaaggaaacattttagtggccaagttggattccgattgtaaaggaatgatactaattttctagcatggctctgaaggtgattttaggtagaagagttttg

SEQ ID NO: 15776 - DNA, 2654 bp, Homo sapiens
tttttttttccattaaaaaaactttattttcattttttacaaagaatatccccatctggggtaaaaatatatctggttaagtacaaaatatagtctttaccatacaaaaagatacataatacaaaaacatgaaaccaaccatcttcagcccacactttctggctgtaataactctcagaaaagggtggagctcagtgctctgacacaggacagtgaacaaagtgctatggctgagagtgactgaccaagtgctggcagctgcagtgaggggccaatatccctatctcctaacacagggcaggaagggggttcaaagggcttttatgaagacctgccctctagtttctcatggcagtatttgggaggttctgaacacagggttggggcatcttgatcaagagttccctccttgggtttgaagtcacagtgggcaaggctgacagcagcaaccctttcacatgatttaagcgttagaattatataattctgtacattgggggcaatctcaaaagtagtaaaattttttttgtcttttggcttaaccctagagacacagtagaccagtttcagcttacatttaagatggcagaaggggagaacaaaaaatttgacaggaattaaagtgctaagaacatcaccttagaatcaattccaaggacttacatgaagagaaaaccatcctcccatatgaaaatatttgcagtaggagaacacagtgcaataggctccaaaaatggcttttaagacctttggtggggcagttactactgctttaaaagccagggttaaagtatactctaagcaaagatgaccgtagagcagctagcttccttttttataatcacagggaaagctctctccattgtccattcaaatcagctctagaaggtttttcttttttttctacaagtgcacaaaggggaaaccactgattttaagaacctccttttcccaaagttttggccacaatttcccttttcatcttcctagtttgttaaattggctcttctccacatgatacgtaagttcaaggtccaaagttcctatcacaatttacaaaaagcctccaaaaaaccttgaaaagcttacgcccaggaggccatttttacctgacccgaaactatcgaaaaggcctcaattttcaaggagatctgagaaaatggatgggcctgagtttttctagttatttttaaacccatccaacaaacacccctgttatcacaacatggggcgcctggcctgaggatgagtccgcatcctttaaggcccaggagattgccctgctgaccacctcctacattaggaagtcagaggctaagggtggacccacactccattgacgagactgttgagtctctgaaaaagtgagtgtccaggaagagagacaaaaagaaacaagtaggtaaagctgcttcttttcttccacatgctcactgcacattgttgttgaggatgcagggatccacctcagtataagtcggtggtggcatgaacttgaactcaggggcatacataaagatagggctgtcttgagagccatccatgtcatctagcagaggagttgttgggctctccaatcggtgatcttcaggaatgacatccatatagcagggaggagcttctggggtatcagggatgttcagatctacccaactcatctcagagctggttcggctggccatgctggatgttctgctgcttagacctgatctgctgccaattaccaggggcaggtcaaggatgaccttcttggatccaggaacgctaacatagatcagtaaggaatattcaactcgaaggatgttgcagcccaggatagaaggcctgatcttctgaacccgaaggctcttgccacgccatgatgcgcatgtccctgagataatatgattgcctctgactgatgacaacttctgagtcagcaccttggtctggccattggcaaggtaagtgtggcggggccacaatggcagctttggggaccacaattcgggaacatgtattctcaaagtcagcatggatggaaatctcatcaccttcacagaatccttttctgtcaattcgagcagagacagacacccgcccatcaggaatgaacatgcaggaaactttcctttcctttttagcagacacaggtggccattaaatccaggggtattgacatccaccagatcccatactttcaaagtttttctttggcccttgaattgggctgactcgggcggtcaagaaaagccttcacccagtagtctacacacccatattttcctttgaaggatgttcccagaggcccctgaggaagctcaaagccgaacttgtactcatatttgtttccaggtctcatgatcaccatctcattctcacctgttggctggtcttccagaagaagcgtgtcttcatagcgcaggtactccgaagtctgtttgcactgctgggatccctgcatccaaagcactttagccactccgcaagccaggatcctaacggctttgacacgagtaacttcacacacctccactatcacccggccagccaccttctcgccactgccgtacaccttttcagggtcgttaaagaccacctcaaaagacttgatcttcttgaacatcaccatgatggaactgagttggttttaagagttagaaatgacggtggaa

SEQ ID NO: 15777 - DNA, 2369 bp, Homo sapiens
  misc_feature (1)...(2369): n = a,t,c or g
tcgggtgtaaagaggctgtttaattaatggtaatttcttcccctggataacaccttgacttctggtcctaaataatgaaataaaactgtttgcctatttttaaagaaaacagagttaaaaataagtgtgatcagaatagttagctaggtctggtagcaacagagatggtggtgacacatcaattcacaggcaactaactgataaaatttttttttcacttttgaatttttacacttttcctgattattctgtgtaaggtgaaaactagaactgtttaaaagacatacacaaatctagtacatcaataaccggggatttttcttttttgctatactattttcacaaccacgggtgtgccttgctagggcaatataaccatcacagaagcaaacgttaggccngaatactggtaagaaaaaacaaagcaagaaaagagctaccagatatacagacaggcttgggttccacattcactactgcattttcaagcgccaagtattaactgcacatttttgttcagctagaaaggagggatttttttttttgttttttctctttttttttggtttgttttaaatcagtgcataaatttttcttttctcatttcagcagatggacaaacagatggactctacagctaagtggaatatcaaaggtagaggggtgattctgtgagactgataggcctgactattctcaattctccccactgcagtgttcacgcaacttccctgaatatagggtctccttaaacacatctgaggcactgacctggatgagtgcacttgggagacctggtgacaggcacaaaaaagcatgatcagggctagcctcaatacagggagaaatcatggatatttaaaaatacttttttgattcagattcccggtatgactgaaagagcaacaccgtgttgagaactggaggaagacagggttctggtgccagaagctcttctccaatctttaaagcccaggcttgctcaccaaggtgctcagtaatgtctctcacccctgccccatatatagcattaaaaagtgaacaaaagacagataaagatagaattcaaaaaggaaaaaaagtaaggaagcagagggacagaaacttagaagagaaaaccaaggtcaacagtcaaaaaggatggtgggaaagaatgtttagatttcaaaatttaaaagccccgagctaggaagaacctgaaaactgagtactcctcaagtgaaaggccatctctacagaacatcattcctttttttgttttttgttttcttttttggaggatgaggtctcgctatgttgcccaggctggagtgcagttattcacaggtgcaaccacagggcactgcagctttaaactcctgggctcaagcgatccttcctgcctcagcctcccaatagttgggacctagatgcacgcaccaccacgcctgactcaggacattattcttaaaggtattatccaggaaacagataaggtcattcataaaacacacggctttttttctttagctcagtgttaacaatgaaagtagattccactattgaagcacaagttgcaaattggtaacatagtgaacatattgctgtaggaaagggggttcagtgtggtgtgttatatgagcacttgaacttttcaaggtgtcataagccagttatctgccacaaagaatttccatttcaggattcgagtttcctcagaggaagacactgtggacatttgtggtcatgaacttttaagtggcaacagcccaaacaggtcaagtgtctttaagtcccgaacaacggcagcattactgtgaattaccattcaactcaaatgccaaatgatgtgtgtctcactccaagttccagcatcacaatataatctctataactttctgtacaactttacaatggaattgtatttcaatgattattttgatatcagattaaaccttccaaaaagttacacataattcaggtctattttttctaccagtaagagttctgctaaattacaaaaccccataatcacagtgttcagtttttaaaaaattaaacacacagtaatcctgtcaatgttaatcaaaatcaaaacttcggaatgccgtggcatttatgtgaccaatctgagttttagatacaaataccagctgtttatcccatgaaccatttttcctaggctgaggctgtgaaaaatcgaaagtcgacgtacgattctcttttttttttttttttttttttatcgcacaagggatatatgttgagggtacagagtgacactgaacagatcacaaagcacggggaaacattagttctctccctccccaggcgtctccttcgtcttccctgggttttccgatgtccacagagtgaggattgtccctaag

SEQ ID NO: 15778 - DNA, 548 bp, Homo sapiens
tttttttttttgtctccactccattgttttattatgtacaaacgctacagaacgagggggacagacacgcgtggggtaagaagggcctggtgggaggagttcacagagcagacggtgcactgggaccaggagagcagaacacaggccataactatagggcaggtggggcaggaacgggttaaaaacgagatccaagccagccagatcgcaggaggtgcgggggcgtcgtcccccttctgttctccccccaaggtcacagtgcatgcaataaaatatatatacaggagctagatccgtcctctgcaggggctctgagggtccagagctcccttcgggtggcgggaagccagtggcgctccctggcggccaggccgggcttggagccacatgcgtcgggggagcgggggtcagtcccagccgttgtctttgatcatgtggttgagttcaatgatgtacttcccctctttgtacttctggctgctctcaaaggcctgttcatatttccagcccaaagtggtcttgcagttctcgcagtggatgtcggcgac

SEQ ID NO: 15779 - DNA, 445 bp, Homo sapiens
  misc_feature (1)...(445): n = a,t,c or g
atttgaataccgttatgacnnnnnnnnnnnnnnnnnnnnnnnnnnnnnnnnnnnnnnnnnnnnnnnnnnnnnnnnnnggcacgagcattttctttactaagtctccaaagcactgtggtctaggagcagcaataaggaatgcatagagagttgagacggttgattttgttgttaagtgtgggttatttaaatgtgaatgtgaatttacatgtgtggcaatcagtaagctgcagatagacttctatgcagtctatgatgtcttttggagaccctgttgtgagctgtagcggtaataagagagccaggcatggtagtgtttttgctcctgaaactgctatgtgatctttaagtacatagtagtaagagcctatcaaactgagcttaactgttggtttattattttgtttgtacaacttccttttttataacgaagcagttgacactt

SEQ ID NO: 15780 - DNA, 734 bp, Homo sapiens
ggcacgaggaaaaacctaaaaatgcccaaataaacattcgcttacatattatatatcttgggcttctttttatgacagttcattcagggacccagtcagtaaacaggtagttaacttcgtgtaaccaagcaagggttttgtttatcttttttaaagtagaaaaaagtgaggctcaaactctctctttctccttgtcataactattggtttacagtctttatttgtttaaaagtaaagcacattgtatgtatttatttggcaatacatgaggccattaaaaccctgagcctaaggtaccacagttagtctcatttgcctcttgtcctgtgaactccacttagaatgtcattgaacttgggcagacataattctagtgtctgttccaaacgcactgtgtcacagaagctagaattaccattagaggcacaaacccctgagaatacacaagggggcacgcttccagtagatgtgttggggaaggaggagggcagaggggacaggggacaggattcagctttgtggtgggtcctgagggttcctaccaggggtagccaggatctgggaaacagatcagcgactctagtctgaagtggctgcctggttcgggggctgccttcagcaagattcaggcaggagagacggaaatagccaccttccaggcgtgagtcctggagataaaaatggattttaacctaggactgccgggagctggccctccgcggctgctcagacta

SEQ ID NO: 15781 - DNA, 549 bp, Homo sapiens
  misc_feature (1)...(549): n = a,t,c or g
agtgtcctagggcttcagttttcccacctgtccaatgggaccctttctgtcctcaccctacaaggggcacaaagggatgacaccaaacctggcaggaacttttcacgcaatcaagggaaggaaaggcattcctggcagagggaacagcatgccaagcgtgagaaggctcagagtaaggaggttaagagcccaagtattggagcctacagttttgccccttccatgcagtgtgacagtgggcaagttcctttccctctctgggtctcagttctgtcccctgcaaaatggcagagcttaccccttgctgtgcaggncaacttttgactggtgagagggatctatgcaggtaacttngtgntctctactgaagtttntgcactttgctctggaaacttatcatnttaantcagtcaatcttgagcttctattcccatatatgacctnctctcagccnttgcctggctggaatntgncactgtcctgactaggtctgggctgctagctaaanaaggnttgaantttntnataggatangaaaaaaaaaaaaaa

SEQ ID NO: 15782 - DNA, 1019 bp, Homo sapiens
tttcatagtgtaatttcttttaatgtataggattgtttccaactcatcaggtctggtgcaattctgtcacgatttaacatggaacatccgggctgcccttcctgaatagtccagggcaagagcagtagtgagtgattcttctcttttctcgggttcactttgacctgaagcaagttgctatcttcggagagtatgtatgggaccccaacagaatggggcccaggggtcttcatcccttacaaatcctggactgtatcaaagggaaggcctcggtaattcgtgctcacccagcccattcggatcctggtcctccctctcttggggttcagggggttcctagagttttcttgttcccacccaggcatgggggggctagtgtccagctgagagttctctctccaactgggcgggggtccgtgcctggatggccaagcgcatggaccggacctcccagcttccttcggccagcgctgcgtggaccagccggtgtcgttgtagggggctcagtccctcgaaacgagagctcaccacagccacgcggaagtgagtctcactgccaggcgggaccgcgtggccaccgctctcgttgcgaagctctagcacctcggggctcagggcctcctccaacttcgtgcgaatggcggcctccaccggaccgatggccccggatcccgagctgccctggcacaaacaaacgcggccagccatggagaccagacccaggaccagccgcccactcagcatggacgccagagactcagacgccaggagtgagggtcggggcgatccgcctggtgagagcaacaatgtcaaacaccgcccccgcgatcccccgcatccgccctaaccccacgcccggacgtccacaccagctcctatagggagcccgccttgatgcccacacggggagacccgagacaccgccccttttctctacgtgacgtggtgaattcgacctccagctgtggaagtgaagggacaagcgaagattagaaaggcccgcacgcgaggcgcgttcc

SEQ ID NO: 15783 - DNA, 442 bp, Homo sapiens
ttttttttttgtccgacatcttgacgaggctgcggtgtctgctgctattctccgagcttcgcaatgccgcctaaggacgacaagaagaagaaggacgctggaaagtcggccaagaaagacaaagacccagtgaacaaatccgggggcaaggccaaaaagaaggtagaaataagacctctctgaaagagactaggggtaactctctcgtaaccctctagtaataggtaacttgtatagtaagtggtttttcaggtgtagatttctagagtcaaaatgtgagagtttatcttcccgtcaccactcgttctttttcccattaggatcatgaaaatgggtctgttgtgcgaagtgtctgccgctgtgcctgctgtgttatttttaactgatctagtggggctcggcccctgtttgaaggccaaaaacgtgtcggtgtttttttttg

SEQ ID NO: 15784 - DNA, 835 bp, Homo sapiens
gctcgactttttttttttttttaaataaaagacttaaaaagtaaagaaggattctaccatatttttaaaaacttttaatcctggtttacttttctaacaaatttatctatggcttcaaagtttaagcggcacttgaattctggatgttttcatgatttaacaagcggccatctcattagaaagagagaaggtaaaatgtttcattttatacgtgggacggcttataaacagctttaaaaatcaatacattatatctttcaccccatctatattttccactatagacttcaaaagtggctttggaattagcatgttttgaaacagtcgaacaagcaagtaacatttacacctaaccacgaaccagtcgctacatacccaggtaactcagtaatggcaaaacacttaaaggcttctgggcctctcttaccctcttagtccaaagctaagtgattatcctttcctgcccttgtatttgcacttgtgcagtttaatgactagatattaaaattcatgctttataagcaaaacctttcacttacggacacttaaaaagtacataaaaagtgcagactgcatttcttctctgccatgctttccctcagtaaggtcacctgtgaggactcaaaacctatccttaatacattcagagttctctacattcgagtcagcgaatgttaattctccaacataaacttaagagaatagtcagccacaaaatggactctaaattcaaaatggcaaaggctaccaagacaactccatagaaaccccactgaagcgggagtgaaattcaggtcacttctgagcaaagctcatcacagatattttgtggtcg

SEQ ID NO: 15785 - DNA, 892 bp, Homo sapiens
tagtacatttgcccctagtgaatgtactaaccttatttaaacaaagataagtgagggaagtaagaagtgatttgaggaatgagcctgggatctgaggcccaccacacattccttaccttcaacttacctttccagtcttctcccaccactgctccacccacctgagattctaggtggagcaatctacaggatactctctgaatgtggttccagcttctcttgcctcacactcttgctcataacatttcctttccttggaaacattgccttcatctcagccccattcagtctttacttgttcacatcatactcttctttcaaaacccagtggaaaagctcaatttctcatgtagccttacctaactccatgcctccagaaagtcatgcaaactcatgccacaacacagccaacagcaacataccatcggcatggcactgagagcaagcaaaaaggacacggggtgacttcactgtctccacttgaagaacttaaggtctgtctgggtgaggggtgtacagtcttaaatattacagcaatcatttattagaaatattcatctgcttctaagttatataaacacttttaatgcaaacattcaatagggcatatttcccactgctctcaagatttcatctctttctgctgccgtaggcataaatggcttcactccgttctttcttctctgcatcacgatagaattccagaatctccggcagtttttgtacctcaagaagtaagtggaacacctttccctgtcatagttattttcatccagacatctgggtggaagcatcagattccttacagatataagagaggcatcatttaaaaggtagaacaggatcgacaaacaaggatttatgtcaggatctctcagcctctgtgttaccg

SEQ ID NO: 15786 - DNA, 4516 bp, Homo sapiens
atgggcaaaggagatcctaagaagccgagaggcaaaatgtcatcatatgcattttttgtgcaaacttgtcgggaggagcataagaagaagcacccagatgcttcagtcaacttctcagagttttctaagaagtgcctcagagaggtggaaggtaagagggcttaaaacatgctaacaaggtaattaaaagacagtttccaattgaggatgcaaaaaaaagcctagttggcattctcgtagtgggacgctattacatagcaaaagacattggttttgaggataatttacttaaatgttacaacttaaacttacaaattaattattttgtagaccatgtctgctaaagagaaaggaaaatttgaagatatggcaaaagcggacaaggcccgttatgaaagagaaatgaaaacctatatccctcccaaaggggagacaaaaaagaagttcaaggatcccaatgcacccaagaggcctccgtgagtatcttgcctgtttttacttcccagacacgttttacagtagaatctgagagaaatttagcaagctactttgtcagtttagagtgtaaatgtacaatcaaagtttcttagctaatacttgttcatattggttatatttaaatagtataaaattcctgttgggtgggagtgttcccagagcatttgaattagacatttggtctcctttgcccagtgtatctccttttgatctttttatttcttgaaaaatactatccctttgaaatagtgtaattgtagaatgttcatctagggttctagctagtataaattaaatagttgtaaattaagctttggttgtgaaggatatttagtatattatagtatttgcaccctgtccaatgcatcacagaaattcacaggcagctttaaatagcaatgcagtgtacacctgatagtatttgtttttgtgatctgttaacttaaaatcctaaaattaattttttttttagttcggccttcttcctcttctgctctgagtatcgcccaaaaatcaaaggagaacatcctggcctgtccattggtgatgttgcgaagaaactgggagagatgtggaataacactgctgcagatgacaagcagccttatgaaaagaaggctgcgaagctgaaggaaaaatacgaaaaggtaagaagtgtgggtttgcttggtaaaatgatgacaagtacgccagatgtatgattgtacttagtttgaggtgtaataagtttttagggtaacagctacattaagtatggtgttgatataagtcctcatccttcaaagaatgcagaggaccaaataaattagggtttttttgactaaaatgtaatcagactcagacaaaggctgtgtacatttatgttggttttgttattccccagtatcttgaagttcatgaaaatgttggtagtcacttcaagtcaaaaatgagcattttcaaatggcttggcatacagtacaaaaacaggctagacaaagtaatataggctatatttttcttagtcatatcctgaaacatttatgttcttttcctttagatactcaaaaaaccacagcatcactaagttaaattacaagtctgctgctctgtccagtaaattaataagattaaggaaatctataactcttatagttcagtaaattgaaatattaaatacttaattttcagctttagtcattctgaaaagtgtttatttctagatgtttcttaacctaattgcatgtttattgacaaattaccttttttttttaagaccacatttcctactaaggattaaggtctgacagtgtaaacctgtagagtgcttttttgcattcagaaggtggcagtgtctaccctttaatcaaagtctctacattctggttttaatagagttaggatctggtagataattgcacctcaatgaggcataactttgcaaatattagactatgccatttcatgagttatagattgttataatgatcttgtatttttatgttcatttattgaagttctagttatttctggagttgctgtggatctacagatacgtgatattttggtataactagaatcttgatttctttcataaagttctgccatgttctatttctttccttaatctttttttcttccctactgttttatcctccctttgctttggaaggatattgctgcatatcgagctaaaggaaagcctgatgcagcaaaaaagggagttgtcaaggctgaaaaaagcaagaaaaagaaggaagaggaggaagatgaggaagatgaagaggatgaggaggaggaggaagatgaagaagatgaagatgaagaagaagatgatgatgatgaataagttggttctagcgcagttttttttttcttgtctataaagcatttaacccccctgtacacaactcactccttttaaagaaaaaaattgaaatgtaaggctgtgtaagatttgtttttaaactgtacagtgtctttttttgtatagttaacacactaccgaatgtgtctttagatagccctgtcctggtggtattttcaatagccactaaccttgcctggtacagtatgggggttgtaaattggcatggaaatttaaagcaggttcttgttggggcacagcacaaattagttatatataggggatagtagtttattcatattcagttatctctgaagcagcaaaaaagaaataattgttgttctgttaactgaataccactctgtaattgcaaaaaaaaaaaaaagttgcagcgtgttttgttgacattctgaatgcttctaagtaaatacaattttttttattagtattgttgtccttttcataggtctgaaatttttcttcttgaggggaagctagtcttttgcttttgcccattttgaatcacatgaattattacagtgtttatcctttcatatagttagctaataaaaagcttttgtctacacaccctgcatatcataatgggggtaaagttaagttgagatagttttcatccataactgaacatccaaaatcttgatcagttaagaaatttcacatagcccacttacatttacaaactgaagagtaatcaatctactcaaagcatgggattattagaatcaaacattttgaaagtctgtccttgaaggactaatagaaaagtatgttctaacctttacatgaggactctattctttaactcccattaccatgtaatggcagttatattttgcagttcccacattaaagaagacctgagaatgtatccccaaaagcgtgacgttaaaatacaagactgccatattaaattttttgttgacattagtctcagtgaagactatgaaaatgctgggctatagatgtcttttcccatttatctaaatatggactgctcaggaaacgagactttccattacaagtatttttaattaattgggccagcttttcaaacaaagatgccacattcaaaatagggtatattttcctatattacggtttgcccctttataaatccaagtagataggaagaaagaagacaaactttgcatctcagtatgaattattcaatttatttgaatgatttttctttacaaaacaaactcattcattagtcatgtttatctgcttaggagtttagggaacaatttggcaattttgtggttttcgagattatcgttttcttaaagtgccagtattttaaaatagcgttcttgtaattttacacgcttttgtgatggagtgctgttttgttatataatttagacttggattctttccatttgcatttgtttatgtaatttcaggaggaatactgaacatctgagtcctggatgatactaataaactaataattgcagaggttttaaatactagttaaatggctttcacttaagaacttaagattttgttacatatttttaaatcttgtttctaataatacctcttagcagtaccttttaaataagtataagggatggcaaagtttttccctttaaaaatactcactttatgcttataaataggttaatgggctgataaaaggttttgtcaaacattgcaagtattcggtgctatatataaaggaggaaaaactagttttactttcagaatgatttaaacaagatttttaaaaacaagatacatgcaagcgaacagcagggttagtgataggctgcaattgtgtcgaacatcagattttttgttaagaggagcaaatgactcaatctgatttaggatgggaagtttctactgtataggaaatcaccattaattcaccaacattaataattctgatccatttaaaatgaattctggctcaagggagaatttgtaactttagtaggtacgtcatgacaactaccatttttttaagatgttgagaatgggaacagtttttttagggtttattcttgaccacagatcttaagaaaatggacaaaacccctcttcaatctgaagattagtatggtttggtgttctaacagtatcccctagaagttggatgtctaaaactcaagtaaatggaagtgggaggcaatttagataatt

SEQ ID NO: 15787 - DNA, 692 bp, Homo sapiens
tgaccagtgacttaaattacaccatgaccattgctaattatatataatcttttgttcttcagttttttgttttgtttcctttttgttattgttgccgaagtgagtagttttgcatttctgatgacagccttggaaagtatatttgctaactccatgtctggtaatgccaacccaagtcgacatgggtcttaggacactgaccacctcacatgccataccctcagttaagcatgttaacatttataggaggaaaaaaatcactttgggagaaaataaaattcaactcaagcataaagcttctgtttactcaggccttctaaaaagcaggttaaaatgctctaaaatgagaaagcctgtggtttcacttatttatataactcactgggacattgccaaatgagtaagcacttaattcgctgcttctgagacttctctgtcaaaacagccccactgataatattagacagaacgagaatgcaggggtctcttccctcccctggggtttaggaagctcatgaggagctcggcttaaaatgtctttgatgtctcttcctttgtctcaaaaagtaatgtcaattttatatactatttcaatattactatctgcatttgttttaatataaaaatgtttgctgcctacctttttctcccaaaaaatctttaagtaaagatgatctgggaaaatgaaaaaa

SEQ ID NO: 15788 - DNA, 1294 bp, Homo sapiens
tgttctaattactaccttttattctaatgtgaaccatggccctgaaagctgataacaagcttggctgagcagagggaactaggggtcggcagaaaggattatgggtggaaaacattggctcttccttggggagtgatgctggggaaagggaagagagtggctcagcctgcaggtaaataggctagaaaagccaaggccaaaggctggaggggagaggacagtcagcatgtccagcctggggtctgggtgtagggttatcccttctccctgtgccttcccatctcgtccatgagcctaggtcttggagccttgtgttggaggctgctgtgatgtcaggaacggggatctgtctagcttttggccacttcctgggacctcacgcccctgttgacagatggagattgggcagcagggccttgctgcattgttatctgctgttccgacttggtttgtcttgtccaagggtgacgaaagagccaggcaccagggtctcatgggatgaggtacagggtgggagatgggggaggggctgggggctgaagggagcaagaaagctgtagctgtgtggggctggcaggatgttgaagaccgcctctgctgctctcacatggggactgggcccagatcctgcttggtcacacccagcccagaagacgggtcctccagttccagtgactctttcggtggagcgtcagtggggcttttgctccaaggagtgcctgctcatttcaaacaggagccaatggtgcatccagctctcaaagaccttccagtctatggtctccatggtgttcttaaggtgtctcaggttctccgggaagctccccttcagtggcgggtacaccttcagggggtcagcattctggagcaggtgcatcacatggtcctctgtcatgttgccatacttggtggcattctgcatgggcccctggggccaggggctcccatgggcagcgctgcatcagcagcggggtggccatgcgcatcttgctcacaggcttgggaggcttgggaagcttcatgcgcaggttctccagctgcaggttctgggaggtgactgtcagtttgtccagccggccctgctgctggtacaggaagtaggcggtggtggcctggccagcgaggagcagagtcaccaggatggaaaagcctgtgtacacggctccgcggctgcacttgctctccggggccccagggcgccggcccagcatgggcagttgctcattgttggagataaggtcgcgctggtcatccatgactggcttctgatcttcccgacagctcctgcttctcc

SEQ ID NO: 15789 - DNA, 915 bp, Homo sapiens
tacatatgtgctctaaaaacaaaccacccagaattgatactgttggtaaccaggagtataaggcagtggctctggggttcttaattcattcctaacttctttgatacttcacaggattaggaaagtggtcatcatacatcccacacagtctgtattacttcaggcttgtgggcaaggttaggaagaatcaatcagccttaactataaatacctgcactgtctctgaggacttactattttatgttctttttaatcaataccgatcagaagtttaggttataaaaacaattctacttcatgctttggtgcttggtaatttttggtgcgtctttaagcattactcttatatatcatatattaaaataccataaaaatgaaattcagacaaaatcactggcaccaaaaatggtttattctgagctgtcttcactttgactatttggggggcttctctcaagtacagatgtgggttggggtcccctggagcaggcaggattggcagtaagagatattggccactcaagtctactgtgtgtgtgtgcctctggaagagtgaagaatggacttcaaaagtaacatcaaaaatctaactgccaccatcctggagacattttgcagggctttcctttcaagtctttcaagtacaggatattaccacaacagcagctgaactgttgtaaccagcatgtttttcctatttccactgtgacctgcagctgactcaaagccttgcgtgacctgttttaggggcatatgattagctcaagcccacagatatattttaaggttgattgtgcgatagaacataattgcaggagtactgtctcatctcatcatattcacgggttctggagattagctcattgaaagggggaggggcattttcaaattctgcctaccacaggcaataactgc

SEQ ID NO: 15790 - DNA, 488 bp, Homo sapiens
  misc_feature (1)...(488): n = a,t,c or g
ggagnnnnnnttgannnctttgaanaccnnnnnnnnnnnnnnnnnnnnnnnnnnnnnnnnnnnnnnnnnnnnnnnnnnnnnnnnnnnnnnnnnnnggcacgagagaccaaacagccttaggggacatgagaagtcttatgagcattgtagacctgctggtgagctagggggtgtaggctgtgtggggtactttctgttctttacttagagatttggtagggaaagttctctggaatttcagcagttgttctgatgtcatgtgtaaatattatctttctgtgttgcagcttggggccaagcttttcatggaaactgctgaaaattatttagtggcatagtaagttgtnnnnnaagttgaagactttatacccaaatccagatggacgaatctttcactttcttgctacagattttgtgaagaagtgttactcaaactttaggtgacattaacaccataagtgtgttaggggaagagctgggataaaggg

SEQ ID NO: 15791 - DNA, 884 bp, Homo sapiens
  misc_feature (1)...(884): n = a,t,c or g
ggacctgcacctggggacatcgttttctgcagaaaccaaccgaagggatgaggatgcagacatgatgaagtacattgagacagagctaaagaagaggaaagggatcgtggaacatgaggaacagaaagttaagccaaagaatgcagaggactgtctttatgaacttccagaaaacatccgtgtttcctcagcaaagaagaccgaggagatgctttccaaccagatgctgagtggcattcctgaggtggacctgggcatcgatgctaaaataaaaaatatcatttccacggaggatgccaaggcccgtctgctggcagagcagcagaacaagaagaaagacagcgagacctccttcgtgcctaccaacatggctgtgaattatgtgcagcacaacagattttatcatgaggagctcaacgcgcccatacggagaaacaaagaagagcccaaggccccggcccttgagagtaggcgacacggagaagccagagcctgagcggtcccctcctaaccgcaagcgtcctgctaacgagaaggcaactgatgactatcattatgagaagttcaagaaaatgaataggcggtactgagttgtgcacagtgggatgtaaatatcgccttcctctccctatatccctcccatgaaaaatggcnnnnnnnnnnnnnnnnnnnnnnnnnnnnnnnnnnnnnnnnnnnnnnnnnnnnnnnnnnnnnnnnnnnnnnnnnnnnnnnnnnnnnnnnnnnnnnnnnnnnnnnnnnnnnnnnnnnnnnnnnnnnnnnnnnnnnnnnnnnnnnnnnnnnntggtggacatgcctgtatcccagctgccaaggaggctaaggaaggaaaattgcttgaanccaaggggcggangttgtggtga

SEQ ID NO: 15792 - DNA, 726 bp, Homo sapiens
tccagagccagaaacaggattttatttaaaatttattgtaatggggtccgcgcaaaaggaaggggtggagggtggggtacatgcaggggacacaggaacacgatgacatggccagggccacaacttcttctgtcgtggggaagagggatgaaaagacaagaccagggctggagctggggtggaagaggggagggggacactggctgcattcccccgcccccaggaagcacctctaggccctggacccctcgctcaccctggcccctaagactccatctcttctctgcctctggccctcctggctcttcctcctgctccccttgactttttcccctgacagattctcaagtaggacgatgttcagggcctgaccccaaccccccataccaccttatgaaggtacaacctttgccggccctgcttctgcccctcctcaaacctcaccgctttccctctttgggacagctctgatccccctccttcctctcctccctcccccctggaaaaaaaaaaaaaaaggaaaagaaagcacccaactccccggggaggggctgcagacagcagggggaaaaggacagaaaggagagaagaggaccgtcaggggaagagggcacaaagaccccgggaaaacagggacagggcttaacagagagaaatggggaacgggcagtggctgcacggacctatgaaccccagccacggccagaggactaaacacaaccgggg

SEQ ID NO: 15793 - DNA, 660 bp, Homo sapiens
actattctaccctaagatgccaatgtctactgagactctccaaaacaggcacagattatccagcatttccccagcttagatggtcatttttttgtgggatgcctgttaacatctcccctggatgttaatgttctgaggagcatggtttgggaaaggacctcgtgggacttacaggaagtagaaagatgtcacccattaaaggccaccacggtaagaacattcctctccttttagcagttgcttaagctgcacaagttggacgtaagatgtcaccctttttatccaggtcattgggttagctgacagggagccaagattgaaatctaagatctttgccctgcaggattcagggctaatggacatcctgagatgggaggaaggagctttcattacagccttgtggggtccttgactcaccagtccctgcaggagccagtggagttcctgccatggtgtccccgaggaggtgtagcttctcacctaccctgccgccaagcccctcagtctgggtcttcttttcccatgcagcctccagcccaggctgcatactatggctgtggcccagtgacacccacccagcctgcccccaggtggacatcccagccacctagaccttcctgtgagtgacccagccccttccactctcagactggcctattg

SEQ ID NO: 15794 - DNA, 312 bp, Homo sapiens
  misc_feature (1)...(312): n = a,t,c or g
ggaagaaaataagtgttgttgacttaagccaaatgtnnnnnnnnnnnnnnnnnnnnnnnnnnnnnnnnnnnnnnnnngggcagtcctatgaagaggcccgtgtggtgagaaagagaggcctccagccaacagccatagatggggtcttgctatgtttcccagttggagtgcagtgattattcacagacatgatcccactactgatcagcatgggagttttcacctgctccatttcccacctgggaggtcatcatattgatggccagctaagtgaggacacctgatcagcatagcacagtacagcccagaacc

SEQ ID NO: 15795 - DNA, 802 bp, Homo sapiens
agcggttactcgacgtttcgggcggcgcggaaacgggcgggtctggcggcccaaccccctgctgccagtcagggcgcacaaaccccaggagagaaggcggaagcagcaagcgactctaaaggcagccccaggctggcctaaagcggttcctggtatggaaacctaggcccgcgagtgcccgggcccagcccggcctagttcaggaagcggctcagccccagggcagcacatcagagacaccatggaacacagccattcctctgccgtcgtgctgggaccagtctttcctgaccaatatcaccttcttgaaggttcttctctggttggtcctgctgggactgtttgtggaactggaatttggcctggcatattttgtcctgtccttgttctattggatgtacgtcgggacacgaggccctgaagagaagaaagagggagagaagagcgcctactctgtgttcaatccaggctgtgaagcccatccagggcaccctgactgcagagcagttggagcgcgagttacagttgagacccctggcagggagataggacccagctgtgctgtcatgcagctaacctctgatgtggtcttcctcaccattggctatggatttgatttcaggtgtataggactaagggcagcttgcgggttagctctgtgactgcatagtttttctaccttctttccctgatcttttgctgccatttgatctttgatagttttggtgaaactctctaaaatacattcactgtgggtccgacgcaatttataaaaattatgtactcaagaagggaaaaaaaa

SEQ ID NO: 15796 - DNA, 875 bp, Homo sapiens
ttttttttttttactttaaaatgctttattggaattattttgataaaagcaaatacttgtatataagacaaatataggaaatagaagctatctacttgaagtgccccctaattttcaggcatttttcccccaataaggtgacagctgctcacacaggataatacaggaaagttgtaagttcttaggatatgcccagcaccaggcggaagatattgtgtcagcaaattccatagcaaggaaggagaacaggcatggctctccacctctcccagcctgaaggtcaagttgcaggaatcactgtctaagcatgacagccatacaaaagcttctctccatgagggggagattcccaaacctttagaccttcactcaggattagtgcagaatctctgtgaaaggtgcattgtccctggctggggcttccagagttcattccctgtaattccagcactttggggagactgaggcacggaggactgcttgagccccaggaagtagagacccagcctggacaacatggcaaaagcccgcttctttactcaaggataacacggcgatgaacgtcttacaactcagttgttttgagtcagcaggggctgtggggccgctagccgagttccccctgccacgagctaggtcagttccaagcaaagacaccagaaactccagtgtgcaacggtagttcacccaactgcactggggaccgccctctcctaccccagccaggccgcgacgtggcgcccgccgggctgtgcgcaaaggcagcgcaagccgttgggatcccctgctccccctcactcaacagtcgggccattacaactctcatactgccaacccacgagcccacttcgcaaaaaaaaaaaaaaaaagatctt

SEQ ID NO: 15797 - DNA, 2744 bp, Homo sapiens
ttttttttttttgcattagacacagtttaatcgccttcaaatagatgaaaagttccggtttacactcccccaccgcataagtcatccagacaggaccctggcttagaaagaggaaaacacaggtgctctaggaaatatagccacatataatacataaatcttcttccctgaaatagagcaggtcctgagcagagctgactgggggccacagcccaccacccagggtgaagtggctctgggactctgccggtggaagtgctggaagagcggggcttggaggaagcccccagtgtggttaccatagccagaggtgggccgaggccttagggtgagttacccgagagggccagcagtgctgggctttccctcactcagccgaggcttaatggaagaactggttagcattttttttttttttgagggtacatcgggggagaggagaggagaggagagcctctctgtgccttggtttcccatttgtgcattcagggcctctgcaggcctcacacagggagtctgaggggatagtgtttaagtgagcactcaggcttcctctgaggaaaagaaatgaccaaagtgcagacttttattactgccattcctgctcctaatgggagcaggagtcaaaaggaaaaacaaattaaaaggggctaatgagaaaggaggagagatgagacagagagtgtgaagggctatgccgctggcatctcataaattcttattgagaatggcacaggtattaaaaaagtttctgggtagtctacgagaaatgtcaattattatctctactacaactacttacatatatctaatgggaaaagagtggggcttaggtgtcagagtggatgggagacaaaggagaagctacactaataaatacaacaagtggaaggtacctgtcccattcctaaaaggatttgtgggccaatgctggcacttggtggccaggagaatcttctgaccccactctccctcctcttcagtcctgaagaccccaagaacccagttaggatcccctggccagaggtctctgtgactgcctctggactcagcacgtgcagcagcttgggaggatttgagccagtctcaaaaacttttagccccagaatgagaccagtgaccccaagcaggagggctgggatctggagggaagagagggggtccaaggggaccctgtggctgaggcccatggagaaccagtgccagggccccaagagacccatttttccagttatcagaggtgactgacatcttctgccactgcccttgagttcagaaatttaaaaaagcttgcagcaagaaaatgccagtgtgcaactgggtgactaaagaccaaagaaaaacaattaaaagggacagcttacttgctctctgtctcaggtttaacttctcacctgaaatctctcatagccctaattaaacacaaacaaaagtctcttccatagataggctacttctcagcttcagctgcctcctgtggtggctctgggggctctggaggtggcatctcttcgggagtgctgctgtcctccggcatctcatttgagttcaggtgttctgtgggggctgggctctgtggcaagaggctgctactggtctcttgagtactgggaggtcgacttccactttcctccagtggcaaaataccccttcgatccagcacactggggggcaaggggccacacagcacttcacagcagttcttcacaatattgccatggctgtagggattctggacgcgattcttccctgtccatgatcctttgatgtcttcattggttgtctggttgagagccacgaggaaagtatgaaatccagtcagtcccacgacggaccagagtgtaaagaagcaaatgaggacttctagaacagttccaggagtttctttcaatgtctccaagaagccaattttcaaagatttgagggccacatagacgatgttgaaggcgaagacatagattgtgaggagggagagagaaaggatgaagaggtagaagtagcggtagttcctctttccaacacaattccccacccaggggcagtgatggtcgaagcgctccacacagttgtcacagatgctgcaatgggaggcccggggaggccggaagatcttgcatgtgtaacagtatttcagtttcacaatctggttgtttatctggaaattcttgatacgaggcggtggtcgctggccctggggcaccgcaccattggtagcttctatctccatttctatgaaagctgcttcatctggtagcgcccgaggaatcactccagggtcactgaagctggtcctcaacagtgtagccatggagaaaaggaagagcatggcagcaaatacagggatggcaggagacagctgaacagccaggtagcggcactcaaaggcgaagaagagtgtacatgtccccaggatgaggaaaagggtcaggtagaaaatgcccttttgccgggccatcatgacgcggccatcacagcaaaaggtgttcctgcctgggagtttctcccatttccgtgtcaccttctttctcaccaccatcacagacatgattggaattcctgctcccaaaatgggttttgcgattacacgagagaagaaacatgaggctgagcccagctttgaaatcacgttgcctgctattcctgccgctgggtcaaacatcatcaaaagtccaattgctagccctggaagacaatctcctcccgataaaccggcccagcgggagaagggagaccaggaaggggga

SEQ ID NO: 15798 - DNA, 12151 bp, Homo sapiens
  misc_feature (1)...(12151): n = a,t,c or g
ctactactactaaattcgcgggccgtcgacccaaggtgaccgtcctaggtcagcccaagctgccccctcggtcactctgttcccgccctcctctgaggagcttcaagccaacaaggccacactggtgtgtctcataagtgacttctacccgggagccgtgacagtggcctggaaggnaggtagcagccccgtcaaggcgggagtggagaccaccacaccctccaaacaaagcaacaacaagtacgcggccagcagctacctgagcctgacgcctgagcagtggaagtcccacaaaagctacagctgccaggtcacgcatgaagggagcaccgtggagaagacagtggcccctacagaatatttattgagggtttattgagtgcagggagaagggcttgatgccttggggtgggaggagagacccctcccctgggatcctgcagctctagtctcccgtggtggggggtgagggatgagaacctatgaacattctgtaggggccactgtcttctccacggtgctcccttcatgcgtgacctggcagctgtagcttctgtgggacttccactgctcgggcgtcaggctcaggtagctgctggccgcgtacttgttgttgctttgtttggagggtgtggtggtctccactcccgccttgacggggctgctatctgccttccaggccactgtcacggctcccgggtagaagtcacttatgagacacaccagtgtggccttgttggcttgaagctcctcagaggagggcgggaacagagtgaccgagggggcagccttgggctgacctgcggggtggatgaggggcagggggtcagagtcatggtgtccacctggggagcccctgacctcagtatatgatgaggtgttggggtgcccgtgttcaggggctctgtgtctgaaggtctatgccaagcagaggggtcagggtgttttccactatgtcctgatctgcacggggagctgttttaccttagacacctgaccacctgtcctgagatctctcggggccttggcccccaacaccgacatctgaccctcagcgccctgaccctgtcccctcctgccatcctgacagataaagagagctctgtgtctcccctgcacagcgaactctggggttacttttctggcctggctcctcagctctgtgggatgctggggccttttggtccctcaggctgttccagccaaatgtgtgttctggagcccgtgtatggggcaagggcctggggggatcggagagcctgcctgctgtcctgggctctctcttattccgtggagtcttttctggcatccaccccacgtcccggctacctggtcatagcagtggggctttcacgcagtggactctgcccctctgatccccctgggcacaggggatatgttctgaagagacccaggagcccgcccttccgtcacatccactccttttgtgacccttcccctggctttctggtgtccagagtctgcttctcccttctccctcctgacggggtttcctgagtctcaggctggctcagggctcagtccctggcagcccccagacgcccagggcagcccctccacctcctacctcattctgggtctggatcctggctctgggtcccagctctgtgattcccgagcatcagccccgagggcactgggtccttctaaagtctcccaggaggtgcctccctcagaccccttgttcccaattccccaggagatggaacccaggtaacccaagggcaaagctgttccgacaagaacccagactgaggaggccagaacagaacaaggcttagagacccagcctgcgcctgtcagacagacagagagacaaacagagagagagagacagacagacagacagacagacgaggctcagtaggtcattctatctagtcccctgcccctgcggtcagaggtgaagtggttgtagtgacctgctgaggcaagcaagggtctgaacagggagggcagaggtccttgctcaggcctgggatgcagggagaaaggctgaccacaagttgagacaagatacagaaacaaacaaaaacagcagaaattgtcccaagagcggggaaggagaggggagaagagactcacctaggacggtcagcttggtccctccgccgaacacccaacactgtgacacaggctcatacaaaaaccctccctgggatgcccctagccccagcccccactgcagctgtgaaggaggaagctggggccagtggtcctggtggcatctgctcatgagggagtccacatggcccccacacttaacccacagagagaggggaccggtgacatcctgtgacccacagcaggatccctggaaatccaggcttctggaggacactgggatcttgaatttgttttttgcaccaaccatcactcaggcccaggattgaatttattagagggcattagtgtcgctaaggagtgaatttccacagatgggataggtggtctcttctctgcaaagttgaaccaacccatggttcaacttttggtaacaccatggggtggtgcagagggtgctcctctcctcccatgcagaggctgattgccctagagtgcagtgttctgggaaccttggtgggtttcagccccaccttctggagtagttctagttggataggcctggtcagtgaggcctggctggtcccaatatgaagtgccagtcacatctgttagggtaaccttgggagcatccctgcacccctgaatctggcctcatgttgggtgggacagctagggtggaggctgccgttgtctttttcaaatgggggacatgagggagcctccagaatgtggtctccaaatatcacctctcactaagggaagggagatcagtgggggatcccaggcctggggcaggaaagacacataagacaaataagaaaggaacatgataagacagaacctcttatcctctgagtaatcaggagccatttaatcccctggggccatgtgaggaagtctgaagccacttggggagactccccctgggaaaatattcatcattggtggccacctgtcatcatcaattaaatataatgacagtggcttcaaaagcattagatggcttgaatcctagagttcaccatgagagaagacatgaattgttcaccctggaaggatggctgggccccggatcttctgtgtgcaaagtggctccttcctagagcatgaagcacactcctgggtgaacagagcccagctgcagacctctgacatcacagacactctgcagcactcatgagaaggaggtgaactgaagcctcaaccctctgccttccttcccttctgagggatgtagctattgaccatcctatgcagctaacattactacaagagtggcagtctgacatgggtgactctgctggtagcagctccctgtccttgcaagctattttgcaatgtccaatctgaatcaagttaatccccttcatgctagaatcattttccaggaaaataaaagctgagggaagccctaggttcctgctccaggaggcgtggctgtatagcagccaggggaagttctccagacagctctcagctcctgcagctcctgccttgccgggaggctctagagcaattgaggaaatattcaccagtgacaaccagcctgatggcacatgcacccatcaccatttgatgtcatattgctcctcatataaacttaaacccccaaataccaacagcaccaacatgtaactaagccaaagcacttctggtgtttctgatgcatttgaggagaccctgcttatttctcgatattagggaattagtgataatttctatttaggtttggtagtgatattatagttattttaaggtccatgtcattccaggacagtaatggagtacttacagctgaacagatctgatgtcttgtatttctttctaaatgttgtgtaagggagaatttattttgctgtgggtgggtcggcatcatctgtgaattgcttattttgagtgctgggtgatgagaacatgggacactgttatttttctgtctccttatttatatgttcagagttcttcataatataaacttatgacacagctcagtctttggacagctgctgggtgtgaagtagaccttggccttgtacccagcaggcctacgtaactggccctccttgggtggtcttagttttctcatttgtgaaatgggcttagacagggactgtggccactagaaccttttagccttcttctaattcagaggctgggatttggatcaggggtggctgtgatcaagcaccaaggggccatttctctgcctcattgtgactgcagagcttcctgtctttgcgggctctgtccctggcctgtcgggaccacccagcagctctggtgaactcagctgccacattcctgatgtgctggaggcagagacagggagtctaagtttgcgtgggcactaagaacgcacagtcatccagggcctccatagaggtttgggtaggaaggctccaccactgtgaccaagggagggcgaaggtcccagtgggcaggagggtctgggggagctgagtgttcatggatgcctgaccttgcctgtagccctctgtctgcattcacacagccctgacccagcctggcccagctccaactcttgtcatgaatttgacacggcctccttcactcctcgagcctgaccctgagcctgtagccatcttatcatacacccgtaacatctttgttcttaaatctcactttatgtttcataaactacttccatgacatactagtatcttgcagaatattatggggcttttagaggtgccagatggataaatgtgactttacataagctaagctttaccacaggaaattatttccctagtagagaacttttcattgcctttacttggctaacgtgcattgtcaagtctaggaaatgcacctgtatgtttcattctccaaggcttctcaggacatcctggtggcagcacaagtatggactcctttcctgctaaacggtcttgtgtggaatggggattttcaactgtgttcctgctgagaccatgacattgactcataggtgctcttcacccttacttctgcctctagcccacatctgggctccccagagaccccttcacttctcctgatttccctctccggactgtcctgcatcctgatgctgggccatggtatttcccagtttggcaagagctacagcccaccagatgcttgcaggacaatatgaaactctggatcatggattctcctgacacagagagctcaccagagtcactggcttgttgcatagggtcagggatgccatggcagggacctggcatctgaccaagagcggacctatcccctgtcccggaccagcaactctttagcccagagactggagcagacacagaaggcatgcgagaagtgccgtgtgatgcgtggttaggtttctgttgaaaggcagaatctaggagagtgtgacacccccctggtcccagccaggcgaggctggtggctcaggggtacagtggagagctgaggaaggggtgtctgggtgaggaaggccttacctgcagagatgcccagggaactgagaaccccttcacataggcaactttcccactgggttcagggttctttccaccacaaattgagaacccaggaaaggctaggaattatatgtgagaaaagaaaaaatgagataaaacaagatttctgattgacaatgagaatatttattgagggtttattgagtgcagggagaagggcttgatgccttggggtgggaggagagacccctcccctgggatcctgcagctctagtctcccgtggtggggggtgagggttgagaacctatgaacattctgtaggggccactgtcttctccacggtgctcccttcatgcgtgacctggcagctgtagcttctgtgggacttccactgctcaggcgtcaggctcagatagctgctggccgcgtacttgttgttgctttgtttggagggtgtggtggtctccactcccgccttgacggggctgctatctgccttccaggccactgtcacggctcccgggtagaagtcacttatgagacacaccagtgtggccttgttggcttgaagctcctcagaggagggcgggaacagagtgaccgagggggcagccttgggctgacctgcggggtggatgaggggcagggggtcagagtcctggtgtccacctggggagcccctgacctcagtatatgatgaggtgttggggtgcccttgttcaggggctctgtgtctgaaggtctatgccaggcagaggggtcagggtgttttccactatgccctgatctgcacggggagctgttttaccttagacacctgaccacctgtcctgagatctctcggggccttggcccccaacaccgacatctgaccctcagcgccctgaccctgtcccctcctgccatcctgacagataaagagagctctgtgtctcccctgcacagcgaactctggggttacttttctggcctggctcctcagctctgtgggatactggggccttttggtccctcaggctgttccagccaaatgtgtgttctggagcccgtgtatggggcaagggcctggggggatcggagagcctgcctgctgtcctgggctctctcttattccgtggagtcttttctggcatccaccccacgtcccggctacctggtcatagcagtggggctttcacgcagtggactctgcccctctgatccccctgggcacaggggatatgttctgaagagacccaggagcccgcccttccgtcacatccactccttttgtgacccttcccctggctttctggtgtccagagtctgcttctcccttctccctcctgacggggtttcctgagtctcaggctggctcagggctcagtccctggcagcccccagacgcccagggcagcccctccacctcctacctcattctgggtctggatcctggctctgggtcccagctctgtgattcccgagcatcagccccgagggcactgggtccttctaaagtctcccaggaggtgcctccctcagaccccttgttcccaattccccaggagatggaacccaggtaacccaaggacaaagctgttccgacaagaacccagactgaggaggccagaacagaacaaggcttagagacccagcctgcgcctgtcagacagtcagagagacaaacagagagacagagagacaaacagagagacagacagacagacagacagacgaggctcagtaggtcattctatctagtcccctgcccctgtggtcagaggtgaagtggttgtagtgacctgctgaggcaagcaagggtctgaacagggagggcagaggtccttgctcaggcctgggatgcagggagaaaggctgaccacaagttgagacaagatacagaaacaaacaaaaacagcagaaattgtcccaagagcggggaaggagaggggagaagagactcacctaggacggtcagcttggtccctccgccgaataccacacactgtgacacaggctcatacaaaaaccctccctgggatgccccagccccagcccccactgcagctgtgaaggaggaagctggggccagtggccctggtggcatctgctcatgagggagtccacatggcccccacactcaacccacaaagagaaggggaccggtgacgtcctgtgactcacagcaggatccctggaaatccaggcttctggaggacactgggatcttgaatttgttttttgcaccaaccatcactcaggcccaggattgaatttcttagggagcatcagtatcgctaaggagtgaatttccacagatgggttaggtggtctcttctctgcaaagttgaaccaacccatggttcaacttttggtaacaccatggggtggtgcagagggtgcccctctcctcccatgcagaggctgattgccctagagtgcagtgttctgggaaccttggtgggtttcagccccaccttctggagtagttctagttggataggcctggtcagtgaggcctggctggtcccaatatgaagtgccagtcacatctgttagggtaaccttgggagcatccctgcaccccgaatctggcctcatgttgggtgggacagctggggtggtggctgccgttgtctttttcaaatgggggacataagggagcctccagaatgtggtctccaaataccacctctcactaagggaagggagatcagtgggggatcccaggcctggggcaggaaagacacataagacaaataagaaaggaacatgataagacagaacctcttatcctctgagtaatcaggagccatttaatcccctggggccatgtgaggaagtctaaagccacttagggagactccccctgggaaaatattcatcattggtggccacctgtcatcatcaattaaatataatgacagtggcttcaaaaacattagatggcttgaatcctagagttcaccatgagagaagacattaattattcaccctggaaggatggctgggccccggatcatctgtgtgcaaagtggctccttcctagagcatgaagcacactcctgggtgaacagagcccagctgcagacctctgaattcacagatgctctgcagcactcatgagaaggaggtgaactgaagcctcatccctctgccttccttcccttctgagggatgtagctattgaccatcctatgcagctaacattactacaagagtgagaatctgacatgggtgatctcgctgttagcagctccctgtccttggaagctattttgcaatgtctagtctgaatccagttaagtccctccatgctagaaccattttgcagggggaaaaaaaaagaagtagatgatagccctgggttcttgttttgggaggtgtggctgtattccaaccgtgggaaggtccccggacagctctcaactcctgcagctcctgccttgccaggcagcactagagcaattgaggaaatattcaccagtgacaactggcctgacagcacatgcgcccatcaccatttgatgccatattgaattctgaaataaaccacccaaaaccccaaaataaccacagcaccaacacttaactaagtcaatacgcttctggcatttgtgagggatttgaggagcccatgattatttcttgatattagggaattagtgataatttctatttaggtttggtaataatattgcagttacttttaagcccatatctttccagcatagaaatgggatatttacagctgaaaagatgtgatgtctggtattgtgtaatggaggggttattctgctatgggtgggtcagtaatgtctgtgaattgcttattgggggggctgggtgatgggaacttgggggcattattatttctctgtctccttatgtatgtgttcaaagttttccataatggaaacttataacacagtcaaagattaggcagctgctggggatggccttgtgcccagcaggactatggatctggcccttggtcatctcagttttcccctccatgaaatgggctcagacaggtgctgtggcaacagaaccctcaagcctccttctaatgagaggctgggatttggatcaggggtggctgtgatcaagctctaaggggctctttctttgcctcattgtgactgcagagattcctgtctttgcaggctctgtccctggcctgttgggatcacccagcagctctggtggaggcagctgctatgtctctgatgtgctggaggcagagacagggggtctgagagtacccaggcactgaggactctccaagacagctggggtctccacacccaggaggctgacatcatctgctgtcagagacactggaatgagtgtctctgagatgaggcagcaggtgtacatgggatggggtggggaggctgcgccaccatgagctacggagggagagggtgctctgcgggcaggagggtttgtgggatctgactcctagtggaggccaggacttgcctggagccatcagcccacattcactcagctcttattcagtctgacccagccctgaagctcatcctgaattcaactctgattagcctcccccaggcaatcaatagatgcagagtttgagcttggatttgtgacttttctcattttcccaatttccccacatcctcctgctcctgcagactgaccatcatcaagctccagccacaaaccaatcagaaattaactctacctgggcctgacttagtggtccacacccttcatgcttgacatccagccccacgctagtgttaactttgagcctgatccccaacccacagccatgtgatcatatacccgtaacatcatgtgcatcaacctcaccccatattccacaaactagttccaggaaacgctggtatctttcagagtgttttgggtcttctaaaggtgaagaaggagatcaacatgcttttggatatgctgtggctcatcatattaaactggttccctagtgcaggacttgtcagtatgtttacttagccaatgtccattgtacaagtcttagaaagacacttgcatgtttcctttcccaatgtttttacaagttcccagtggcagcacagttatttatccctcacccagtaaacactctcctgactggttcctcgtatgcaatggggaatttcaccttctgttcctgctgagaccgtggccttgagtcaagggtgtcctttttccattatttctgcctctagccctcatctggtctccggggacccccttcatttctcctgaatctccccacagggcgccagcaaacctctcactgggcccctgtcccttcccaggtgggcaaggactgcaggacaattttgtgccttggattgcagttcccactggcacagggagctcacccggttccctggcaggttgggtggggtgtgggatgacggagacatgggatctcacctggaactgccccctgtccctgagcagtgacccttcagcccagacacatgaccagacagagactgcacattagaaatgctgcgttttacatgatcaggtatttattgagaagtaaaatttaggagggtgtgggactggtctgaactgatgccagactggtagctcaggggtacagtggagagttggagaaggggtgactgggagaggaaggaccctctggggagatgactcagggaggctgtgagcctcctcccttgggtgattttcacactgggtgcagaattccctgtaccccacactgagaaccccggggaggctagcaatttatgtgagaaaaaaaatgagataaaacaagatttctggttgtcaatgaggatatttattggggtttcatgagtgcagggagaagggctggatgacttgggatggggagagagacccctcccctgggatcctgcagctccaggctcccgtgggtggggttagagttgggaacctatgaacattctgtaggggccactgtcttctccacggtgctcccttcatgcgtgacctggcagctgtagcttctgtgggacttccactgctcgggcgtcaggctcaggtagctgctggccgcgtacttgttgttgctctgtttggagggtttggtggtctccactcccgccttgacggggctgccatctgccttccaggccactgtcacagctcccgggtagaagtcactgatcagacacactagtgtggccttgttggcttggagctcctcagaggagggcgggaacagagtgacagtggggttggccttgggctgacctaggacggtgaccttggtcccagttccgaagacataccgaccattcaggctgtcatcccatgctgcacagtaataatcagcctcgtcctcggaccggagcccactgatggccagggaggccgtgttgccagacttggagccagagaagcgattagaaacccctgagggccgattagtgacatcataaatcatgagtttgggggctttgcctgggtgttgttggtaccaggagacatagttataaccaccaacgtcactactgcttccagtgcaggagatggtgatcgactgtccaggagacccagacacggaggcaggctgagtcagggcagactgggcccaggaccctgtgccctgagtgaggagggtgaggaatagcagagcccaggccat

SEQ ID NO: 15799 - DNA, 2588 bp, Homo sapiens
taaaacctttatttaccccaattcatccatgtattctgatacgttcagtgaaaaagccaggatcattggggctgttctctctatcaaaggaaagagctccgatcacctacattataattttctgtgcttattttctgcaggggaggaaatacacatctattcaacgccacactggacgttacaaaatgcatgcatattctgccccagtgctatctgttcattaccgttttgtctccttaaagaactatctaacatagtgtttcccaaaatgttctccacaggacattagtgagaggttcataagtatcccaaaggagaaaaaggtcctggtgtcaaaatagtttgggcaatgctgggttagacagtttttcactaccggatgccaagcccttactgcgctaaagtgcattgtaagtttccaggtgcaaacttggtttcccagcaacaccatttctataaaacactgatgaacatctcacagagcactcatattacatggagtgctatgggaaatgcttttccccatccaggttactggcaattccacaatttgggcttacattcattgtaatcccagaaatattttctccatttaccctcatgactttgtgaaatttaacagattccagaaggaagactcgaagccgtctcagttaacagttctacacatttcccactagtttttgcctttgtttttcatgcattttcagagtgcacaacttccctcctctcttctgaatcacttaggacattctcattttcaaaaacagactgcagtttcatgttgtttaatattgttttttttttttaacttgaccacagtcttcccctgaagaagggcatgcatttcatgttacagaaatgcgatagagtaaactgtaataaattatttacaagcacctagtttgtttaaccttatgtggaagccatcactgttggaaaacaatgagaatgtatcttttagcaaaacggtgctatctggaagcttcattgtgaagatgctttcgtttttttgttttttgttttcagtcatgaggcactgaagaatgagttgtgctgaaattaactcaaaggtcagcttgtctggatgagcataactttggttgagatttttctcccttaaaaaagattttcaaagcaccagttaattacaaaaagcatgcatatttatcctcacagtgagttaagtggtgagagagctagcaaatcatacattgcattccccaaagcatctgaacgtacttctagaaaacaaaccaaccaaaagggaaaataatgcaagagaagccgtattttctttgcttaggttggcaaagcagcagctctttgcagcaatgacaggcagggcagagtgtcgactgggaagcgagtcccaatcttgaataatggtgagcttgagtaatccttaatttacaatttaaaggatgaaaaaaagagactagtgaaatgtttgcttccccagataaggaacacccaagactccctggggtatcctccaaatgtagccaagaaaagtgttcttctaccctagtcagtaaaatggaatgctaaaacatgatatctcattcaacatcagagctactacaactgacaatgacttcatggtatacatcaattcctataaagaaaaaatatattttaaatgcagaacttgagagggatcacaacagcatagcattattgctatgagtttcaaacatggtatttcatacaatgtgaaatatcaatcagcatccctccctctcccaaaacacacattactcatgagatactatcagtgtttaaaatccaagcttatggaagtacaaacttaattctcagtacttttatactaaattcaaagaatctatgtaacactcatctggaaaaattcttaattccataatatcttggagataagcaacagtaaactgttagaaaacgttttaacattacatgatatttaaaaaatcaccataattaccataataaaccaataattatgctccctgctcacaaaaggcacctaccaattatgaacagaccatttttcataattatttaccactatgtggcataagggtttaggccatataaccccataaaaaatttgttaaaagtcatggtttttcctcaaagctaaaaatccataaatgcctctaaccattaccagtcagtaggcccaccacatgcatatactggacaggttgtgccacggccacaactcgagtgggtacccagtcacctggactggggtgcagtacacaatctgtgtgcagtacagaaagccctcatcagctgtggccagagaactgtattctaacagtctgtcagctcaagctaatcaagttaggaaaactgctatttggttggaggatttccaagaaacagctgtacctgtgagaggcaggtattacctgaggggtggacgaggtacagacataaaacaggaagggttctaaatatatttgctggtcatttgaaactcaatggcacttgtttatatgagcaaaagccttcaacaccagttttctggccaagtttccctagaattttgccagccaaattaacttcctgatgttaactatttgattacaatatctcagttc

SEQ ID NO: 15800 - DNA, 2600 bp, Homo sapiens
  misc_feature (1)...(2600): n = a,t,c or g
ggatgggaagcgagcatggtgagtcctcaagtcgcagctgggcctgccacgtgggagtggagggtggaggaacgtgtggagtttcggagtccagcccagtgcgagacagccttgaaaccgtggttggcgggcgctccactccgctctgggctcgaaccctgcctgaccctagctgtgccccccactttctccctgtctggcccctgctccccgccccctcacttagaggagggcacggggaagggcaaacggtccagagggcgggcggctgcgggctcctctgcatcatgtgaggagggcgtggggaaggacatcctggtggggcccgatctgggctgcctccagcccgggcctgtgtcttggacttagtcgtggacctggaggccagtgcccggctggccctgtcaccctctcgctgtgacgccagcgcctgctgactggaggacccaggttccttcgcctgctttttctcaggctgccctgaggatctgtgtttggtgaaaaggagccaaattcacctgcagggcaggcggctctagcagcttcagaagcctggtgccctggcgacactggacctgccttggcttctttgatcccaaccccacccccgatttctgctctgctgactggggaagtcatcgtgccacccagaacctgagtgcgggcctctcagagctccttcgtccgtgggtctgccggggactgggccttgtctccctggcgagtgccaggtgaggctgcggcggctccgacgcaggtggagctgctgacctggcccctttctgcggctgcgagggactttgaacatgtcggggatcgccctcagcagactcgcccaggagaggaaagcatggaggaaagaccacccatttggtttcgtggctgtcccaacaaaaaatcccgatggcacgatgaacctcatgaactgggagtgcgccattccaggaaagaaagggactccgtgggaaggaggcttgtttaaactacggatgcttttcaaagatgagtatccatcttcgccaccaaaatgtaaattcggaaccaccattatttcaccccgaattgtgtacccttcgggggacaggtgtgcctgtccatctttagaggaggacaaggactggaggccagccatcacaatcaaacagatcctattaggaatacaggaacttctaaatgaaccaaatatccaagacccagctcaagcagaggcctacacgatttactgccaaaacagagtggagtacgagaaaagggtccgagcacaagccaagaagtttgcgccctcataagcagcgaccttgtggcatcgtcagaaggaagggattggtttggcaagaacttgtttacaacatttttgcaaatctaaagttgctccatacaatgactagtcacctgggggggttgggcgggcgccatcttccattgcccgccgcgggtgtgcggtctcgattcgctgaattgcccgtttccatacagggtctcttccttcggtcttttgtatttttgattgttatgtaaaactcgcttttattttaatattgatgtcagtatttcaactgctgtaaaattataaacttttatacttgggtaagtcccccaggggcgagttcctcgctctgggatgcaggcatgcttctcacccgtgcagagctgcacttggcctcagctggctgtatggaaatgcaccctccctcctgccgctcctctctagaaccttctagaacctgggctgtgctgcttttgagcctcagaccccaggtcagcatctcggttctgcgccacttcctttgtgtttatatggcgttttgtctgtgttgctgtttagagtaaataaactgtttatataaaggttttggttgcattattatcattgaaagtgagaggaggcggcctcccagtgcccggccctccccacccacctgcagccccaccgcgggccaggaccaggctctccatctgcttcggatgcacgcaggctgtgaggctctgtcttgccctggatctttgtaaacagggctgtgtacaaagtgctgctgaggtttctgtgctccccgcatcttcgggctgtagagcgctgggcagctaagatctgcataggtcgggattggcatcgagaccctggcaactgcaccggtgccagctgtcttgggggccacaaggccaggtccagaccagggctgggggctgcctgaggactcctatccgggcagcctgctggcgggggttcccctcttcagtggccaggtcacagggatggagctgcgctgtgcatagggtgccacctcaggtgtctgtcccttgtgtcctcaggaggcagccttgctaccacccgtggcaaacgccaggtgctttttctgggagagcccacagccgttgccctccagggtttccccgacccttagcgccaggtagagggccctgggcagcctgtgtctggaagaattcgtcctgaggccacctgagtgtggtctgtcctgggggaggctgtgcgcctcagcagccgtcctgacgctgagccctctgcaaaggttgggccggccagttctttnggggttgcctgaagccactgcaggaagtngcctggcttgggaagtttgggt

SEQ ID NO: 15801 - DNA, 535 bp, Homo sapiens
ttttttttttttttttttcaaggaattacaaagctacttttaatactttggggtgagccccacaggaataaaaaacactgggaaggggtaaccccctcacccccgggagtggcccagggggagagaggctacctgaggggaaggaagcacaaaagggacccgcttgcagactcagggcaaagggaatgccatcggtgctgggacctgtgagcactacaggaggaaacgcgagcgtggtgggactggctccaggcacacaggcgaagggcaagagggttggacacgaagccacaaagctacttgggttcctccttcttctcgtttgcctttttctgcttctgctgcatgatctccgagtccctctgcttgcgggcggcagcagaaagcccgtcatctcggcgctttcccttaaccgagtcgctctgctttttcatattcttctggcgggcgagctcacgctggttaccgcgggtcatggcgacggcagcggctccaacctgcctccgttacgtcccctcgttctgtcggacgttgc

SEQ ID NO: 15802 - DNA, 2049 bp, Homo sapiens
tgcgtgtgtgtgccgtgcgtttgtgtgctgtgtgtgcatgtgtgtgcgtgtgtgtgctgtgcgtttgtgtgtgtgctgtgtgctcatctgtgtgctgtgtgtgctgtgcgtttgtgtgtgtgctgtatgctcgtgtgtgtgctgtgctcgtgtgtgtgctgtgttcatgcgtgtgctgtgtgttgtgtgtgtgtagctgcggggatgcataaagtatgagtgctttttaggatgggaattgagatgtaagatttgggggtgagggtcgtgccaattacatttcatttgcatggattttggttttcatgctctgtcctcccctcctatggtcttactgggtccctctgactgctctgtgatttttagtgatggaaaagggagtgaggagcccagtctgggttgttgctattttcggatggccagtttaccctgaaaattcccgtgagaagggagatggcggtagcagcgacgtgcccacctgtgatttctggggcccttcttttctctttgctggttcagggactcaagtcccaggccaatttgactcaaagtccaagggagaagagaaagaggggggtggggagtgccaaattcctttattttgccaattgtttctcagccaattcgtttttaatactttttttttttagccaattgattttttttggtggttgttttttttaaagccaatttctgagcttttgtggggtgtttctaaaaagccaattagttttaagagggttgttgtgggggggggaagggggttagtttaatgttttgattttttatgtgtggggataattggggataatttggggaggagacaagatggagagccacgactaggcacggaggtcagacaggcagcccgggccaggatggttagtggcccaggggagagctgcaaacctggggacgcaaggggctggtcggcaagtgcccccgggaacacccactccggcgaggcagaatataacactgggtgggtgggtgtcctgacgaatgggcaggtaatttggggtgcctcgaagcgttttggatctcaggccaatgtgggttccacaattgtgacaatttggctctttgggcttctgtccaatgttccgaatggcccactcacagggcgcttgccgagggaccctctgcgactgaggcggactggcatggacgacccccggggtcatgccagccccgtcaccaggacccagaagcctcaggcctctagactgctagtcgggctgcgtgcaggggggctgagctgggggcacaagtgggggcgaggtaaacctcccagaggccgagtccctgccgcagccctaggcgccgcggtggtggctgctatggcatcaccagacccgtgggctccggggcccaagcaacctggtcgatgggcagacctggcagctctcctgctctgtgggctcagacccgcctgacctccctactccccggcctcaccccaccttgcccccaagaggtcccacagagcttcggacctcctggagacaaggcagggtgctgaggggcgggcaagatgtcaccgagggagaggggagggttcctcaagtgtgcggaaggcggccaccctgccccagcctgatggaaccctctgtttacacacctgctagccccttcccctccggccagcctcaggccagccaggagccccctcctgtggcctccgagcaccctcctgacacctgaggagaccctgcccaacccccccctccgccctcaggacttctggggaccagccactgtccccagaagccaggccggacagtggccttctccactcccctctgacttctccaagggggctcagtggccagtgccccccaggaggctccaccctcaactcaacccaagcaacagggacagatgaaaaacaaaatccaatcagggcgataaatggcggggggcaggacgtggtggtctccaggctggcttcgtgcgttcttgcttttgtcactgcccccctgttacatggggggggggtttaatttggtttctgagcgcataaagctaaggaggggtaaaaaaaaaaac

SEQ ID NO: 15803 - DNA, 618 bp, Homo sapiens
gatagttccctgcagtcctgccccagcgccacctgggttttggttccaaagcattaccaatcattaccaccctccactacctgggtggaatatttctttgctgctttaaagtcattaaaacatcttgagaatgagaccaagaatttaggagcctgtgctgtgataaaaatgagcaggtccccttgctctagaagtggcagcatatcttctgcaccaagaggagggtaattgaagaatgcctcagagcctcccaccttccccggagcatcccctcccttcctgagtctgcagtaaacccctgcctttaaattccctctagataacagtcatcattggaaacaaccaagaaatgcattttatctgaatttgccacttaaaattctgccatttaccataaatcgctttggaaggcatgggctactttcaagggtgcgatgatgacctacagtcaatgacttagaggttgtggagcagctcgtgcgacctctccttcaaatgggctttagggaaagttaaatgggagtgacccagacaatggtcactcaaaagactcacataaatgagtctcctgctcttcatcaagcaattaagaccagttccccttctagtggaaataag

SEQ ID NO: 15804 - DNA, 4154 bp, Homo sapiens
tacaaccggacgcccagcggcagcaggatgagtgcggaggcaagcgcccggcctctgcgggtgggctcccgtgtagaggtgattggaaaaggccaccgaggcactgtggcctatgttggagccacactgtttgccactggcaaatgggtaggcgtgattctggatgaagcaaagggcaaaaatgatggaactgttcaaggcaggaagtacttcacttgtgatgaagggcatggcatctttgtgcgccagtcccagatccaggtatttgaagatggagcagatactacttccccagagacacctgattcttctgcttcaaaagtcctcaaaagagagggaactgatacaactgcaaagactagcaaactggcaccgacagcccgaaagaccacaactcggcgacccaagcccacgcgcccagccagtactggggtggctggggccagtagctccctgggcccctctggctcagcgtcagcaggtgagctgagcagcagtgagcccagcaccccggctcagactccgctggcagcacccatcatccccacgccggtcctcacctctcctggagcagtccccccgcttccttccccatccaaggaggaggagggactaagggctcaggtgcgggacctggaggagaaactagagaccctgagactgaaacgggcagaagacaaagcaaagctaaaagagctggagaaacacaaaatccagctggagcaggtgcaggaatggaagagcaaaatgcaggagcagcaggccgacctgcagcggcgcctcaaggaggcgagaaaggaagccaaggaggcgctggaggcaaaggaacgctatatggaggagatggctgatactgctgatgccattgagatggccactttggacaaggagatggctgaagagcgggctgagtccctgcagcaggaggtggaggcactgaaggagcgggtggacgagctcactactgacttagagatcctcaaggctgagattgaagagaagggctcagatggcgctgcatccagttatcagctcaagcagcttgaggagcagaatgcccgcctgaaggatgccctggtgaggatgcgggatctttcttcctcagagaagcaggagcatgtgaagctccagaagctcatggaaaagaagaaccaagagctggaagttgtgaggcaacagcgggagcgtctgcaggaggagctaagccaggcagagagcaccattgatgagctcaaggagcaggtggatgctgctctgggtgctgaggagatggtggagatgctgacagatcggaacctgaatctggaagagaaagtgcgcgagttgagggagactgtgggagacttggaagcgatgaatgagatgaacgatgagctgcaggagaatgcacgtgagacagaactggagctgcgggagcagctggacatggcaggcgcgcgggttcgtgaggcccagaagcgtgtggaggcagcccaggagacggttgcagactaccagcagaccatcaagaagtaccgccagctgaccgcccatctacaggatgtgaatcgggaactgacaaaccagcaggaagcatctgtggagaggcaacagcagccacctccagagacctttgacttcaaaatcaagtttgctgagactaaggcccatgccaaggcaattgagatggaattgaggcagatggaggtggcccaggccaatcgacacatgtccctgctgacagccttcatgcctgacagcttccttcggccaggtggggaccatgactgcgttctggtgctgttgctcatgcctcgtctcatttgcaaggcagagctgatccggaagcaggcccaggagaagtttgaactaagtgagaactgttcagagcggcctgggctgcgaggagctgctggggagcaactcagctttgctgctggactggtgtactcgctgagcctgctgcaggccacgctacaccgctatgagcatgccctctctcagtgcagtgtggatgtgtataagaaagtgggcagcctgtaccctgagatgagtgcccatgagcgctccttggatttcctcattgaactgctgcacaaggatcagctggatgagactgtcaatgtggagcctctcaccaaggccatcaagtactatcagcatctgtacagcatccaccttgccgaacagcctgaggactgtactatgcagctggctgaccacattaagttcacgcagagtgctctggactgcatgagtgtggaggtaggacggctgcgtgccttcttgcagggtgggcaggaggctacagatattgccctcctgctccgggatctggaaacttcatgcagtgcacatccgccagttctgcaagaagatccgaaggcgaatgccagggacagatgctcctgggatcccagctgcactggcctttggaccacaggtatctgacacgctcctagactgcaggaaacacttgacgtgggtcgtggctgtgctgcaggaggtggcagctgctgctgcccagctcattgccccactggcagagaatgaggggctacttgtggctgctctggaggaactggctttcaaagcaagcgagcagatctatgggaccccctccagcagcccctatgagtgtctgcgccagtcatgcaacatcctcatcagtaccatgaacaagctggccacagccatgcaggagggggagtatgatgcagagcggccccccagcaagcctccaccggttgaactgcgggctgctgcccttcgtgcagagatcacagatgctgaaggcctgggtttgaagctcgaagatcgagagacagttattaaggagttgaagaagtcactcaagattaagggagaggagctaagtgaggccaatgtgcggctgagcctcctggagaagaagttggacagtgctgccaaggatgcagatgagcgcatcgagaaagtccagactcggctggaggagacccaggcactgctgcgaaagaaggagaaagagtttgaggagacaatggatgcactccaggctgacatcgaccagctggaggcagagaaggcagaactaaagcagcgtctgaacagccagtccaaacgcacgattgagggactccggggccctcctccttcaggcattgctactctggtctctggcattgctggtgaagaacagcagcgaggagccatccctgggcaggctccagggtctgtgccaggcccagggctggtgaaggactcaccactgctgcttcagcagatctctgccatgaggctgcacatctcccagctccagcatgagaacagcatcctcaagggagcccagatgaaggcatccttggcatccctgccccctctgcatgttgcaaagctatcccatgagggccctggcagtgagttaccagctggagcgctgtatcgtaagaccagccagctgctggagacattgaatcaattgagcacacacacgcacgtagtagacatcactcgcaccagccctgctgccaagagcccgtcggcccaacttatggagcaagtggctcagcttaagtccctgagtgacaccgtcgagaagctcaaggatgaggtcctcaaggagacagtatctcagcgccctggagccacagtacccactgactttgccaccttcccttcatcagccttcctcagggccaaggaggagcagcaggatgacacagtctacatgggcaaagtgaccttctcatgtgcggctggttttggacagcgacaccggctggtgctgacccaggagcagctgcaccagcttcacagtcgcctcatctcctaagcactcctttcccctgctgtccccttcgaccctcagccctctggtgccgctctgcccgatgcacagccacctcagccagcccccaggtagaaacgtgggttaagctcttcctgccccgttcagcttcactcccaccctttcagcgtcctgccccttcaccttgacccgggttcccccactcccattccctggcctctgccataatttgttgttcaactgctccctccttcctgaggggcctcagggcttgtggggggtaggctgagaccccaccaccaaaggttaagtgaggtccccttgattgaggacttcaccccttgattaaagcaacttctgcttcagtgaaaaaaaaaaaggatcg

SEQ ID NO: 15805 - DNA, 533 bp, Homo sapiens
  misc_feature (1)...(533): n = a,t,c or g
cccnttnnnnnnnnnnnntttggnnnnnnnnnnnnnnnnnnnnnnnnnnnnnnnnnnnnnnnnnnnnnnnnnnnnnnnnnnnnnnnnnnnnnnnnnggcacgagannnnnnnnnnnnnnnnnnnnnnnnnnnnnnnnnccggnnnnnnnnnnnnnnnnnnnnnnnnnnnnnnnnnnnnnnnnnnnnnnnnnnnnnnnnnnnnnnnnngacctgatcccagggatgtttgaggctgcagtgannnnnnnnnnnnnnnnnnnnnnnnnnnnnnnnnnnnntttcagttttaaaacagcttctattacattttctttgtggaagctgtatttctaccttagtactcactttctgcttggtctgaaagatacctctagtagtggcaacattgtgttaagtagagttcattgggtctcttgtaaccctacccctacataatggaccactggtgcaggcttacataaacacacatactgtggcacttcagctgaagacaagggacaaactaagatagtctgaaaggtaaaaaaacaaac

SEQ ID NO: 15806 - DNA, 1848 bp, Homo sapiens
  misc_feature (1)...(1848): n = a,t,c or g
ttttaaataaaaatacatacattttattacctattacagtatttactcttctacacacttctcagttcatgtatatacgggaggtttcttacatcctgcatggatgcctgaggttccaccactaaggagtcttgtccctaagtgaagaagtcattaaagctgtttatgtaaagcctgtgtcttggagacagggtgttatctctttatcagtcacatgcattgggtatgaaatggccgattggattggctggcgtgcctgtcactccacactgccctgggaccagacagctttggtgaccgagctggagaggggctccagagctggactgaccctgagaaggctccacctcagagcagcacagggaggagatgaggccccactggtttccctggggccaggcctcatgtcaaattgcagaaacagcctgaggacagagccatggagagctgaggagagggcaggcttgtccattccaacttccatctctgcctctgacccacatctgtggaatcagggcggtgaaccagaagcctctggagtttctcagtgctctgatcccgtgaattcctcctctgtccccgcgatttcacaatgaatggatgcttcccattctcaccaagtgcctgttgaaactttccctcaagcctgaacagctttccttctgttactttcaaatgaatgacaggctcccaggaggaaagtttaggtaaacctctcttcaagtgctgcgtcccaaaagtcccaaagaactgtctacctatgaggcgctctcaggacctgggacgtgtgatcacggtatccggggagcagccagcgctgcgccctggggaggaggaggcgccgggttactggctccgggctgcatcccctcgtctgggtctgtgctgttcctgcacttcataacataattttcctcttattccttaaggctcaacaagtcttctactgctctcagtcactttatcctgggagtcagatgtttgcctggttttttagtgcatgtgaatacctacccaaaattgctctgtgattttcaaaatgctaaattccgtagattctttgagaccagtgactttcactctttcaatccatttccattgggttgaaaggatattgagggggacatgcagcctggaagagccggaagctgacctgccttgccgctctgctttgccgctctgccgctctgccttgatggactcctatggacacaagcaatgccacacagcaccaacacttggacagggacacactgtgattggtgggggcgggggcaaggcaaatcaatacccctctgtaatctggtatgatcacaaggtgaagtcccacaataggtctgcaagccaggaagccaggaagccagtctgagtcccaaaacctcaaaaggagggaagccaatattgtagccttcagtctgtggccaaaggcccgagagcccctggcaaaccactggtgtaagtccaannnnnnnnnnnnnnnnnnnnnnnnnnnnnnnnnnnnnnnnnnnnaagcatccagcatgggagaatgatgaaggtcagaagactcagcaagtctagtctttccacattcctctgcctgctttattctagccgctctggcagctgattagatggtgcccacccagattgagggtgggtcagcctctcccagcccactgactcaaatgggaactcctctggcaacacctcacagacacacctaggaacaatactgtgaatccttcaatcaagttgacacttaatattaaacatcacaccagggccaaaccttgggagtcctgcctgacttctcacacccacatttgatccatcagcaagtcctacaggctctactgtcaagagcat

SEQ ID NO: 15807 - DNA, 461 bp, Homo sapiens
  misc_feature (1)...(461): n = a,t,c or g
tttgannncntttgannnnnnnnnnnnnnnnnnnnnnnnnnnnnnnnnnnnnnnnnnnnnnnnnnnnnnnnnnnnnnnnnnnnnnnnggcacgagaaagattttcttttattgggcccttagggtgatgagatgccctctgaatttgtagtgaagaggggttgtagcttggtcacaaggctgctgggtctccattaggtttcatcttcagttggcttgttacaggggcttgggtagttgtaatttccattttatttttggacagactgcatatccttcgggactttgctctgtagggcagacactagggcatgtttttgcagtcaggtctgcagatgctgggccttaaatcaggatgtggatgagtgtggctttcagtgagtaccagagagcatttcctcaggtaactgtgtgggtttctatataggcaggactgaccatgaactgtggctcgtgtaacgg

SEQ ID NO: 15808 - DNA, 327 bp, Homo sapiens
  misc_feature (1)...(327): n = a,t,c or g
ttgannccntttgaanaccgttnnnnnnnnnnnnnnnnnnnnnnnnnnnnnnnnnnnnnnnnnnnnnnnnnnnnnnnnnnnnnnnggcacgagcggcacgagcgaggagtcctgggggctatacgtccagcttctgttcccaatcagtgaggcctaagtactcttgggggtcaggggaagggagtaatcataacagcagctaatattggcatgctaatgcgtgcttaaggcccggtgcattacctcactgaatccttctcgtggttctcacaaggtacctattagacaggctagactgagctagtttttttaaattgttgcagatct

SEQ ID NO: 15809 - DNA, 1386 bp, Homo sapiens
tttttttttaatgtacgtattttaactatattcactgctacaacaggaccagtaacaactatatttatttaagaaaaaaaagactgccatgcgttatcagaattacttaatacagaaaacagtaaaatacacttttttctttgtcttttttttttttttttttacaaacaagactagcttatggcaaattctctatagctaagggtcaatttaaaatccttggcttatatctccccctcgctcaatgactacatgatgcaaactaattttattaacaccttaagcaaaacatactggaatttcacaaaatgtacaagatttcaatatttaagggactggggttagaaagcagaagtggctttcaggtcttccagtctttctctcaagtaataaagctctgctgtggaatattcaaagctattgggaaattaccggtagatttttctgtttttcttttttcggttttccactatgttgtttctctagatatgtaagcttactctattaaccaaaatctcagcttgaccattcttgataagtacctaatcgacatgtaactttttttctgccttaaatatgtataacaggacagagcccttaaatctgattcaattattaattcctgatttacaagtgctatggtgagctaacagaacttatcaatgcctttattgcactttactagccaaatttagaaggttggaattagtctctcctatctagtattctgtcagtttgcccagcttgtacttttaattttgcttctaatggtaatctgccctatcccttgaaataaaataatctacattttgggagggctaattcttcattgtgccaggctgtcccatgcactgcaggggtgagtgtctttaggcttaaatgccaacagaagcccctagtaaatatgacaaccaaaaaagtgcccctacacatttctcagcatcctctggaatgacaggttactgcctctagttgaaagccactggcacaactttggtttttaagctcttatgccatttattttaattgcccagacatcaattccacctaaattcttagtcatagcctggttccttgaatttgctggattagtaaccacagattaaggtgtttcaatagttaagacaggactttggaacaagagtttttaaattgtataatacttgagaggatctatgaatataaattgggtcctgtttataattagttttacataatgaactttaagattgccttttcatggtgaacagaagtttggaaattactgttttggcacaaagcagattatcttagtagaaatacagaattactgcaatctgtgaataagactgcttttaaatatttctacttgtgtgctatcttacatatagaatgtgtacgacagtt

SEQ ID NO: 15810 - DNA, 384 bp, Homo sapiens
cagttgagtaaaatgtgtaatatttattccccattaataactgactaggaaggactaaaagccagaaaggggatgaaaaaaaaatccttaattcagggccgacattatctacttaaacaactttgagatatggtcttaattattttaaagcagaataatataattgaaagtttatagctaaaagagactatataggtcatttagtataattcttcattagtttacgaaccacaaaattgcaaataaataagctatgaactttgatgtacactataaatctccttaattctataaatttgtgtctgtaacctgaatagtttgaaaacttctttaaaaatctcttgtatttcatccgggcgcgtggctcacacctgtaatcccagc

SEQ ID NO: 15811 - DNA, 467 bp, Homo sapiens
  misc_feature (1)...(467): n = a,t,c or g
tttgaacacctttganaaccgtnnnnnnnnnnnnnnnnnnnnnnnnnnnnnnnnnnnnnnnnnnnnnnnnnnnnnnnnnnnnnnnnnggcacgagctggtaaaggattaacttaacaaactggctttccaagaaaataaagccttgattggtagcacttgcaatttctatggtacaaacgcttcccgcatgactgagttcaagctgtcaaggagacatcactatacatggacttgggaagagatgagaacaatcagcccactgagcctatgggaactggctccagcacatccctgcaagtcaactctcatcagggtgagtgagttgaggaccaagaagcagttatcctcttgcctttgcaggacccaggcaaagggaagggcatagtgacagtgatgatctctcttccggaagtctttggtttgctgagagtaaaaggcgtgggcttcaccagtggtgaagccagtc

SEQ ID NO: 15812 - DNA, 822 bp, Homo sapiens
atcagcccgactatgacagcgtggcatcagacgaagacacagatttggaaaccactgcaagcaaaacaaaccggcagaagagcctagattcagatttatcagatggaccagtcactgtacaggaatttatggaggtcaaaaacgctctagtggcttctgaggccaagatacagcagctaatgaaggtgaataacaacttgagtgacgagctgagaattatgcagaaaaagcttcaaacactccagagtgaaaattcgaacctcaggaaacaggccacagccaatgtatatcaggtgcaaactggttctgagtacacagacacttccaaccactcttccttaaagagacgtccgtctgcccggggcagtaggcccatgtccatgtacgagaccggatcaggtcagaaaccatatctcccaatgggagaagcgagccgccccgaagagagcaggatgagactccagcccttccccgcgcacatcgggaggagtgcacttgtgacctcctcttcatctctgccttccttcccctccacactttcctggtcgagggacgaaagcgcccgaagggcatccaggctggagaagcagaacagcacacctgagagtgactacgacaacactcccaacgacatggagccagatggcatggggtcaagccgaaaggggacggcaaagaagtatggtgtggccaggggatggcttggtaccagacacagcagaaccccatgtggccccaagccccactctccctagcaccgaagatgtcatcaggaagactgaacagatcaccaaaaacatacaggagtcttaagagcagccc

SEQ ID NO: 15813 - DNA, 2089 bp, Homo sapiens
  misc_feature (1)...(2089): n = a,t,c or g
ctgaaacccttnnnnnnnnnnnnnnnnnnnnnnnnnnnnnnnnnnnnnnnnnnnnnnnnnnnnnnnnnnnnnnnggcacgagcttcacactcaaggccacggtcctaaactaccttcccaaatgcatccgggtcagtgtgcagctggaagcctctcccgccttcctagctgtcccagtggagaaggaacaagcgcctcactgcatctgtgcaaacgggcggcaaactgtgtcctgggcagtaaccccaaagtcattaggaaatgtgaatttcactgtgagcgcagaggcactagagtctcaagagctgtgtgggactgaggtgccttcagttcctgaacacggaaggaaagacacagtcatcaagcctctgttggttgaacctgaaggactagagaaggaaacaacattcaactccctactttgtccatcaggtggtgaggtttctgaagaattatccctgaaactgccaccaaatgtggtagaagaatctgcccgagcttctgtctcagttttgggagacatattaggctctgccatgcaaaacacacaaaatcttctccagatgccctatggctgtggagagcagaatatggtcctctttgctcctaacatctatgtactggattatctaaatgaaacacagcagcttactccagagatcaagtccaaggccattggctatctcaacactggttaccagagacagttgaactacaaacactatgatggctcctacagcacctttggggagcgatatggcaggaaccagggcaacacctggctcacagcctttgttctgaagacttttgcccaagctcgagcctacatcttcatcgatgaagcacacattacccaagccctcatatggctctcccagaggcagaaggacaatggctgtttcaggagctctgggtcactgctcaacaatgccataaagggaggagtagaagatgaagtgaccctctccgcctatatcaccatcgcccttctggacctggagtcagcctggaagacagcacaagaaggggaccatggcagccatgtatataccaaagcactgctggcctatgcttttgccctggcaggtaaccaggacaagaggaaggaagtactcaagtcacttaatgaggaagctgtgaagaaagacaactctgtccattgggagcgccctcagaaacccaaggcaccagtggggcatttttacgaaccccaggctccctctgctgaggtggagatgacatcctatgtgctcctcgcttatctcacggcccagccagccccaacctcggaggacctgacctctgcaaccaacatcgtgaagtggatcacgaagcagcagaatgcccagggcggtttctcctccacccaggacacagtggtggctctccatgctctgtccaaatatggagcagccacatttaccaggactgggaaggctgcacaggtgactatccagtcttcagggacattttccagcaaattccaagtggacaacaacaaccgcctgttactgcagcaggtctcattgccagagctgcctggggaatacagcatgaaagtgacaggagaaggatgtgtctacctccagacatccttgaaatacaatattctcccagaaaaggaagagttcccctttgctttaggagtgcagactctgcctcaaacttgtgatgaacccaaagcccacaccagcttccaaatctccctaagtgtcagttacacagggagccgctctgcctccaacatggcgatcgttgatgtgaagatggtctctggcttcattcccctgaagccaacagtgaaaatgcttgaaagatctaaccatgtgagccggacagaagtcagcagcaaccatgtcttgatttaccttgataaggtgtcaaatcagacactgagcttgttcttcacggttctgcaagatgtcccagtaagagatctgaaaccagccatagtgaaagtctatgattactacgagacggatgagtttgcaattgctgagtacaatgctccttgcagcaaagatcttggaaatgcttgaagaccacaaggctgaaaagtgctttgctggaatcctgttctcagagctcg

SEQ ID NO: 15814 - DNA, 2372 bp, Homo sapiens
atggatttcttccggcgcattgataaggaccaggatgggaagataacacgtcaggagtttatcgatggcattttagcatccaagttccccaccaccaagttagagatgactgctgtggctgacattttcgaccgagatggggatggttacattgattattatgaatttgtggctgctcttcacccaaataaagatgcatataaacctatcacagatgccgacaaaatcgaagatgaggtgacaaggcaggtagctaagtgtaaatgtgcaaagcgatttcaagttgagcagattggtgataataaatacaggttcttcctgggaaatcagtttggggattctcagcagttgccgactggtccggatcctgcggagtactgtgatggttcgcgttggtggaggatggatggccttggatgaatttttagtgaaaaatgatccctgccgagcacgaggtagaactaacattgaacttagagagaaattcatcctaccagagggagcatcccagggaatgacccccttccgctcacggggtcgaaggtccaaaccatcttcccgggcagcttcccctactcgttccagctccagtgctagtcagagtaaccacagctgtacatccatgccatcttctccagccaccccagccagtgggaaccaaggttatcccatcatcaggtagcaagttgaaacgaccaacaccaacttttcattctagtcggacatcccttgctggtgataccagcaatagttcttccccggcctccacaggtgccaaaactaatcgggcagaccctaaaaagtctgccagtcgccctgggagtcgggctgggagtcgagccgggagtcgagccagcagccggcgaggaagtgacgcttctgactttgacctcttagagacgcagtctgcttgttccgacacttcagaaagcagcgctgcagggggccaaggcaactccaggagagggctaaacaaaccttccaaaatcccaaccatgtctaagaagaccaccactgcctcccccaggactccaggtcccaagcgataacactgtctaagcacccccaagccactatccactttgaatcctgctccatacattgggtgtatatttattctgaacgggagaagttatattgttaaaagtgtaaaagaataattgtgttatgaagctgccttattttttttctttttgtaagttactattttcatgtgaatatttatgtagataaaatttgcctcctggtaaccctgtaatggatggggcccagaaatgaaatatttgagaaaaacaagtgaaaaggtcaagatacaaatgtgtattaaaaaaaaaaaagcctattaatagggtttctgcgcggtgcagggttgtaaacctgctttatcttttaggattattcctaaatgcatcttctttataaacttgacttgctatctcagcaagataaattatattaaaaaaataagaatcctgcagtgtttaaggaactctttttttgtaaatcacggacacctcaattagcaagaactgaggggagggctttttccattgtttaatgttttgtgatttttagctaaagagagggaacctcatctaagtaacatttgcacatgatacagcaaaaggagttcattgcaatactgtctttggatattgtttcagtactgggtgtttaaaggacaaatagctgctagaattcaggggtaaatgtaagtgttcagaaaacgtcagaacatttggggttttaaactgatttgttgctccctatccagcctagacaccagtaactcttgtgttcaccaggacccagacccttggcaagggataggctcgttggtgacattgtgaatttcagatttgttttatccactttttttgctatttatttaaatggtcgatcaacttcccacaaactgaggaatgaattccacgagcctgttctgaaaatgtggacgtaagacaaacacgtgctcgtcctttaatggagttcaccagcacacttgttaaccagtcctgtttgctttcgtctttttttgtgcgtaataaagtcaactgaccaagtgaccatgaaaaggggctgtctggggctcctgttttttagctgctgttcttcagctccgaccatgttgctgtgtgattatctcaattggttttaattgaggcagaaactgaagctctaccaatgaactgtttagaaacaagacacacttttgtattaaaattgcttgcagtaacaaatattttgtatttcctgattttcttttcaactattaccttatctataaatgttaccctggggtataatcatgttgtaggtacttaaatgcattccgcaaatcaaaatatcttgatggataaattatagagctt

SEQ ID NO: 15815 - DNA, 1477 bp, Homo sapiens
tttgccttgaaatgtttttaatagaattggtctagtaatcattcaggatttcggtgatgggccctccctgtctggacactgccaacccacagctggaggggcacttaaggcacgtcattttgtgattagaattacacaaaatttgattaatattatagctgcaaaattaacatacacaattttcactcataatttaaaatattttgatgaaattctttgctttcacaatagaagatcaatggtacacagtatattgaactctgtaacaaaattatttttgagaaaatacagaagtgagaaatagtgatttcctcaatttgtttatagtctatcacaaagtaggccaaagttcagtattaaatagatatcctaataaaagtttttacaagttttcctaaggaaatacattcataagactgtttaccttctgtttgacagcagtgacaggaacgtggggatccccactcatgacgagtccctagcactcagcccctggcacccacagccccggcgcgctccgtcacctggtagggagcagcctgggcttctgcgagtgaggtgttctcactctggttccgtgtttgtgtttagcctgtgcaattctcgtcaacacagaacacctgcctgcccacccccggtgctgaagaccgaccagtcaaggaggtgttggtgggagtgttgtgttcaccatgtggagatcaggcggcgattaccgcatcttctttgctgactttggtaaccgggtgtccagggaggagcgatcgggagtgcccaaagcagttgcctggacttcagcttctgactctgcagctgggaagtcagatgcaggccccaagggtccaggggagttgttcagcgcctggaatcgccatgcaacttgccggtggacccgcacgacgctcctgctctgttctcccaggcacagacaggcacttggaaggcagctttgctcctctggccacccggaaacctcccagcagttcagatgggacaaactgggggcctgtcagaacagccacttgtgccgggaaggcccagccccggccctgcctccgatgaaccgtcaggacggtggcctgcagccagggaacccagggctggccccttggaatcctgtcccagtagggtccacctgaactgggcagggccttgcctgccatagaggatggcctgccattttgtgcctcagagttggttgaaatggcctacgaagtgtggagaataaccactgaatccccaaaaagttcactgcgcttgatctgatcccaagtaacagtgactgcagttagggtcggagaacttctccgaagcagcggtcatgcaggcttttgtgtggctgacgcttccctttttcacaacagtaaaaagctatcaatgggaaattgtggacttttcccaccagggactcaatggggactcaatgtgcaatattcagtcaacataaaactctttaagaactcctcttgactggtgactc

SEQ ID NO: 15816 - DNA, 502 bp, Homo sapiens
  misc_feature (1)...(502): n = a,t,c or g
tttgaattcaatnnnnnnnnnnnnnnnnnnnnnnnnnnnnnnnnnnnnnnnnnnnnnnnnnnnnnnnnnnnnnnnnnnnnggcacgaggacccagattagaagccctgaggatcctaggtccagaagaaagggccttgtcggaggccacacaggccaccaggagccaggcccctgaagatccttggcccaggagaaagggccttgccagaggccacacaggccaccaggagtgaggcccccagaggggtcagcagggcctaccctacaccaccccacccttcaacacgcccaggcgtgcacgctgcaggccagacaaccctccagctggtgtccccagcacccaacccaagtttttctcctgctcaggcaccagcagtcttcctggttgcactctaagctccagatcacaaagtcgagtccttttgttgtgcactgttcactcccccgtagaccaccctgttcctctggggagcttgctataactagacccactcctggtag

SEQ ID NO: 15817 - DNA, 1111 bp, Homo sapiens
agcaactcgactggttctcccaggagcaggaaaaacccttgtgacatgaaacatctcaggcctgaaaagaaagtgctctctcagatggactcttgcatgttaagactatgtcttcacatcatggtgcaaatcacatgtacccaatgactccggctttgacacaacaccttaccatcatcatgccatgatggcttccacaaagcattaaacctggtaaccagagattactggtggctccagcgttgttagatgttcatgaaatgtgaccacctctcaatcacctttgagggctaaagagtagcacatcaaaaggactccaaaatcccatacccaactcttaagagatttgtcctggtacttcagaaagaattttcatgagtgttcttaattggctggaaaagcaccagctgacgttttggaagaatctatccatgtgtctgcctccatatgcatctgggcatttcatcttcagtcccctcattagactgtagcattaggatgtgtggagagaggagaaatgatttagcacccagattcacactcctatgcctggaagggggacatctttgaagaagaggaattagggctgtggacactgtcttgaggatgtggacttccttagtgagctccacattacttgatggtaaccacttcaaaaggatcagaatccacgtaatgaaaaaggtccctctagaggatggagctgatgtgaagctgccaatggatgaaaagcctcagaaagcaactcaaaggactcaaagcaacggacaacacaagagttgtcttcagcccagttgacacctctgatgtcccctgggaagctttgtgctaacctgggactgcctgacttcctttagcctggtcccttgctactaccttgaactgttttatctaacctctctttttctgtttaattctttgctactgccattgaccctgctgcaggatttgtgtcattttcctgcctggttgctgagactccattttgctgccacacacagagatgtaagaggcaggctttaatttgccaaagcacagtttgagcagtagaaaacaacatggtgtatatctcaaattgcctgacatgaagaggagtctaacggtgaagttt

SEQ ID NO: 15818 - DNA, 951 bp, Homo sapiens
gccatctcaaaaaataaaaattgaaaaataaaaaaagaacctggatctcaatttaatttttcatattcttgcaatgaaatggacttgaggaagctaagatcatagctagaaatacagataattccacagcacatctctagcaaatttagcctattcctattctctagcctattccttaccacctgtaatcttgaccatataccttggagttgaatattgttttcatactgctgtgggtttgaatggttccctccaacactcatgttgaggaccttaatccctaatgtggcaatactgaaaggtggggcctttgaggatgtgattggatcgtaagggctgtgccttcattcatgggttaatggattaatgggggttatcacaggaatgggactggtggctttataagaagaggaaaagagaactgagctagcatgccccagccccacagagagcctccactagagtgatgctaagtggaaaatgtgaggtgcagctgccacagagggccccccaccagggaaatgtctagtgtctagtggatcccaggccacaggagagagtgccttgtggaagcgctgggagcaggacctgaccaccaccaggacccccagaacttgtggagtcagtggcagcatgcagcgcccccttgggaaagctttaggcaccagcctgcaacccattcgagcagccacgtaggctggaaccccagcaaagccacaggcacgggggctaccctgaagccttggggggcccaatccctgctccagtgtgtccgtgaggcaagcacacgaagtcaaaagagattattctctttcccacagataccttttctcttcccattgacccttttaacagcatctgctttcatttcccttcacctttcccaggctgatctgaggtaaactttgaacgttaaataaaagctgtgtttgagacatcaaaaaaaaaaaa

SEQ ID NO: 15819 - DNA, 364 bp, Homo sapiens
  misc_feature (1)...(364): n = a,t,c or g
gattgaaagctcagccagggcctgaccccagacgcagtgctcagagaccacagtgcttctagaggcccacaacagtattagagcttcttttaaaatcagaaggaaggaaatgaacctctaagatcaaatagtacatttgcctttataccagtgcagctatacaatatgatttctaatatttgggaggagaaggggacccataagggtaaagcaccttgggcccatgggaagtcaccctgtgacctgaggntcagcccattggaggttgagggggntgaagcccactgcctctgctctccctgctgaatctgcccttgctcccagggctctgatcctcctctacgttggcagtcctgggtcttag

SEQ ID NO: 15820 - DNA, 246 bp, Homo sapiens
  misc_feature (1)...(246): n = a,t,c or g
accngtnnnnnnnnnnnnnnnnnnnnnnnnnnnnnnnnnnnnnnnnnnnnnnnnnnnnnnnnnnnnnnnnnggcacgaggtccctttggcacccagtgttttgtactttaagacagtgcaccactgtgctttttttaagtagaaggacaaaaaggatataaaaacttttatgactgcttgactgaaggtatgatctcaagcagatcaattttaggaagcagtacttaagattagaaaatctagaaa

SEQ ID NO: 15821 - DNA, 218 bp, Homo sapiens
ctcagggctatcctaatggatagagagcctagggcaccatgtggcttgaaatcaggcatgcagtcgaagtccagtgcgtgctggtgagtgagctggtgattcctacctctggggataaacctgaacaatgttgagatcattacttgattacttgatatctgattttaggaaagtggggaatttaataaatttctggtgctctggaaaaaaaaaaaaaa

SEQ ID NO: 15822 - DNA, 468 bp, Homo sapiens
  misc_feature (1)...(468): n = a,t,c or g
tttgannnnnnnnnnnnnnnnnnnnnnnnnnnnnnnnnnnnnnnnnnnnnnnnnnnnnnnnnnnnnnnnnnnnnnnnggcacgaggggatatcgtaatattaaagtagaaaggcttttcttttgtggcaaagctgtaggcaactttgagaagtactggatttagaataaaatttctatcctctgtttgtaacagagttagggctaaagtttgtgggtttctatcatctgtcagaggaatgttgttttaattgggaaagtgttttatttgagatgtcattcccctgacagaagcagaatgactcatggctctctaaatggtagcaatttctagcactatagctggatttaggcccccattctgttacttaaactatagaatacaaaactattcagacctctccagcaccaccaaaaaccctttactttgtttcctgatgcaggtttgagtatcttttcaattttgacaa

SEQ ID NO: 15823 - DNA, 3167 bp, Homo sapiens
  misc_feature (1)...(3167): n = a,t,c or g
ttttttttttttttttttttttgactttctgtgtttacttgtatgaggaaaaacagcacatagaggcatccacagtatttaatttgtttggataacagttacagataaacaggtacaccccatatacaattaccaatactttttatacagttcatatttcagtacatcaacactattttatttacactctatttatgtacattaacatctttctaaagtcagtgcattgtcaacaagttttatacagtaatttacaaggtgaatgtagttaatagttaatttaataaattttccgctagttcatgaattaaaaaaattaattacaaccagtataacaaacacagatcaaacaacattagtagattgtgctacctgcttaaataaaacatctgtaaagaaattatttaaaatcttccactttttaatgggacatgtccaggtaggaaaggacagattttatatactgaaaatcttgaaactataaagtatgcattttgtctgactttattacattagacaatttaggccactcctacctatttgcaattatattttttctgaaaaggatttcaatttaggtagccatttaagataacctttccaaatgctctgagaactagacattaatagttactggcctcagatatcagaacacaaatgcttagttacactggtaattactacctatgaggaagaaagtgtagtggaatctggcaatgagaatcaacttgcagggtctaaatgaataaacaaagaccaaaaataaggtgaaacatttccttcaagtatatattaagaaactacatgaaaaaaattctacctcaaataaataatatttatacttttgttccaatcttaaataattagagggaaaaaatgaagtaagcaaagaaacataactttcaatgactactgtaaaatttaaaaaaagacaaatatcaaaataaaaaaattagtggacatgcaaacaaagcaaaactaaagttgacttcctaaaaccaccaatttcattaaatatacttatgaactcctaatgtctgggatgtgttttgtttgtaatttatagcccttagagccatcaaatacacacaagcaagttcatttgcatgtgttctctcttttttaaagtgcaagacaaacacagaaaagaacaaccactaattgtgaaacgtgatctagctccaatgccacttaccttcccagaagctcttgttgcaacaggtgcatgtgaagntggtgcaaatattggcaactgctccccttccctcagcatgggtggggccgggggtgcagaatacatttctgaggatacttgaagtatcctaaatgtaagatgcctccactgggagggccatggtagctggatttcccaggatgctgtttctttctactgggtctcccacaaggctctgggtggaaggcacacagctcttaagagagcctccctttcagactgaccactatatgcccctgccaccaatgactggttgtgtctcaaacataaatacaacggcaaaaacaaaaagcaagaaagacaaaggaaagggtatggaaacagtttaaaaaataaattgaaaaatcctcggtcccatgccttaagaatcatttgcacaccttcgtgatcttgctttctccatcttgtcaatataatggaataaaacttcaggaaaaaggaggtagcatatcatgtcgtccctagacaacattataattgtttgttttttactctgactccaaggaaatctttaatatttgttatgattattgataaactctatactcactacatatttgttcatatctggacaagcacaattgaattcttatttggtcccaaggtggctggtgccaaaccttttgtttacaggctaatggtgggatctgcctgaaagttctctatcagacaacttgcatgagacttcaaaataaaattactactactcttcaagttaactattttaattagaatttttgttctaacaggataaaataactacatttagcttgtctttcagtgacacttttgccaagtatcagctacaaggagtcatctccctcgccaccaagctgtctagcagccagagtgggagctttactggaacatagagtacttttcgtaatcagactcagagtcttcatccgtactgcttgtgtctgccatctttttgccatcaatctttggcagaaattgtgcgtagtctatcccctgctgctcatagaaaagaatgtaggcagagtcggtgtcaatttcatcagggtgaagttcctcacagctgctgtcattataacagtaccacttgcagtttgggtttttggcataagtgacgtaatgggcccccacccagaattcctgaatggcacggaaattgcatatagattataaataggcttaatacgagtatcttctctttggtcatcagtgctgtcttcttcactgtggtttccaagctgaccattgctgtagccatcgccacagccattgccacatgcttcatgctcataaaggaatccattggccaaagctacctcatggtcctgaggagtgaccaactctggttggctgccccccagcacatgccctcgactcaaggcgtcagccagctcacatatctgcccagccccattttctttgctggcatccaagttctctttactacttgacagtttatttttgctgccaatctggggcagccggagcctccctttgctcctccccaaagtccgtgggctgctattagggctgctgtttttgctggagggacagctggttccactttttcttgatgaagaaggagaacctttcgggctgctgatgatgttagcgctgagtgaggatgggcttttgctcaggagcacgtcctcttccccagccgaactctgcgcatccactttcttcacctcccttgccagaatcctgggctcagagagctcatccccctggggtgtgagtggtttatgctggcagagagccgggtctcttggtaccaaaaaagcacttggatcaaaactttcccgaggaaatttgacaattttctgtgattttatccaccgaccatttacaaattgaaatcgcttaaggtgaataatcaggatgggtggaagcctccagagatccagcttctttgttgctaagcagtgggtcttacacttggaacagtagtacatct

SEQ ID NO: 15824 - DNA, 1829 bp, Homo sapiens
gattaccaatattgtgcgacctactgtatcaataaacaaaaaggaaactggtctctatgagaatctctacctggtgctttcagacaacacttcaccaggtttaaagagaaaactcctgactctacacgtccattcccagggcgagctcactgtctggcatcaagttccccatggtcgagtttccctgtacaagagtccaaggggagaggtaagtgtcctttattttgctggatgtagtttaatattacctgaggtaaggtaaggcaaagagtgggaggcagggagtccagttcagggacggggattccaggagaagtgaaggggaaggggctgggcccatgcctgggggtctctccctggtttccacagacagatccttggccaggactcaggcacacagtgtgacaaagatgcttggtgtaggagaagagggatcaggacgaagtcccaggtccccaggcggggttctcagggtctcaggctccaagggccgtgtctgcactggggaggcgccgcgttgaggattctccactcccctgagtttcacttcttctcccaacctgcgtcgggtccttcttcctgaatactcatgacgcgtccccaattcccactcccattgggtgtcgggttctagaagccaatcagcgtctccgcagtcccggttctaaagtccccagtcacccacccggactcagattctccccagacgccgagatgcgggtcatggcgccccgaaccctcatcctgctgctctcgggagccctggccctgaccgagacctgggcctgtgagtgcggggttgggagggaaacggccctctgcggagaggaacgaggtgcccgcagcggcagggcgcaggacccggggagcccgcgcagggaggagggtcgggcgggtctcagcccctcctcgcccccaggctcccactccatgaagtatttcttcacatccgtgtcccggcctggccgcggagagccccgcttcatctcagtgggctacgtggacgacacgcagttcgtgcggttcgacagcgacgccgcgagtccgagaggggagccgcgggcgccgctgggtggagcaggaggggccggagtattgggaccgggagacacagaagtacaagcgccaggcacagactgaccgagtgagcctgcggaacctgcgcggctactacaaccagagcgaggccggtgagtgaccccggcccggggcgcaggtcacgacccctcctcatcccccacggacggcccggggtcgccccaagtctcccggtctgagatccaccccgaggctgcggaacccgcccagaccctcgaccggagagagccccagtcacctttacccggtttcattttcagtttaggccaaaatccccgccggttggtcgggactggggcggggctcgggggacggggctgaccacgggggcggggccagggtctcacaccctccagtggatgtgtggctgcgacctggggcccgacgggcgcctcctccgcgggtatgaacagcacgcctacgacggcaaggattacatcgccctgaacgaggacctgcgctcctggaccgcggcggacatggcggctcagatcaccaagcgcaagtgggaggcagaagaatttgcagagcagatcagggcctacctggagggcacgtgcgtggagtggctccgcagacacctggagaacgggaaggagacgctgcagcgcgcgggtaccaggggccacggggcgcctccctgatcgcctgtagatctcccgggctggccctcccacaaggaggggagacaattgggaccaacactataatgtccgcctctctctggtcct

SEQ ID NO: 15825 - DNA, 833 bp, Homo sapiens
tttttttttaatagttaagagattttattctaatagctataattacagtgcttgtttgtcgaaatgaaaactgaaaacaagtatacaaaacagttgattactaatcgtgtattgaaagcagtaagaggttccacgacaccaaatagaccagttctgaggtttccccaagataaatttaacagctccagcttcagtgtttatcaaaatacaaaagaaaaaagtagaggttgtctttttcgatggcaaatcggacccttgcaggctgagggagagaaagctacattacacacaccaggcacatcttctctttcacagagcttatcaggatggtatctccttttggcttaaaccaaccaccttgtgtttataaataacccccccacccccagtgcctgaattcatccacatcttctgccttcataggcagcctccccttggctccagttccagcaggacaggccttcctctgaaaggaagcctggggcagtgaggccacactagtcagcgttcggccctccctacaccaatcccagctgggctcctagttgtctagcacctttgcactcaagaaagttatattgtttttctctctcttcctcatttcttgccagtattctgccttttcataacatttatgccaacaagatatctggtcattcccagaccttcctgttttgcacaacccttcatagataaccgagtgactgcaacgctgaaaatctgttgctcttttctcttctaaacctgtatctacctcaataaaactgagtcttttatgggaaccagaagacttaagactaatgggaaccaggagtcataagccagagactcct

SEQ ID NO: 15826 - DNA, 231 bp, Homo sapiens
  misc_feature (1)...(231): n = a,t,c or g
tttgaanacncgtnnnnnnnnnnnnnnnnnnnnnnnnnnnnnnnnnnnnnnnnnnnnnnnnnnnnnnnnnnnnnnnnnggcacgaggtgacatattgctgggtccaacatccaggtgatgtaacttttatgcctgggtcctggcaccagaggacattgtctttgcaccactcacacaggtgatgtgattttcttctgttacctggtctctgctcacaggaagaattgtgac

SEQ ID NO: 15827 - DNA, 3028 bp, Homo sapiens
gaccccagagtcagaaggagtgagaaccctgacccctaatcccactgcatccagccaataggagcccagccaccatggcggacgtgcaggaggtgcagatcacagaggagaagccactgttgccaggacagacgcctgaggcggccaaggaggctgagttagctgcccgaatcctcctggaccagggacagactcactctgtggagacaccatacggctctgtcactttcactgtctatgggcacccccaaacccaaacgcccagcgatccttacctaccacgatgtgggactcaactataaatcttgcttccagccactgtttcagttcgaggacatgcaggaaatcattcagaactttgtgcgggttcatgtggatgcccctggaatggaagagggagcccctgtgttccctttgggatatcagtacccatctctggaccagcttgcagacatgatcccttgcgtcctgcagtacctaaatttctctacaataattggagttggtgttggagctggagcctacatcctggcgagatatgctcttaaccacccggacactgttgaaggtcttgtcctcatcaacattgatcccaatgccaagggttggatggattgggcagcccacaagctaacaggcctcacctcttccattccggagatgatccttggacatcttttcagccaggaagagctctctggaaattctgagttgatacaaaagtacagaaatatcattacacatgcacccaacctggataacattgaattgtactggaacagctacaacaaccgccgagacctgaactttgagcgtggaggtgatatcaccctcaggtgtcctgtgatgctggtggtaggagaccaagcacctcatgaagatgcagtggtggaatgtaactcaaaactggaccccacccagacctcgttcctcaagatggctgactccggaggtcagccccagctgactcagccaggcaagctgaccgaggccttcaagtacttcctgcaaggcatgggctacatggcctcatcctgcatgactcgcctgtcccggtctcgtacagcctctctgaccagtgcagcatccgttgatggcaaccgcccacaggcctgcacccactcagagagcagcgaggggctgggccaggtcaaccacaccatggaggtgtcctgttgaagcccttgatcccgctgacgacgcccacgtcgaggccccaccgccatccttgcgccggctcatgttccctttagtttatttttgtgagggcaaaggggaggaaatggggttctgtttgaaaaaaatgaggggatcttagatgctgcagcagaacagtctccaggtgttttaaggggctcagtcctcctcatcccatctcactctccgtggtaacttagccaacttgacccctctcatcccactcccggcggcccaggcacagaagggcagggccattagggagggagattcgctacggatccaggccattcctgggtgagcccttgggagggcatgtttggagatgagagaggcttcgagagggtgggtgctgggccacaggggtgcggggccagcttcaggcactggcgtggggagccctggggagaccccttcccccaccctccaccaagcacacctgtttctgtctcatagcacatgtgacaatcatctgggacaacagccacaagggggcgcttcgggaccagggcagccactttcctggtgctctctggggcccagctgggtgcttgtagggccacgcaggcagggggggtcaaggggtttctctgcccaaggaagacagaacatggagaaccgtcagggcaggaaccccacagactgtcccttccagcccacactctgccacctcctggccctgtcccaattctgagccaaggcctccccgaggcagaagttgcctggtcctctgtccccacagtgacctgactgggggtgagggagaaggaggagagagcccatgtgtggtgtgtgtgcccctgagaacttcgtggtgactgcctttgggagcccgcaggtggccagaggcaggggtagctgagttcctggagaccccttttttgcccccaggttccccagagggcaacgccatcagtagcagtgtggtgtttcaggcagagctctggccaggctgtgccagtgtgtcccggacgcatcactaaggaagagagagtttatttagtcaactggcccaaggaagcgaggcttctacagtcccacaccccatagccgcctgggctggggcttactgggggctgaaggttctggacatgaacaagggtcaggtagaagagaaaggcttcccctacaccccagcctcctgctgtcccctgaagcccaggactgcgttgtttgctttccatccactcaccttaccccatagcatcttgcggcccagaaaccagagccatttgtctcagaccctaaatcaataatcacaaaccccaaaacgggagagagcagtgaaaacatgcagggctgtggacgggggaagggttgtggcgggtgttctgaggctgagaggacacctatatgcgtatttcctctacacacatcaccccccttctataatcttaagccatgactagcctggtggcgtgttagtttctgcccagttctaccccctcatgtgcttcttctgaatactgaatgtgactgtttgaaagctggtagaattcatccctcttactgtagataacactgcaaatcttggaattttgttttttgctgtttccagatgtatctataaatatctatacattatatgtgtgtgtgtgtgtgtgtgtacatcgggtcctcccatgtgtggtgttcttctggaggttgtctctttggtcaaggtgaacttttaatgtttattattttcttctccgcacaaagtaaagagcctaattttgtgtattctggtggctgctgtcatgagatgataaaatgtaaaacaaaactctagtcaacgtagaaagagttaactgtgctgaaaaactaataaagaacctaagaagaaaaaaaa

SEQ ID NO: 15828 - DNA, 444 bp, Homo sapiens
  misc_feature (1)...(444): n = a,t,c or g
cgcccntcccttgancccannacctcttatgactgccnnnnnnnnnnnnnnnnnnnnnnnnnnnnnnnnnnnnnnnnnnnnnnnnnnnnnggcacgagcttagagcgggcagccagtgcttcctcttctgtttgtacgaaataatgtgctcattcagctgtttgagcctccaggtcacttccgcatccaatgacctattggatccttggctgctctgcaagatgattggtacattaatgcaggaaataacttcaacttacagatcggatgttcagcttcaaagatgtaaagtgtgtgtaggaggtgaaggggttgaacctagagcttagattttctaagctgtaacttgctgtctctagacctgtgctctagatgcaactagtttgtttcagagcctaatagcaatttgctgtggaggtgtcaccctaagccttcaggcccata

SEQ ID NO: 15829 - DNA, 843 bp, Homo sapiens
aggatacacagtaaaacagtgatatcttggagacaagttatcaaatccccccacactgagcagatgccagacaacagttgagtgcgcaggaaggacacaccaggaccaggcagttgcttcaggcgcttttattaggttccactgcaggggctggggtcaatgtaatgcaaatccaagcccagtgatgcacacctgtgagccgaaacagagccgaagcaggagcacctgtgtcccaggagcagctggttggagggagccagggccaaggcccacctcctctcgggaccaggagactggcagccgctgtgttcacctgggcaggtgtgcacccagtcacccccacttggattatgggtgctggtaacattgagagggttgtgtccacaccaaagggcaggtgaagatgcgaggtggggctgagacctccttcccacaaagaggaggtggctgagcctccccagggcctgaactctcacagcagggcttcaccccccaaagcctgtatgcttagctctgactctctttggacaataaaataaagtgcagttactgaacaaagagtaactcaaaaccagaatcagacaaatcgccaatgcttttcctttagctaaaagacaaaagaaaacatgaatgatgtgaatgccggaacttcagagtaagggaaatgctggtggaggacaacggaaactataatagcgtggtggataaggacgagcgagtgggagaggaactggcaacgcggctctctctagaagtccgtgctgtccagcctctgcccagtggtgggggaaggccttggactcacagggaagcaatgcaggaagccttggccacctaggctcc

SEQ ID NO: 15830 - DNA, 541 bp, Homo sapiens
  misc_feature (1)...(541): n = a,t,c or g
tattgaaacccttttgatgaccannnnnnnnnnnnnnnnnnnnnnnnnnnnnnnnnnnnnnnnnnnnnnnnnnnnggcacgagcggcacgagcggcacgannnnnnnnnnnnnnnnnnnnnnnnnnnnnnnnnnnnnnnnnnnnnnnnnnnnnnnnnnnnnnnnnnnnnnnnnnnnnnnnnnnnnnnnnnnnnnnnnnnnnnnnnnnnnnnnnnnnnnnnnnnnnnnnnnnnnnnnnnnnnnnnnnnnnnnnnnnnnnnnnnnnnnnnnnnnnnnnnnnnntaatatattttcaaataacatactttacatctgttttcaaagagattttgaagtgttggcaaacttttaaaagttactcccaaatattatagtttaaggcaaagatctgcctatttctcaagtttaatttttaatgaacaactttagaaaccgatggagaataagcaaattaaaaatggtaaatcaagggctgggcacaatgcctcatgcctgtaatctttaagattacactttgggaggccaaggcaggcagatcgctt

SEQ ID NO: 15831 - DNA, 561 bp, Homo sapiens
  misc_feature (1)...(561): n = a,t,c or g
ttggnannttgntannctnnnnnnnnnnnnnnnnnnnnnnnnnnnnnnnnnnnnnnnnnnnnnnnnnnnnnnnnnnnnnnnggcacgaggaaaacagtattttggaattaaatttctagaatctttcataatattctctcctctctactgaacatagtactaggttggtaactggaggatcccagaaagtcatgctaatttttctaacaaaacaggccttgctgtctctaactctgatttgatatcctgctttgagcaaataaaagagccctggaatgtgaagagacatgagacagtagtcagcttctcaggtaggtaagcatgaatgaagcagataacagagacgagggatacgaaggtcagaaagaatttcagaccttaaaatgtggtatagaatgctctgcttccatggaaaggtttcctaaaaagccatttatttctctagctcccaaataggagcatcttttgcccatacccttaaattctttaaggatcctacttnctatttagngattttccttagagggaccgtgagagctaaagcctctttatggcttataa

SEQ ID NO: 15832 - DNA, 486 bp, Homo sapiens
  misc_feature (1)...(486): n = a,t,c or g
ttgaaacccttgnaaancnnnnnnnnnnnnnnnnnnnnnnnnnnnnnnnnnnnnnnnnnnnnnnnnnnnnnnnnnnnnnnnnnnggcacgagctgagtgtagtgaatgacttaagattgggaacaatgtgaggtgttcagcgcatcactaatgacatgtattacatatattttatggtaaaatgtgaaattatagtgctttccctaaaatgcatattatcaaggatatcagtaaactgaaatacgttgttaaactcctcacttttctacagccttctcttaatgtagaggaaataaattaaaactgaaatttggggctttttatttctacaatacttttttttattgcttgcattcaaataatttaannnnnnnnnnnnnnnnnnnnnnnnnnnnnnnnnnnnnnnnnnnnnnnnnnnnnnnnnnnnnnnnnnnnnnnnnnnnnnnnnnnnnnnnnnnnnnnnncctgtctctacagaaaatacaa

SEQ ID NO: 15833 - DNA, 993 bp, Homo sapiens
ccgcgtcgactttttttttctttttttttttttcaagttttatgatttatttaacttgtggaacaaaaataaaccagattaaccacaaccatgccttactttatcaaatgtataagaagtaaatatgaatcttatatgacaaaatgtttcattcattataacaaatttccaataatcctgtcaattatatttctaaattttcccccaaattctaagcagagtatgtaaattctaagcagagtatgtaaattggaagttaacttatgcacgcttaactatcttaacaagctttgagtgcaagagattgaagagttcaaatctgaccaagatgttgatgttggataagagaattctctgctccccacctctaagttgccagccctcctagagctacctgtggagcaacctgctcagatacatcaaacatggagacagcactcaaagtagaattataaagaagatcatgtccatgttaacattattataaccctacattttgtgcataaagtgtaagtgtataagcatatcaatattaaaaagcaagcaagcagaatttggaattcatccaatccaaatgcggcatcttcaaacctcccatgatgctgcttacatgtctcgatccccacttaactatcttgggctgtgacaaagtcaccatggttcacacggcaggcatactcatctttttcagtgggggtgaattcagtgtagtacaagagatagaaagaccagtccttgctgaaagacaagtctgaatgctccactttttcaattctctctccattcttcagtaagtcaacttcaatgtcggatggatgaaacccagacacatagcaattcaggaaatttgactttccattctctgctggatgacgtgagtaaacctgaatctttggagtacgctggatagcctccaggccagaaagagagagtagcgcgagcacagctaaggccacggagcgagacatctcggcccgaatgctgtcagcttca

SEQ ID NO: 15834 - DNA, 549 bp, Homo sapiens
  misc_feature (1)...(549): n = a,t,c or g
gggctcagcatggtcagtgccgtttaacctttattgtggtggagtccacccctgctgtgggcctcagataaccctgtacaaaggggaatggagattgcctgtatccacctagattcataagctgccctgaggcgatcttggcatcaagaaagacagcattgaggcacatctcaccatcagcttcagaggatgtcagcctttgatatgtcccatgggttttttcccagggaaccaatctgtccttttgangaaaagacaannatangaacgatggtagaggaccaccggtcaaattcttaccaggattcantgacgtttgatgatgtggctgtggagttcaccccagaggagtgggctttactggacanaactcatgaaatncctctacaggnnatgtgatgctggananctcntgaacctngcctctgtggatttccttttctgcttaacttcagantggggantactnctaaacatacgntcatcnctncgcnggttttttnnanatctntatcactgggntancntttccctntcttnnttgntgtt

SEQ ID NO: 15835 - DNA, 1231 bp, Homo sapiens
  misc_feature (1)...(1231): n = a,t,c or g
ggcacgaggtatggagattaccaggcagatgataccgaaatgcttaaaggggctgtggctgaggctgtagcatctctgctggaggtgagacactctgggaactgatttgacctcgaatgctcctaaaagagaacttgatagcctgacagcagagaagtattatttggaggggagtctgagaaagcctggcttgtattatctgtccaaaaggaagcctcttcatctcccggtgccttggttgactattttggaaataggcatatcaaggttcctgattcagcactttgctcttttaataacaaatcgtccaaagatctcaaagtaagggtttttttttttancttccactcttccgcanacttggncatcgacctatttttattgaanaatgaaaggcgatgacaantttaacatatacaaattcgtgaattcttgttcattttgcattcctgcagtcagtgctaatccgtcgttcttaatcaggagttctgccaggtttaaggtcacctgcactcccagccaagtggtgatgtatgcctcccactctctgcaaggttttcctcatttttatattcatttattcatcattcattcattcacctaactttcattaaatagctgcaccatcccaggccctgtgcggagcatcgggaatacaaagatgagataaaacattgtccctgcccccgggggctcacatgccactggaaacaacagactcttaaactaacaattcaagcaggcgccaagtgctacgacagaggtgtgaataaaagcatcaggaaatcggatggagaaccaccattcacccaagggtcagaggaggtttcaaagaaaaggtgtcattggagcagtgttttgcagaatgagccagagttcaccaagcaggcaaggcaaggaagggtgttgcagagagggaacagcatatgcaaaggcatatcagttcatggcatcacatctttcactggggaagccagtttccacangcagcatcccaagggtcaataaaggccttatttacaagcaagcaaaatgcaaaccaaaccattatcattantggcttaagtatgctttctcctgaaaactttagcaatgggtgcaaatattcantatggttccccgaaccaaagggttttacccagggnanaaccaaaaaaatgggnccccttggnnnnngngganggccnnnntnnttnncccccnangggcannnnnnnnannnnnnnntttt

SEQ ID NO: 15836 - DNA, 2770 bp, Homo sapiens
agtactcggtgttcctgaggatgctgtgcatggcctacaacgacttctttctagaggacaacaagtgaccagggctgccctccaccctcaccctccaccctttgctgctgacctcggctgctcctctcacagaccctctttggcccctgccctcctctccctcccagatggacccttccatgggaggaaataaagtttccatcgcaggtgctgggagtctggttttgaagctgtcttgtctaccttggcctggggagaggggagcacaggaagggtctctccttgagtgggttgagacagcttctgcctctgggggttagggtcctgggctcccactgcattcctctccttctttggtgtggacgtcattggttttgtcatggcttagttttgcctgcctggaaaatggggaagttaggccaggcgggaactctgcaaggatgcagaggaagttaagagggaaagttgctttgagaggaggacactgggaggggttgggagtggctcctgagggcggtgataggcaggcaggcctgacttgtccacagctcacccggaggccaccttggcagcacctgtaggaagggcatgtctggcctccacaccagccccctccctcttcaccatttccccttcaatagcaccactctcatcatctatgggggacagtgctttcttctctccctgcctcctccatcaaaatcttttctcaggggagggtctgaaaaggccttcactcccccgtaaataacgaatggtgcttacagggctgggctcccacgtgcatgcacattaacaccaaaggtgctgtagtgaatggaatttggggcactgaggggaaggcgtggaggtgttggtaggaacttgttgctggtgggggatgggcgccgtagatatcctttacaccactggctactccccctatctcctctggggtgaccctgagtatcctctgtgggacaccggcatcctgtgaggcgccctccttgcccacattgacgctgcgctggctcgagggtcacattcacggtctggcagaggaagcaggggtgaccgccgcagtcctcctcctgctccccttgccgagtcacgtgtcacgaagagcaaactgagcaaactgagctgcgcagatgaggggagactcgtcaccaggcgtgcagtgggcactgctgggctcccccatcccgtcctaacccggaacagccccgggcaggaggcgtggaaagtcgagggggtaaaccgcgaatgtgcgttgtgtaagccacggcgcagggtggggcgcgggcgggacttgggcgggcggggtgggcttggccgagctggcctccggggcaccgaccgctataaggccagtcggactgcgacacagcccatcccctcgaccgctcgcgtcgcatttggccgcctccctaccggtgagttctctccaggagccctgggtactttccaaggccagctgccctcacgctgggggtccagccatcccctgcccatttcagccgctggatccagactggggccatctgtggcgctcccccgctggagggatagtcaggagcagcagtgctgtgccaggcaggccttgggctaagggatcgcaatggggtgtgctcttttggggtgcggaagggagtgccctgggtatgtcattgccaccatgtgtggccctgtgaagctgtgtttaagctgcctttgcagcctccattcccctcccctgcccagccatactcctcaacctctggatcccctgaaggacagttctcagctgtgcccaaagctactgttcctatatgcttcttagaatccttaagccacctctcttgccttggccctagtgtgctctctccttccccttcagccctgggctgtctcctgatgccattgtgtgtggcctgagactgggtggttccaaaggaggcggggctagtgcaggcagcattattggggtgtgtgggtgagaagtccttgctcccatggcactgactaggccctctgctgccagctccaagcccagccctcagccatggcatgccccctggatcaggccattggcctcctcgtggccatcttccacaagtactccggcagggagggtgacaagcacaccctgagcaagaaggagctgaaggagctgatccagaaggagctcaccattggctcggtgagtggcctcctccccaggaccccttttcccacccttgtcctttggaagcaaggattaggggagagagaggtgccaggtgcatctgactcacatttacccacattctgaggccctggtccacatgtagaccctgagctgtagacccactctcccagcgggtaggggatgcttccagccggatatccatctctccaaatgaggaccagtaactgagaagtagctgaggagaagcaatgccaaagtgacatgggtccttggtgatgagggagcacagagccacttgcagagaggattgcctgggagggggaaggggaagaatccagggttgtcatcaccactgagtatggatttcacattctaacacattagaagctgcaggatgctgaaattgcaaggctgatggaagacttggaccggaacaaggaccaggaggtgaacttccaggagtatgtcaccttcctgggggccttggctttgatctacaatgaagccctcaagggctgaaaataaatagggaagatggagacaccctctgggggtcctctctgagtcaaatccagtggtgggtaattgtacaataaattttttttggtcaaatttaaaaaa

SEQ ID NO: 15837 - DNA, 262 bp, Homo sapiens
  misc_feature (1)...(262): n = a,t,c or g
gcaagaaattcatcatggggctgaggcaactgtatgtccacatagaaaagaataaaattgtacccccgtctcagacctaaatttatttatttatttattttttctttnnnnnnnnnnnnnnnnnnnnnnnnnnnnnnnnnnnnnnnnnnnnnnnnnnnnnnnnnnnnnnnnnnnnnnnnnnnnnnnnnnnnnnnnnnnnnnnnnnnnnnnnnnnnnnnnnnnnagcatccattaactattctttcctgatgctttccctccc

SEQ ID NO: 15838 - DNA, 1210 bp, Homo sapiens
atctactaaattccggccgctcgacttttttttttttttccagagtttcatccttttattgaagcttacaatttcactggacttttggccccaaatgaaaaaaaaatgcaaattaaaaaaagtattggcagggagaggtgaccactgtctcctggagactgaagccgagcagagcatggcaggcaagtgaggggtcccagctgcagagggcagaagcctgggccaaagatgcccagggagcagatttgtcctgaggcagggccagcccccaggcagctagaagttaacacacaaggatttatgggtgtggcagaatccaagccactggtcccatagacagatctctctcatgcttggtcagattccactttggagaaaatgggctcgtttgacaggatggcctggtgagggaacacaggtactaacggtaacaggccgatgaacactcaccactggcatcagggtggagctcagctgactggacactaactccattacaaggacctgctcctggtgccaggctgtgccactcaactgctcatggccatcaggacattcaacttctatcctctcctccatcaggcccctatctgtgtggcctcagccccggtcctcactatttggtggctatgatgcaggactctccaccctcttttggaacagtgttgcatcaagcaagggagaatgttcttctagagggacaggaaaagaagagatgtccacatacttctctcactctaagaagccaggaaaggtccctggtgcactccactctccacagatggttgggtcatagcatccgagaagctgtcatggtgacgaagtcctcgaagctgagccgaatgttgccttgtacagctgtgtccttctcccggaaggcctctgtcagcacctgcagctgggtgcacacctggatgaagcggtcaagctgcatggcaggattggcagagcgtgggcagtagcgggagaccagaagctgggtgaactgggggctcaggttgtagcccatttgggacagagcttgctgcagctctgtgtagctaatggagcccgagcggtcccggtcatactgctggaagaggttcttccactgctggatgaatttccacagggctgagaagccgtagacatcgatgcggcctgacttggtcttgtcaaacatgtttatcatcatgaggcaggtctcatcattgaatgaagaccaattgca

SEQ ID NO: 15839 - DNA, 640 bp, Homo sapiens
  misc_feature (1)...(640): n = a,t,c or g
tgttcatttccccacagtttaacaaattggcggggtgggaagtcctgagtgctccgtccctcttagcatcactcctgagctgcgggagaggtggcccagagaacagcagagtcagttacacctgcagctcttgtctaaagtgattagatggccaccctcaccactgtccagtccagcagcagcctggctgccttgtcatggcctcctgggggcagaaggcgatgtggaccacgggatttgtagccagccagctcccaggccaacgcccaaagccctgatgacctggttcttctgaggccctcaacctggcatcttagggtatggtcaggcaacagggtgaccagctgtcctggtttcccaggacatggaactttcaatgctaaaactgggacattacccagcaagtggggatggttggtcccctaccagggagagggcctggggctcttgcttcccgagaacgcctgtggcttgaagaaccttgactgcttggtcctcaggtatctacctcccacctttttccttcatcttttgggagcaagccaactcagtgccccagaacccacctgatctgcatcttttgttttgcatcttccagagacacctgagggccccagagtttnagggcaaagcaggggcc

SEQ ID NO: 15840 - DNA, 444 bp, Homo sapiens
  misc_feature (1)...(444): n = a,t,c or g
tnnnntnnnnnntnttgatnccntcnntgaatnccntnnnnnnnnnnnnnnnnnnnnnnnnnnnnnnnnnnnnnnnnnnnnnnnnnnnnnnnnnnnnnnnnnnnnnnnggcacgagggggcgccggtggccacgttggtgtcaacctccttcgtgaagctcacacctcccccgccccgggaggggtttgcccgccactgtcgctgaatgattgcatcatcgaaagcagaaaaccacttttgcatccttcggcctctggcgtgcctgccatgacgtcatagctctgcggaggtgaagttggggagctttgaggacctcatggatcccagggggaccaannnnnnnnnnnnnaagacagaggtanctgancctcnnancaaactacctnnnncannnccttctntgccacngaccctgcctntactntgnncnttnnntttntacc

SEQ ID NO: 15841 - DNA, 344 bp, Homo sapiens
ggaaaaccacttttgcatccttcggcctctggcgtgcctgccatgacgtcatagctctgcggaggtggaagttggggagctttgaggcctcctctgtagaatggaaactctgtacccctgcttgtcttaggacctcatggatcccagggggaccaagagaggagctgagaagacagaggtagctgagcctcggaacaaactacctcgtccagcaccttctctgcccacagaccctgccctctactctgggccctttcctttctaccggcgcccttcggaactgggctgcttctccctggatgctcaacgccagtaccatggagatgcccgagccctgcgctact

SEQ ID NO: 15842 - DNA, 839 bp, Homo sapiens
tatacataaattttcgtcacctttataaacagcgcagacggcgctatggacaaaaaaagaaaaagatccactaaaaagaaagatttagatggcttcttgccagtttgagcctaatctgattcttacagttttaccttcttgaaccaatgtaaaagtttttttaatgttaaatgattaaattctcagtgaggctatcttccttttccccagtaacattcctgaatttactgttatcttattgtagtacttgcatgacatggattcctgatatctgatgagaggttcattcttgtgtattcagttaatgacaccaaaaggctcagcccaccccaaccctatctcatgttcagtctgtctaatacatgccagagatttttttttcaaaaagtgctttatccctacaatgtactgacagttcttacagttgagatttgttcttttcagctattgcttgtgaaaaaaagcaagactatgtcactctatagaaggctgttaaagtgactcaggcaggaattaattattctgtacctaaggggttacttgtttaatgggatggcattgactttttgaaaatcaagtggactgagtcattgataaaacatttctaagagtggggctagagaacatactttacatctgacatcctttggcctaacaacatctattattatagtgctcagcagtgtgggcattgaagaggcgcagaatgctttgaaagaaactaatcagaatcttggaacatcatgatcatgccattcttaagtaaatcaactattttcaacactgaagaaaaatgaaacattatttagaaaacaatgagattacaagttccaaactca

SEQ ID NO: 15843 - DNA, 340 bp, Homo sapiens
catttcctagtttggtaattctaactatatcgtttagaattatgaaatgatgctttgaatgataggatttacttcttcacattaagacatatttttaggaacatagaccattttgacaagtgaatttcacagtttaagttccttaaataaaatgttaatacatattccacactctttgtttggatcctcttttgctggttttctgtaaccagtttctgctttgcctgatctagtaggctgtccacatattcagggtaatctattcctaaggtaggctttcaaggcagtcaggaaacagggattggcatttgctttgtacttttttgggggcgggtgtagg

SEQ ID NO: 15844 - DNA, 384 bp, Homo sapiens
  misc_feature (1)...(384): n = a,t,c or g
atagaagggccacaggacaaactccctctatcaaagccttttcactaagggcaccctgatcccagttcgcaaagctctatcttcgtgacttgactnnnnnnnnnnnnnnnnnnnnnnnnnnnnnnnnnttacactgtttcaacagtaaacagtttatgtagagtttcaacataaattaaggaggggacaaaacatccaaaccaaggaaggctgggagggaagccagagggaaagtgcaagaggaggtttggtggaggtgtcctagattgtttgcagtccaaggaggttggggagagtgtaacaggcctgccttggtatccctgctctgcagtcactggctaagagcagtccttaggaagcacagcctggcacaaatacaacaag

SEQ ID NO: 15845 - DNA, 420 bp, Homo sapiens
ttaaagaggatgaagttgtgtcttcagaaaaagcaaaagacagttttaatgaaaagagagttgcagtggaagctcctatgagggaggaatatgcagacttcaaaccatttgagcgagtatgggaagtgaaagatagtaaggaagatagtgatatgttggctgctggaggtaaaatcgagagcaacttggaaagtaaagtggataaaaaatgttttgcagatagccttgagcaaactaatcacgaaaaagatagtgagagtagtaatgatgatacttctttccccagtacgccagaaggtataaaggatcgttcaggagcatatatcacatgtgctccctttaacccagcagcaactgagagcattgcaacaaacatttttcctttgttggagatcctacttcagaaaataagaccgatga

SEQ ID NO: 15846 - DNA, 511 bp, Homo sapiens
gaagttaatcctgcctatctgcctctcctaaccttggtcttgttttctggcaggcagaggtggaggagacactgaagcgactgcagagccagaagggagtgcagggaatcatcgtcgtgaacacagaaggcattcccatcaagagcaccatggacaaccccaccaccacccagtatgccagcctcatgcacagcttcatcctgaaggcacggagcaccgtgcgtgacatcgacccccagaacgatctcaccttccttcgaattcgctccaagaaaaatgaaattatggttgcaccagataaagactatttcctgattgtgattcagaatccaaccgaataagccactctcttggctccctgtgtcattccttaattttaatggccccccaaggaatgtttaatgtcaaatcatggtccagtggacctaggcacatgggcagttcgtttggggaaccccattttacaccattccgttgacctgtgttggggttggcggttttttttccccca

SEQ ID NO: 15847 - DNA, 243 bp, Homo sapiens
tttagatttcttccactggtggtatagagaatctcctgaattagttaagcaggaaattgatgggtgtggttttccagttcaaatgagtctgtatcttagagggaatgatccagttagaaactatttgaggacctttttgctaccatcgaagtttatgataatatctaaaaaccaccatctagcccctgttagacattcctatcactctgtgcatagttgtaagaacagaaaatggaggctgag

SEQ ID NO: 15848 - DNA, 1691 bp, Homo sapiens
ttttattgaattagttgcatgcaggagcaattctgttcttcccatgagcagcagagtcgagtgttagagtgcaggatccagagcggggagaggctgctgctgacctgggagagtgggcaggtcctgggggaccagacggtctcagacaatgagctccaggaaatgtccaatcagggaagtaagtacgtcaataaggaaattcaaaatgctgtcaacggggtgaaacagataaagactctcatagaaaaaacaaacgaagagcgcaagacactgctcaggcaacctagaagaagccaagaagaagaaagaggatgccctaaatgagaccagggaatcagagacaaagctgaaggagctcccaggagtgtgcaatgagaccatgatggccctctgggaagagtgtaagccctgcctgaaacagacctgcatgaagttctacgcacgcgtctgcagaagtggctcaggcctggttggccgcccagcttgaggagttcctgaaccaggagctcgcccttctacttctggatgaatggtgaccgcatcgactccctgctggagaacgaccggcagcagacgcacatgctggatgtcatgcaggaccacttcagccgcgcgtccagcatcatagacgagctcttccaggacaggttcttcacccgggagccccaggatacctaccactacctgcccttcagcctgccccaccggaggcctcacttcttctttcccaagtcccgcatcgtccgcagcttgatgcccttctctccgtacgagcccctgaacttccacgccatgttccagcccttccttgagatgatacacgaggctcagcagggccatggacatccacttccacagcccggccttccagcacccgccaacagaattcatacgagaaggcgacgatgaccggactgtgtgccgggagatccgccacaacttccacgggctgcctgcggatgaaggaccagtgtgacaagtgccgggagatcttgtctgtggactgtttccaccaacaacccctcccaggctaagctgcggcgggagctcgacgaatccctccaggtcgctgagaggttgaccaggaaatacaacgaagctgctaaaagtcctaccagtggaagatgctcaacacctcctccttgctggagcagctgaacgagcagtttaactgggtgtcccggctggcaaacctcacgcaaggcgaaagaccagtactatctgcggggtcaccacggtggcttcccacacttctgacttcggacgttcctttccggtgtcactgaaggtggtcgtgaagctcttttgactctgatcccatcactgtgacggtcccctgtagaagtctccaggaagaaccctaaatttatggagaccgtggcggagaaaagcgctgcaggaataccgcaaaaagcaccgggaggagtgagatgtggatgttgcttttgcacctacgggggcatctgagtccagctccccccaagatgagctgcagccccccagagagagctctgcacgtcaccaagtaaccaggccccagcctccaggcccccaactccgcccagcctctccccgctctggatcctgcactctaacactcgactctgctgctcatgggaagaacagaattgctcctgcatgcaactaattcaataaaactgtcttgtgagctgaaaaaaaaaaaaaaaaaa

SEQ ID NO: 15849 - DNA, 497 bp, Homo sapiens
agctagacagagctagtcaaaatgagacctgatgtgaaaggccactagggcaccagcctttttaatctgaaagctctgcttcctctgtttctttatcctgttgctgtttgttgaccacataattatttgtttacgtcatcagctggcacagggcctttatgaggtcagagactgcctagccctgtgttcctggcacctaacaatgcctgtcataaaaacaggcattcagtacgtttttgatgatgaacaaattatacttatttccttggtatttgacaactacttgactgtatatgatgataattagaatatccactctgagaaatcatttaaaagagaaactcattcaatgcaatctcaaatgcctttactcatcacgctctcattttcttccagattcctggtgcccctgatgatgaagcagtacggatatttttagaatttgagagagttgaatcagcaattaaaggttagtggtacagctaaatattaaagaa

SEQ ID NO: 15850 - DNA, 478 bp, Homo sapiens
  misc_feature (1)...(478): n = a,t,c or g
ggtngnntntttgattccctctattnaacnctnnnnnnnnnnnnnnnnnnnnnnnnnnnnnnnnnnnnnnnnnnnnnnnnnnnnnnnnnnnnnnnnnggcacgaggcttagcctccaagtatgggctacttattttttaacaattactttcactccaagacgtacataattttttaaacatgggaatccttgatgtttcatttttgttttggaaatgatttttagagaagatgaattatcctgtctgatgccatgagatctatttttatcatttgggatgttgagactaaaactgacaacatatttagtattgcttatagtactcagtgacactgcctccctttgaagcccgccagagagccaccatgcaggaacatgagttactaattaattcaacctgctcactgggacaaaatgggaaggaagaacccacatttgacacagataaagtggagcatgttcaaagcgccaggacact

SEQ ID NO: 15851 - DNA, 558 bp, Homo sapiens
gtatataaaggattaaaaaattccaatttaatacattttggaaaagcaaatgtaaaatgacttgggcttataaaaccagcatttacaattatctgtgaatagtcaaagacaaatcatagaaccaatctgattacaaatccaaagtaattctaatgttggttacagaatcactttcccactcccccagtaaaagtccaggtgttaagttgtacacacccccatgctacacacactccttcatctccttctcagtgttttcataccccagccgcattacacacaccaggcacatcttctctttcacagagcttatcaggatggtatctccttttggcttaaaccaaccaccttgtgtttataaataacccccccacccccagtgcctgaattcatccacatcttctgccttcataggcagcctccccttggctccagttccagcaggacaggccttcctctgaaaggaagcctggggcagtgaggccacactagtcagcgttcggccctccctacaccaatcccagctgggctcctagttgtctagcctcgtgccgaatt

SEQ ID NO: 15852 - DNA, 732 bp, Homo sapiens
aattatctgctgcttgtgatcggttgctagtggaggaagaagcgaatgcgcaggtacgttgagactttgccagcccaggaggagggaagttccttggacaaaacttaggagaaacatttggtttggaaatcttaaaagatctttaggagaaaaacgtttgagtgttttctccctggagccaggatttaacagaacagagaacgatagaaccgtagtgcttgttcattttaccacctcattctttatgtggacgtttgatttaatgtgggagggaaaggcaactctggtttgaggtgtattccattcctgtgtctgcttttcaggctgaagcgcaaaagaagaaagatgaggcagaggtccaagtaaaccgctagcttgttgcaccgtggaggcccacaggagcagaaacatggaatgccagacgctggggatgctggtacaagttgtgggactgcatgctactgtctagagcttgtctcaatggatctagaacttcatcgccctctgatcgccgatcacctctgagacccaccttgctcataaacaaaatgcccatgttggtcctctgccctggacctgtgacattctggactatttctgtgtttatttgtggccgagtgtaacaaccatataataaatcacctcttccgctgttttagctgaagaggtgatttattatatggttgttacactcggacacaaataaacacagaaatagtccagaagtcgacc

SEQ ID NO: 15853 - DNA, 385 bp, Homo sapiens
gaaagaaaggggtgaaagtggaaaacagacctttcctctcaaaactcatcttcttcaatgtctctgaacatgactatgggaactacacttgcgtggcctccaacaagctgggccacaccaatgccagcatcatgctatttggtccaggcgccgtcagcgaggtgagcaacggcacgtcgaggagggcaggctgcgtctggctgctgcctcttctggtcttgcacctgcttctcaaattttgatgtgagtgccacttccccacccgggaaaggctgccgccaccaccaccaccaacacaacagcaatggcaacaccgacagcaaccaatcagatatatacaaatgaaattagaagaaacacagcctcatgggacagaaatttgagg

SEQ ID NO: 15854 - DNA, 514 bp, Homo sapiens
  misc_feature (1)...(514): n = a,t,c or g
annnntnnnnntnnnangnnnnnntnnnnanatnnnnnnngnaananntatannaagngtnnttgaantccttggaanaccgctatgacatgattacgaannnnnnnnnnnnnnnnnnnnnnnnnnnnnnnnnnnnnnnnnnnnnnnggcacgaggtggaaaacagacctttcctctcaaaactcatcttcttcaatgtctctgaacatgactatgggaactacacttgcgtggcctccaacaagctgggccacaccaatgccagcatcatgctatttgaactaaatgagcctacgagctcaactttgttgcaagaagtgaaaactacagccctgaccccttggaaaggtccaggcgccgtcagcgaggtgagcaacggcacgtcgaggagggcaggctgcgtctggctgctgcctcttctgttcttgcacctgcttctcaaattttgatgtgagtgccacttccccacctgggaaaggctgccgccaccaccaccaccaacacaacagcaatg

SEQ ID NO: 15855 - DNA, 816 bp, Homo sapiens
acagggctggctctgtgtgaagctgcagtgaaccagatgtactgcaagcagcttccactgtgggcacccgggaacatggtgactcctggaagcttagagacaccagaaacccgagtcccaaagagggtgtcacagcccttgctcagggagcccctaggtctgggttccccaaagggctgcagctcttctctccttcacttcacctgtaatgtggcaagcaaagggtacatctcagccctgtttgtattacagctctttcagtcccaccattcagtgggtcccaagttcttgtcccatgtccaggaagaatgaggtacacagacaactggagggtaagcaagaagaggtgctttattgagtgacagtacagctctcaggagacccaaagtgggtagctcctttctgcaggcaggttgtccggttgtctgtgcagccctcagtggagaggagacctggagtgggtagctcctttctgcaggcaggttgtcctgatgagtatacagccctcagcagagaggagatctggagtgggtagctcctacacgcaggcaggttgtcctgttttctgcccaagtctggctgagtctggggtttttataagcttcagaggggaggaagtacatgctgattggtccatgggcagtagaaaaagtgccataagttctcactccagtctgaggacctggcagcccagcccccaggcttcagactctcagttgcctaaaggtagggtttcactgaggacccaccccatttttgcccaggagccagtctgcctcatgccactgtccatggcaccaaggctgtttgtgcagc

SEQ ID NO: 15856 - DNA, 702 bp, Homo sapiens
acatacagaaggtccctgataaagttagtagctgccctcatcagaaaccaggcccaggcagtggggacacatccagagtgctgaaagaacctcccccaggtcatcctatccccaagagtgatgcccggcagcattcccagctcagggctaatggttcacggaagccaggaatcaaactgcctgggttccagtcccagctctgccagttatgcccagctgtggggacttgggcagctcgtttagtagcaccgtgcctcagtttcccatatgtaaaaggccattttgagtgcctttcacagccctgcataaggcaggtgtctcagtgttcactgctgtctctccagctcttagtccagtagctgcatggtgagtgagcgtagggcgcaccctggaaggctgccaagcccaaagttgtgcagagcgctggggactccagactccccacagcagcagagactcgggactgaggcatcctctgttcacaggacatgctggcatctactgggtcagggctctgctgctcggtggctgtgcaaccttgggcaagttcctcgaacctctctgtgtcttcggtaacctcatctgtaacatgcgtgtcgatagaccctactactcagggttgatgagaagattaaatgtgcaaaacctgcttgactgtgcccacaaatcctgattgtaggaataaattaatgactttttata

SEQ ID NO: 15857 - DNA, 846 bp, Homo sapiens
ggcagaggctgatcaaattcttcattgaccagagtaaaaaagatgctgagaagtatgcaaagttttttgaagattacggcctgttcatgcgggagggcattgtgaccgccaccgagcaggaggtcaaggaggacatagcaaagctgctgcactacgagtcctcggcgctgccctccgggcagctaaccagcctctcagaatacgccagccgcatgcgggccggcaccgcgcaacatctactacctgtgcgcccccaaccgtcacctggcagagcactcaccttactatgaggccatgaagaagaaagacacagaggttctcttctgctttgagcagtttgatgagctcaccctgctgcaccttcgtgagtttgacaagaagaagctgatctctgtggagacggacatagtcgtggatcactacaaggaggagaagtttgaggacaggtccccagccgccgagtgcctatcagagaaggagacggaggagctcatggcctggatgagaaatgtgctggggtcgcgtgtcaccaacgtgaaggtgaccctccgactggacacccaccctgccatggtcaccgtgctggagatgggggctgcccgccacttcctgcgcatgcagcagctggccaagacccaggaggagcgcgcacagctcctgcagcccacgctggagatcaaccccaggtgaggccacgctcctggctcttccagcctgtgggattccccagaatcctgtgtgtggtgttcttttgttgtggaatgtgacacagaagaaaagtgcgtgaggcctgtggacatgtgggtaactataaggagctgtatgcagtttaggctgcacccatgc

SEQ ID NO: 15858 - DNA, 1328 bp, Homo sapiens
  misc_feature (1)...(1328): n = a,t,c or g
ttttcttttgacttgtttgtggatggaatgtttacagacatttctaattactgctttaattaaataaattggatcaaaggccgttcgaggtatttttgttttgccgtttgtcgctcagaattggcattttgagaggtgattgatactgctaacaattttctagtactctagtttgtttcaagaagagattttgggtagacgtaatcttcacctttcaaattatataacaatacgaacattattttttatactgatcataatttccagatttggggagggggtgatcgtggcaggaaaagttgtatgtttgttagttgcatatggtgatttttgatttttcaatgctggtaggtaagtaaggaggtctctgtaccatggctcgtacaaaggnagactgcccgcaaatcgaccggtggtaaagcacccaggaagcaactggctacaaaagccgctccgnaagagtgcggccctctactggaggggtgaagaaacctcatcgttacaggcctggtactgtggcgctccgtgaaattagacgttatcagaagttcaantgaacttctgattcgcaaacttcccttcccagcgtctggtgcgagaaattgctcaggactttaaaacagatctgcgcttccagagcgcagctatcggtgctttgcaggaggcaagtgaggcctatctggttggcctttttgaagacaccaacctgtgtgctatccatgccaaacgtgtaacaattatgccaaaagacatccagctagcacgccgcatacgtggagaacgtgcttaagaatccactatgatgggaaacatttcattctcaaaaaaaaaaaaaaaaatttctcttcttcctgttattggtagttctgaacgttagatattttttttccatggggtcaaaaggtacctaagtatatgattgcgagtggaaaaataggggacagaaatcaggtattggcagtttttccattttcatttgtgtgtgaatttttaatataaatgcggagacgtaaagcattaatgcaagttaaaatgtttcagtgaacaagtttcagcgggttcaactttataataattataaataaacctgttaaatttttctggacaatgcccagcatttggatttttttaaaacaagtaaatttcttattgatggcaactaaatggtgtttgtagcatttttatcatacagtagattccatccattcactatacttttctaactgagttgtcctacatgcaagtacatgtttttaatgttgtctgtcttctgtgctgttcctgtaagtttgctattaaaatacattaaactataaaaaaaaaaaaaa

SEQ ID NO: 15859 - DNA, 534 bp, Homo sapiens
gtgcttgtagttatgctgcctggggggaaaaaagagtacagaatattcggtgagaactgaaggttattataatccagaaagagtgatggagtataaagacaacgtcttttcaaatagactttgcaagactttctgccttttcagtggtaaaggcctaagcagtggtttgctggctttgcccctctgtgggttacagaaaggcctttgccttataaatccatggagctgaaggtcacatgaagggcttgcctgcactagcttatttactctaggatcagaatcaagacctcagttaatctcagttacactagtgtggcatatttcccacctccacccatatccacccactagttctgggccccagattgttctctgaggctgggccctgcccactggtcagaacagattggcaaatgatcattccttaggacagccctggcttgtacaacaggcaggaatgaggtcagaagaaaggctattgtccccatatccttggtagatggaggcttatgttaccttctcatgttgctttaa

SEQ ID NO: 15860 - DNA, 1500 bp, Homo sapiens
ttttttttttccagattttttttttattcagtacagatgcaaagtagtagctcagaggctctgggtaatagcattcctgagattgatgacatccattacctcactagtccaacttctccagactaacgcagacttttctcttcccttggcctttcctctcctcgccattgggccaattccttcgatttctcatttcccttgaagttagggccattcacagtttcatggtcaaagccagttccaggttcaatagtctgtgatttatccaggctctgaggtatgcaccgcttctgttttgctcgttcctccaagagctagtttggccagaaaggggatgctttataccatagaacacatccaccttctagaacctgctctagaaggccaggccctcagattccacatggttggagttctggccaagtctggagctttcttcacactcggctctcagagctctgggttcagaaaaaactgagcatggtgagagaagacagtgtcagaccgaggccccctggaggacctttggaacctctgatagtctgtcataccagagcatgattttctctaatgttcagacctggcttcactgaggaatagttcaggggatcagggcctagagacaagactcccaactgccttatttccctcctgttttcctggcaaccccactacttcctccaaaggtttctgtatgcgaagttgctaggcctgctggctgagctccggagcattaatgaggcctacgggtaccaaatccagcacatccagggcctgtctgccatgatgccgctgctccaggagatctgcagctgaggccatgctcacttccttccccagctcacctggaacaccctggatacactggagtgggaaaatgctgggacccaaagattgggccgggttcaaagggagccccagtggttgccaatgaaagactaaagcaataactgccctccttcatgcggtcatggggatagtgggggtgacccataggaacaaagttgttctctggaagcacagaagatgggaaggaggaaacctcagggctaagaggtaaagaagctccttctgggaatgggtgggccccacttcctgagaccaaacatctagcccttcagccctactttcccagccttgggaggctctgggatggaaaacaggatggtcagctaatcccatgcaggattaaccaaagggaaaggaagaaggaagcctgagggcaaggggtgccgggggaattcagccataccccttaatccttctcccttagtccacagccacaagagcatggggaaggtgatactggggctggtagcagaggggggatcctcaaacctctgcctcatcaactgcccctgtggcagctccagttctgaggagggcatggtcctgtccaccactctgctcctgggtcctagagatcacccagcaaggtgggctctgaagaggggcctagtctttggccctagggcacctgactcagaggttccagctgcc

SEQ ID NO: 15861 - DNA, 803 bp, Homo sapiens
tccatactataactaccagtgacctggcccctacttcagcaatttttagaactgctgaacagagcaaaaatatcctttactagctgcaacatccaaacctcaaaaaaaggaattcctttggatgattccattcttaaaaactgaatgcacatctatttttttttttaattttgtaaaaggcctagcaacctcaaacagacaccatggtgcacctgactcctgtggagaaagtctgccgttactgccctgtggggccaaggtgaacgtggatgaagttggtggtgaggccctgggcaggctgctggtggtctacccttggacccagaggttctttgagtcctttggggatctgtccactcctgatgctgttatgggcaacccctaaggtgaaggctcatggcaaagaaagtgctcggtgcctttagtgatggcctggctcacctggacaacctcaagggcacctttgccacactgagtgagctgcactgtgaacaagctgcaccgtggatcctgagaacttcaggctccctgggcaacgtgcctggtctgtgtgctggccccatcactttggcaaagaattcaccccaccagtgcaggctgccctatcagaaagtggtggctggtgtggctaatgccctggcccacaagtatcactaagctcgctttcttgctgtccaatttctattaaaggttcctttgttccctaagtccaactactaaactgggggatattatgaagggccttgagcatctggattctgcctaataaaaaacatttattttcattgcaaaaaaaaaaaaaa

SEQ ID NO: 15862 - DNA, 3115 bp, Homo sapiens
tgcttatggcggcgctggagagggggcgctgagctgttgggtatgaagtgtaacagaacagactttaccacctgaaactgctgcttcaagttcagatcaggcaaggaacaaacctcgtaacaactaacaagaccaaagaagagtacacttaagttgaagacacaacacttgatctgaaacaagaagtttgtgcctactcaacagctttgaaagagcacttcccaacgctgctagtagtctttgttttcttcagtgctgtactgtgagattgcccggtacagcagcagttgtattctttattaagcttggtagatcattttctctccgctcttttttttaatactagcaactttcatcctttgaaacgtgtgctgaaaaagaagaatcagcaaatactactgaaagtgcaatatttgagtatcactgcgagatgagctttgatccaaaccttctccacaacaatggacataatgggtaccctaatggtacttcagcagcactgcgtgaaactggggttattgaaaaactgttaacctcttacggatttattcagtgttcagaacgtcaagctagacttttcttccactgttcacagtataatggcaacctgcaagacttaaaagtaggagatgatgttgaatttgaagtatcatcggaccgacggactgggaaaccccattgctgttaaactggtgaagataaaacaagaaatcctccctgaagaacgaatgaatggacaagaagtgttttatctgacttacacccctgaagatgtcgaagggaacgttcagctggaaactggagataaaataaactttgtaattgataacaataaacatactggtgctgtaagtgctcgcaacattatgctgttgaaaaagaaacaagcccgctgtcagggagtagtttgtgccatgaaggaggcatttggctttattgaaagaggtgatgttgtaaaagagatattctttcactatagtgaatttaagggtgacttagaaaccttacaggcctggcgactgatgtggaattcacaatcaaggacagaaatggtaaagaagttgcaacagatgtcagactattgcctcaaggaacagtcatttttgaagatatcagcattgaacattttgaaggaactgtaaccaaagttatcccaaaagtacccagtaaaaaccagaatgacccattgccaggacgcatcaaagttgactttgtgatccctaaagaacttccctttggagacaaagatacgaaatccaaggtgaccctgctggaaggtgaccatgttaggtttaatatttcaacagaccgacgtgacaaattagagcgagcaaccaatatagaagttctgtcaaatacatttcagtttcactaatgaagcccgagaaatgggtgtgattgctgccatgagagatggttttggtttcatcaagtgtgtggatcgtgatgttccgtatgttccttcccacttccagtgaaattctggatgggaaccagctccatattgcagatgaagtagagtttactgtggttcctgatatgctctctgctcaaagaaatcatgctattaggattaaaaaacttcccaagggcacggtttcatttcattcccattcagatcaccgttttctgggcacggtagaaaaagaagccactttttccaatcctaaaaccactagcccaaataaaggcaaagagaaggaggctgaggatggcattattgcttatgatgactgtggggtgaaactgactattgcttttcaagccaaggatgtggaaggatctacttctcctcaaataggagataaggttgaatttagtattagtgacaaacagaggcctggacagcaggttgcaacttgtgtgcgacttttaggtcgtaattctaactccaagaggctcttgggttatgtggcaactctgaaggataattttggatttattgaaacagccaatcatgataaggaaatctttttccattacagtgagttctctggtgatgttgatagcctggaactgggggacatggtccgagtatagcttgtccaaaggcaaaggcaacaaagtcagtgcagaaaaagtgaacaaaacacactcagtgaatggcattactgaggaagctgatcccaccatttactctggcaaagtaattcgccccctgaggagtgttgatccaacacagactgagtaccaaggaatgattgagattgtggaggagggcgatatgaaaggtgaggtctatccatttggcatcgttgggatggccaacaaaggggattgccctgcagaaaggggagagcgtcaagttccaattgtgtgtcctgggccaaaatgcacaaactatggcttacaacatcacacccctgcgcagggccacagtggaatgtgtgaaagatcagtttggcttcattaactatgaagtaggagatagcaagaagctctttttccatgtgaaagaagttcaggatggcattgagctacaggcaggagatgaggtggagttctcagtgattcttaatcagcgcactggcaagtgcagcgcctgtaatgtttggcgagtctgtgaggggccccaaggctgttgcagctcctcgacctgatcggttggtcaatcgcttgaagaatatcactctggatgatgccagtgctcctcgcctaatggttcttcgtcagccaaggggaccagataactcaatggggtttggtgcagaaagaaagatccgtcaagctggtgtcattgactaaccacatccacaaagcacaccattaatccactatgatcaagttggggggaatctggtgaagggttctgaatatctccctcttcatccctcccgaaatctggaatacttattctattgagctattacaccagttttaacaccttcctcgtgttatgtttaaaaaaataaataaatttaagaaaaccattttaaataatgcacagttgcagcctggaaaaacttaaggtggcgccttatagtatcaattttaggagctttatttggtgcatttaacgcaactggtaattgcagaatccactttgcctgtgtaagtgaaaaatatagactgttatcttgttgggccctatgaaattctgcacttttccattata

SEQ ID NO: 15863 - DNA, 926 bp, Homo sapiens
cagacttggctgattgatctaagaaactttattgctcagaaccttccctccctgggcaatggaaagagctttggagaccagcccatggggacagagtcagaggcactgggtgtaaaaaagagcgagcgtgtggcacatttggtccattgtcatgtgcgggtatggcaggaggagggggtaatctagaagccccacatctagggccttctagggacccagatatgcccccttaggcaaggctcacatgccaaagcaaagcagatgaggtcagcctggcttgggttgagggctcagtgcctcttagccttgccctggggttcttggaccttccggaaactgagccacatcaggctcacgttgatagcataggtggtgatacaaacaatgcagaaatcatagagcacgaagaacaggatccaggccaggtagacagaaccagcgagagacaccagggagctcagcagcatcaggacagaggcccagcgtgtccgcaggcaacctaacaatagctgtagtgtgtagaagatgcaaccgaatatgctgttggattgattgaggatgctgtcctgtcccagcacatgctccaccagcccgaaacccctgccccacctggaggagaagacgcgcgaacagctgatggcggtgcccacgtcgcagagcgcgcggtaatcccggtcccgggcgcgcgccgccttcacgtgcagcgcgtagagcgagagcactaagcccgtcaggcaaagagcgagccgcacccagccagggctcccccaggtgctgcccattatctccaggttccgcccgaggcgcccgcggagaaaaccagccacggagcaggggcctggcggcgaatggccgcgcccctcctggccctctgactcggcgattggccggccgtgctcgcactccacgacccaaatggctgttcc

SEQ ID NO: 15864 - DNA, 3085 bp, Homo sapiens
  misc_feature (1)...(3085): n = a,t,c or g
gggctcgcgggctcctcagagccggggcccgggaccttgagtcagacgcgcatgtgtaagggaggagaggcggcggcgacaccatgtcatctcccagtccgggcaagaggcggatggacacggacgtggtcaagctcatcgagagtaaacatgaggttacgatcctgggaggacttaatgaatttgtagtgaagtgttatggaccacaaggaacaccatatgaaggcgggtatggaaagttagagtggacctacctgataaataccctttcaaatctccatctataggattcatgaataaaaattttccatccccaacattgatgaagcgtcgggaactggtgtgtctagatgtaattaatcaaacttggacagctctctatgatcttaccaatatatttgagtccttcctgcctcaggttattggcctatcctaaccccatagatcctctcaatggtgaccgctgcagcccatgtacctccaccgaccagaagaatacaagcagaaaattaaagagtacatccagaaatacgccacggaggaggcgctgaaagaacaggaagagggtaccggggacagctcatcggagagctctatgtctgacttttccgaagatgaggcccaggatatggagttgtagtagaaaaagcacctgcttttcagaaagactattatttcctaaccatgagaagcagactataatattcatatttaaacaaagcaattttttttattactaaaacaaggtttttatgaataatagcattgatatatatatattatatatcaccctttagatcttgatttcttggtcatttctcaacctgaggtgcatagcatattcccacattccatttggtagcaatatgcggtctgaatgcatgcattcatgagtccatgtggccaagtcagcctgtgtgctactgaactgtcgaaggaaatagccgctctgataggtagatgtgagtaaaaagaacaggaaaaaattgcttcttttattggtttccaaagaaacaaaccaaaccaaccagctcttggatgtgaagataaaatagtgcttttttgaaatggagaggaaaaacttggggaggaagaggcctgctgtgggggcatcggagccagccatgtaagaatcagagctgctccttcctgtgaatcctaggtggccctatgtcttctgtggagttacagtataaagcagggagctaattaagagtattaaaacttaaaaccattttttgactctgattttaagtacatttttatatgtcagttgctgcccttcacactaccaggccctgcagccacagtgttctgttggagaaacttggggaagtgttttctgaaccagttctttttcttggggtagagcgtgaaatccagacctgtttttgaaaggacagcacaggaggagaaaagtgactgggacgatgcttcctctcatccaaaacacatgcagagtcacatcctcatcctagtgtttggcagtttgagaccgctaccctgaacttaagagctttaaatatgagggttgtgtttctgggggggttatttttttggtgtgtgtgtgtgtgtattgtgcttagaaaggtttgcagaattcatcttcacctaccaagaggcggccgcctcctttggacaagccgctcatggaccattagacttgagaagacgacccacgtggtgactgcaaagccctgggtacttgccttcatgttctggtttggttttccctttttctgctgctcttgggcacagcctggtcatcatctgcttgtgggagtgggaaatgggtattttagacccaacacaggttctaaatttaaaacaaataataattggaacaaataaaggttcttgtacccagagtgattctacatgggaaaaacaaaccagcttttttcagagagtgaccgaataggaagaagggattcagaaatatgatgtagtagaacactggcccctgcaggaagaaaatgttttctctcctgcgtatgttaagaggaaatcagtttaaaatgccctggctaatgcnaatgtcgactcagctaaccatatgtcccaggttgctggcagagtttctttcaaatctgagtgttgccctggctgaactcggaggggagtttggagaaattttagacagcagctctgtgttctttttttgccgcagcccaataagataatagcagaattagccaatcctaaaaccttctaaagacgatttttgagcatcccactgggattatttaatttttttttttgacgtgtgtttttagtttagaagtgctgtattccacaaggtttaagtcagtgaggttggaagataccctatcttttttattcaaaaagcacaatcaatcttttgtttgaaaatctatataaagtacaacttgcttttagcatgattattttcctaaataaaaagacaaagaatttacttactttatgttaattacgggcatgaagcaaaaggttttctttaaaaaaaaaaaaaaaagtgcagtgatgtagggctgtggttagttaaccgtactgagttatccatctagcatctgtggcttgctggaagggtagtattaactatttaacatgtaatggtgtacttcactcttacctagcacgctgtcttctcattgctttgggggagggagggtctctctgctggcactgtctaacttgcttacctgctgactttgcagtttgcttgtgctatgacatttattgtaggtgctatttagggtaggcttaaagtgctgggtggtgatttgagttcaaacaataaaaaattgtattttttcaatattgtataaacaatagtgttctaattaccttaaaaaaaaataatgaccagttaagaattgcttttgatcttgtcaaaaaactgaatagaccccagtttcgggaaggtgtgtgagcagtgccatgactctgccccttacctaatcccacatctctctaatgataagacattggctcgcctctgaccagagccccagcaccagagagcgggaaggatgcaggaattgtccaaatgacctgctggggggaggttgtagggagttttagcaggatttgagtgtggctg

SEQ ID NO: 15865 - DNA, 694 bp, Homo sapiens
  misc_feature (1)...(694): n = a,t,c or g
ggcacgagcacactgggaaacatcattaaatcnnnnnnnnnnnnnnnnnnnnnnnnnnnnnnnnnnnnnnnnnnnnnnnnnnnnnnnnnnnnnnnnnnnnnnnnnnnnnnnnnnnnnnnnnnnnnnnnnnnnnnnnnnnnnnnnnnnnnnnnnnnnnnnnnnnnnnnnnnnnnnnnnnnnnnnnnnnnnnnnnnnnnnggacccttctggttgaaggaatgcagccattctgcttgtttgactatgtcctttctattcatctctatttcctgggaggtgtttatccaagtgcaataggaggtattggtgaccgcacagtcccctcagtgttctgctagtaaatagttgaaggttgatcattgatcttctgcgttttcagtctggcatggaaaagcccctgtgcaactggtaaagatatcaataagcaccaggaggtatctaaatccaccaggagccataggcatcacgttgacgtccatttaccagtcttccctggcaagattcttctgaattgtgctgccttggccaaaagaggtatgggaggnnnnnnnnnnnnnnnnnnnnnnnnnnnnnnnnnnnnnnnnnnnnnnnnnnnnnnnnnnnnnnnnnnnnnnnnnnnnnnnnnnnnnnnnnnnnnnnnnnnnnnnnnnnnnnnnnnnnnnnnnnnnnnnnnnnnnnnnnnnnnnntttgggg

SEQ ID NO: 15866 - DNA, 629 bp, Homo sapiens
  misc_feature (1)...(629): n = a,t,c or g
tttgaagaccnnnnnnnnnnnnnnnnnnnnnnnnnnnnnnnnnnnnnnnnnnnnnnnnnnnnnggcacgagcgtggacaaggagaacctcaccatgccgggcctcaggttcgacaacatccagggagatgcagttaaagacttgatgcttcgctttctgggtgaaaaagctgcagcaaagagacaagtcctaaatgccgactcagtggaacaatcttttgttggattgaaacagctaatcagctgcagaaactggagggcagcagtggacctgtgcggacgtctcctcacagcccacggccagggctacggcaagagcgggctgctcaccagccacacgacagattcactgcagctctggtttgtcaggctggcactactagtgaagttgggccttttccagaatgctgagatggaatttgaacccttcggaaatcttgatcagccagatctttattacgagtactacccgcacgtgtaccctgggcgcaggggctccatggtccccttctcgatgcgcatcttgcacgcggagcttcagcagtacctggggaacccacaggagtcgctggatagactgcacaaggtgaagactgtctgcagcaagatcctggccaatttggagcaagg

SEQ ID NO: 15867 - DNA, 1802 bp, Homo sapiens
  misc_feature (1)...(1802): n = a,t,c or g
gacacagtggttggtgacgggacagagcggtcggtgacagcctcaagggcttcagcaccgcgcccatggcagagccagacccctctcaccctctggagacccaggcagggaaggtgcaggaggctcaggactcagattcagactctgagggaggagccgctggtggagaagcagacatggacttcctgcggaacttattctcccagacgctcagcctgggcagccagaaggagcgtctgctggacgagctgaccttggaaggggtggcccggtacatgcagagcgaacgctgtcgcagagtcatctgtttggtgggagctggaatctccacatccgcaggcatccccgactttcgctctccatccaccggcctctatgacaacctagagaagtaccatcttccctacccagaggccatcttttgagatcagctattttcaagaaacatccggaacccttcttcgccctcgccaaggaactctatcctggggcagttcaagccaaccatctgtcactacttcatgcgcctgctgaaggacaaggggctactcctgcgctgctacacgcagaacatagataccctggagcgaatagccggggctggaacagggaggacttggtggaggcgcacggcaccttctacacatcacactgcgtcagcgccagctgccgggcacgaatacccgctaagctggatgaaagagaagatcttctctgaggtgacgcccaagtgtgaagactgtcagagcctggtgaagcctgatatcgtctttttttggtgagagcctcccagcgcgtttcttctcctgtatgcagtcagacttcctgaaggtggacctcctcctggtcatgggtacctccttgcaggtgcagccctttgcctccctcatcagcaaggcacccctctccacccctcgcctgctcatcaacaaggagaaagctgggccagtcggaccctttcctgggggatgattatggggcctcggaggaggcatggactttgactccaagaaggcctacagggacgtggcctggctgggtgaatgcgaccagggctgcctgggcccttgctgagctccttggatggaagaaggagctggaggaccttgtccggagggagcacggccagcatagatgcccagtcgggggcggggggtcccaaccccagcacttcagcttcccccaagaagtccccgccacctgccaaggacgaggccaggacaacagagagggagaaaccccagtgacagctgcatctcccaggcgggatgcgaagctcctcagggacagctgagccccaaccgggcctggccccctcttaaccagcagttcttgtctggggagctcagaacatcccccaatctcttacagctccctccccaaaactggggtcccagcaaccctggcccccaaccccagcaaatctctaacacctcctagaggccaaggcttaaacaggcatctctaccagcccccactgtctctaaccactcctgggctaaggagtaacctccctcaatctctaactgcccccacgcgcaagcggctaccccagaactttttaactcttccaggacagggagcttcgggcccccactctgtctcctgcccccgggggcctggtggtaaagtaaaccatacctaacctaccccagtgtgggtgtgggcctctgaatctaacccacacccagcgtaggggggagtttggagccgggagggctcccggagttttctggcctttcagttcccaaagtggggtggtggggccctttcaagtgggaaccacttncccatggtggatt

SEQ ID NO: 15868 - DNA, 2260 bp, Homo sapiens
  misc_feature (1)...(2260): n = a,t,c or g
aagcttctgatatctatttaactgatttcacccaaatgctttgaacctgggaatgtacctctccccctcccccacccccaacaggagtgagacaagggccagggctattgcccctgctgactcaatattggctaatcactgcctagaactgataaggtgatcaaatgaccaggtgccttcaacctttaccctggtagaagcctcttattcacctcttttcctgccagagccctccattgggaggggacgggcggaagctgttttctgaatttgttttactgggggtagggtatgttcagtgatcagcatccaggtcattctgggctctcctgttttctccccgtctcattacacattaactcaaaaacggacaagatcatttacacttgccctcttacccgaccctcattcccctaacccccatagccctcaaccctgtccctgatttcaattcctttctcctttcttctgctccccaatatctctctgccaagttgcagtaaagtgggataaggttgagagatgagatctacccataatggaataaagacaccatgagctttccatggtatgatgggttgatggtattccatgggttgatatgtcagagctttccagagaaataacttggaatcctgcttcctgttgcattcaagtccaaggacctcagatctaaaagaatgaacctcaaatatacctgaagtgtacccccttagcctccactaagagctgtaccccctgcctctcaccccatcaccatgagtcttccatgtgcttgtcctctcctcccccatttctccaacttgtttatcctcacataatccctgccccactgggcccatccatagtccctgtcacctgacagggggtgggtaaacagacaggtatatagccccttcctctccagccagggcaggcacagacaccaaggacagagacgctggctaggtaagataaggaggcaagatgtgtgagcagcatccaaagaggcctgggcttcagttgtggagagggagagagccaggttggaatgggcagcaggtagggagatccctggggaggagctgaagcccatttggcttcagtgtcccccaaacccccaccaccctcttcctaggccgccctccccactgttaccaacatgaagctgctcgcagcaactgtgctactcctcaccatctgcagccttgaaggtgggtgtgatatggagagggggccaaaagggagaatgtgctggtggttatagctacctatctgcctgtgctcttatatccaggtctggcaaccaaagggctcaaaaggaagatcattccctctctaaagcccagaaagcccatccaaagatctggctggatacctttttggggagggggcagagagctggggtgggtactggcagaggtatggcaggaggccaggattcactgctgtggacccagctgaaaannnnnnnnnnnnnnnnnnnnnnnnnnnnnnnnnnnnnnnnnagctttggttcggagacaggcaaaggagccatgtgtggagagcctggtttctcagtacttccagaccgtgactgactatggcaaggacctgatggagaaggtcaagagcccagagcttcaggccgaggccaagtaagtctcagggcaaggggttcaggggctgtggaactgtggagagaaagaagggaagatgagaggtcccacagaagtctgaacccaggggtggggattagggcagattaggcttaaattgcagagaaaaagtatttcatcacccaaagatcccacacgtctcttagatagagaggaacagcaagaactgggccttgaatttcagtctctagagtctgtccctctacctagcaaaggtcttgactctattcctacctaggggctttgccatggcgatggaccaggcactagagtttggggacctgagtcagtctgctctgacctcccaccaccaccaaggcccctgcctgtgcctagggtccctcagattaaactctaatcccctcacctatccaagtcttactttgaaaagtcaaaggagcagctgacacccctgatcaagaaggctggaacggaactggttaacttcttgagctatttcgtggaacttggaacacagcctgccacccagtgaagtgtccagaccattgtcttccaaccccagctggcctctagaacacccactggccagtcctagagctcctgtccctacccactctttgctacaataaatgctgaatgaatccaaaaaaaaaaaaaaa

SEQ ID NO: 15869 - DNA, 361 bp, Homo sapiens
  misc_feature (1)...(361): n = a,t,c or g
agcaacctcaaacagacaccatggtgcacctgactcctgaggagaagtctgccgttactgccctgtggggcaaggtgaacgtggatgaagttggtggtgaggccctgggcaggctgctggtggtctacccttggacccagaggttctttgagtcctttggggatctgtccacctttgccacactgagtgagctgcactgtgacaagctgctcgtggatcctgagaacttcaggctcctgggcaacgtgctgatctgtgtgctgacccatcactttggcaaagaattcaccctaccagtgcaggctgnctatcagaaagtgntggctggtgnggctaatgccctgnccacaagtatactaag

SEQ ID NO: 15870 - DNA, 367 bp, Homo sapiens
  misc_feature (1)...(367): n = a,t,c or g
ggaagatggctactctggagttgaggtgcgagttacaccaaccaggacagaaatcattatcttagccaccatgaacacagaatgttcttggtgagaagggccggcggattcgggaactgactgctgtagttcagaagaggtttggctttccagagggcagtgtagagctttatgctgaaanccaggcacatnctctgctgttaccnnctcctagnagggcttgctntgcnnntggcctgctatggtganctggnggncatcatgcagagngcggccactntntnngntgtntcactggagctannctccntggtgngangngnanganatnanntttnnnnnnnnngngnngnncnantntgagctc

SEQ ID NO: 15871 - DNA, 1644 bp, Homo sapiens
gagctgggaggctgcgagatccctaccgcagtagccgcctctgccgccgcggagcttcccgaacctcttcagccgcccggagccgctcccggagcccggccgtagaggctgcaatcgcagcggcgagcccgcagcccgcgccccgagcccgccgccgcccttcgagggcgccccaggccgcgccatggtgaaggtgacgttcaactccgctctggcccagaaggaggccaagaaggacgagcccaagagcggcgaggaggcgctcatcatcccccccgacgccgtcgcggtggactgcaaggacccagatgatgtggtaccagttggccaaagaagagcctggtgttggtgcatgtgctttggactagcatttatgcttgcaggtgttattctaggaggagcatacttgtacaaatattttgcacttcaaccagatgacgtgtactactgtggaataaagtacatcaaagatgatgtcatcttaaatgagccctctgcagatgccccagctgctctctaccagacaattgaagaaaatattaaaatctttgaagaagaagaagttgaatttatcagtgtgcctgtcccagagtttgcagatagtgatcctgccaacattgttcatgactttaacaagaaacttacagcctatttagatcttaacctggataagtgctatgtgatccctctgaacacttccattgttatgccacccagaaacctactggagttacttattaacatcaaggctggaacctatttgcctcagtcctatctgattcatgagcacatggttattactggatcgcattgaaaacattgatcacctgggtttctttatttatcgactgtgtcatgacaaggaaacttacaaaactgcaacgcagagaaactattaaaggtattcagaaacgtgaagccagcaattgtttcgcaattcggcattttgaaaacaaatttgccgtggaaactttaatttgttcttgaacagtcaagaaaaacattattgaggaaaattaatatcacagcataaccccaccctttacattttgtgcagtgattattttttaaagtcttctttcatgtaagtagcaaacagggctttactatcttttcatctcattaattcaattaaaaccattaccttaaaatttttttctttcgaagtgtggtgtcttttatatttgaattagtaactgtatgaagtcatagataatagtacatgtcaccttaggtagtaggaagaattacaatttctttaaatcatttatctggatttttatgttttattagcattttcaagaagacggattatctagagaataatcatatatatgcatacgtaaaaatggaccacagtgacttatttgtagttgttagttgccctgctacctagtttgttagtgcatttgagcacacattttaattttcctctaattaaaatgtgcagtattttcagtgtcaaatatatttaactatttagagaatgatttccacctttatgttttaatatcctaggcatctgctgtaataatattttagaaaatgtttggaatttaagaaataacttgtgttactaatttgtataacccatatctgtgcaatggaatataaatatcacaaagttgtttaactaaaaaaaaa

SEQ ID NO: 15872 - DNA, 536 bp, Homo sapiens
ttttttttaaaaaatcatttaattacaagaaaattagccagaaaattacatagtttcaaacaaatattgtctataaaaacaagtgttcatttaccatctttttaaatttatcttttaaataatgtctcatctactgaacctagcctttcctggcaaacattagaatatacaagttttcttcatgtttaatatttcataaaacagaactggcttttgttcctgaagttagaatgatgcctatcattttgcttcagagaaactttaaaattgactatttcaattaaccactccccaaatccaatgcaaaaacaacaaaaaacaaaagcccaagttcatgcagctgtggcagagttacagttctgtggtttcatgttagttaccttatagttactgtgtaattagtgccacttaatgtatgttaccaaaaataaatatatctaccccagactagatgtagtattttttgtataattggatttcctaatactgtcatcctcaaagaaagtgtattggttttttaaaaaagaaagtgtatt

SEQ ID NO: 15873 - DNA, 3230 bp, Homo sapiens
  misc_feature (1)...(3230): n = a,t,c or g
ccgtgagaaagatccacctacgacctcaggtcctcagaccaaccagcccaaggaacatctcaccaatttcaaatccggtaagcggctctttttactctcttctccaacctccntcactatccttcaacctctttctcctttcaatcttggcgccacaattcaatctctcccttctcttaatttcaattcctttcattttctggtagagacaaaggagacacgttttatccgtggacccaaaactccggcgccggtcacgacctgggaaggcagccttcccttggtgtttaatcattgcagggatgcctctctgattatacacccacgtttcaagggtgtcagaccacgcagggacaactgccttggtccttcacccttagcggcaagtcccgctttcctggggcaggggcaagtacccctcaaccccttctctccgtgtctctaccccttctctgcttttctaggggaggggtaagtaccccaaccccttctctccgtgtctctactccttctctgcttttctggggacagggcaagtaccccaaccccttctctccttgtctctaccccttctctgcttttctggggcaggggcaagtacccctcaaccccttctccttcacccttagcggtaagtcccgctttcctagggggcaagaaccccccaatcgcttatttccgccgcaccccaacctcttatctctgtgccccaatcacttatttctgcaccctgacctcttatctctgtgccccaatcccttatttccctgccccaaccccttctctgctttcctggagggcaagaaccctccgccccttctccctgtctctactcttttctctgggcttgcctccttcactatgggcaaccttccaccctccattcctccttcttctcccttagcctgtgttctcaaaaacttaaaacctcttcaactcacatctgacctaaaacctaaatgccttattttcttctgcaatgccgcttgaccccaatacaaactcaacagtagttccaaatagccagaaaatggcactttcaatttttccaccctacaagatctaaataattcttggcgtaaaatgggcaaatggtgtgaggtgcctgacgtccaggcattcttttacacatcagtcccttcctagtctctgtgcccagtgcaactcgtcccaaatcttccttctttccctcccacctgtcccctcagtcccaaccccaagcgtcactgagtctttctaatcttccttttctacagacccatctgacctctcccttcctccccaggctgctccttggccaggccgagctaggtcccaattcttcctcagcctctgctcctccaccctgtaatctttttatcgcctcccctcctcacacctggtccggcttacagtttcgttccgtgactagccctcccccacctgcccagcaatttactcttaaaaaggtggctggagctaaaggcatagtcaaggttaatgctcctttttctttatcccaaatcagatagcatttaggctctttttcatcaaatataaaaatccagcccagttcatggctcgttcggcagcaaccctgagacactttacagccctagaccctaaaaggtcaaaaggccatcttattctcaaaatacattttattagccaatctgctcccgacattaaataaaactccaaaaattagattccggccctcaaaccccacaacaggatttaattaacctcaccttcaaggtgtacaataatagaaaaaagttgcaattccttgcctccactgtgagacaaaccccagccacatctccagcacacaagaacttccaaacgcctgaaccggcagcggccaggcgttactccagaaccttctcccccaggagcttgcttcaagtgccagaaatctggccactgggccaaggaatgcctgcagcccgggattcctcctaagccgcgtcccatctgtgtgggaccccactgaaaatcggactgttcaactcacctggcagccactcccagagcccctggaactctggcccaaggctctctgactgactccttcccagatcttctcggcttagcggctgaagactgacactgcccgatcgcctcggaagccccctagaccatcacggatgccgagcttcgggtaactctcacagtggaaggtaagcccgtccccttcttaatcaatacggaggctacccactccacattaccttcttttcaagggcctgtttcccttgcctccataactgttgtgggtattgacagccaggcttctaaacctcttaaaactccccaactctggtgccaacttagacaatactcttttaagcactcctttttagttatccccacctgcccagttcccttattaggctgagacactttaactaaattatctgcttccctgactattcctggactacagctatatctcattgctgcccttcttcccaatccaaagcctcctttgcgtcctcctcttgtatccccccaccttaacccacaagtataagatacctctactccctccttggtgaccgatcatgcaccccttaccatctcattaaaacctaatcacccttaccgcactcaatgccaatatcccatcccacagcatgctttaaaaagattaaagcctgttatcactcgcctgctacagcatggccttttaaagcctataaactctccttacaattcccccattttacctgtcctaaaacgagacaagccttacaagttagttcaggatctgcgccttatcaaccaaattgttttgcctatccaccccgtggtggccaaacccatatactctcctatcctcaatacctccctctactacccattattctgttctggatctcagacatgctttctttactattgctttgcacccttcatcccagcctctctttgccttcacttagactgaccctgacacccattaggctcaacaaattacctgggctgcactgccacaaggcttcacagacagcccccattacttcagtgaagcccaaatttcatcctcatctgttagtcatactcccgttcaccgttctcaactactcatacatgccctgctcttctttacactgccggtttacactgtttctccaagacatcacagctgatatctcctggtgctatccccaaactgccactctaaactcttgaagtaaataaataatctttgctggcaggactctgctgaatctccttaggcactc

SEQ ID NO: 15874 - DNA, 389 bp, Homo sapiens
  misc_feature (1)...(389): n = a,t,c or g
gttcaggttggcactaaggtgcccagtggtcagatgagcagcctcaggtttgcaggagccagtagttcctgtcttgctcctgggggtacttccagaaaagccagaagcggataaagctggtgacgattcctggaaagttggacaccatgatatagggatctctgagtcgaaacccatagaggcaccaggaggcagaggtgagaagggtagcaatggtgagtgggtaggagagacattgggttgatttagtttgaatcaccttagccaagtcagccagtggtgagaggtacatgctgatggtgaagacactgcagaagaggccgtcgacgcggccgcgaattccnnnnnnnnnnnnnnnnnnnnnnnnnnnnnnnnnnnnnnnnnnnnnn

SEQ ID NO: 15875 - DNA, 460 bp, Homo sapiens
gtggaggcgggcggctttctggactcgctcatttacggagcatgcgtggtcttcacccttggcatgttctccgccggcctctcggacctcaggcacatgcgaatgacccggagtgtggacaacgtccagttcctgccctttctcaccacggaagtcaacaacctgggctggctgagttatggggctttgaagggagacgggatcctcatcgtcgtcaacacagtgggtgctgcgcttcagaccctgtatatcttggcatatctgcattactgccctcggaaggctaaggtgattcaaactaaatcaacccaatgtctctcctacccactcaccattgctacccttctcacctctgcctcctggtgcctctatgggtttcgactcagagatccctatatcatgcagttcttgtgatttcaggtgtccaactttccaggaatcgtcaccagctttatccgtt

SEQ ID NO: 15876 - DNA, 392 bp, Homo sapiens
tcaagcagggagagagaactggccagggtataaaaagggcccacaagagaccggctctaggatcccaaggcccaactccccgaaccactcagggtcctgtggacagctcacctagtggcaatggctgcaggtaagcgcccctaaaatccctttgggcacaacgtgtcctgaggggagaggcggcgccctgcagatgggacgggggcactaacctcaggtttggggcttctgaatgtgaatatcgccatctaaggccagatatttggccaatctctgaatgttcctggtccctggagggatggagagagagaaaaaaaacaaacagctcctggagcagggagagcgctggcctcttcctctccggctccctccattgccctccggtttctccc

SEQ ID NO: 15877 - DNA, 1630 bp, Homo sapiens
gctcgactttttttttttttttcaatatcacacagtggcctcagccaatgttagtttgcacagccaggggttcctgccacaaacagcagttttcgattatcagtagctgtttccctctagcctgggcaggggctgagagagacacacacagaaatatgatatttcagactcctttgagatctgaagaaatcatttcctcctttcttgccatctccataagaccacctctggaagtatgctatgctcaacttatactcacacatacagatttgctcataggttgaacagtgaagtttaagtaaaacccattgcacagactgttcctttcatcacagacacaaagaaggtgagagtaagatgctatcaaggaactagccaatcttggaccaagcgtacatgctcccttccttcttactccatggaagagactgctccatgggcctctcctggacctgttgccacggggagatttaggaggccatccaaggagtgactgagccttggccctcttccatggctacaggaatattgttcctgcaggtactatccagatttcagctctagatgtaactgaaaaaacctgaaactctgaggaaaggaatctaaggcttatagtgcttgagtactgatggggaacaactgcagcgaacagcaccagggaagctggaggatgctcagtaggtgaatcgcatcttttgtgagtagcccagtttgtccaagttgggatggcaggccagctgcaccattgggggtggcccacaaagcagtaccagcacatcatcccctggagcgggcaggtgttcccggatcatgtcggcagtcacaaagcccttgctgtaggcccaatcttttgggggatgatccagagtgaaccagagcttaaagcgattgggatagcgggcctgcagttcctctaagtcctcccgcaagatgatatccttttctgtctggttggcaaaaagcagaaagcactgggttggatcttcagggactttcaggatggcccggatcagctgtagcattggggtgattcctgtcccgccggcaatcattcccagtttcttcgccactcggggttctggtggagatttcttgttgggctgaatgttaaaatgcccttttccagtgtaagtgagcaacccgcttggcccccgaaactccaccacatccccaaccttcaggctatccaggtactgagacatcttccctccctcaggaaatttggggtgcaacacccttcaggtagaccttgatgacaagatccacatagccttgatcctcatcactggtgacaggagtgtatggcctgatgaccaggctgccatcaattcgggtggagaggtagatatgtttcccacaggcagccccagagtgtggtgggcggtgggcagggcaaagcggaacctcttggtgttgtggctcacagtcgtcttgtctagcagtcgtagcaggtacttttcattggggtccaggagagtgacctgaggccggcgggacctccgaaccaagtaggagcccacagccaggccgagcagagtgaccagccccacccccagggaggccagcaggacggggctcgtctggatccccatgacggagcgccttttcctccaccacctgacaagccgac

SEQ ID NO: 15878 - DNA, 1169 bp, Homo sapiens
  misc_feature (1)...(1169): n = a,t,c or g
tttttttttttcagattcctctacagtttattgttatagcagaagttgtgggagacgggagggcaccctccacacatactacagtgtggtcagagccccagggtagccctttccaccctatgccaagccccaagcagcccagcccaagcttagctccctccccagtcccactctagatgcacactgagctaccaaagttagtgcagccaaacggccccaggccccttcctgttgccccagcaccaatccttccccacactcgttcactgcccgccaactcccattccaacttcctttttacactggatgtttctatcacatcctgaggaccactaacccaccagcaagtctccccctgacacacattcacgtagggtccatacccttcagagtcctaaagggttaatgagaagccacctcagctttggtgaatggagccccagccccaaatcccctccccttgcaaatatgggacaagtagggagagtctgatggaggcaccaggacaactacaacaacctcttacccctcagctatagacacctagatcaggacagaggatgcatatgccctctccaccttaacatcaaaatgggggaggaggagaatttaggggtctggggtccctaagagatattaggacatctcttcccaggagctggggggaatcacgggttaaaggtcaaggttagggtagcaatcaaagatcaaggtcatctccccgcatgatctgccctttttcccttgcttacggtggcccaatgccccttcagcacctcccaggttagctctgggggaggtgagggctgggtcccactctagggcaacaagggccattcaacaggagacctccatggtgtgccccgggggccccgaagaaagagttccagactcgctgctctgggacagggtgcgagagcgggaccggttgccatcaacggatgctgcactggtcagagaggctgtacgagaccgggacaggcgagtcatgcaggatgaggccatgtagcccatgccttgcaggaagtacttgaaggcctcggtcagcttgcctggctgagtcagctggggctgacctccggagtcagccatcttgaggaacgaggtctgggtggggtccagttttgagttacattccaccantgcatcttcatgaggtgctttggtcc

SEQ ID NO: 15879 - DNA, 476 bp, Homo sapiens
  misc_feature (1)...(476): n = a,t,c or g
tccccntttnacaactgaaactctttggaacatccnnnnnnnnnnnnnnnnnnnnnnnnnnnnnnnnnnnnnnnnnnnnnnnnnnnnnnnggcacgaggtgtggagatgtcaagctagttcacactctgaggctcagaatatgtaggacatgcacaattgtgcagtcctttgggattggaagtgaaacagtctgtgatcccctaccttctagggaactaggacctaggaagaggtaaagattatcaggtatgcaaagcgccccaattcttctgctgccatgggggattttaccccaactccagggttcgaggccaatctgagaatggcttaggattgcaatgtcaaggtattatatcagccccttgcttgaggcttgaggtcataatatccctctaggacttacctgttcccccagatcttgccttgggaccacatttgctgctacttttcctgctgctctatcctatacattgaa

SEQ ID NO: 15880 - DNA, 711 bp, Homo sapiens
ggagtggccagtttattctcttaagagagaaaatgaggggattaatggactgtagttctggacaaggtggaaaactcttaaagtggaagtattggggcaagtgctctgacaggctaggatggtgcagtcagtcacttcacccagaaatcagtagaatgttaacagttcagactcaaaccttgtgaaaaacaggttctagaaaggaaatccctcacagcaactggcaccataatcaagacagaatttttgcagaataaatggagttacctgctttcagccccaggtcgtagctattgtctgccctgctgatatgtgataataatttgtgatcctgttgtcttaaaatggggtcactcatctccagtagaattaagtccacagtgaagttgtccccccatccccaaagagataaacatatatgaatgaactcacgtgataacaactactgctgcctgggatcatgagagacctgaactgaactgataggatgtgaaaggtggctgagataatgagaatagacccatctgcagaggatcataaaaccagcaaagacaagatcttgtctaagatgccttcacaagctttgtccatgagaactcttaaggatttcaccagacctgttgggctgctgctgtgatctctgcccaagggggagcctctgaccaacatccaaagggcttctgggacccactgggattcctcttggaggta

SEQ ID NO: 15881 - DNA, 404 bp, Homo sapiens
  misc_feature (1)...(404): n = a,t,c or g
ggtttcaaccacaagtatttattgatggatggaagatacaattttaatggaacaataaggcacaaccgtggattaaaacactttgctatacagccaaaaggggggaaaatctataaccttaggaactttatgccaatcaagaagcctctaaagtacctctctaatagatcagtatcagacattcttcccttttacataattcctatattacatcacttaatcataaaatctgactgatacttcataaagaattcctcattcatttatatttgagccatccagcctggctactcccctgttctccacccttttccatcactttgcagtgtcaatagttttccaaagcaaggaaacaagcangcaagcaatgaggtcngaaagtnacccagggcnaantggtgggt

SEQ ID NO: 15882 - DNA, 828 bp, Homo sapiens
  misc_feature (1)...(828): n = a,t,c or g
ggtttcaaccacaagtatttattgatggatcgaagatacaattttaatggaacaataaggcacaaccgtggattaaaacactttgctatacagccaaaaggggggaaaatctataaccttaggaactttatgccaatcaagaagcctctaaagtacctctctaatagatcagtatcagacattcttcccttttacataattcctatattacatcacttaatcataaaatctgactgatacttcataaagaattcctcattcatttatatttgagccatccagcctggctactcccctgttctccacccttttccatcactttgcagtggtattttttagcaatcttcaatagttttccaaagcaaggaaacaagcaagcaagcaatgagtcagaaagtcaaccaagggcagatgtgggctaaatacactcatagagacatacattaggatagcaatagcctgattcactgaagtctaaactaagctgacttggcagaaaagttgctgtggctcgctcaaagatctgtaatgccaccttaggttgtgctactagtgccagacctcttgtttttaagggattagcagtggtctaaacaagaagccagggagctaatgtaaccaggcagctaatgacacaacagtcaatgctttggacatgtattaggagcacactatggcttccgtcattaacatttgccaagtgtaaaattcataaagaattttgnnnnnnnnnnnnnnnnnnnnnnnnnnnnnnnnnnnnnnnnnnnnnnnnnnnnnnnnnnnnnnnnnnnnnnnnnnnnnnnnnnnnnnnnnnnnnnnnnnnnnnng

SEQ ID NO: 15883 - DNA, 1115 bp, Homo sapiens
ttttttttttttttttaccagaggaagcagcttttattgatgggttatctccagaaaccagaaagactatatgtactcactttcagttacccccgtgcctccagaatcgcatgttgctccacctgggggcggatataaattacctctagattgtccaaagcccagtctttcccttccctgtgcagccttagaaactaagtagcagtactgtttggtgtgtgtttgtttcttccccaggcaatgcctactgccagctacttagtaacaactagaggtgggaggggtgtccgggggaagcagttagatgagttaagtgtgatgcacaggaaaatagtatcgtagcctatcaaaggtccctctgccctgcctcagtggcttgattcttcattggttgcatttctctttgtgttggatgacgcccttctgaatcagatcagggatttccactgccagccatggacccagccccagagccatgagatgagctagtccaaatttgggcacattcatggcccacaaaggtttgaaaatgatccgtcaggcatattttgcccacccctgtacatctttgctgtctttcccatccagctcaggaactgcaatttctggggcagtagtaggatatgtgataggaatgtcaaactcgatgtcaaactcatatttcaggaggtccatggatataccagcattttccaaaccaccgagttccttccttgttggactccagtcggaaccaatcgttgtcaagcattcttgttgttctcccacataccggataagggactgatattcctccttcagtcgctgcacccacaactcacgatctcggggtccggcgttagtcttcagcaccgggatctcagacacaacacgtcgcgtggcttcatccgccatcttggaccagggcgcaagagaaacgcggaagtggtgttgcctgtagcttacctcaaggcgccgtcatctttactatgggaagatgagacgttgggttgctgtaagacctcttttgaataagatctttgttttcttgtcacctagttacccgcttgtgagtgcatcgagaagaacagaatgtaaacagattctccgtcctatatatgacacctatcattaaa

SEQ ID NO: 15884 - DNA, 588 bp, Homo sapiens
  misc_feature (1)...(588): n = a,t,c or g
aaccgtnnnnnnnnnnnnnnnnnnnnnnnnnnnnnnnnnnnnnnnnnnnnnnnnnnnnnnnnnnnnnnnnnggcacgaggccttgtctggtatccttatgcagaatgaactgaaataatcatcaatctgaaaagctactcttaaacagagacttgcttcaacaccaggaagaacatgaaagggtgactcataattcccagcagcagtgccagttcatgtgctgggattctgaccacaagtctaacaatcaggtcagggagtcagatttctgttggatttagaaaagcatctatgtgtttatgaaagaaacccactggatttttaatagttctgcagctcttggaggctctacatctaccctttctccccagccaagagcatggctatgggagaaggaaggcaggcagcaggcaggtaagtgtgacttcctcacttcccctaccttctcatcttaaagccatagagtggttgctgggtaacccactcctacatatattggttcataaagcctagtgagccactgaaattcttactgatctgtaaatttcaaacacactgtancacagacagccatggtgtaatgacttg

SEQ ID NO: 15885 - DNA, 1818 bp, Homo sapiens
ggccacacaagtgtcggcaaggctgggcccgctgctattcagccaacaactaacacactgcacagtcttttcagaagtaatacagcaggaagtacaggctcctttgcagaaaacctccaccccgtcccctctaagtgcagcaaactgccagcatcaaggaagggagctataggcttagcttatagggatgagagatgccgccacccacagccacagccctctctctccgcctccccctccccaggacttgcaaggtatacaaggggagaaccttactggcaaagtcaaaccaaaaccaagtaaaaccagctccaccatcaatgtttcttgaaaaaacggggtttattgatttttaaactgcaaatagtcgttacaaaaagttttttttcttttaaataaattcacacaaagaaagagaaatagaaagcgacggtagtgaccagcaagaggaataataattacattcatcttaatgtgtgtgtgccagttctgtttacattaacattggaaaactccagacctggaatccagaacctcaaatctgtgagtggaatgtcttgagatgggcacgtggaagtcaaagggtttctcttttttttttttttccccttttagaagctatacataaaaagttgttttccttctgtactgtcacagaacttttacatacattctcagtcctagttgtgaaaggcctaaagagaaagaaactcaatttgcagtccaacacaaaggggggaatttctaaaataaataatccaacagttttttgcatttttttaaattaatttttcatttttttaaaataaaataaccaaaaaagtgtaaagttacaaaaaatgtcgttgaagaataatatattaaaactgtggaaaaaaaggaaaaagacacgtcacaaaattttaagattaatatgaagatcataatttaacataaaagaatatattctatggatttgtcatcccgataaatatgaacaaaattaacaaaaaaaagcatagtttggcaataaatacgttttgataagttaaataagcttttttatattgatgtgcagtgacaagcaaaatttttgctctccaatttctgaaagttatatgaagtttaaaacccagggaagaaagcatggcgtgagtgctctaaggatagacctacggtattctagagcaaaaaccattaaagctacttctacaggaaatcgttttacacagatattgtatgtggaatgaataccattaactgctcaccccttacttttttttttttagcttttctctcattttttttttgttgttattttttttaaaaagatgtcacatatgaactggggaactttagcaccaaaatcaagtctctcctagtccatctagcttccccttcctccccacttaaaaaaaagaaaaaattaaatcacaaagtcccacttaagtcaaaatcttcgtccgctttttcagccttccttcctgcagacctacacaaacccaggcaagattagtcaacaggggttcagatcgggaagaaaaaggttttgaatgtcaagacaggtttcccccaaaaccctggtctggcaacaactcttccaaggggcaggggtggggggggtggggggcggtacaggtggagaggtgccaccgggaagaggggaggaggaataagtgtgcgggagactgaaatgagggaaggtgcagttgtgtcgccagtggagggggctgctggttccgggtctccaccccgccatgggcagaggctccgggaggcccacgggtgccctctggcgctgaagaggtaatgtagtcacagtgacaaagttagattaca

SEQ ID NO: 15886 - DNA, 669 bp, Homo sapiens
  misc_feature (1)...(669): n = a,t,c or g
atcgtttnnnnnnnnnnnnnnnnnnnnnnnnnnnnnnnnnnnnnnnnnnnnnnnnnnnnnnnnnnnnnggcacgagaaaaaaatacagaagcaggaaaaccaattataagttcaagtgagggatgatggttgcttgaaccaaagggttgcatgtagtaagaaattgtgatttaagatatattttaaagttataagtagcaggatattctgatggagtttgactttggttttgggcccagggagtttcagatgcctttgagaaatgaatgaagtagagagaaaataaaagaaaaaccnnnnnnnnnnnnnnnnnnnnnnnnnnnnnnnnnnnnnnnnnnnnnnnnnnnnnnnnnnnnnnnnnnnnnnnnnnnnnnnnnnnnnnnnnnnnnnnnnnnnnnnnnnnnnnnnnnnnnnnnnnnnnnnnnnnnnnnnnnnnnnnnnnnnnnnnnnnnnnnnnnnnnnnnnnnnnnnnnnnnnnnnnnnnnnnnnnnnnnnnnnnnnnnnnnnnnnnnnnnnnnnnnnnnnnnnnnnnnnnnnnnnnnnnnnnnnnnnnnnnnnnnnnnnnnnnggaatctgaaaacaatggaaccatgccttcataattctagaaagttattttcaactgataaatctatatcncccaataatcanggtgaaggtaaatatact

SEQ ID NO: 15887 - DNA, 463 bp, Homo sapiens
aatttgaacttgatttgtcacacaaatcacctttccatactagcttctgaattccgtccctcgaactctccctatctcctgcgaacccctgctcccatagaaaagctcactaggtggaaaatgaacaaattgaccagagctcattaggcccactccgctgcttttagccctcagagggaggggcagctgtgtgacttcagccctctgctccatcatcacaagttgccactgttgtggagccccttggctacccctgctataggaaccgaggaacttggcctacttactttggctagcagctcctggcgggtggcagctgtcaggcctttccggatggtccgcttgtgatcacagacacggaaaggtcgctggggtggtggagctgaggtccagaccctccggttcagagctgagaggtactccatggtggaccggagagttccttccctgctcgtgccgaatt

SEQ ID NO: 15888 - DNA, 502 bp, Homo sapiens
gagcgcagccgcatccccatggaaacgctggagacctgggaggagcggctgcttcggttcttctccgtgtccccccaggccgtgtacacagcaatgctagacaacagcttcgagaggcttctgctgcacgctgtctgccagtacatggacctcatctcggccagtgctgacctggaggggaagcggcagatgaaggtcagtaatcggcacctggatttcctgccgccggggctgctcctgtccgcctacctggagcagcacagctgatggcggccccgcggagaccccgctgccacctcgcccagccatcaagccctccgataccttcggctaaaatatctttcatatttttagaatttgtcctcggaaacctttttcgcttggggtggtctctctcactctgccccctcctcacgcagctcttggcagtcaacagacgctggcggctggggctgccatgccatccagctccaagcttccactccgggacttgtgtttgggt

SEQ ID NO: 15889 - DNA, 875 bp, Homo sapiens
  misc_feature (1)...(875): n = a,t,c or g
gcttccttgaggtctggctaccgcctggactctttcttgtttcctgggtattcccagcatttagcacagtgcccaatgcttactggaaaggggtttcgatcnnnnnnnnnnnnnnnnnnnnnnnnnnnnnnnnnnnnnnnnnnnnnngggtgatgccacagtgtgaagtgaaagcaagtttattaagaaagtaaaggaggagnnnnnnnnnnnnnnnnnnnnnnnnnnnnnnnnnnnnnnnnnnnnnnnnnnnnnnnnnnnnnnnnnnnnnnnnnnnnnnnnnnnnnnnnnnnnnnnnnnnnnnnnnnnnnnnnnnnnnnnnnnnnnnnnnnnnnnnnnnnnnnnnnnnnnnnnnnnnnnnnnnnaagtgaaacttttctttaaannnnnnnnnnnnnnnnnnnnnnnnnnnnnnnnnnnnnnnnnnnnnnnnnnnnnnnnnnnnnnnnnnnnnnnnnnnnnnnnnnnnnnnnnnnnnnnnnnnnnnngcattacatccaagtgaaacttcttgagatggttacataatgtctaaatctgctggtgtagaagttaataaagtgtagaactgaataaatattaaatattagatcaagtttctcatgtttatcttaacgtataacgatttatcttaaagcactgattttcacaaaataacatcagtgtgaaattggaaaagaagccaaatattttatttcacgtatctgggaaatgaggtgctttagtcaactgaatctgcccaaaactaaaaagcattaattaaaaagtacttaactcagaaattataaaaataggagacatcaataaaatacattctacacagaatacgccaaccatacactactcttttttgataataaaaaatgtatttactg

SEQ ID NO: 15890 - DNA, 838 bp, Homo sapiens
ttttttatacaaacaagtttcttttattgtttccacacattcataataactatagaacagaaagattgttttaatttgctgtcctaacttcggtgacctgataaatacactgggaacagtccccattttgagtaaggtcagttgaagcccttactgtataagtccaaaatttaagaaaaatgagttccacagtgagcttcctcatgcttcggctatgcgtggaccagtcagcttccgggtgtgactggagcagggcttgtcgtcttcttcagggtcactctgcaagggttgtctgggcttggtcttgcctcccaggtttcaggtgctgcaggttttacatggctgtggtggatccaggctgggattccttctaccttcacagcggtgggagtgctcagaacgacaatctggggtcctttccacagtggacacaaagaggctactttccagtccttgatccacactcgatcacctggggagaaagggtgaactggggagaataagctaacagggcatctctcatttacccaggctgagattgtttgtgtaatttttcctaaggcctgtagctgtcgctgtaactcaatttcacctaactctcagggagtgcctggaagtccccgcaatataggagggggcctatgatataatatttcataaggggaatatcctgctcttttagaagtggtacatctaattttaaataataccatagggagagcctgtatccattttaatcctgtttcctgacatactttccctaaactatttttgatagtttgattcattcgctccacctttccggaactctgaggccagtaggcagcatgcagtttcc

SEQ ID NO: 15891 - DNA, 1832 bp, Homo sapiens
cgctgtagtgcggcgccccaggttctttagtggaagaacgcgaagcgaggatgagtgatccgtggaggcagtaacaggcgcggcgagggagaagtgattcccgaagaatcaaggctgggccggacccggtggcctggcaacagggtaataagagaaatgaagccaacaggtacagacccaaggatcttatctatagctgctgaagttgcaaaaagccctgagcagaatgtccctgttatactgttgaagttaaaagaaataataaacatcacacctttaggaagctcagagttgaagaaaatcaaacaagatatatattgttatgatctcattcaatattgcctcttggtcctcagtcaagattattctcgaatccagggtggttggactacaatttcccagcttacacagatattaagccattgctgtgtgggcttggagccaggagaagatgcagaggaattttacaatgaattacttccatcagctgcagaaaattttctagttttggggagacaattacaaacatgttttatcaatgcagctaaggctgaagaaaaagatgaattactacactttttccaaattgtgactgattctctcttctggcttttgggaggccatgttgaacttattcagaatgtactacaaagtgatcatttcttacatttactgcaagctgacaatgtccaaataggatctgcagtcatgatgatgctacagaatatattacagatcaacagtggtgatttactcagaataggaagaaaagccctgtattcaattttagatgaagttattttcaagcttttttcaactcctagtccagttataagaagtactgctacaaaactcctactgttgatggctgaatcccatcaggaaattttgattttactgagacaaagtacctgctacaaaggactcagacgtctactaagtaaacaggaaactgggactgaattcagtcaagaacttagacagcttgttggccttttaagcccaatggtctatcaggaagtagaagagcagaaactacatcaagcagcatgcttgattcaagcctattggaagggttttcagacaagaaagagattaaagaagcttccatctgctgtgattgctttgcagaggagtttcagatccaaacgatcaaagatgttgctggagataaataggcagaaggaagaagaggacctcaaattacaattgcaacttcaaagacagagagccatgagactttcccgagaattgcagctgagtatgctcgaaatagttcatccaggtcaggtggagaaacactatcgggaaatggaagagaaatcagcactgattatccagaaacattggagagggtacagggaaaggaaaaattttcaccaacagaggcagtctctcatagagtataaagcagctgtcacacttcaaagagcagcgcttaaattcctagcgaagtgccgtaagaaaaagaaactatttgctccttggcgaggactccaagaactcactgatgcacgccgagttgaactgaagaaacgagtggatgactatgtcagaagacatttgggctctccaatgtcagatgtggtcagtagggagctccatgcccaagctcaagaacgactgcaacactactttatgggcagggccctagaagagcgagcccagcagcacagagaagctctgatagcacagatcagcaccaacgttgaacagctaatgaaggcaccaagtctgaaggaggcagaagggaaagaacctgagctcttcctaagtagatccagggcctgtgggcagccaaagggcaagcaaggcccatctcacaaccctga

SEQ ID NO: 15892 - DNA, 569 bp, Homo sapiens
  misc_feature (1)...(569): n = a,t,c or g
gtcgttatcagaggtggagacatttagaagttgttcttaatcagagtgaagcttgtgcttcggaaagtcaacctcactcctcagcactcacagcacctagctctccagaacaatatgaatcttttgtgaaattcacacatgatcagattatgcgacggtatgggacaaggccaacaagctatgtgtcatgaagctttgtcacatatctgggtaccaggtttgacctcaagagatggctgctgtacactttttgcaactggtttgatgtcacatttcagctccaactttgcatcctgagaacacttaaacgtttctgcaggtccattttatacaacttgaaagaccgtaaaactttctggttgccacaagcatatctttcttttctgctcatccaataaacagctgtgccctactgtgatagattttccaaacaaaaatacctggagcagcagtttagcaaaatatgcctcagtggnattcaacaaatggngtttcccaagcacagttctgtaaaagtgcgtgtganatgtgtgtaaagtgtgtagggnatttaagtangattgatggca

SEQ ID NO: 15893 - DNA, 202 bp, Homo sapiens
tcccttgtctttcctctaaggagaggtgcttgtggaaagtggaggttgtgggcatcttttcaaccttttcaatctgacctttcaacaggtcaggtgagagaaaagacaaagctatttgaacctatgtttttcttatgtccagaaatccgttctttcatcaaaccactaaaccactcgccttagcctcttctgcagtttctgg

SEQ ID NO: 15894 - DNA, 1361 bp, Homo sapiens
ttttttttttttctcttactcattcagattatttattaagagcaaaagtcgggccatcccatcgtgtgatattgcaacatgaaaagtcacatacatactaaggagaccccacagaattgagagcctttcaacagtacagagccatagattacaaagttaaaatacaaatgatcccccagatttggcaggaaacaagtacaatatgaggaggcctggaatggaagggcacttacttttcaataaggcagttacaaaatgggaaaaaaaacccccaaaaccttgtaccccaaaatatactctgatgagccgtagcagacaatagaaatgtaaaagaaggatcctgtataaccctctgtcattggcaaatgtgtgcattaagtgaaagcaactgaagggttttgtgttttaaggatgcaagctagatgaaacaactgactgtagacatttctacctcaaggaacaggttcatattctttgccccttaggctgggttctaccttaaaacacccaggaccccactttaccatttctaaccataaacttggaaacagtctataatacaatgaaaggaataaaaaggcacccctagagcaccatgctttcccaaggcatgatcttgagctcatctggcccttcgggttcgacttgcccagctcagtaacagggaccaggagccagggccagctgaattacacaacctcaaaggatcgcctggaaggcagatatctgaccaagagatcacagaccaagcacatttcatgagaatttaaatgctaggacaatactacctctcccaatagggcttttgaaccctggttttaaataacaggctagatctgttttcccttaccactcattttgcaaaactcaactggcctaaacatttcgctcaatcttgagttctgcaggttggtccctgagagctaggttggccttgggaatttctgctcaattttaagttctcaagaatctgagggcagccgatttagactgaattagagtcatcctataggtcagaaagaaagaatgctagacaggtcaagagggccagaggttggttctgataatgccatatgacctcaggcacatctttttgagttttagtttccccatctctaaaaacggatgattggacaacagcaagcttaacagactttccaccttgaaaatacggcacttctctgacgcttagaccttaagtcctgaagcgttgttttctcagcaaaaacagtgcaaagtccttacaggaatctaaggtacaagccctgggcaaccatgaaaactttaaacttcatgcaaagcaacgaagttataaatcctccagctgaacaatttcctgatgatgtgagcatccgtttttg

SEQ ID NO: 15895 - DNA, 1161 bp, Homo sapiens
ccagagggcaaacccagtcttaagaatcaaattgctctcggctttcggctcggaggaggccaaggtgcaactttcttcggtcgtcccgaatccgggttcatccaacaccagccgcctccaccatgccgccgaagttcgaccccaacgagatcaaagtcgtatacctgaggtgcaccggaggtaacgatcggtgccacttctgccctggcccccaagatcggccccctgggtctgtctccaaaaaaggttggtgatgacattgccaaggcaacgggtgacctggaagggcctgaggattacagtgaaactgaccattcagaacagacaggcccagattgaggtggtgccttctgcctctgcccctgatcatcaaagccctcaaggaaccaccaagagacagaaagaaacagaaaaacattaaacacagtgggaatatcacttttgatgagattgtcaacattgctccgacagatgcggcaccgatccttagccagagaactctctggtaagagcaggacaacatgtaaccgccataactgtagttgtgtttttcactgagtgataacattcttcttacttgaagggtgctcagtgagacccaagatggggtgcagttttctgggactgaaaggatggatcgtaaattggatgtgtttaatctgggcatcaaggacccatggaagctttgcattccgggttatggaactagatggaactctatattctatattaggggagcaggaacctcattccttccattgcctgctatgaaccccttcagtattccccagtatctgcagattgtgagggactgagccagcacctccaatgccaccatttctttacttaaaggaaccattaaagagatcctggggactgcccagtcagtgggctgtaatgttgatggccgccatcctcatgacatcatcgatgacatcaacagtggtgctgtggaatgcccagccgtaagtgacattttcattgttacagtaggggtgaaaggggggccacccagtgtattcacagagataagctgggaagttttggaaatggttactggtggggtgggataatccttttaaactttttactgattttttttttctttcccacagagttaagcacaaaggaaaacatttcaataaaggatcatttgacaac

SEQ ID NO: 15896 - DNA, 506 bp, Homo sapiens
  misc_feature (1)...(506): n = a,t,c or g
gaccctgattaagacgtccactccctttgcaggtggaaatcaagctccttagaaaagcactgtgcagttacgccgcttgtccactcctgctccaacatgccccaggctctgtgtccacactgcaacctctctgatcctccccggtctaggtcaggcctggcgtgtcccagaggcacagcagtgagaaagccagggacacctattctctggcctcccttgctccctaccatccccacatctggacatcccggtgagccgtgttggtgtcattgttgtaagagttgcccgtctgtgaatactgcacttcaatgtttacggaatccactcacaatatattactgcatttcttctactcagcaatccttaaagtggatattattaactccatctcacagatgagaaaattgggttcaananaggtaattaagcgggcgcaagcttatccctttaatgagggtaatttaaccttggaatgggcgtcnttttaaattccnnatnggaaaaaa

SEQ ID NO: 15897 - DNA, 264 bp, Homo sapiens
  misc_feature (1)...(264): n = a,t,c or g
cttctggggtaagacgctgttctctatctcgatcgtattggtggtcacacaagtgaagacatgttagaactcatcaaaccatacacttagaatgtgtaatataaacctcaataaagcaaaatttaaaaaaaaaaaccacctttaattttctcttacaaaaaaaaaaaanggnaaacccnttaantttaanttttnncaaanacnnnntttnggnncnnnnnnnccttaangncnngnttcnagggcntnncntannnnnnttaa

SEQ ID NO: 15898 - DNA, 469 bp, Homo sapiens
  misc_feature (1)...(469): n = a,t,c or g
gcgttcatgtaaacagcatgacgtgaggccgtggatgcaggcattaaggtatactgtgtaccagaatcagttgttggagaaaattaaagttaagtggttttccttttttttttttngtaaaaaaaanttaangggggtttttttttttaaantttgncttnatgggggttaaaataanaaatccaaantgtnggnttngaagattncaaaaangncnccantnggnngccancaaaancaaccaaaananaaaaaagngnctancccaaaagggtcccntgggnanaaccccccnattncccccggnnanaattnnnggnttgncttncggccncaanggntaannntngcnttncnaaaatttccanggncnagaannccatanaaaaanntcccctngggtnggnntcccctgnccaagaannaaatttttanggtncnccnaatgncntttacnaggnncaacccc

SEQ ID NO: 15899 - DNA, 396 bp, Homo sapiens
gtaaagtaaaaaacctattaaattgaggctagagctggagatgtaattggtttttgagaaacattagtataaagcttgcccttgttgtgtggaagaagccattttgtactgctttaaagttagactaatattctcagcacgggtgtatggggacctcattacctatttttttcatcatttaccctaggtaagaactttgatcactgcttactaggtaaagaatgtttgtactgttccaaaacccaggcttctttattcctttaccactatccatgtgagcattgacaaatcatggcttagaggtgctcactgactcgctaagacgactttggccctgttgatgactggtgctgtgctccagccttatcagttaggggacccaaggtttgtttggga

SEQ ID NO: 15900 - DNA, 396 bp, Homo sapiens
gtcagtattctgtaaagttcccctggcctaaatgattacttgctctgggcaagtggatatttattaggctatttctaagccacagcataagaatgtcagcctagccacagagtctgagattctgagttcagcctagccacagagtctaagattctgtatcctctgacattttggaaatgatacactactggcttaagtgatgactctttcagattttcagtattttatacaactactgccacatccttatactttattgcttttctgtcttcttcaacctgggagagaccctgaatttgagtgtgttctctaatcaatagtggtttagctttcttttctatttcactcgtttctagggttttttatttgcagtttaggaactattaggaatgcagg

SEQ ID NO: 15901 - DNA, 379 bp, Homo sapiens
gtgttggagcaaaacaaggaagcaaagcaaatactgtttttgaaattctatctgttgcttgaactattttgtaataattaaactttgatgttgagaaatcacaactttattgtacacttcattgcaacttgaaattcatggtcttaaagtgagatttgaatttctattgagcgcctttaaaaaagtaataccaaaccataaagttaaaatctatgtatattgagtcatatctaaaaccacgtataaacataaattgtatttcctgttttaattccaggggaagtactgtttgggaaagctattattaggtaaatgttttacaaattactgtttctcactttcagtcataccctaatgatcccagcaagataatgtcctg

SEQ ID NO: 15902 - DNA, 364 bp, Homo sapiens
gccgaggaagagcgttttggggacgggggctggtgaggctcacgttggagggcttcgcgtctgcttcggagaccgtaaggatattgatgaccatgagatccctgctcagaacccccttcctgtgtggcctgctctgggccttttgtgccccaggcgccagggctgaggagcctgcagccagcttctcccaacccggcagcatgggcctggataagaacacagtgcacgaccaagagcatatcatggagcatctagaaggtgtcatcaacaaaccagaggcggagatgtcgccacaagaattgcagctccattacttcaaaatgcatgattatgatggcaataatttgcttgatggcttagaact

SEQ ID NO: 15903 - DNA, 451 bp, Homo sapiens
  misc_feature (1)...(451): n = a,t,c or g
tttgaanancntnnnnnnnnnnnnnnnnnnnnnnnnnnnnnnnnnnnnnnnnnnnnnnnnnnnnnnnnnnnnnnnnnggcacgagggctgaatccgtggtggcaccgagaccaaactcattcaccaaatgatgccacttcccagaggcagagcctgagtcactggtcacccttaatatttattaagtgcctgagacacccggttaccttggccgtgaggacacgtggcctgcacccaggtgtggctgtcaggacaccagcctggtgcccatcctcccgacccctacccacttccattcccgtggtctccttgcactttctcagttcagagttgtacactgtgtacatttggcatttgtgttattattttgcactgttttctgtcgtgtgtgttgggatgggatcccaggccagggaaagcccgtgtcaatgaatgccggggacagagaggg

SEQ ID NO: 15904 - DNA, 367 bp, Homo sapiens
ctggactttcacatggatcgtaatagacaacttcatcctgtttttctaaaaaggtattaatgattgtttaaaacatattttattatttgtaaaaatgcactcaatttttttaaatgtaaggaaaataaagatcacttgtaatgccaccactgagaatcactattaacatataaaaaatgtatgtgtataaatgtaatatacatatacacgtgtatatatacatgactatacacatgtattaagcagcatgtgtgtatatacaagtagtatatgcatgtatatatacctgtacagacatacgtatatatacacacgcacatacacatactacttacatagctacacatatcaatggagttctaaaaga

SEQ ID NO: 15905 - DNA, 325 bp, Homo sapiens
cagagtaaagaattttgccattttgatccttttactttgttttagccacctatagtgttaccaaccatctttatccttgtctgcagggataataatgaactaatgtagtgttttaagataatttaatgatactatctttccaaactttgttagattttaaatgtattattgacctgagaccttaatgacaaatcactgctattagacaattgaagtgttcatttactttgtaattccaataatcatagttatggaattatggtaaggttttgcttttctgtcctagtggatatgtgtattttttgagatggagttttgctcttgt

SEQ ID NO: 15906 - DNA, 173 bp, Homo sapiens
  misc_feature (1)...(173): n = a,t,c or g
tagtatagtgaatcaggctgggtgaggtggcttatacctgtaatcccagnactttangaggcatgaggatcctttgancccagnaatttnnaaccngcctgggnnnannntnnnaccttggntttcccaaaattnacngtnaaaantaacctgggngnaanggtttgaccttt

SEQ ID NO: 15907 - DNA, 502 bp, Homo sapiens
  misc_feature (1)...(502): n = a,t,c or g
ttctaccaactggagtgtgccagtgagggtgagcaaaaggtggtctccagggagaacatgggcagggtttggagccagcacctccccagggttggaggaagcagacccaggacctgcctgactgggatggggctctcttctgccatctccgcctccacctgcctagctctgctcccccgccccgagagatgcctccaggcttgggtagatnaagccaggggcttcctgccttcctggaaggcttttccctgtctggagtttatgaaagaccagcaggcaatgcggcaataaaaaanaccttggggtaagaggggcgccacgagaggcgggtctggcgctgacatccaaccccgtgccccctccctgcaggatgctggtgggactgtgtgcccctggtggaagtgngctacatgatgatcatggtcaagaaccctgaacccaagtgtgtcttcaccatgtgcagtcgctcctanancaacctgcaagccactaantgccctgc

SEQ ID NO: 15908 - DNA, 215 bp, Homo sapiens
  misc_feature (1)...(215): n = a,t,c or g
gctgtgcagaagactatctatccgtggtcctgaaccagttatgtgtgttgcatgagaaaacgccagtaagtgacagagtcaccaaatgctgcacagaatccttggtgaacaggcgaccatgctttttagctctggaagatgatgaatcttacnttnncnnagagttnantgntgaatntttgancttancntgcgncncnatncanactttctga

SEQ ID NO: 15909 - DNA, 440 bp, Homo sapiens
  misc_feature (1)...(440): n = a,t,c or g
gatggtgagaggcgaaagccactgcttacatagtgacagcaagagaaaaaatgaggaagaagcaaaagcagaaacccctgaannnnnnnnnnnnnnnnnnnnnnnnnnnnnnnnnnnnnnnnnnnnnnnnnnnnnnnnnnnnnnnnnnnnnnnnnnnnnnnnnnnnnnnnnnnnnnnnnnnnnnnnnnnnnnnnnnnnnnnnnnnnnnnnnnnnnnnnnnnnnnnnnnnnnnnnnnnnnnnnnnnnnnnaatcattagcactgtttgaacatgctctttttctgagctgcttattgctgtaggtgaaagcaagttttactccttataaactaaaatttagtcatatacagtacctagtttgttagcagtgtttaaaatataaaaagcacacacaggtataaagnataatgntccatagcacataagctgaaaagctcatt

SEQ ID NO: 15910 - DNA, 322 bp, Homo sapiens
gttttttacggatgggtccagtggcttagaagaaaactcagaagtaacaaaaggtgttaaatttataaagagcagtagctttacagttaatctatcagataatcaaagcttaatttgctctgccccagcagagaagaaatgtgcaaataaccccaaccaagacattccctttcaattctgtctcagcccactaaaaccacccaacactagatttccaaaaatccactctgggaccgtcagattccaaagatgtcacatgttccccccaacccccacactcaatgtcccaactctgccagatacatgtctgttgggagggctc

SEQ ID NO: 15911 - DNA, 480 bp, Homo sapiens
  misc_feature (1)...(480): n = a,t,c or g
ttcggcacagcccaaccctctcatctactgcacctgctgggacccctggaacttgggaccacggaagctaatcaagacccctcaactaccacgcaagaactccacagggagttccaagctaactcctcttctaccagctccaaaaaatcacaattacctccaaccaacaaaacctgttgtttccccaaaaatgaaaatccattcagcaaggcaagaagagactaataaatcattttatgaagtgatcaacgtgtcacctgggctatcaacttgttcggaatcgggaacagatttctgttcaccttaggggatgagatgtttgatagggaaaaagcggtggggaatcggagatcccgggacaaagggcagattttccagggaccaacatcatttttggacctaggaagaggcaaattttcagagcttgacaggcattaattttgaacaattgancaggggaccaccagttttgccccggaa

SEQ ID NO: 15912 - DNA, 4408 bp, Homo sapiens
  misc_feature (1)...(4408): n = a,t,c or g
attcggcacagcacagactcagagagaacccaccatggtgctgtctcctgccgacaagaccaacgtcaaggccgcctggggtaaggtcggcgcgcacgctggcgagtatggtgcggaggccctggagaggatgttcctgtccttccccaccaccaagacctacttcccgcacttcgacctgagccacggtctgcccaggttaagggccacggcaagaaggtggccgacgcgctgaccaacgccgtggcgcacgtggacgacatgcccaacgcgctgtccgccctgagcgaccttgcacgcgcacaagctttcgggtggacccggtcaactttcaagctcctaaagccacttgccttgctggtgaccctggccgcccacctccccgccgagttcacccctgcggtgcacgcctccctggacaagttcctggcttctgtgagcaccgtgctgacctccaaataccgttaagctggagcctcggtggccatgcttcttgccccttgggcctcccaacgggccctcctcccctccttgcaccggcccttcctggtctttgaataaagtctgagtgggcggcagcctgtgtgtgcctgggttctctctgtcccggaatgtgccaacaatggaggtgtttacctgtctcagaccaaggacctctctgcagctgcatggggctggggagggagaactgcagggagtatgggaggggaagctgaggtgggcctgctcaagagaaggtgctgaaccatcccctgtcctgagaggtgccaggcctgcaggcagtggctcagaagctggggaggagagaggcatccagggttctactcagggagtcccagcatcgccaccctcctttgaaatctccctggttgaacccagttaacatacgctctccatcaaaacaaaacgaaacaaaacaaactagcaaaataggctgtccccagtgcaagtgcaggtgccagaacatttctctcattcccaccccttcctgccagagggtaggtggctggagtgagggtgctggccctactcacacttcctgtgtcacggtgaccctctgagagcagcccagtcagtggggaaggaggaaggggctgggatgctcacagccggcagcccacacctagggagactcttcagcagagcaccttgcggccttactcctgcacgtctcctgcagtttgtaaggtgcattcagaactcactgtgtgcccagccctgagctcccagctaattgccccacccagggcctctgggacctcctggtgcttctgcttcctgtgctgccagcaacttctggaaacgtccctgtccccggtgctgaagtcctggaatccatgctgggaagttgcacagcccatctggctctcagccagcctaggaacatgagcagcacttccaacccagtccctgccccacagcaagcctccccctccacactcacagtactggattgagctttggggagggtggagaggaccctgtcaccgctttccttctggacatggacctctctgaattgttggggagttccctccccctctccaccacccgctcttcctgcgcctcacagcccagagcattgttatttcagcagaaacactttaaaaaataaactaaaatccgannnnnnnnnnnnnnnnnnnnnnnnnnnnnnnnnnnnnnnnnnnnnnnnnnnnnnnnnnnnnnnnnnnnnnnnnnnnnnnnnnnnnnnnnnnnnnnnnnnnnnnnnnnnnnnnnnnnnnnnnnnnnnnnnnnnnnnnnnnnnnnnnnnnnnnnnnnnnnnnnnnnnnnnnnnnnnnnnnnnnnnnnnnnnnnnnnnnnnnnnnnnnnnnnnnnnnnnnnnnnnnnnnnnnnnnnnnnnnnnnnnnnnnnnnnnnnnnnnnnnnnnnnnnnnnnnnnnnnnnnnnnnnnnnnngcccccacatcttatcttttttttttccttcaggctgtgggcagagtcagaaagtcagaagagggtggcagacagggaggggaaatgagaagatccaacgggggaagcattgctaagctggtcggagctacttccttctctgcccaaggcagcttaccctggcttgctcctggacacccagggcagggcctgagtaagggcctggggagacagggcagggagcaggctgaagggtgctgacctgatgcactcctcaaagcagatcttctgccagacccccaggaaatgacttatcagtgatttctcaggctgttttctcctcagtaccatccccccaaaaaacatcacttttcatgcacagggatgcacccactggcactcctgcacctcccacccttccccagaagtccaccccttccttcctcaccctgcaggagctggccagcctcatcaccccaacatctccccacctccattctccaaccacagggcccttgtctcctctgtcctttcccctccccgagccaagcctcctccctcctccacctcctccacctaatacatatccttaagtctcacctcctccaggaagccctcagactaaccctggtccccttgaatgcctcgtccacacctccagacttcctcagggcctgtgatgaggtctgcacctctgtgtgtacttgtgtgatggttagaggactgcctacctcccagaggaggttgaatgctccagccggttccagctattgctttgtttacctgtttaaccagtatttacctagcaagtcttccatcagatagcatttggagagctgggggtgtcacagtgaaccacgacctctaggccagtgggagagtcagtcacacaaactgtgagtccatgacttggggcttagccagcacccaccaccccacgcgccaccccacaaccccgggtagaggagtctgaatctggagccgcccccagcccagccccgtgctttttgcgtcctggtgtttattccttcccggtgcctgtcactcaagcacactagtgactatcgccagagggaaagggagctgcaggaagcgaggctggagagcaggaggggctctgcgcagaaattcttttgagttcctatgggccagggcgtccgggtgcgcgcattcctctccgccccaggattgggcgaagccctccggctcgcactcgctcgcccgtgtgttccccgatcccgctggagtnnnnnnnnnnnnnnnnnnnnnnnnnnnggggcgggggtgcgggctgactttctccctcgctagggacgctccggcgcccgaaaggaaagggtggcgctgcgctccggggtgcacgagccgacagcgcccgaccccaacgggccggccccgccagcgccgctaccgccctgcccgggcgagcgggatgggcgggagtggagtggcgggtggagggtggagacgtcctggcccccgccccgcgtgcacccccaggggaggccgagcccgccgcccggccccgcgcaggccccgcccgggactcccctgcggtccaggccgcgccccgggctccgcgccagccaatgagcgccgcccggccgggcgtgcccccgcgccccaagcataaaccctggcgcgctcgcggcccggcactcttctggtccccacagactcagagagaacccaccatggtgctgtctcctgccgacaagaccaacgtcaaggccgcctggggtaaggtcggcgcgcacgctggcgagtatggtgcggaggccctggagaggtgaggctccctcccctgctccgacccgggctcctcgcccgcccggacccacaggccaccctcaaccgtcctggccccggacccaaaccccacccctcactctgcttctccccgcaggatgttcctgtccttccccaccaccaagacctacttcccgcacttcgacctgagccacggctctgcccaggttaagggccacggcaagaaggtggccgacgcgctgaccaacgccgtggcgcacgtggacgacatgcccaacgcgctgtccgccctgagcgacctgcacgcgcacaagcttcgggtggacccggtcaacttcaaggtgagcggcgggccgggagcgatctgggtcgaggggcgagatggcgccttcctcgcagggcagaggatcacgcgggttgcgggaggtgtagcgcaggcggcggctgcggacctgggccctcggccccactgaccctcttctctgcacagctcctaagccactgcctgctggtgaccctggccgcccacctccccgccgagttcacccctgcggtgcacgcctccctggacaagttcctggcttctgtgagcaccgtgctgacctccaaataccgttaagctggagcctcggtggccatgcttcttgccccttgggcctccccccagcccctcctccccttcctgcacccgtacccccgtggtctttgaataaagtctgagtgggcggcagcctgtgtgtg

SEQ ID NO: 15913 - DNA, 1265 bp, Homo sapiens
atccagagtattgaagaaggcagagtggagagcctagtaatgagtatctggtaccccagtatcctctcccacagaatctgtacagctctccgtttatgacagtttaaacttaatttaaattatcaaacagacactttcctcaaacatataaatgatgaggcagttcattcaggctgtatgtataaagttgttccagccacctttttctaacggcttctctatatcttttacatggagacaatgagagatttgcttaggacaatttgactgtaatttagaagtaggaaatgggaagtatttgtatcttctttgcctaactcacattagttactcaagtaagcatttcttccgttattgcattttcctgattacaagttttatgttttctctaaaacacatatcaaaagaaatgtcctaagcactatgcagggggaagccatgacatttatccaccactgtcagcaaaaacatgaacttagccctcaacagaatatttcacttcattctagtgtcacctctgcgtcacctgcactggagtcaccacttgcctgttgggtaagaccaggatgcaccactgaaataaaaaggggtcagacaatacaagaaaagccagtagaaattgccaaatgtatcagaatacacacaggctttctaaggatatggcccaagaggaaggctctagagcccaccctgaaacaggatttttgacttcacagataaattatttaattttcaataacacaattcaattaaagaaagggaaatacaaggctaaacaaataagaaatgaagacaaaaacccaacctttcaaatctaaagaaaataatctgttttaaagacacagatgaagatcagggacccaaaacagaagaaaggaaaagcaattaacgctggcatctgataacaacgaaaagtatggagtctggagaatcgctagactctaaaaattataaaggtttagacttggactttgtacactgaagaaaagaaaactgcatgcatttatactgaccaatgtacactattgctgctttttaacttttgtgtatatgtagggtagatttttttttaagtgaaagcaagcttattaacgaaagtaaaagaataaaaaggtgacttctccataggcagaaaacctagccgtagtttttttattagaaattgttattcaataatagtacatgttacaaataaataccattttaaactggaaaaaattgtagactttcaaatcagttaggggtgggtcaccctaaaaaagggc

SEQ ID NO: 15914 - DNA, 336 bp, Homo sapiens
agatttttttctaaaaattattatcaaacccccaatttcaccagtagaaaaagagatcttaagatttctgtgtttttttttccagcataactcagttacttatggctgggagaaaatatgtagggagataatctaatacctaattcgaaggaagaaaatatctaattctaagtcttgagttcttctcatcagaccatagcaggatttaacatttaacatttttcagaagcttctaaatagacttcattcagttttttgtccacagcagtggcatttaaattactgtacctttaagacatggaattgctgggaggcttgggaaaccttgagtgcaat

SEQ ID NO: 15915 - DNA, 3635 bp, Homo sapiens
  misc_feature (1)...(3635): n = a,t,c or g
agtctccgccgccgccgtgaacatggagcccccggacgcaccggcccaggcgcgcggggccccgcggctgctgttgctcgcagtcctgctggcggcgcacccagatgcccaggcggaggtgcgcttgtctgtacccccgctggtggaggtgatgcgaggaaagtctgtcattctggactgcacccctacgggaacccacgaccattatatgctggaatggttccttaccgaccgctcgggagctcgcccccgcctagcctcggctgagatgcagggctctgagctccaggtcacaatgcacgacacccggggccgcagtcccccataccagctggactcccaggggcgcctggtgctggctgaggcccaggtgggcgacgagcgagactacgtgtgcgtggtgagggcaggggcggcaggcactgctgaggccactgcgcggctcaacgtgtttgcaaagccagaggccactgaggtctcccccaacaaagggacactgtctgtgatggaggactctgcccaggagatcgccacctgcaacagccggaacgggaacccggcccccaagatcacgtggtatcgcaacgggcagcgcctggaggtgcccgtagagatgaacccagagggctacatgaccagccgcacggtccgggaggcctcgggcctgctctccctcaccagcaccctctacctgcggctccgcaaggatgaccgagacgccagcttccactgcgccgcccactacagcctgcccgagggccgccacggccgcctggacagccccaccttccacctcaccctgcactatcccacggagcacgtgcagttctgggtgggcagcccgtccaccccagcaggctgggtacgcgagggtgacactgtccagctgctctgccggggggacggcagccccagcccggagtatacgcttttccgccttcaggatgagcaggaggaagtgctgaatgtgaatctcgaggggaacttgaccctggagggagtgacccggggccagagcgggacctatggctgcagagtggaggattacgacgcggcagatgacgtgcagctctccaagacgctggagctgcgcgtggcctatctggaccccctggagctcagcgaggggaaggtgctttccttacctctaaacagcagtgcagtcgtgaactgctccgtgcacggcctgcccacccctgccctacgctggaccaaggactccactcccctgggcgatggccccatggctgtcgctcagttctatcaccttcgattccaatggcacctacgtatgtgaggcctccctgcccacagtcccggtcctcagccgcacccagaacttcacgctgctggtccaaggctcgccagagctaaagacagcggaaatagagcccaaggcagatggcagctggagggaaggagacgaagtcacactcatctgctctgcccgcggccatccagaccccaaactcagctggagccaattggggggcagccccgcagagccaatccccggacggcagggttgggtgagcagctctctgaccctgaaagtgaccagcgccctgagccgcgatggcatctcctgtgaagcctccaacccccacgggaacaagcgccatgtcttccacttcggcaccgtgagcccccagacctcccaggctggagtggccgtcatggcgttggcgttcagcgtgggcctcctgctcctcgtcgttgctgtcttctactgcgtgagacgcaaagggggcccctgctgccgccagcggcgggagaagggggctccgccgccaggggagccagggctgagccactcggggtcggagcaaccagagcagaccggccttctcatgggaggtgcctccggagaccaggggtggcagcgggggcttcggagacgagtgctgagccaagaacctcctagaggctgtccctggacctggagctgcaggcatcagagaaccagccctgctcacgccaagtactccccacgccttccctcttccctcttccctctccctgcccagccctcccttccttcctctgccggcaaggncaggacccacagtggctgccctgnctccgggatgttaggatagggagggtgggtgggtgggagggggccttcctccagggaatgtgactctcccaggccccagaatagctcctggacccaagcccaaggcccagcctgggacaaggctccgagggtcggctggccggagctatttttacctcccgcctcccctgctggtccccccacctgacgtcttgctgcagcgtctgtcactctttccgcttccctttttcttatncnctagcccagagcttttaaaatgaggtctggcatatacttgattacaaatgaaaactcagaaaccaattttatttattaaatcatatcttttgtttttccccctcccttctaatcccccaaaggacctatttgagctgttccccaattcatctgcttattttggaccatgaatctgccagagtgatattttctgttatttctcctccaaatttttccctgatgtttccaataaagatttacttgggtggccccttaaggtgacatcaggatgctcttatgtccttccagaataagcatacacttcactcctctccctttcatctccctctgcattcttaattccttgcttttctcacttggagccgagggtgctttagagaggtggttttccatgaatcagccaagattcctgtagaagttgggtataccaaccaccaccaccaccgccccctattccagtttcaaagctcctcggctatgctaatgtcccctcagagatgaggtttgacttttaggcccgtatgactcctccatagcctggccaaggagaccatgagtagccatgtctggtttactctttatcctgagactgtttgtttatagcttaaaacagaagtgtgtcttcccagcacaaacctaatcaatcagtgtatcagtgcatctggtggcaacagctcagcccattcaaagagcaaggattcaggaaaggcacactgatggtggggagcctcttaagagcctctaatgttctcccaaaaccagagttgagagtcggagtgccagtcgtcgggggcccactattcctgaataagggacatgcaagggcccagaagtagcttgactctcgcctaaatatctgtgcctttgcctgtcctttctcccactctactgaaacccggaacagattcccgcttgccttctgatgaagagaggttaggtaaagagagtttggaggaaaaaagacaccaggaggcaggctgcggggtaggagagggttctgagaggaggcagcaatccagaatacctccttttctagccagcatcccttgaacttttgaaaggttgtgcctaccactggctgggcacaccaggggcaatgatttccctgcagaaggaaggaaagaatgttttcacccttgcatccttcttggagaagctacagcctgtgctcagttgagtggtttcacactcagactttggctttatggttttccttccctccttgtcctttgccctgacctttgatcaacaggggtgaaaaagaaccaccctgaaggttttccatgcctctcccatttttaagtgggtagcattttgg

SEQ ID NO: 15916 - DNA, 743 bp, Homo sapiens
  misc_feature (1)...(743): n = a,t,c or g
tttttttttggagaaaccggacgagaataacatttatttagcacttattagtttctacctttatgataatcattttaagcactttaacaaggttttcaatgtgcccccacatctctgcattccagccaccaccgtgcctttgtggagtttctcagagctaccaggctcctcccaccacagggcctttgcacgtgccgctctcatctgagacactcttctttggcctctttacccctgcaacttctactcttctttgagatctcagctcgagtcttttcctcaaggaagtagcttagacttgtgcagattctgtttttttaacttttaagttcggggatacatgtgcaggtttgttataaactcatgccatgggggtttgctgtagattatttcatcacccaggtactaagccaagtatccaaataggcactcagtgggtaatggttgaagaatgaatgaagaaatagatgttagtaacatttattgagcacttactggtttcttnnnnnnnnnnnnnnnnnnnnnnnnnnnnnnnnnnnnnnnnnnnnnnnnnnnnnnnnnnnnnnnnnnnnnnnnnnnnnnnnnnnnnnnnnnnnnnnnnnnnnngttcncagccgtgcatgcatttggtatttgtcccaaanctctcctcgtgccnnnnnnnnnnnnnnnnnnnnnnnnnnnnnnnnnnnaaaagtattggtttttccanggctnntagtnntcaaggagggggncaggcc

SEQ ID NO: 15917 - DNA, 540 bp, Homo sapiens
tttgggttcaagtggtctttattagatccacataagaatctagaaaatgataaaatatcacaaaacacagcacaatgtgggttcaccaataatgaaatatagagagaggatcttatgttttaaatttttgtaacatatagtccaaaacaaatagataattatacattctgcaatagatgaggacattggcagggcatataaaattagactcttgggcttcaaatgactaagttggaagcattagcaaactcaaggaagggacaattcagaggctataatgggcttaatgctgctatttaaagtaatgaagcattttctctgctttctggattcatttcaccaaacgatttcctcagcaggtcagatatagatttgcagcaaaatgaaaaacattttccaggaataaaacaactgatccctggcaacagctgacttaacttttctgaataataaatcttcatctgacatgcccagatgcctcagagtactgtcactgatattcttaacctcttcctaaccttgccagatccttgtatttca

SEQ ID NO: 15918 - DNA, 1000 bp, Homo sapiens
ccagttacaggtgacctactcgagccctgaggatggaatccatgagctattccctgcacctgatggtgaagaagacactgcagagctgcaaggcctcagaccgggttctgagtacacagtcagtgtggttgccttgcacgatgatatggagagccagcccctgattggaacccagtccacaggtatatggttaatttgaccaccaggtgcccatgggagcagcggctttatgccctactgaatgaattatgcttcactgggctattgattcccgtgtaagggtgaaaaagaattattaggaaagatcctctttaaagaggaatggtaagaaacaataaaacttaggtgatatttaaggaaacaagtctgattaaaagaaattttggagtatcctggcttatacacaagaccataaagcaagacatttgaagaggatactaaagttgtggattatttcctaagctctgactccctgtgattaccctcactatgtataaagaaaagaagtttggcattacagagcttacttataaaaaggaacccaaactcgggcatttcatagcagcatgattctgagcacacgtgggtaagacctttcttctctggttagatatcatatgctggtgtataattagcttaaatgattgtgatttagacacctaggaaataatcaattaggggcaatttgctttccataatactttatcttcttgtgctttatttctgaagcagagtagaatgctaaagatgtatcctagtgacagcataaaccctagaggtgacagtctgtattattgcttttcgcttctcttttctgcttctgttgggagccagttttcttcttacgccgcattacagagagaacgtcaaatttagcagccatatctgccatagggtccaaataaagagacaataaaaacattattctctcttttttggatggaatactgcgtgaaatggttatccatacaaagatactttatgtagaatagaaaaagga

SEQ ID NO: 15919 - DNA, 453 bp, Homo sapiens
ccaatattcaggggagggaggtagatatcacagtctgatcagtggcccagggtatcacaaattttcaaggttatgataaagaatgcaaaagacacttataaattctacggagacatctggtgtatattcaaataacaaattgtatacagaaagcaaaatcccaaaaacaatgtactaggctaagtatctagatctataattagtacatcctgggccaactaagattcaatttcatataaaacatagaacaagtcatcctgtaaaccatttttcctaaaacaagtaacatctaacctgaaactcaaatgattaataaaaccaagcacacacaactacatactcgaatctggttcttaagttgctcggcctcctgccgtaactggtcaagctcactcatcttccgatcttagtgctcttcaatgccaccttcaagaatgtgagatctgaaacaga

SEQ ID NO: 15920 - DNA, 729 bp, Homo sapiens
tttttttttttttttttttgacagcttgaggttgggttttaatttttttatttgtatagtacaatctctgtggtagcagaaatatatgcacaaaaaacaattcaaataagagttcagagtaaaaaaaagtcagctaagactgtatcccgcaggacatttcatatatatggatttcacagctacactcgatccacgccccacaccacatacaggctgctgtctcccacaagaatgatgatgtcaggggcatcaggaaaggtaagggccgggaaaccgggcccttgggagaaccctgcccaggggaggcccagcctactcacaggatccgacactccaggcagagcagagggcaggagaggcccaaagagctaggtcaagcagctgggctcccctgggaggggagcgcggagacagggaggtcctcacactgcccccgtggccacgcatggctgtctgcacactccatcaggaggaagggcaggggagaagtcacatgcagtacagtgaaactcatcagtggtcaacacgtccagcaggaggggagagctctgtctccacagtggcggccttggctgctccagagcaatccagctgctccgcttcagccatgggaccaagagggtaaaggagcagcttcaggaggcccaggaagagggcaccttgcgcagagactggcgactgcgcaaaacagctctgcgcacaagcggtcccagggacgagagcgccgtc

SEQ ID NO: 15921 - DNA, 401 bp, Homo sapiens
  misc_feature (1)...(401): n = a,t,c or g
agccctcctgactacctgggacctatgggtgtcccaatgtaccttggcttaggcaatgatttttgagtgccctataccaagacaggaacacctatttccatgattcacagcaccatgacattcaaaacaagcacaatgactactgatgctgaaacagacaagtccctcccttcattctccaataataccctcgcatttacttaatatgtatcaagtgcctactgtatgctaggcactggtcttggtgctgggaatattgcactcaaatgaaaaaaagtangaataaaaatccttccctcangaggatctcaatctaggggnatagatagagactngataaataacattaattttattcctgaacagtgctatgatatgtacaacaacgcagcacttcgcat

SEQ ID NO: 15922 - DNA, 892 bp, Homo sapiens
tttttttttttttttttaagatttaatgctttattgctcttgatggcaaatcaaaatatgctttagaaataaagttaatttactggaaaataggagtttttgcaccaaaccataaaattgcatttcattacatcaagagaaccccctcattgtctacaatcatgcccgcttcctttcccctcagcgcccgggacacgtgaccgagatcataccctaaattcctgatccttttgcagttgccacatactgtggcttttagtacatcataaaaaagtgctttcctgtgggcctcagctgggaggccctggcgctggggctaaggggcccaaggcaccatccaaaggctgggaggaaagaacccaaacccaggccctcctcctgccctccagcctttgacaggcaactcatttggcatgatctgttttggtgtgtttaaaacatacatttgcatgtgtctagtgtaaagcaacaagtttgaggaaataagtggaaggagagaggaagttccagttagatggttccactagtgtctactggtaattggcaaaactatgagtgttgctaacctgggctgagggcacctctgcctgtgcaggcagctgaccaggcttggagaatgagaaagggttcccaaggacaggatgccagcgggattctttgttgcaaactgcacacagtgcaatttttgggaagcagggatggggagtgggcatgagaccgggttgttgggaccactctggggtcaggccctgggtgaggcacaggaggctgcacacaggcacttggtgggttctgccgggtcagggtgggaaggcaggagtagtgtctgtggcaggacgggaagaagcttcagtacatccctctcttgcacctctgcccactccacctgagc

SEQ ID NO: 15923 - DNA, 204 bp, Homo sapiens
tcggtctctccccgggcacagtttcctcgctggaactccctgcatacctccagtttgtcagtcctgagaagtttctgagttgcagttgagcccggggagagaccggactgccgctttgcacaccccgcagacagcaccatgatcgacacaagtgacaacaccgtaaccgttttgtatggattacataaaggggcgttgcatgag

SEQ ID NO: 15924 - DNA, 3255 bp, Homo sapiens
  misc_feature (1)...(3255): n = a,t,c or g
ttttaaggccaaggaattaagtgactgtatttagcacagaaggtattccatgaataacatcaaaacaacgtggacactaagagaacacatgtaactcatggacgcaggggatgcatgttgtctgcattcctgttttctgtgcctacatgtgctccaccccacacctgctgagtacatgctgggaagaccatgtcaacccttggagcagctagtgtttaaccatctcctggctagcgcctcatgttttacattttggcactaactgtcatccagatactcccctttccccctaaataagacactgtcacacaatatcttttaactcatctgtatttgttacaactttaagcagaatgtgactcgagcactacatttccatccacaagactgggtctgagttatttttgaacagctttacgatatgcttaggtaggcttttaactttgctcctccaaacaatacttttctttggaaaacaagccctgtggagagatccttccatcaagttgcttcagtttaacctatttctagaggactagtacatgcagaatggtcaacttaccagggaatgaaaagttcaaaaagtaagatcctacaagatgtaaccgaatacttttctaaacatcaagatacagctcagaacacttcaataacaagatttggtctacttaggcatccgggcttgacagctaaacactttagaccacacaaagttaacatcatgttacatacggtcttacagtgcacggttaccccaatctgtgaaaataaaccaacatgaaactcaaaaagcattactagctctggctttagtgcctaaggtatcacagcatcacttagtagacagaaatcttatcttccccttaaagtagttgtcatgccatacagactttttaatattaacaaaaataaagaaaaacatccttgaaaatatattatcagaggaattgtagagtactgaacaggtaagtcatccctcagccagagattagtctacttcttccatgcgtgatgtgtcgtcatctccttcaaggggtggcatttcttcagttacagcagcactggtatcatcagcagtagggtcatcttcatcaatacccagaccaagtttgatcatcctgtagatcctgttagcatgtgtctggggatcttccagactgaagccagaagacaggagcgcagtttcataaagcaagatgaccagatccttcacagacttgtcgttcttatcagcctctgccttttgccttaaggtctcaataatggaatggtcagggtttatctccaggtgtttctttgctgccatgtaacccattgttgagttgtctcttaggggcttgagctttcatgattctctcccatgtttgctgtccagccatatgtgcttgtgacaatacagcatggagatgtcaaccaatcggtttgacacaaccaccttttcaacttttttctccaatatgtctttcatgattttgcagaggttctcaaactttgtttttttctcttcctgcttctttttctcttcttcatcctctggaagttccaggccttctttggtgactgacactaaagtcttcccctcaaattccttcagctgttggacacagtactcatcaatgggctcaatcatatagatcacttctaagccatgtttccgaagacgttccacaaaggctgagttagctacctggtccttggtctcacctgtgatataatagatatgtttctggttctccttcattctggtgcagtagtccttgagagaaaccatctcatcaccagaggcagatgtgtagtaccttaacagctctgaaagcttcttccgattttgagagtcttcgtgtattccaagctttatgtttttagagaactgctcatagaatttcttgtagttctctttatcttccgccagttcagtaaagagttctaagcattttttgaccaaattcttcctgataactttcaaaattttgctttgttgcaacatctcacgggatatgtttagagggagatcctccgagtctaccacccctctaatgaagttcagatattcagggattagctcctcacagttatccatgatgaaaactctgcgtacatacaatttgatattgttctttttctttctgttttcaaacagatcaaaaggagcacgtcgtgggacaaatagaagggctctgaattccaactgtccttcaactgaaaaatgcttcactgccaagtgatcttcccagtcattggtcaagctcttatagaattctccgtactcctcattagtaatatcgtcgggatttctggtccagatgggctttgttttgttgagctcttcttgatcgatgtacttttccttaatcttcttcttcttcttcttgtcaccatccttcttttcttcttcctcatcagaaccaacatcttcaatttcaggtttgtcttccgactctttctcttctttttctttttcttcttctttgtcttccttttcttcagcctcatcatcgcttacttctttatcacgttccttctccacaaaaagagtaatgggatatccaataaactgagaatgtttcttcacaatctcctttattcttcgttcctccaagtactcagtttggtcttctttcaggtgtaggataacttttgttccacgnacccataggttcacctgtgtctgtcctcactgtgaatgatccccctgctgaggactcccaagcgtactgctcatcatcgttatgtttgggggatcacagttactttctcagcaaccaaataagcagaataaaaaccaacaccgaactggccaatcatagagatatctggcaccagcctggcaaagcttccatgaacgctttggtcccagacttgggcgatagtaccaaggttattgatcaagtcagccttggtcattccaattccagtatccacaatagtgagagttcgatcttgtttgttcggtataaggttaatatgcagctctttcccagagtctaatttactgggatctgtcaaagtttcataccggattttgtccaatgcatctgatgaatttgaaatgagctctctcagaaagatctctttgttcgagtagaaagtattgatgatcaatgacatcaactgggcaatttctgcctgaaaggcgaacgtctcaacctcctcctcctccatcggttggtcttgggtctgggtttcctcaggcatcttggctaagtgaccgcacaggaccaacggcacagccacaccgggacgctgaagcaactg

SEQ ID NO: 15925 - DNA, 462 bp, Homo sapiens
ttttttcattgtacaatatctttattaaagaaatgcattccagcaacactgtcagcatctttattaccaaagaaatacataactttaacagataatctctctgtatcttagtttttgcctttgcaaaacaaatggagatatatcaactctcatacaattctaaaagcattgtgctgtgctgcctcacaggggtacgttcccagaggtttctctctctagagcaatccctaataggacaattgttcactctgaggcttctggcttcttatctctcctctcttggggagctgctgcttctctgtaggttgcttccctgtgacgcagggaccatagtttctgctctaataacaccttttccactctgacgtagctgagccatacactacattgccttagtcctgttcaccctttggtgattctgttccatttgccacctggcctcttcctcctcagtcacttttt

SEQ ID NO: 15926 - DNA, 458 bp, Homo sapiens
  misc_feature (1)...(458): n = a,t,c or g
gctcacagccttacaggaaaggacgggggcgggcgcctgccctcagtctgatttctgagcgtccctgggtctgaccttaagggcaagggcagggagcttcacatttcaaatacagttgtggttacggcagcccagtacttttggccctccttgctgttcggttctcctcccttctcccaacctcctcactggtgttgctgggtgtggtcctcaatacagaatagagacccttgggcctgtgtcaccagacttctgaccccttgggcaacagccanatggagactggtcgccttttgagcctcagctctcttcctcttgttctcctagggtgggagtacagcagccaaacgctgaacttagtcccatccacttccatcttatctttgtgccttatcccctgcacttgtctttttgcctctggtactcccagtgcccatattttacccaggactggagat

SEQ ID NO: 15927 - DNA, 546 bp, Homo sapiens
tttttattgttacagaaccattaaatacaacttatacacaagcaagctgggcgacgtccggggggcagggagagtgcaagagggtcaggggtgagcagtccgggcccggtcctggagggggctgaggctgccgtcgtgggaggggcttggctggcggaggccgggctgcctgtggaggccttgaagctttgccagcagctcctggatgaagtcctcgacaggtttcccacatgactttcaggagtccctggattttccggcttctctcctcttgactctctaactccaacaattcatcaatgttgatctcatcgggcatgtctgcctccatgccgcggtacagctcctccaggcgcccgtcgatccacttctccacgtccagccgccgctgcagctcccgccggtcatacttgacggtgacgcgcgcgtgccgcttctgcagccccccgggactgcccgcctggcccgggcccgcgatggagactgcagcttgctcagcacgcgcttgcccagccgctgagctgccatcgcgctgctggacccagc

SEQ ID NO: 15928 - DNA, 640 bp, Homo sapiens
ttttttttttgctgtataattcttatttattaatgtgcaatatttagttcttaaaaaacaaaaacaaaaaacacatacgcaaaacaagacattaaacaaattctttcatgcacggcttctctacctgacaaggttccgctgcatgattttttgaggagttcccttgctcagggttggcatatgtttttcaattttcactatccagagccatatttgcagaaagatatacgaatattgtaaatggtgggatgtgctgctctcatatgatgaaaacttcagttccttggttgtctgggactttgtgtaaatgccaataaatttgagagttcgcccaactgtgtctcttaacctttgttcccaaaggtgaagggcaggatttttaatcaagtagcaatttatctttaattaggaaaacataattaggtatcatcacctcatttcaattactggtgggagaaagtcacatttcacgagtagtgacccatgttgggttatggatctcctattactgaattttgcatctgtatttatatttggcagacagccaataaaaattaaaaggtgatcaccatgtttctctgcagtccagttgtcaaagtcaccaactctgctgctgaataagaaaccaagagatacttcc

SEQ ID NO: 15929 - DNA, 1285 bp, Homo sapiens
  misc_feature (1)...(1285): n = a,t,c or g
cccatggaggcgctggggaagctgaagcagttcgatgcctaccccaagactttggaggacttccgggtcaagacctgcgggggcgccaccgtgaccattgtcagtggccttctcatgctgctactgttcctgtccgagctgcagtattacctcaccacggaggtgcatcctgagctctacgtggacaagtcgcggggagataaactgaagatcaacatcgatgtactttttccgcacatgccttgtgcctatctnagtattgatgccatggatgtggccggagaacagcagctggatgtggaacacaaacctgttcaagcaacgactagataaagatggcatccccgtgagctcagaggctgagcggcatgagcttgggaaagtcgaggtgacggtgtttgaccctgactccctggaccctgatcgctgtgagagctgctatggtgctgaggcagaagatatcaagtgctgtaacacctgtgaagatgtgcgggaggcatatcgccgtagaggctgggccttcaagaacccagatactattgagcagtgccggcgagagggcttcagccagaagatgcaggagcagaagaatgaaggctgccaggtgtatggcttcttggaagtcaataaggtggccggaaacttccactttgcccctgggaagagcttccagcagtcccatgtgcacgtccatgacttgcagagctttggccttgacaacatcaacatgacccactacatccagcacctgtcatttggggaggactatccaggcattgtgaaccccctggaccacaccaatgtcactgcgccccaagcctccatgatgttccagtactttgtgaaggtggtgcccactgtgtacatgaaggtggacggagaggtactgaggacaaatcagttctctgtgaccagacatgagaaggttgccaatgggctgttgggcgaccaaggccttcccggagtcttcgtcctctatgagctctcgcccatgatggtgaagctgacggagaagcacaggtccttcacccacttcctgacaggtgtgtgcgccatcattgggggcatgttcacagtggctggactcatcgattcgctcatctaccactcagcacgagccatccagaagaaaattgatctagggaagacaacgtagtcaccctcggtgcttcctctgtctcctctttctccctggcctgtggttgtcccccagcctctgccaccctccacctcctcggtcagccccagccccaggttgataaatctattgattgattgtgatagt

SEQ ID NO: 15930 - DNA, 1091 bp, Homo sapiens
  misc_feature (1)...(1091): n = a,t,c or g
ttactcagtagcgctgggcctactgcacagccgttcattacaatattgttacaagtacaatcagacatgcatttataaagagaatataaaaatatgtacaatagctcattttcaatgtgtgtaagttgccgaaagacaccaatgaaagtgtgcaaaaattcatttgtcaaaaaatcagaaaaagcctnccttggcaacagtgcatcaaaagcccatcagagaggtggttaaatctccaaacagtttatctcaagatttacagaaacgtccaagtacatctccttttcaaatagccatggtgaagggcaacttcagtaacaaaagaactaccaccatctttgctacagaagtgtttaataaacatcataatagatttggagaaagaacacacactccacccatgccactaccttcttactccaagggatacagacagcaaagaatttctgtctcctacaggacaacttcaggggattaaaaaaacagtaactgccagctggagggatagattaagacacattagtggaaatctagtcactgccaaaggagaaatatatttaggatatacaataaataattcaaatgcttaaaataattgaatgaacggaagagtagacttgaccaaatttacattcgttgttcaggaagagattcccagtatgctgaggggttcgtggtaagctatggctctgacgagacacagcagcgctgggcctactgcacagccgttcattacaatattgttacaagtacaatcagacatgcatttataaagagaatataaaaatatgtacaatagctcattttcaatgtgtgtaagttgccgaaagacaccaatgaaagtgtgcaaaaattcatttgtcaaaaaatcagaaaaagccttccttggcaacagtgcatcaaaagcccatctgaaatatcgagatccatttgcctcgctcaacacctaccccaaacagatggagaacaaaactatgaaagggtttgccaagtactcagcagtttcttatggcaagtctcaggctaaagcaggatgccagttcaactaatcactttatatataaatatatgtatatatttatagagtagtt

SEQ ID NO: 15931 - DNA, 1315 bp, Homo sapiens
agaactacgtcacgtcttgacaaaacttggggttaaaactaaccgatgaagaagtggttgaaatgatcagagaagccagatattgatggagacggacaagtcaactatgaggaattcgtacagatgatgactgcaaaatgaagacctactttcaactcctttttcccccctctagaagaatcaaattgaatcttttacttacctcttgcaaaaaaaagcaaaaagaaaaaagttcatttattcattctgtttctatatagcaaaactgaatgtcaaaagtaccttctgtccacacacacaaaatctgcatgtattggttggtggtcctgtcccctaaagatcaagctacacatcagttttacaatataaatacttgtactaccttaatgataaggactccttaaagttccatttgctaatgattaatacactgtttgggctggccagtttttcatgcatgcagcttgacgattgagcacagtcaggcctttgtattaaaaatgaaaaatgaaaaaacaaattcaaaacctattcaaatgggttctagttcaatttgtttagtataaattgtcatagctggtttactgaaaacaaacacatttaaaattggtttacctcaggatgacgtgcagaaaaatgggtgaaggataaaccgttgagacgtggccccactggtaggatggtcctcttgtacttcgtgtgctccgacccatggtgacgatgacacaccctggtggcatgcccgtgtatgttggtttagcgttgtctgcattgttctagagtgaaacaggtgtcaggctgtcactgttcacacaaatttttaataagaaacatttaccaagggagcatctttggactctctgtttttaaaaccttctgaaccatgacttggagccggcagagtaggctgtggctgtggacttcagcacaaccatcaacattgctgttcaaagaaattacagtttacgtccattccaagttgtaaatgctagtcttttttttttttttttccaataaaaagaccattaacttaaagtggtgttaaatgctttgtaaagctgagatctaaatggggacaaggcaggtggaggggaggccagtgtacatgtaaatgcccacagcccagcattgggtttccctcccaaggccccagcaccaacctctgagcccaagaccttgcctgaaaacaagcagataccgattgcttcatcctatttatggacatgtaggtctagttgcattttcactggggggaggggggaaggtgaattatggtaacttttaatgatctattcaggcagtagagctcttaagg

SEQ ID NO: 15932 - DNA, 1384 bp, Homo sapiens
catttacccagtctatacaccctaaggaaactgtaccctcggtacgttcgaattccggtcataacatctaaattccgcccctcaacttttttttttttctggtgagccacagggacctttattgaggtacatgacaggtgcggttccctaggccccttcctcttcaagggctctacatggaaactgtgaggaggggagattcagtgtggtgggggactgagtgtggcagggactccccagcagtgagggtctctctcttcctcttgtgctcttgcctggggctggtggtccagggggtcttactccttggaagcccatgtgggccatgaggttccaccaccctgttggctgtagccaaattcgttgtcataccaggaaatgagcttgacaaagtggtcgttgagggcaatgccagccccagcgtcaaaggtggaggaagagggtttccctgttgaaatcaagaggagacccacctggtggctcagtgtaacccagggatgcccttgaggggggccctccgaacgcctgtcttcaccacccttccttgatgtcatcatattggcaggtttttctagacggcaggtcagggtccaccaactgacacgttggcagtggggacaccggaaggccatgccagtgagcttcccgttcagctcaggatgaccttgcccacagccttgcagcgcccagtagaggcaggatgatgttctggagagccccgcggccatcacgccacagtttcccggaggggcatccacagtcttctgggtggcagtgatggcatggactgtggtcatgagtccttccacgataccaaagttgtcatggatgaccttggcccagggggtgcctaagccagttggtggtgcaggaggccattgctgatgatcttgaggctgttgtcatacttctcatggttcacacccatgacgaacatgggggcatcagcagagggggcagagatgatgacccttttggctcccccctgcaaatgagccccagccttctccatggtggtgaagacgccagtggactccacgacgtactcagcgccagcatcgccccacttgattttggagggatctcgctcctggaagatggtgatgggatttccattgatgacaagcttcccgttctcagccttgacggtgccatggaatttgccatgggtggaatcatattggaacatgtaaaccatgtagttgaggtcaatgaaggggtcattgatggcaacaatatccactttaccagagttaaaagcagccctggtgaccaggcgcccaatacgaccaaatccgttgactccgaccttcaccttccccatggtgtctcagcgatgtggctcggctggcgacgcaaaagaagatgcggctgactgtcgaac

SEQ ID NO: 15933 - DNA, 473 bp, Homo sapiens
actacagctactgaacatactccaccagagtgaaagagaacacttcttcattcacagggcaagaaacaaattagtttagggaatacagtatattggacatccaaagtttcaacagtgacatgggaagttcccaggaaaggaagtgctgagatgagcagagcagacaccatactctcttcctctcctccctccagactccccgcaacagcggctgtacctgccactggagagtgccacattttaacaacgatgatgataacagcaacatttcatcttcaccacaaccctatatggtatgtacgttatcatcccaattttacagatatgaagaactgagggacgtagagttcgagaaacttgcttaaaattacacactactggcagaactaggattcaaaccagcgtgtctggcccaaggcactggcttcttcacctgactatgccaccttgtctccccatactcgttaactcac

SEQ ID NO: 15934 - DNA, 365 bp, Homo sapiens
  misc_feature (1)...(365): n = a,t,c or g
ggtttttttttcatttataccccatttacaacacaaataattagcttcttcagtatcataatagatactctaggaaatacttgaagaaaggcaggtccctgaaggtacagataacatgaacaagaggcagttatttttaataaggcttagttctatttagtcagaacttaaggagtactttaaacctatctggaagaagaaatcaataggctgcaatgtcatgttctacttttcccataacngnccngccgttggtcttaanagccatttttggagcctattgcactgtgttctcctactgcanatattttcatatgggaggatggttntctcttatggaatgccttngactngattntaaggtg

SEQ ID NO: 15935 - DNA, 660 bp, Homo sapiens
  misc_feature (1)...(660): n = a,t,c or g
gcctctggtattagcctcataagttattgactattccccggggttggcggggagtggggacatgagttggtctgcctgttgtggggccgggaaggggagggagtcaggcacaagtggcctctttgtttggtcttaaaggcatccatttctgggaatgaagccatgttcgctgctaacacttttggatgttgtgaggccacgtggagtgtgtgagagactaggttttatggatggtctggttcaggtaccaggtctgctggaaggttcctgttcggataagctggtagctacctagctctgagcctgccttcaagaacacctgtgttcatcctctgattctctgtgtgtacctcttgtggcgtttcctctcccgggtgttgaacatcctaaccggtattgtggcaaaccccaagaacgtcagatcccaaagaacaacaacccggatggattggggaacatcttaagcaatttttagagagagggtggacttgagagtacgtnttgggccccccccacccctgaggaggaatctttacgggcccccaagacttaaattccccggnaggtttttctttaaccccngnggancncaaanttnggcaaagggntgnnccctcaannnttaattctcaagttgnttnaaangnttnngnaacccct

SEQ ID NO: 15936 - DNA, 571 bp, Homo sapiens
ctactactactaaattcgcggctgctcgacttttttttttttttaacaactggtcatcaatttattaaaatagttgacttaagcatctgcaatggtgacttccacctcaactcctggctcaatactgatggaagtaatctgcttaacaatctcagaaggactgtgcaagtcaatgagtcgcttgtgaattctcatctggaaacgatcccacgtcttagaaccttcaccacaaggagtttttcttgtagtgattctcaaagtcttggtaggcattcgaactggtcctttcactttgagattcttttcttttgcgcctcttatcaagtcagcacacaccttttccaaggattttacgttgcggcttgttagggtgattcgaattcggtgaattgccacctccggctccacgggtgtttttccggtatccttaaaagccatggctgttgcgcgcgggcttcctgaccgacttgttcctcggcgagagcgaacagcggtgagtcaggagcaggagcgtgcggaccaaaaatcctcagcccttacgaccgcgtcttcctcaaaaaaaaagtcgagc

SEQ ID NO: 15937 - DNA, 478 bp, Homo sapiens
ttttttttttttctttatatccatatctttatttaaacaagtttccataatagctaggagaatacagcattaatgacacacatttactaagcacaacaatggacaactacaaatttagagcataaatgtaattctgatattgttttggtttttatcttagcactaggtgatatctagtgaaaacccatgtttcaaaggcttttgttgatatgagatgaattattaacttatttttaaaaattgcacgtgagatatgctagaatgggttctagagtctagagttagttgataatgcctttcatgtctcagtatttctgcttcctttttaatgggtaaatgtttcacctaagaactttcaaaaaattgtatcaaaattttctatgcagatcaaagtagaattccttttccagacccaacaaggaaaaatatttgaaaactgcaatgttcaattccattttagttaaaaggatgtccattt

SEQ ID NO: 15938 - DNA, 1106 bp, Homo sapiens
tttttttttttttttaaaccattactgtgactttattataatagttaacaatattttagtggtatacaatcatatcacaattactcaagctatatacaaacaggtatttatataagtctacatttaaaaaagaaaaagcaattaatgacctccccaaaatcacattatcatcaacaagatttttttctaaaagttacggccaatccaataacaaaaaaattcacagttattctgcagacattttaaagatgcaggaattgtattgcacattatataattataaaccataacaagcagttatatattttaatctagtttttcacaaaatttacattatcatgcaatacttcactgtacacagaatgatggaactagaacaggttaacttacaaacttttaattatagccacaaatttagaattattttaaaggttatatttccaaattattatactaaaaaaacactccagtgtaataaaacagacacaatccataatttggttccacaggatcaaaattacttttttaagtgttccttcctttgtcctttggcctttccttttcccttttccatccctgtagtgcagtaccgagctttttgataagaactgacagaaccttgtccagtggatccatgactcctctttgaagccatttaggaatagtagtcctagcatgatgaaagcccaatttttgaagaatataatcaacacctactggatcaatctttcttccagtccaagaaattaatctaagagtaggttctagatgccatgtattgcacataaaatctctccagtccacagtagtataagtgatgctatcttctctatctttatcagaggaattgtcgtcatgtataataattggacttttttgtcctggtcgagtagataaaatcccgaggtggaaagatggctttttctttttctttaagataagctgatactaaatcatgaagaaacatgatgagctcagcatccatagtcacacaaatgtggtcagtgaactctgtcaccacactacattctacttttggcttcaggctggcatcctgtaatgaaggctcctgtggttcttgaacatgaatggatttaaagtcaagc

SEQ ID NO: 15939 - DNA, 437 bp, Homo sapiens
ttggggaatttggcccctcgaggcccaagaattcggcacgagggtgaacctggcctctggtcctcaatcgagttcctctacgaagaacacaccagaaatttgtcattgccacttcaaccaaaatcggatatcagcaatgtaaaaatcccaaaacatcttactgatgcttacttcaagaagaagaagctgcggaagcccagacaccaggaaggtgagatcttcgacacagaaaaagagaaatatgagattacggagcagcgcaagattgatcagaaagctgtggactcacaaattttaccaaaaatcaaagctattcctcagctccagggctacctgcgatctgtgtttgctctgacgaatggaatttatcctcacaaattggtgttctaaatgtcttaagaacctaattaaatagctgactacaaaaaaaaaaaaaa

SEQ ID NO: 15940 - DNA, 681 bp, Homo sapiens
tatttccttgtcctgatttccctttgctacacttatcactactaccagggaatgttatattacacataaatttatttgctgtattttctgcaccacctaactcccccacccccacgcatattgtaagctctgtgcaagtaggacctttgcatttctcattcactgctatatccccagggcctaatatagtgcctactggttaatatatatttgttgaatggttgaacagactcagactgaatgccaaataatgttaacttaaaaaaaaagtatacacatcaaaatatttaaagaaacaattattgatttaaacataaaactgatattgggtaccttggttttacaaacactcctcacaatacttccccttggtgaagcctttcaggaactcttctgcaagaattattttcagagccagcttgtcaacgacatgattggtctttttacttcataagtcttattttggtttcaccaaaagcttcacagtgtaacaaaccaaactcagcacagaaaacatatgacaatatattttagattctctaagacaaggtctcataagtttagatgacaagtgacaacatcaatggactaagtatatcacctcccataacttaaaaggctaatactcataaacatgaaagttctggagtatgaaatttaaaacacaaattttggatataa

SEQ ID NO: 15941 - DNA, 320 bp, Homo sapiens
ctgctgattactagttaggaccagacttggcatcggcaacgatgttgcaggccctggcgtgggccctctggggcctgagccctcctcgcagccctgcgggacccctctgtcccccttgaacaccacgttcacccagcgtgggttcctctcctccctgcccttctgcccccgtcagaccacaggacagtctcggccacgtcagagccagcatgggctccccaccacgcaggcctccctgcttctccgggcttctgcttctgttactatgacgagctccacactgcccttccccaggaggtcccatcctgcagcctggtctg

SEQ ID NO: 15942 - DNA, 480 bp, Homo sapiens
gattgagtgtcaacttgattggactgaaggatgaagtactgttccttggtgtgtctgtgaggagcatgttgatttggcaaagaacaatttggctttgaagagggagcaccattttgcctgtttctcatgtgtgagcagacggactcagaaggcactggttccaatccagatttgctgttaagcacagcgccctccacaaccatccatgaagtggagcagaagaacttccgcctttcagagcaagcctcctgggattcattgattttgtaattccttgcctctatttgtgttataatacattgaaaccaaagctagcatttcaaaaatcaggaccaagtattttaagttactccgggaccaagaacataaagttccagtgaatgaaattaacataaggacagagccgttccgaccaagaaaaagaaaagtccaggagattaaagataccattcagatgaactgttacaaggtaactccatg

SEQ ID NO: 15943 - DNA, 627 bp, Homo sapiens
  misc_feature (1)...(627): n = a,t,c or g
ttggaaaggaatttagagattatctgatccaagccttattttagagataagaaagatgctacagttgcttaatagatactcagactctgcccaaggcaaatacatgttaacacttctttcaggtttggtgggatctgcagatactcctatatcctacctcccaatcttatctccagggtggaaatgctgggcagtattagtcagggttctcttagagggacagaactaatatatatatgtatatataattatatatattatatagaactaatatatatatgtaatatatattatatataaatnnnnnnnnnnnnnnnnnnnnnnnnnnnnnnnnnnnnnnnnnnnnnnnnnnnnnnnnnnnnnnnnnnnnnnnnnnnnnnnnnnnnnnnnnnnnnnnnnnnnnnnnnnnnnnnnnnnnnnnnnnnnnnnnnnnnnnnnnnnnnnnnnnnnnnnnnnnnnnnnnnnnnnnnnnnnnnnnnnnnnnnnnnnnnnnnnnngnnnnnnnnnnnnnnnnnnnnnnnnnnnnnnncactggcagctgattagattgtgccaccaggttaaggtggtctgcttcctagccactgctccatgtaactcttttggacccctacagctcaagagctc

SEQ ID NO: 15944 - DNA, 340 bp, Homo sapiens
agttatttaacttctttgtgcctgagttttttttggctctaaaagtgctacactgaaataaagaatagtgaatataaaccttttcatgataacttacaaataacaagccatatctggttatggctaaactatcaataagcacctaccttatgaatttgttaatgaggattaaataagtgcttaaaaagctcttaagcatgtagtaagtacttaataaagctcagatattatcatcattactgttattcaacaaagcttttccctagtatctacaatggaacactttggctcatttcctggttcctataagaccttaggttcagaatttccaaatctccta

SEQ ID NO: 15945 - DNA, 993 bp, Homo sapiens
cctttgtatagaaattttgcttttttttccctcattctactttagaactgcaagcttgtgcactgtggatgcgtgaatattttagtgtgaaacgtgtttttgtcatagtattgaaataaaacttcaacatagtttggttgtggaaggtatagcagatagttcagaaaaaatattcaggaaacaaaaatcactcaaacggaatcgaagccttttaacaaagaaaatgaaatacagatgatgatgatgatgatgaagatgatgctaagtaaacagaaatcagtactccgcatgcgctcctctcctaaggtacaaagcagcaagaggttagggtggcaaggctgcctctgggtccattctgtgggccactctccccaacgttctgacacttctgcagtctgatcagtggcgatgctagattataatttcaaactgtgaagaataatggtcttgtcatttgctcaatgtggggttatgttgcattttctccagctcctggggatggaaatggaggatcccagaacacacagccctggcccctttgattctagggcctgcacagatctctggttcaaatgcacaggccctcagaatagaggaacatgaagagagatcttagaagcacacagtagaatgtgagagcctgggtgtctgagaccgggagggcccagcagtgaggggcaggctcttctggtcaccaggctgttcagtggactcagttcttcatcttgtaatgtcgcatggctttgccacaccaggccaagcccatgccataccttgtcaagactgtcaaagtggttgtggttaggtcaaactggttttggttctgatggttaggaagaaacaggtcagccctcagatcacctggcccgggacagctgaccccctagaacgcctggctctgccattagctaggacctaagactctgcccacattttggtctgttctctcccattacacataggtttgtctcagcatgcaagagtttttccttt

SEQ ID NO: 15946 - DNA, 1490 bp, Homo sapiens
aattgccggccgcgtcgacttttttttttttttttcaagtgaatatgttttattaaatgcatactaatatctttctatagtatgtgagtacacataataaattaaaatgtatatatttattaaatatagatagatataataccagaacatgattatttcagatgagaaatcaaaataaacccatttttaagtatcttttggtcactccaaattgatattgctcataaaaaaatacactagttttccctggggaaaaaaaattaattccataggcaatgcagttaagggacgtgttttatttcatagctttctgcaagcaaaattgctctgatacaaaatgagttcaatgatacaggtgctactgtccactcaagcaaaagaaaacctcacatgtatatgaacgcactttatacttatattcttacagtataataggtctaatatccaggatgcctctggcctcattgaaagcaatggcagagaaatgctgcaaggtacttgaatatcatagtactggcaagtgcttgaagtaacttcctgtgagttctctgtcagatactgcaaagactgcgtgtgggtgtgtttgtctttttgtcttccatcttttggtttacatttaaatcatctcaaaaaatatcccctgcatgtatcattcagcttctcagagtttccataaaaacaggaaaatgtcatgaggtatccctaacgtcagggattgatgtagtgctgtggctgtcagagaggatgtagacttacctgtaggtacagtaactgagtttagtgtgtgcccggcacgttacagtgcagaaatgttagttcatgttaaacttttcctcctcacatatgatgtgactttaaccccagaatatctgacaaaaaaaattatacagataaaataaaaagacaaatacacaaataaggccatctgcagaattttaaactcgcctcttgcaatatttcacaagaatttctacaccatattttacatcgttcaaacttaaataataaatgctcaaggaagggccttggtagaaccaattgcactatctctttgaggacttgtccaatttgctggcaggtgatttcctctggggcgtggggatttttgaaagcttcgctgtggatggccgagaacctgctcggggtgtaggtctgtgtgtctgggggacagtttccacatctgagcacacggactggatttctgaaatgtcaaagtctgatgcatcaactcctcggcggctgctggccctgctgcccagctttgcttccagctcgacttcctggtcggctgggagtcttcttggaatcagcaaactgtgttcggactctggcagctgcagttgttatcaagccactgtcctccccagagtggaagcctttccctgataaatatcctggaagtcgaagcttgcttccttgtattggcgttccctctgcagatggcacgggaaagtctgagcactctgctgctttacaaggagttgacattt

SEQ ID NO: 15947 - DNA, 365 bp, Homo sapiens
ctgtgttaaaaacgtgtgaatagtttgataatttgtacacataatcaagagcatctcagctggactttgtgttggctgctgtatagaacatgaacaaatgtcaagggatagaaaattactttggatatttaaaagagaagaaatatatagtctatttgttttgtaacaagtttctgtaaataaaataatttatactatttataagaaaaggttgtgctttgctttataagaaattagcttgtggaacaaacatgttactaaacgggcaataaaattaggacttctcaataaataaggttggctgcatgaaatattgtacgtttctgcctcgttgtgatactaaaccctttcagtctactctgact

SEQ ID NO: 15948 - DNA, 385 bp, Homo sapiens
aggatagcagcctggcctgtctccgagttcttcctaatccgagacacaagcctcattcccaacgtactctggtttgagtacacggtaacccgggcagaagccaggaacagacaacgcaagctggggacgaaactgcagtgaccagtgggtgtggctgggtccagccttccagatctggcccgcacgatgccttgcaggatggacaggatgacagacagggacgaagcagagaccttttacagacccaagtcaccaagtggagcctttttttttcttattttaattttaatgaacaaggtggaccaaagggctgaaccagcccctcaaccaggaccctggggggcctgctgcctgggggccgtggccagagacccttgctgtgctt

SEQ ID NO: 15949 - DNA, 894 bp, Homo sapiens
tttttttttccagagtttacggttttattttaaaacagtagtaaacaatttcattgatttttcttaaatcaaaccacctcatactcggcttgtctcaggcaaaaagtaaaaaataaaaataacgggagggaaaccatggaaaccgacctaccttccctagaaataagcccctggtcttggcatctggaatggcttttggacactgcctttaacaaatgagaaaagaaagcaccaaaacattgtgcttcagcagcaggttaggaaactccacaaagaaaggggtggggaggattcgaacacagatcccgagtgacccagttcagtcctcaaaacttctgagagtctggaggcgtctcctctccacaactccctttcagagtgacttagagatgggggtccctttaggaagagccctcccacgaaccaggctgatagggatctgtgagcccacaccccagacacaggtttgagggggaccccaagcaggttcccagctggtcagagatgggtcaggaaggacaaggacatattcagagcacacagagggaaggacgagggacttcgggtgcctgttgcctcactcctctcctcacggctccttcccattttgttcacgtggggatgaagactaactgctactggatggcaggacaagaaagagctgtaaacagcttgggtctgctcacccaaatgtgcaggctcctttgtcagaaagcgattattgtcttagggacaggggaccagagaaagcccttgtggtgttgggtcagtacggggtagaacacaacgacagcagccgccagacgcgtgctcgctgctggccctgcccccagacagggaacactgaccgaggttctggaacggcaacggtggcagggaggtgtgggtatgctc

SEQ ID NO: 15950 - DNA, 2266 bp, Homo sapiens
  misc_feature (1)...(2266): n = a,t,c or g
gcggcccggttcctgggagtgtcggtgcggcgcggtggttggggcggatcccgcggggcccgggcgggggaaggagtcaccggcccggccatggcggacaacgagaaactggacaaccaacggctcaagaatttcaagaacaaaggccgcgacttggagactatgagaagacaacgaaatgaagttgtagttgaattaaggaagaataaaagagatgaacatctcttaaagagaaggaatgtaccacatgaagatatctgtgaagactctgatatagatggtgattatagagtgcaaaatacctctctagaagctattgttcaaaatgcttcaagtgataaccaaggaattcaattaagtgcagttcaagctgctaggaagcttttgtccagtgatcgaaatccaccaattgatgacttaataaaatctgggattttaccaattctagtcaaatgtctagaaagggatgataatccttcattacagtttgaagctgcttgggcattaactaacatagcatcaggaacttctgcacagactcaagctgttgggcagtctaatgcagtacctctttttctgagacttcttcgttcaccacatcagaatgtttgtgaacaagcagtatgggctttgggaaacataataggtgatggtcctcaatgtagagattatgtcatatcactgggagttgtcaaacctcttctgtccttcatcagcccctccatccccatcaccttccttcggaacgtcacatgggtcattgtcaatctctgcaggaataaggatcccccaccgactatggagacagttcaggagattttaccagctttatgtgtcctcatataccatacagatataaacattcttgtagacactgtttgggctctgtcatacttgacagatggaggtaatgaacagatacagatggttattgattcaggagttgtgccctttcttgtgccccttctgagccatcaggaagtcaaagttcaaacagcagccctcagagcagttggcaacatagtgactggcaccgacgagcagacccaggttgttctcaattgtgatgtcctgtcacacttcccaaatctcttatcacacccaaaagagaagataaataaggaagcagtgtggttcctttccaacataacagcaggcaaccagcaacaagttcaagctgtaatagatgctggattaattcctatgataattcatcagcttgctaagggggactttggaacacaaaaagaagctgcttgggcaatcagcaacttaacaataagtggcagaaaagatcaggttgagtaccttgtacagcagaatgtaataccaccgttctgtaatttactgtcagtgaaagattctcaagtggttcaggtggttctagatggtctaaaaaacattctgataatggccggtgatgaagcaagcacaatagctgaaataatagaggaatgtggaggtttggagaaaattgaagttttacagcaacatgaaaatgaagacatatataaattagcatttgaaatcatagatcagtatttctctggtgatgatattgatgaagaccctagccttgttccagaggcaattcaaggcggaacatttggtttcaattcatctgccaatgtaccaacagaagggttccagttttagaaagatgttgtggaagttaggtacaatgcagcactgagnnnnnnnnnnnnnnnnnnnnnnnnnnnnnnnnnnnnnnnnnnnnnnnnnnnnnaaaaggtttgannnnnnnnnnnnnnnnnnnnnnnnnnnnnnnnnnnnnnnnnnnntgccgaattcggcacgagcacgcgtggagaatttttccgccgcctccgcccgcaggacccccgccgcgatgcgntaacgtcgcctcctacctgcctgggctgcccctanggggccaactcctccccgaagcgccaaaggacatcaagaagatcttggacagcgtgggtatcgaggcggacgacgaccggctcaacaaggttatcagtgagctgaatggaaaaaacattgaagacgtcattgcccagggtattggcaagcttgccagtgtacctgctggcnggggctgtagccgtctctgctgccccaggctctgcaagcccctgctgctggttctgcccctgctgcagcagaggagaagaaagatgagaagaaggaggagtctgaagagtcagatgatgacatgggatttggcctttttgattaaattcctgctcccctgcaaataaagcctttttacacatca

SEQ ID NO: 15951 - DNA, 518 bp, Homo sapiens
gaattccggaagttttttgcttcctgggtggtttgcaggggccacaggcttggccccacctcgctggtgctccctctactcctttctgtgtttgaagcaagttctggttcagacagaaagcctggcctttaagggcgttgggtccccacttcctcagtcatagatgtgatgtgcttcccttgacttgggaccttctgagggatgcaaggtggaccaaaggacccgtgaatggccagggcatgcctgcgtggctttcggttccttaagcagtgatttcagtccacttaaagggtgtgaaaattctgagaatgctacggaccaaatatattttatgtaacagttgggacccggcaacacttcagggctctttcaaaatctggtagctacgagctcttccgtgactgagatgggacaagagtgaagatttgtccttgcttttagctctgctccaattcatagttctaatgggaaattatgtgacttaaacccaggctgtgagatgcatcagtgcggaattc

SEQ ID NO: 15952 - DNA, 911 bp, Homo sapiens
ttttttttttttttctggctaacagaattttattgttaaatcacagaaactttagtgcaaaacaaaaatcacgaagtccatttaatagcaacttcatgtcctgctggctttgcttgctgtctcctggcaaccagaagtggacagaagcgtgggtgcccaagtgggccacagacagcttccaacccccacaccccagcatccaatccacacccagcagacccttcggcatgccgccctctaccaggaagccagaggcctaggagctcgccatccatatttatttgaaaaggtcaaaaggagcatctatgagacaagggaggggtgcaggctgaaagcagcgccttcaacagcccagggacatgtaggcaacacgagcaggcacagcgcggccaccactgtccacacgctcacacaagccaggcccgcctgtcgttcggagagctagcaggttacattcaggcagatggccctcttcccacccaaacccacagaaccccaaacaaggcatcaccaggaaagacacgggaaagccaaatcacagttgaaccagggacagagaacccttggcccccactgatgtcccaagccaccagcaggctggcttccaaaatcccctatgctattacagtgggatttacatcatttaaaaagcctgattattccaggcttctaatctttcatataaaactgcctttggtttggcggccttgttcaactgggaggcccaggaaaaggggggagggtccctcattcgggcaggaggcaccttcagaaagcccaggcccacagttgcccagacattgtccggggccagaacaaaggcctaaccaaggggtttagtgggttccgttaaagaaatgttgggccttgcagaagaggtttttctcctcccaagaggcgccatggagggc

SEQ ID NO: 15953 - DNA, 796 bp, Homo sapiens
ggcacgagggccttcgcgcacctcatggaatcccttctgcagcacctggatcgcttttccgagcttctggcggtctcaagcactacctacgtcagcacctgggaccccgccaccgtgcgccgggccttgcagtgggcgcgctacctgcgcacatccatcggcgctttggtcggcatggccccattcgcacggctctggagcggcggctgcacaaccagtggaggcaagagggcggctttgggcggggtccagttccgggattagcgaacttccaggccctcggtcactgtgacgtcctgctctctctgcgcctgctggagaaccgggccctcggggatgcagctcgttaccacctggtgcagcaactctttcccgggcccgggcgtccgggacgccgatgaggagacactccaagagagcctggcccgccttgcccgccggcggtctgcggtgcacatgctgcgcttcaatggctatagagagaacccaaatctccaggaggactctctgatgaagacccaggcggagctgctgctggagcgtctgcaggaggtggggaaggccgaagcggagcgtcccgcaggtttctcagcagcctgtgggaagcgcttgcctcagaacaacttcctgaaggtgatagcggtggcgctgtttgcagccgccttttgtctcgtcggccccaagaagagttggaacccggcatccacaaatcacctggagaagggagccaagtgctaagtccacttggctttctggggaatttcgggaagtctttgcttgccttttttgtcgccgc

SEQ ID NO: 15954 - DNA, 909 bp, Homo sapiens
ttttttgattgtaaatgttttaatagaaatacacaatctttcactttctcagacagcaataaaggggtttgtaacaatcactaagaatacagaattttgccacgaggatgcagcataatctactgcaaagctgatctgcccaattacacgtagtcagctgcaagaatatcagaaatcaatacaaacaagtattgacaggtgttacagacatgcaaaatatccttcaatgcaacgaatttttaagaaatcagctagcctatattaatcagatgttttaggtcaaaccaagtttcccatcttgggctcagtgaaatagtattaactcattgagtctcctttcccccaggaatgttgggaatggcagaacagaaagagctatcactccttaaattcttttatgcaagtgttactccaacacttattttacttggtttacttggaatgtatgagaggaaactgatgttttttacaatggccaactgtatgtctaaattttcagttctcctttttgtgagtttcctgccagaaatccttgttaaaggatcagcggggtgttcacccccgaagttcttgctgttttcagtgtcctactgcagacaggtttaaaaagccaactgaacagcagcagaatgaagtatttttgaggtctattcaaaaatgtacagtcccaccactcactagaacaagtacacaagtaaatggactcagccagtgcaggagatggaaggctgccattttttatgtttgtgcacagccttacagtttggaggtgtgtttggcctactctaatatttctagtttgtcaaaggctgtacactgttactgccagtttgacctacatactgtgttccctttggatccctgctaccatttggacctcgtgtgtgtgtgtgtgtatgtgtgtttgtg

SEQ ID NO: 15955 - DNA, 251 bp, Homo sapiens
agttcaggatttcatttattaatttcttcttgctgcattttggaagttaagggaaccaataaggtgactcttttgcagattggaatatggtgctcagccagccatatggaagcactgtcctggcgtgatctgccctgggctgttggctctctgagtgctgtcttgggaggagcactgcccttcagaacagaagagatggcttccagtcccctctcccccttctcccagtctctctgaggctgcttgttggg

SEQ ID NO: 15956 - DNA, 547 bp, Homo sapiens
  misc_feature (1)...(547): n = a,t,c or g
attagatttagtcaaataagtcttagcaggcaataaagtttctgtggtggcatatatcatgtaagacacttaaagtaagtttgtgaatttgtcaactttcgagcatcaaacaaatattttacttaaattttattttatcttatttttaggtgcttttaatctcaaaattctgaaaagcgaatagcagtgttttcagaaacaaatgtgaaagcagtcaaattaagtagatactatttagaaatgtaaaatactctccagatctaccattaatagaaaataaactaaaccttatattttatttttgccaaaatattttattataaaatatggaccaaaatatttaaaatgcacaatgcttttaacttaaatgtgctaaccctgtttctgtctgttttgtgctgtaccttttctgattcngaattatagaaaacttgataaatacntggattttaaccaatggagactacaggcagatggggactaagtgtttatgggggacaattatggacnatttaaccttanatatattttgggttaatagggaata

SEQ ID NO: 15957 - DNA, 447 bp, Homo sapiens
  misc_feature (1)...(447): n = a,t,c or g
tttttttttttttgtggtctaaaataaacttttaattgcacatttgtgtcttgggttatctgtggggtgagaaacctcctcacttccaatcccagctatctgggtacaatctggtgttgtggtctggctgtcggcgaggggtagaggtgggtgcaggactggcccccgagtctgcaccgacctcttcagggcagggagctcagaccatggtagtacttgcactgcttcagggcctcgctgaagccctcacacagggacaggtcactctgagtggtggaacagtccaggaactgcctgatctcataggcgcagggccccatctgcaggggctggggggcagcgggggtgggggcctgctggacagcaggttgnggagggctccgagctccccgccgctgaaggctccggtcanggcgctgcccatgacgtgtcccacagccgagccca

SEQ ID NO: 15958 - DNA, 418 bp, Homo sapiens
gaatgactatgaaattaaataatgcaaacttaaagctgttggaaatttaccttattttgagccttgagaggaatgtggctgtgtggcctgagttatgtagcatgcaactgcaacttctgctttttcctgtaaatgatcaggaaaggccttgtggcaccagacataagaccccctgaaagtatcatccctcctgatggaatggtaaagcaatctttcttggaacatagcaagtagtaaccgatcaaattgctataacgtgtgtactgaccttatgtggaaaatgctgcaaccctgtttactgcctatgtaagtgaaatcttaacttccccattttggaatgctgactccagtcattaggtgtctgtatttcctgagtggttaccctcaagctttgtgctcaaataaactctatacttaa

SEQ ID NO: 15959 - DNA, 465 bp, Homo sapiens
  misc_feature (1)...(465): n = a,t,c or g
ggtaatttataacacgagcaatttttgtatgtttaaaggattaccatccctagcctgtattgttgctttgctgtgagggaacggttgggacagaaaaagtgtttgtgtagctctgaaacttcaatttctaggaatgcagctactcactggggcttccctgcttgaagatcatgggcttttcccttccactggagaccaaggaaaagtcgagagttggataagggatctggctctgagttctatgtttcctgctgcttgtagagaggcctgaggatgatggggttgcaaatccagagaaatgttcagagatgctgctgctactgctcttattacccccatgctcgtgccgaattcttgggcctcgagggccaaatttccctataggtgagtcgtatttaaatttcgtaattcatgttcattagctgttttccngttgttgaaattgtttattccgcttcacaattt

SEQ ID NO: 15960 - DNA, 988 bp, Homo sapiens
gcgaccgccaactggacggcgggcttcggcgcgggcacacgccgcccggcgttgtgggcatccggcccgcgcggcgcggcgcgcgccgctcctcgtgctggaagaattcaagacggagaagaagctgtgcaagatgttctacgccgtcacgctgctcttcctgctcctctgggggccctacgtcgtggccagctacctgcaggtcctggtgcggcccggcgccgtcccccaggcctacctgacggcctccgtgtggctgaccttcgcgcaggccggcatcaaccccgtcgtgtgcttcctcttcaacagggagctgagggactgcttcagggcccagttcccctgctgccagagcccccggaccacccaggcgacccatccctgcgacctgaaaggcattggtttatgaggggaggccccgccacatagacccccaacccagcctttccctttggctcggacggtgacgttgtatcttttccttctggcccctgtttaattttctaagctgccttcaaaatgactcgaagtggacagacacttggattgtactgactcctttgggggtggggtgggtgaggagtaggatgctcagcccactccagctccgcacattcgtcctcctaactcgactttcttcctgacaataggccctgcagtctttttgtagcggtactgacgtcttttattccatgtgtggttcctttttttctttttctataaaggctgtactaattttcttcatgcaacgtttcctaaagaccatggccagttttctacagaagctatttttgacaacctcaagtggcattacattttgcagtgaagtagaggaacctagggggacttcttcacaagttagatttcttgaggatcttctgttggaagcaggagaaagtggggggtggggggaagttgtccgaaatgccctctgaattgccggctgcagggtccttgtgctgcgctggttctttgaaagtctcagtgt

SEQ ID NO: 15961 - DNA, 575 bp, Homo sapiens
gcgaccgccgctttcggccagaagtcagccgtggccaaacaccagtgggttcatcggcccgggggcggggcacgaggggccgggtcgccgggcgtctgtctgtgaccctgacccctggccacggagacctggacccgcccgtgggcttccagctgtacccggagatattccaggagtgtgggtgacggccttaaaagtgactatctagacattacgggaggcccgagatgggctcaggggcccgaacctctgcggcggcctgcagggaggtcccagaatctagggcaagagctggccctggggtgcggacagtctgatcttgggcccttagcagcctcctctgccagcaccttgctccccactgcccagggctctccaaggccccctctactgaggcagggctgagttgagaacccccagacctacataaggggaaccaaaagctgtttctcagcccagaggtgctaagaggactgaggtagaggagaaccttgttttacccattgtctttttaaattttttatcattatttttattcttgtgaccctcccagaacacaatactcattgtctttt

SEQ ID NO: 15962 - DNA, 856 bp, Homo sapiens
ggcacgagcttgggttcttttcctatgactccatcaattccagctaatcctcccatggctttcaatccttacataccacatcctgggatgggcctcgttcctgcagaacttgtaccaaatacacctgttctgattcctggaaacccacctcttgcaatgccaggagctgttggcccaaaactgatgcgttcagataaactggaggtttgccgagaatttcagcgtggaaattgtacccgtggggagaatgattgccgctatgctcaccctactgatgcttccatgattgaaggcgagtgataatactgtgacaatctgcatggattacatcaaaggtcgatgctcgcgggagaaatgcaagtactttcatcctcctgcacacttgcaaggccagactcaaggcagctcatcatcagatgaaccattcagctgcctctgccatggccctgcagcctggtacactgcaactgataccaaagagatcagcactggaaaagcccaatggtgcccaccccggtctttaatccccactgttttccactgccaacaggctctgactaacctgcagctcccacagccggcatttatccctgcagtgccccatgatgcacggtgctacacctaccactgtgtctgcagcaacaacacctgccacccagcgttccgttcgctgcaccaactacaggcaatcagctgaaattctgaacagcagagttatggagtatcagaatctttccatggaaacctccatatggcctttctatatatattctcgtatgtcttattctaccaacacaacaataagcgtgttgcagtcaatgtattaagcaaagcaaacctgccagccagcaaattc

SEQ ID NO: 15963 - DNA, 1021 bp, Homo sapiens
ctgacttcttccctataaaaagatactgagagctccataatgaaagaagttgttatactttctcagaatattctggaccactgaatgcacttctaatagagctttaatctaaagaagttagttcagtggttattaactgattttattacaggagaaaaaaactttaacaaaaaggcagggagaaaagtgtgaagggcatcaagcaaaatgacaggggcttcaaaaaacaaccaaagacaaaaccctatcttctgaagaccaaaggtccaactttacttactgggctggcacagctcttctgaactccttgagtttagaatagagctcctagaataataaggcggccaaatttaaagatcagtcaatacagtagggacctgctattgatctctcaggcactgagtcttcacatccagtgtcaagcccagcccagcatatggggtgatatgagcagaaaacacacatcggtgtgtcttgatttctcgcagctgtgtaatgtggcatgagaagtatgttttggtgccacatatttctcaatctgatgcctttttgtctttttttttttttgccatttgcatcctatttcatagtgccaaaatgaatttttgtatcttgtcttgtctttgtccattataaactggaggatcacagttaagccttccatgaattcatagtttggaatcatttaccttaccattattttggatttttttcttattacagtgtcactacactgtattcatgtgggggaacaaacatgtaggtgcttgaacatgccccacagacacagttgtagccctagtatttgtgacggtcattattgacacagtgcagactttgcagatggagcattatgctctcagaggactttaaaaatatgtatattaagcaattaactttctggagttggagttatcaaatcttgctgggaaattaacttccaagagctctgaattggatggaattccatctggcttcagagaacaatcagcctatatgaaacggagctttgaaatgtttt

SEQ ID NO: 15964 - DNA, 106 bp, Homo sapiens
cattcaaattcaggaaatccagagaactccagtaagatactccacaagaagatcaaccatcaagacacatagtcatcagattctccaagatcaaaatgggggaaaa

SEQ ID NO: 15965 - DNA, 614 bp, Homo sapiens
  misc_feature (1)...(614): n = a,t,c or g
tacaatcaggaatgtttactaaaatgtacaacttattgggtacagattgtatattcatggcattcattctgtagatggtcttgtgtagcaaatctagattagaataagaaaacctatttttatattatgtatatttaatggtgtctaacttcattatggttttattttttggaataagaggtagtcgatagagacagctggcaagatggccgaataggaagagctctggtctgcagctcccagcgaganaatgcggaaggtgannnnnnnnnnnnnnnnnnnnnnnnnnnnnnnnnnnnnnnnnnnnnnnctggttagacagtgggtgggtgcagcccacgggagggtaagctgaagcagggtggggcatcacctcacccaggaagtccaaagggcgagggaacttcctcacctacccaaggaagccatagggactgtgctatccagcccagaaattatgcttttcccatagtttttgcaacacggcagaccagggagattcccttgtgtgccaatgctaccaggggccctggggtttcaagtgcaaaactaggtggctgtttggggagacactgagctagctgcaggagttttttttttttcccccagtggga

SEQ ID NO: 15966 - DNA, 825 bp, Homo sapiens
aaaattattcagagtctgttggatgagttttggaagaatcctccagttttagctcctacttcaacagcatttccttatctatacagtaacccaagtgggatgtctccttatgcttctcagggttttccatttcttcctccatatcctccacaagaagcaaacaggagtatcacttctttatctgttgctgacactgtttcttcttcaacaacaagtcataccacagccaagcctgccgctccttcatttggtgtcctttcaaatctgccattacccattcccacagtgggatgcttcaataccgacaagccaaaatggttttgggtacaagatgccagatgtccctgatgcatttccagaactctcagaactaagtgtgtcacaactcacagatatgaatgaacaagaggaggtattactaggaacagtttctgactttgcctcaactaaaacaaattattaccgacaaagatgacttagtaaaaagtattgaggaactagcaagaaaaaatctccttttggagcccagcttggaagccaaaagacaaactgttttagataagtatgaattacttacacagatgaagtccactttcgaaaagaagatgcaaaggcagcatgaacttagtgagagctgtagtggcaagtgcccttcaggcaagattgaaagtagctgcacatgaagctgaggaagaatctgataatattgcagaagacttcttggagggaaagatggaaatagatgattttctcagtagcttcatggaaaagagaacaatttgccactgtagaagagccaaggaagagaaacttcagcaggcgata

SEQ ID NO: 15967 - DNA, 870 bp, Homo sapiens
gtcgaccactatagggcaaaacttttttttttttttttgtctttgtacaaaattttattaaaggtctttagagagcaacatccagactccagaatacagctgccaaggagaccctgttatgctgtggggactggctggggcatggcaggcggctctggcttcccacccttctgttctgagatgggggtggtgggcagtatctcatctttgggttccacaatgctcacgtggtcaggcaggggcttcttagggccaatcttaccagttgggtcccagggcaagcatgatcttcaccttgatgcccagcacaccctgtctgagcaacacgtggcgcacagcagtgtcaacgtagtagttaacaggggtctccgctgtggatcatcagggccatcccacaaactttcatgggatttaagccctctgtcctcgggagtttcccagacaccacaacctcgcagcctttgggccccactctccatgatgaaccgcagcacaccatagcaggccctccgcacagcaagccctcctaggagtttgtaacgcagagactctgcctgggcaatggcacacagacctctagtggccaccttttcagcataaagctctacactgccctctggaaagccaaacctcttctgaactacagcagtcagttcccgaatccgccggcccttctcaccaagaacattctgtgttctggtggctaagataatgatttctgtcctggttggtgtaactcgcacctcaactccagagtagccatcttcagccagctcccgagtaagaaactcattcagttcagctttgaagatgccatgcagcgacaaacttcctcttcttggatatttgcactgccatcttgccgccgcg

SEQ ID NO: 15968 - DNA, 428 bp, Homo sapiens
ccagcgggtgtacctggctgagtctctgtggccgcggagcgcggagctaaagcggctcggattatcctgggcagaccagagacttgaccagctaaacacttccgtcggtccggggcgtggacggggccagatcagcctcctgctctcccgagtcagggccacggaaaggcacaaatccatccgtgcgactcctggtacccagaccgggaggttgtctagtcacgcgcggtccgtgttgggcgatagctgaggagccggcgtccctgccaacgactcggcccccgggaaggtcaggagcctggggccctggtcccgcaactgtcttcgggcggacgcatccctcacgtctctccgcagccccgcgggtcctgccccgaaggcagcgcgctaacgtgggccgtgggatggcaacaattttccgacggttt

SEQ ID NO: 15969 - DNA, 463 bp, Homo sapiens
agactgcagttcctcgcttacctgtgcagtctaattttgagctgcctctttgtagtcttaaaaggcaggagcttcgtgttgtgggtctgctaacccgtacgtttccgtgggcaagtcgtgtgtactcctcgccatggctcagctccaaacacgcttctacactgataacaagaattatgccgtagatgatgttcccttctcaatccctgctgcctctgaaattgccgaccttagtaacatcatcaataaactactaaaggacaaaaatgagttccacaaacatgtggagtttgatttccttattaagggccagtttctgcgaatgcccttggacaaacacatggaaatggagaacatctcatcagaagaagttgtggaaatagaatacgtggagaagtatactgcaccccagccagagcaatgcatggttccatgatgactggatcagttcaattaaaggggc

SEQ ID NO: 15970 - DNA, 1387 bp, Homo sapiens
ttaaatccagctccatacaacgctccgccgccgctgctgccgcgacccggactgcgcgccacacccccctgccgacagctccgtcactatggaggatatgaacgagtacagcaatatagaggaattcgcagagggatccaagatcaacgcgagcaagaatcagcaggatcacggtaaaatgtttattggaggcttgagctgggatacaagcaaaaaagatctgacagagtacttgtctcgatttggggaagttgtagactgcacaattaaaacagatccagtcactggggagatcaagaggatttggatttgtgcttttcaaagatgctgctagtgttgataaggttttggaactgaaagaacacaaactggatggcaaattgatagatcccaaaagggccaaagctttaaaagggaaagaacctcccaaaaaggtttttgtgggtggattgagcccggatacttctgaagaacaaattaaagaatattttggagcctttggagagattgaaaatattgaacttcccatggatacaaagtcaaattaaagaagaggattttgttttatcacatatactgatgaagagccagtaaaaaaattgttagaaagcagataccatcaaattggttctgggaagtgtgaaatcaaagttgcacaacccaaagaggtatataggcagcaacagcaacaacaaaaaggtggaagaggtgctgcagctggtggacgaggtggtacgaggggtcgtggccgaggtcagggccaaaactggaaccaaggatttaataactattatgatcaaggatatggaaattacaatagtgcctatggtggtgatcaaaactatagtggctatggcggatatgattatactgggtataactatgggaactatggatatggacagggatatgcagactacagtggccaacagagcacttatggcaaggcatctcgagggggtggcaatcaccaaaacaattaccagccatactaaaggagaacattggagaaaacaggaggagatgttaaagtaacccatcttgcaggacgacattgaagattggtcttctgttgatctaagatgattattttgtaaaagactttctagtgtacaagacaccattgtgtccaactgtatatagctgccaattagttttctttgtttttactttgtcctttgctatctgtgttatgactcaatgtggatttgtttatacacattttatttgtatcatttcatgttaaacctcaaataaatgcttccttatgtgattgcttttctgcgtcaggtactacatagctctgtaaaaaatgtaatttaaaataagcaataattaaggcacagttgattttgtagagtattggtccatacagagaaactgtggt

SEQ ID NO: 15971 - DNA, 773 bp, Homo sapiens
ctttacccaagaatgtggtattcgtgcttgacagcagtgcttctatggtgggaaccaaactccggcagaccaaggatgccctcttcacaattctccatgacctccgaccccaggaccgtttcagtatcattggattttccaaccggatcaaagtatggaaggaccacttgatatcagtcactccagacagcatcagggatgggaaagtgtacattcaccatatgtcacccactggaggcacagacatcaacggggccctgcagagggcatcaggctcctcaacaagtacgtggcccacagtggcattggagaccggagcgtgtccctcatcgtcttcctgacggatgggaacccacggtcggggagacgcacaccctcaagatcctcaacaacacccgagaggccgcccgaggcgaagtctgcatcttcaccattggcatcggcaacgacgtggacttcaggctgctggagaaactgtcgctggagaactgtggcctcacacggcgcgtgcacgaggaggaggacgcaggctcgcagctcatcgggttctacgatgaaatcaggaccccgctcctctctgacatccgcatcgattatccccccagctcagtggtgcaggccaccaagaccctgttccccaactacttcaacggctcggagatcatcattgcggggaagctggtggacaggaagctggatcacctgcacgtggaggtcaccgcagcaacagtaagaaattcatcatcctgaagacagatgtgcctgtgcggcct

SEQ ID NO: 15972 - DNA, 693 bp, Homo sapiens
ggtcgacttttttttttttttttgcagattaaggcttgttttattttaatggctgatctatgtaatcacagaggccagtatgtacagacaaagtgggaggttttatttcttggtctcttcctccttggataaagtcttgatgatctcctccttcttggcctggaggcgctcttcacggcgcttgcgtgcttccttggtcttagacctgcgggcctcagcctggtcagccagggagcttcttgcgggccttgtctgccttcagcttgtggatgtgttccatgagaatccgcttgtttttgaacacattcccccttcaccttcaggtacaaggctgtgaatacatgtggcgatcgaatcttcttaagattcacgggtatcttctgaagcagccggcggcaaaatcctcattctccctcatccatgtgaccttctctggcattcggggcattggctgtacccttccgcttacctatgcccatgtgccctgcccttccggcgggccaaggtgtttttccggcatcgagcccgggaatggaccgtcacaggcttgcggatgatcagcccatctttgatgagcttccggatctgctgacgggagttggcattggcgatttcattggtctcattggggtctaaccagaccttcttcttgccacagcggaggacactagaggcgaagctcttctgaagcct

SEQ ID NO: 15973 - DNA, 831 bp, Homo sapiens
aggatttggacgagggggtggccgcggaggctttaacaaaggccaagaccaaggacctccagaacgtgtagtcttattaggagagttcctgcatccctgtgaagatgacatagtttgtaaatgtaccacagatgaaaataaggtgccttatttcaatgctcctgtttacttagaaaacaaagaacaaattggaaaagtggatgaaatatttggacaactcagagatttttatttttcagttaagttgtcagaaaacatgaaggcttcatcctttaaaaaactacagaagttttatatagacccatataagctgctgccactgcagaggtttttacctcgacctccaggtgagaaaggacctccaagaggtggtggcaggggaggccgaggaggaggaagaggaggaggtggcagaggtggtggcagaggcggtggttttagaggtggaagaggaggtggaggtgggggcttcagaggaggaagaggtggtggtttcagagggagaggacattaagtgaaacagttgacagacatcaccagttgacttctgcattaacctgcatgatctgtttctactatggattggaaacttgtttcttgaacaagtcttgaagatcttggtcattttatgacaatggatctaaaatgtcagcatcatgcaaagtgcaacggaatagtgaattttgctctaaaagagcatgaacaagtctttctaatgttttgtacagtgcctggcactctgtgggtgctcaataaatggataggagttttcatttgaagcatatttgaatttttaaaataaagtgttttattcccttaaaaaaaaaaaaa

SEQ ID NO: 15974 - DNA, 747 bp, Homo sapiens
aagaataataaacatttattattgcttctaagtcttagattcagctggagggttcttctgctttggctgggcttactcatgtgtcggcagtcatctgtgggttgggtgactctcctgatcttgactgggggtaggctgactgtgggctagtctaggatggcttcagctggtatctctggctctttcgcatgtctctcacctacacatctcataaccctccagctgatcagccatgttctcatggcactggcaaagagcaagagggcaggcctcctttaaagcttctgtttgcttcatgtttatcgacatctcattggctaaaacaagtcacatgtctggtcccagcatcagagtgagatgggactacaatgttataggcaaaaagagatggatacaggggagaccatgaatagggatcatcaaaacaatcagcctaacacaggacacattaaccaattttatctggaaaagaaaggctttatagaagaggctacactagaactgagtgttgaaacatgagagagtattcactaagtgggcagctgttacttggaactggatgcaggctggtttaccacaatcaatagaaactcagcaggtctttctgtgctcatgacagggttctattatttgtatcttggcttcatttcttctggtcaggcacagagcagcaagcacacaacaaatgtttgctgaattgaattgaatatcttactgtgaacaaggtgtggactgaaacagctgaac

SEQ ID NO: 15975 - DNA, 1150 bp, Homo sapiens
cattcaattgtcactttattgcaagatggtagaattaattacaaatttaaactataacctgttaatctttagtcaggcagcaagtttttataaaggcaaatgcttattcagaagtgatcacggaacaactcaaagggcagagccaagaaggatgagaaacatctgactggccgatagagatttcgttctctcactatatgaaacaaacttttcatttttaggaagggtaaactataacttcagtagacaccaacacagaaagactttgtcaaatagactagtttccatttagtcagtcaactgtttctagctgactcaattgggatagatacatttacataactgggctgtgccttgagcccttctttgcccagcagctttaggtccggcaatgccacttggcaattgtctccttttcctgctgtgtggagatgcctttgcaccacgtgccttctccacccaatttatcatgtgttcttgttcctttcgacgcatcatgttctgcacagatatatgatagtccaggcgattctttacttccttatatactctatacagtcgggtcccggtaagtaacttccaaagccatagccaatgttattcctttgcacatcaaaaaggtaatggcgcttctgaaccagtgcctgttgtgacttctccgtatcaattgcattctggatgtgttggatggaagcctgcttcgccctcttctagttgggcaagtttttgcctcattgagtttatcagcaaagtctgcaacaaagggaccatattttttaattccatagaccattacacctagtactgatagggcagtgaaggtctctgcgctaatcacatatatttctttggataaagcgtacaagacaagcccagttccgagtacatagggtcctgttacaccagttttaggataaagaaactggaagaattcctcagggatcagtcccataacgaacttttcctccgtattcaggaagaggtggtacagggacaaggtgtggctgccctgtatgaaaggtccttgttgcctgcaatacccctggacctaggaaggctgcattcttcagagagggggccgctgtggcggcggcggaaagtaccacccgggacagcatggtcaacgaaagtccaggtagcaatcttagcg

SEQ ID NO: 15976 - DNA, 571 bp, Homo sapiens
tttttttttattttcaagttcaatatttccattatctttctctggctttggagttgtaatgctggcttgttttctgacataatcaaccacttgacccaactggtttgaactacaatactggacctcattatcacatacgtaacaccatacactccagttgtccaaactaagaaccagacagtgaggttcagatcttggcgtcagatagtgcttcaaggcatgctgctcctgagaatttctgccacagccctgatggccacatttaagacacagccaaactgaaggcttttcttctgtttcttcttcagctttatctttcactttattgtcagtcttacagtcttggcagatattccattccacattcactaaagcctttttcaaattaccttgttccaatccttttctaatgtgtctgcacacaggttctaaagtttcagaggaatcatcgattggaacagtttttccctttgtccgtttctttcccatgttggcactttatggattacttactgacacaaaataacaatcttccctctcctccccttctaactgctccgatcccacgggg

SEQ ID NO: 15977 - DNA, 392 bp, Homo sapiens
tttttgttttgacgttttattttcttggatttgtgaacaggtcaaaagcgtcaggcagagagataagaaagcaagtgtgctatacatcgaaggacacatgaacccgaaaatgaaaggtttcacagtgtctcttaaaagtttaaagcactttgattgtaaagagaaacagacgcttctgaatcaagccagggaggacttcaaccaggacatcggctggtgtgtctccctcatcaccgactacagggtccggttaggctgcgggtcttttgctggctctttcctggaatattacgcggctgatataagctatcctgtccgaaaatccatccagcaggacgtgttggggaccaagcttcctcaactgagcaaggggagccccgaggagcccgtgg

SEQ ID NO: 15978 - DNA, 1461 bp, Homo sapiens
ctgcgtgttgggtggcttcctgcggcgtttccactctcgctctcctttcgttgcctgatcgccgccatcatgggtcgcatgcatgctcccgggaaggccctgtcccagtcggctttaccctatcgacgcagcgtccccacttggttgaagttgacatctgacgacgtgaaggagcagatttaccaaactggccaagaagggccttactcccttcacagatcggtgtaatccctgagagattcacatgggtgttgcacaaagtacgttttgtgacaggcaataaaattttaagaattcttaagtcttaaggggacttgctccctgatcttccctgaagatctctacccatttaattaagaaagcagttgctgttcgaaagcatcttgagaggaacagaaaggtaagctaataaataaaacctggtgctaagtaggactgcttgtactaaattttttcggtaaaatgtaatgcatctggtttgaattatccaaggcttagtacacaaaccagtgtagtgctgctttgaagttcaaattctatccaaagagattttcattatagaaagtgcatggtagctctacattctcttattaatgtttgataatgttaggtcattttgggtggttttcttgaattgcaccaaattttatttttaggataaggatgctaaattccgtctgattctaatagagagccggattcaccgtttggctcgatattataagaccaagcgagtcctccctcccaattggaaatagtaagtatcaactcttttgtcgttgttatcaagaataggagtcagccagtagtaaaagtcctagtagtaaatatgttcagccttgggggctagtagtaaatatgttcagccttgggggctattttgttaactgctctttgagctctggcctggtagtgggaaagcagccacaggcaatacataatcgaatgggtgtggctgcttgtctttaataaagacaagcagagggccatagttgcagaccccagatttagaccatgaataagccctttgactctcttttagatagtaggtagattttcctttcatacctctactcccaggagtttgaattaattttcacatgaattgctcactatgatgattggttgccagacattcgcagtttccaccagaaatgtttttccttatgttggccagttcttccttggatgtctgagtgagcatcttcattcattgtgcttgaacacaatgagttggttcaggtattcagtagtttggtgcactttatatagtttggatttattaactgtttgagaatagcaccattagtggggagattctgttaatgaatgtggagggaccagtattaatcctgattttctttctttccccttttgcttttccagtgaatcatctacagcctctgccctggtcgcataaatttgtctgtgtactcaagcaataaaatgattgtttaacgt

SEQ ID NO: 15979 - DNA, 504 bp, Homo sapiens
gtcaacaatcccaagaagcaggaatgaaagtggcgctttctccgccccagggttccaggacatagtctgaggcaagatggagggtatgaggggccttcacacttcacttcatcccttctacccatcacaacatgctgggcgtgtcgctcttcttgcttgtcgttctctatcactacgtggccgtcaacaatcccaagaagcaggaatgaaagtggcgctttctccgccccagggttccaggacatagtctgaggcaagatggagggtatgaggggccttcacacttcacttcatcccttctacccatcacaacatacaaagcaactacacctggatttttccaaacaacttttatttcctcagagtcttccttaatcctatggaacaagaagctgccactgaatagggcccagtataggggcttgcttttctactccctccccccaatataaaaatatagacttttttttgtggtcccaaaaaaaaaaaaaaaaaaaagtcgac

SEQ ID NO: 15980 - DNA, 523 bp, Homo sapiens
  misc_feature (1)...(523): n = a,t,c or g
tatgagttgaactgtaacaggcaatacctgttgtatggccaacatgattactcagttgcagtgcacatgttggctggttggcatatgctctgtaagcgcantgngcagtctttaagatccatagaaatactctttgacgtttgatctctaagttccatttctgggcatttgtccttaaggaatggaaaagcaggcaaactaaagctagtcattgcagcaatgacccactggaaacaactgaaaatataatgagagaattgtaggagtgctgggataaaatgttgtggggtccactcaaaatgatttcgagtgtttgtagtgtggaaaatgcccaagccaggggggacacatttaaaatggtgggtacacttctgattgtgattatccaaatatataggatgggacaaggacagggagggtttttttgaaaagtaaaggacagntgaggaagtgttaatattaaccntaagtctttttaaaacgtcggganacccttttaaaaattnccggttgccttttgaat

SEQ ID NO: 15981 - DNA, 714 bp, Homo sapiens
ctcctaccctcaggtggtcttctgcctcaggtaatacattacagacagtgagccaccatgcccagttgctgcctacattttcaatattccactcaacaaacattgacacttcctgggactggaaagtaaaaaaaatctaagtactgtgtagaattaagcaaacaagtgatgtttcagaagtaacccattactgcttaaaataaagcctacatcaacacttaactcaaacggaggacaattgttatttagtttttatttcataatcataaacttaactctgcaatccagctaaggcatgggagggaacaaggaaaacatggaacccaaagggaactgcagcgagagcacaaagattctaggatactgcgagcaaatggggtggaggggtgctctcctgagctacagaaggaatgatctacgtggttaagataaaacacaagtcaaacttattcgagttgtccacagtcagcaatggtgatcttcttgctggtcttgccattcctggacccaaagcgctccatggcctccacaatattcatgccttctttcactttgccaaacaccacatgcttgccatcccaaccactcagtcttgggcagtgccagattgaaaaactgggaaccatttgtgttggggtccaggcatttgcccatgggacaaggatggccaggacccgtatgctttaggatgaagttctccatccttcaatttct

SEQ ID NO: 15982 - DNA, 14992 bp, Homo sapiens
cctaattacatagttgaaaagcgtgaatcgggtacaacagcttggcagcttgtcaattccagtgtcaagcgcactcaaattaaagtcactcatctcacaaaatacatggaatattctttccgtgtcagttcagagaacagatttggtgtcagcaaacctctagaatcagcaccaataattgctgaacatccatttgtcccaccaagcgctcctaccagacctgaggtctaccatgtgtctgccaatgccatgtctattcgttgggaagaaccctaccacgatggtggcagtaaaatcattggctactgggttgagaagaaagaacgtaatacaattctttgggtgaaagaaaacaaagtgccatgcttagagtgcaactacaaagtaactggtttagtagaaggactggaatatcagttcagaacttatgcactcaatgctgcaggtgttagcaaggccagcgaagcttcaagacctataatggctcaaaatccagttgatgcaccaggcagaccaggggtgacagatgtccaaagatcaacagtatcactgatttggtctgccccagcgtatgatggaggcagcaaggttgtgggctacatcatagagcgtaagccagtcagtgaggtaggagatggtcgctggctgaagtgcaactacaccattgtatctgacaatttcttcaccgtgactgctctcagtgaaggagacacttatgagttccgtgtgttagccaagaatgcagcaggcgtaattagcaaagggtctgaatctacaggccctgtcacttgccgagatgaatacgctccacccaaagccgaactggatgcccgattacacggtgatctggttaccatcagagcaggttctgatcttgttctggatgctgcagttggtggcaaacctgaacccaaaattatctggaccaaaggagacaaggagctagatctctgtgaaaaagtctctttgcagtatactggcaaacgagcaactgctgtgatcaagttctgtgacagaagtgacagtggaaaatacactttaacagtgaaaaatgccagcgggaccaaggccgtgtctgtcatggtcaaagtgcttgattcccctggcccatgtggaaagctcaccgtcagcagagtaacacaggagaagtgcactttagcctggagccttccgcaggaagacggaggagcagaaatcactcactacatcgtggaaagacgcgagactagcaggctcaactgggtgattgttgaaggcgaatgcccaaccctatcctatgtcgttaccaggctcatcaagaacaatgagtacatattccgagtgagggcagtaaacaaatatggccctggtgtgcctgttgaatcagagccaattgtagccagaaactcattcactattccatcaccacccggcatacctgaagaagttgggactggcaaagagcatatcatcattcagtggacaaaacctgaatctgatggtggcaatgaaatcagcaactacctagtagacaaacgtgagaaggagagcctgcgctggacacgtgtcaacaaagactatgtggtgtatgataccaggctgaaggtgaccagcctgatggagggttgtgattaccagttccgggtgaccgcagtgaatgcagctggtaacagtgagcccagcgaacgttccaacttcatctcatgcagagaaccatcatatacccctggaccaccttctgctccaagagttgtggataccaccaaacacagcattagtttggcatggaccaaacccatgtacgatggtggtactgacattgtaggatatgttctggaaatgcaagagaaggacactgatcagtggtaccgagtgcataccaatgccacaataagaaatactgaattcactgtgccagaccttaaaatgggccagaaatattccttcagagttgctgccgtgaacgtgaagggtatgagcgaatacagcgaatcaattgctgaaattgagcccgtggaaagaatagaaataccagatcttgagcttgcagatgatctaaagaagactgtgaccatcagggctggggcctccttgcgcttgatggtgtctgtatctggaagaccacctcctgtcataacgtggagcaagcagggcattgaccttgcaagccgggcaattattgacaccactgagagctactcattgctaatagtggacaaagttaatcggtacgatgctggaaaatacacaattgaagctgaaaaccaatctggcaagaaatcagcaacagtccttgttaaagtctatgatactcctggtccctgtccttcagtgaaagttaaggaagtatcaagagattctgtgactataacttgggaaattcccacgattgatggtggagctccaatcaacaattacatcgttgagaagcgtgaagctgctatgagagcattcaaaacagtaactaccaaatgcagcaagacactttacagaatttctggacttgtagaaggaaccatgcactatttcagagtgctgccagaaaatatttatggcattggagaaccttgtgaaacatctgatgcagtactggtctcagaagtgcctttggtgcctgcaaagctagaagtggtcgatgtcaccaaatccactgttacccttgcctgggaaaaaccactctacgatggtggtagccgactcactggatatgttctcgaggcctgcaaagctggcacagagagatggatgaaggttgtcaccttaaaacccacagtcctagagcacactgttacttccttaaatgaaggtgaacaatacttatttagaataagggcacaaaatgagaaaggtgtgtcagaaccaagagagactgtcacagccgtgactgtacaagacctcagagtgttgccaacaatcgatctttctacaatgcctcagaagaccatccatgtcccagctggcagaccagtagagctggtgatacctattgctggccgtccacctcctgctgcttcctggttctttgctggttctaaactgagagaatcagagcgtgtcacagttgaaactcacactaaagtagctaaattaaccatccgtgaaaccactatcagagatactggagaatacacacttgaattgaagaatgttaccggaactactttagaaaccattaaagttatcattcttgacaagcctggtccaccaacaggacctattaagattgatgaaattgatgctacatcaattaccatttcctgggaaccacctgaattggacggtggtgctccactgagtggttatgtggtagaacaacgtgacgctcatcgtccaggatggctgcccgtttctgaatcagtgactaggtccacgtttaagtttaccagactcaccgaaggaaatgagtatgtgttccgtgtggctgcaacaaaccgcttcgggattggctcttacttgcagtctgaggtcatagagtgtcgcagcagcatccgtattcctggacccccagaaacattacagatatttgatgtttcccgtgatggcatgacacttacttggtacccaccagaggatgacggtggctcccaagtgactggatatattgtggagcgcaaagaagtgagagcagatcgatgggtccgtgtaaataaagtacctgtgacaatgacacggtaccgctccactggccttactgaaggcttagaatatgaacaccgtgtcacagccattaatgcaagagggtctgggaaaccaagtcgtccttccaaacccatcgttgccatggatccaattgctcctccaggaaagccacaaaacccaagagttactgatacaacaaggacatcagtctccctggcctggagtgttccagaagatgaaggaggatctaaagtcacaggctacttgattgaaatgcaaaaagtagatcaacatgaatggaccaagtgtaacaccactccaaccaagattcgagagtatactctaacacacctacctcagggtgcagaatacaggttccgcgtcctagcttgtaatgctggtggacctggtgagcctgctgaggtaccaggaacagtcaaagtcactgaaatgcttgaatatcctgattatgaacttgatgaaagataccaagaaggtatctttgtaaggcaaggtggcgtcatcagacttaccataccaatcaaagggaaaccattcccaatatgtaaatggaccaaggaaggccaggatattagtaagcgtgccatgattgcaacatctgaaacacacactgagcttgtgatcaaagaagcagacaggggtgattctggcacttatgacctggttctggaaaataaatgtggcaagaaggctgtctacatcaaggtcagggtgataggaagtcccaacagtccagaagggccactggaatatgatgacatccaagtccgctctgtgagggtcagctggagacctcctgctgatgatggtggtgctgacatcttaggctacatcctcgagagacgagaagtgcctaaagccgcctggtataccattgattccagagtccgaggtacatctctggtggtaaaaggcctcaaagagaatgtagaataccatttccgtgtttcagcagaaaaccagtttggcataagcaaacccttgaaatctgaggaaccagtcacaccaaaaacaccattgaatcctccagaacctccaagcaatcctccagaagtactcgatgtaaccaagagttctgttagcttgtcctggtcccggcccaaagatgatggtggttctagagtcacaggctactacatcgaacgcaaagagacatccactgacaaggtggtcagacacaacaagactcagatcaccaccacaatgtacactgtcacagggcttgttcccgatgctgagtatcagttccgcatcatcgcacagaatgatgttggcctgagtgagaccagccctgcttctgaaccagttgtttgcaaagatccatttgataaaccaagccaaccaggagaacttgagattctttcaatatccaaagatagtgtcactctacagtgggagaaacctgaatgtgatggtggtaaagaaattcttggatactgggttgaatatagacagtctggagacagtgcctggaagaagagcaataaggaacgtattaaggacaagcaattcacaataggaggtttgctggaagctactgagtatgaattcagggtttttgctgagaatgagactgggctgagcagacctcgcagaactgctatgtctataaagactaaactcacatctggagaggccccaggaatacgcaaagaaatgaaggatgttaccacaaaattgggtgaagctgctcaactctcatgccagattgttggaaggcctcttcctgacattaaatggtacagatttggtaaagagctcatacaaagccggaaatacaaaatgtcttcagatggacgcacacacactcttacagtaatgacagaggaacaggaagatgaaggtgtttatacctgcatagccaccaatgaggttggagaagtagaaaccagtagtaagcttctcctgcaagcaacaccgcagttccatcctggttacccactgaaagagaaatattatggagctgtgggttccacacttcggcttcatgttatgtacattggtcgtccagtacctgccatgacttggttccatggtcagaaacttttgcaaaactcagaaaacattactattgaaaacactgagcactatactcatcttgtcatgaagaatgtccaacgtaagactcatgctgggaaatacaaagtccagctcagcaatgtttttggaacagttgatgccatccttgatgtggaaatacaagataaaccagacaaacctacaggaccaattgtgatcgaagctctattgaagaactccgcagtgatcagctggaaaccacccgcagatgacggaggctcctggatcaccaactatgtggtggaaaaatgtgaggccaaggagggggctgaatggcaattggtgtcttcagccatctcagtgacaacctgtagaattgtgaacctcacagaaaatgctggctattacttccgggtttcagctcagaacactttcggcatcagtgaccctctagaagtgtcctcagttgtgatcattaagagtccatttgaaaagccaggtgctcctggcaaaccaactattactgctgtcacaaaagattcttgtgttgtggcctggaagccacctgccagtgatggaggtgcaaagattagaaattactaccttgagaagcgtgagaagaagcagaataaatggatttctgtgacaacagaagaaattcgagaaactgtcttttcagtgaaaaaccttattgaaggtcttgaatacgagtttcgtgtgaaatgtgaaaatctaggtggggaaagtgaatggagtgaaatatcagaacccatcactcccaaatctgatgtcccaattcaggcaccacactttaaagaggaactgagaaatctaaatgtcagatatcagagcaatgctaccttggtctgcaaagtgactggtcatccaaaacctatcgtcaaatggtacagacaaggcaaagaaatcattgcagatggattaaaatataggattcaagaatttaagggtggctaccaccagctcatcattgcaagtgtcacagatgatgatgccacagtttaccaagtcagagctaccaaccaagggggatctgtgtctggcactgcctccttggaagtggaagttccagctaagatacacttacctaaaactcttgaaggcatgggagcagttcatgctctccgaggtgaagtggtcagcatcaagattcctttcagtggcaaaccagatcctgtgatcacctggcagaaaggacaagatctcattgacaataatggccactaccaagttattgtcacaagatccttcacatcacttgttttccccaatggggtagagagaaaagatgctggtttctatgtggtctgtgctaaaaacagatttggaattgatcagaagacagttgaactggatgtggctgatgttcctgacccacccagaggagtcaaagttagtgatgcctcacgagattctgtcaacttaacatggactgagccagcctctgatggtggcagcaaaatcaccaactacattgttgaaaaatgtgcaactactgcagaaagatggctccgtgtaggacaggcccgagaaacacgttataccgtgatcaacttatttggaaaaacaagttaccagttccgggtaatagctgaaaataaatttggtctgagcaagccttcagagccttcagaaccaaccataaccaaagaagataagaccagagctatgaactatgatgaagaggtagatgaaaccagggaagtctccatgactaaagcatctcactcttcaaccaaggaactctatgagaaatatatgattgctgaagatcttgggcgtggtgagtttggaattgtccatcgttgtgttgaaacatcctcaaagaagacatacatggccaaatttgttaaagtcaaagggactgatcaggttttggtaaagaaggaaatttccattctgaatattgctaggcatagaaacatcttacacctccatgaatcatttgaaagcatggaagaattagttatgatctttgagtttatatcaggacttgacatatttgagcgcattaacacaagtgcttttgaacttaatgaaagagaaattgtaagttatgttcaccaggtctgtgaagcacttcagtttttacacagtcataatattggacactttgacattagaccagaaaatatcatttaccaaaccagaagaagctctaccattaaaatcatagaatttggtcaagcccgtcagctgaaaccaggggacaacttcaggcttctattcactgccccagaatactatgcacctgaagtccaccagcatgatgttgtcagcacagccacagacatgtggtcacttggaacactggtatatgtgctattgagtggtatcaacccattcctggctgaaactaaccaacagatcattgagaatatcatgaatgctgaatatactttcgatgaggaagcattcaaagagattagcattgaagccatggattttgttgaccggttgttagtgaaagagaggaaatctcgcatgacagcatcggaggctctccagcacccatggttgaagcagaagatagaaagagtcagtactaaagttatcagaacattaaaacaccggcgttattaccacaccctgatcaagaaagacctcaacatggttgtgtcagcagcccggatctcctgtggtggtgcaattcgatctcagaagggagtgagtgttgctaaagttaaagtggcatccattgaaattggcccagtttctgggcagataatgcatgcagttggtgaagaaggaggacatgtcaaatatgtatgcaaaattgaaaattatgatcagtctacccaagtgacttggtactttggtgtccgacagctggagaacagtgagaaatacgaaatcacctacgaagatggagtggccatcctctatgtcaaagacattaccaaattagatgatggtacctacagatgcaaagtagtcaatgactatggtgaagacagttcttatgcagagctatttgttaaaggtgtgagagaagtctatgactattactgccgtagaaccatgaagaaaattaagcgcagaacagacacaatgagactcctggaaaggccaccagaatttaccctgcctctctataataagacagcttatgtaggtgaaaatgtccggtttggagtaactataactgtccacccagagcctcatgtaacatggtataaatcaggtcagaaaatcaaaccaggtgacaatgacaagaagtacacatttgagtcagacaagggtctttaccaattaacaatcaacagtgtcactacagatgatgacgctgaatatactgttgtggcaaggaacaaatatggtgaagacagctgtaaagcaaagctgacagtaaccctacacccacctccaacagatagtaccttaagacccatgttcaaaaggttactggcaaatgcagaatgccaagaaggccaaagtgtctgctttgagatcagagtgtctggcatccccccaccaacattaaaatgggagaaagatggtcagccactgtccctcgggcctaacattgaaattatccatgaaggcttggattattatgctctgcacatcagggacactttgcctgaagacacgggttattatagagtcacagccactaacacagctgggtccaccagctgccaggctcacctacaagtggaacgcctgaggtacaagaaacaggaattcaagagtaaggaggagcatgagcgacacgtacaaaaacaaattgacaaaaccctcagaatggctgaaattctttctggaactgaaagtgtaccactgacacaggtagctaaagaggctctgagagaagctgctgtcctttataaaccggctgtaagcaccaagactgtaaaaggggaattcagacttgagatagaagaaaagaaggaggagagaaaactccggatgccttatgatgtaccagagccacgcaagtataagcagactaccatagaagaagaccaacgcatcaagcagttcgtgcccatgtctgacatgaagtggtataaaaagatacgtgatcagtatgaaatgcctgggaaacttgacagagttgtacagaaacgacccaagcgcatccgcctttcaagatgggaacagttctatgtgatgcctcttccacgcattacagatcaatacagacctaaatggcgtattcctaaactgtcccaagatgatcttgagatagtgagaccagcccgccggcgtacaccttctcctgattatgacttttactaccgacctagaagacgttctcttggggacatctctgatgaagaattactcctccccattgatgactacttagcaatgaaaagaacagaggaagagaggctgcgtcttgaagaagagcttgagttaggtttttcagcttcacccccaagtcgaagccctccacactttgagctttctagcctacgttactcttcaccacaagctcatgtcaaggtggaggaaacaagaaaaaacttcaggtattcaacctatcacatcccaacgaaggctgaagctagtacaagttatgcagaactgagggaacggcatgcccaggctgcgtacagacagccaaagcaacggcaaagaatcatggctgagagggaggatgaagagttgcttcgcccagttacgaccacccagcatctctcagaatacaaaagcgaacttgacttcatgtcaaaggaggaaaagtctagaaagaaatcaaggcgacaaagagaagtgacagaaataacagaaattgaggaagaatacgaaatctcaaaacatgctcaaagagaatcatcctcatctgcgtctagactactgagacgacggcgctccctgtctccaacttatattgagttaatgaggccagtgtctgagctgatccggtcacgtccacaaccggctgaggaatacgaagatgacacagaaagaaggtcacctactccagagagaactcgcccacgatcccccagccctgtgtctagtgagagatcactctcgagatttgagaggtctgcaagatttgatatcttttccaggtatgagtccatgaaagctgctttaaaaactcagaagacatcagaaaggaagtatgaagttttgagtcagcagcctttcacactggaccatgcccctcgaatcacactgagaatgcgctcgcacagggtaccatgtggccaaaatacacgttttattttaaatgttcagtctaagccaactgccgaagttaaatggtaccacaatggtgtggaactccaagaaagcagtaagattcattacaccaacacgagtggagttctcaccctggaaattctggactgtcatactgatgacagtggaacctaccgtgctgtgtgcaccaactacaagggcgaacgttctgactatgcaacgttggacgtgacaggaggggattataccacctatgcttcccaacgcagagatgaagaggtccccagatctgttttccctgagctgacaagaacagaggcgtatgctgttccatcatttaagaaaacatctgagatggaagcttcgtcttctgtcagggaagtgaaatcacagatgacggagacaagggaaagtctctcctcatatgaacactctgcatctgcagaaatgaaaagtgctgcattagaagaaaagtcactggaagaaaaatccacaaccagaaagatcaagacgactttggcggcaagaattctaacaaagccacggtccatgaccgtctacgagggcgagtctgcaaggttttcttgtgacaccgatggtgagccggtaccaactgtgacctggctgcgtaaaggacgagtgctaagtacttctgcccgccaccaagtgaccaccacaaagtacaaatcaacctttgagatctcttcagtccaggcttccgatgagggcaattacagcgtggtggtagaaaacagtgaagggaaacaagaagcagagttcactctgactattcaaaaggccagggtaactgaaaaggctgtgacatcaccaccaagagtcaaatccccagagcctcgggtgaaatccccagaagcagttaagtctccaaaacgagtgaaatctccagaaccttctcacccgaaagccgtatcacccacagagacaaaaccaacaccaatagagaaagttcagcacctcccagtctctgccccaccaaagattactcagttcctgaaagcagaagcttctaaagagattgcaaaactgacctgtgtggttgaaagcagtgtattaagggcaaaagaggtcacctggtataaagatggcaagaaactgaaggaaaatgggcatttccagtttcattattcagcagatggtacctatgagctcaaaatcaataacctcactgaatctgatcaaggagaatatgtttgtgagatttctggtgaaggtggaacgtctaaaaccaacttacaatttatggggcaagcctttaagagtatccatgagaaggtatcaaaaatatcagaaactaagaaatcagatcagaaaaccactgagtcaacagtaaccagaaaaactgaaccaaaagctcctgaaccaatttcctcaaaaccagtaattgttactgggttgcaggatacaactgtttcttcagacagtgttgctaaatttgcagttaaggctactggagaaccccggccaactgccatctggacaaaagatggaaaggccattacacaaggaggtaaatataaactctctgaagacaagggagggttcttcttagaaattcataagactgatacttctgacagtggactttatacttgtacagtaaaaaattcagctggatctgtgtcctctagctgcaaattaacaataaaagctataaaagatactgaggcacagaaagtctctacacaaaagacttctgaaattacacctcagaagaaagctgttgtccaagaggaaatttcccaaaaagccctaaggtctgaagaaattaagatgtcagaggcaaaatctcaagaaaagttagccctcaaagaggaagcttcaaaggttctgatttctgaagaagtcaagaaatcagcagcaacctccctggaaaaatccattgtccatgaggaaatcactaaaacatcacaggcatcagaagaagtcagaactcatgctgagattaaagcattttctactcagatgagcataaacgaaggtcaaagactggttttaaaagccaacattgctggtgccactgatgtgaaatgggtactgaatggcgtagagcttaccaactctgaggagtaccgatatggtgtctcaggcagcgatcagaccctaaccatcaagcaagccagtcacagagatgaaggaatcctcacctgcataagcaaaaccaaggaaggaatcgtcaagtgtcagtatgatttgacactgagcaaagaactctcagatgctccagccttcatctcacagcctagatctcaaaatattaatgaaggacaaaatgttctctttactcgtgaaatcacgtggcgagccatcccctgaaatcgaatggtttaaaaacaacctgccaatttctatttcttcaaatgtcagcataagccgctccagaaatgtatactcccttgaaatccgaaatgcatcagtcagcgacagtggaaagtacacaattaaggccaaaaatttccgtggccagtgttcagctacagcttccttaatggtccttcctctagttgaagaaccttccagagaggtagtattgagaacaagtggtgacacaagcttgcaaggaagcttctcgtctcagtcagtccaaatgtctgcctccaagcaggaggcctccttcagcagtttcagcagcagcagtgctagcagcatgactgagatgaaatttgcaaggcatgtctgcccaaagcatgtcctccatgcaagagtcctttgtagaaatgagttccagcagctttatgggaatatctaatatgacacaactggaaagctcaactagtaaaatgcttaaagccaggcataagaggaattccgcctaaaattgaagctcttccatctgatatcagcattgatgaaggcaaagttctaaccagtagcctgtgctttcacgggtgagcctaccccagaagtaacatggtcctgtggtggaagaaaaatccacagtcaagaacaggggaggttccacattgaaaacacagatgacctgacaaccctgatcatcatggacgtacagaaacaagatggtggactttataccctgagtttagggaatgaatttggatctgactctgccactgtgaatatacatattcgatccatttaagagggcctgtgcccttatactctacactcattcttaacttttcgcaaacgtttcacacggactaatctttctgaactgtaaatatttaaagaaaaaaagtagttttgtatcaacctaaatgagtcaaagttcaaaaatattcatttcaatcttttcataattgttgacctaagaatataatacatttgctagtgacatgtacatactgtatatagccggattaacggttataaagttttgtaccatttattttatgacattttacaatgtaagttttgaaactaactgttggtaggagaaagtttcttatggaacgaataccctgctcaacatttaatcaatctttgtgcctcaacatactgttgatgtctaagtatgcctcagtgggttgagaaaatccccattgaagatgtcctgtccacctaaaagagaatgatgctgtgcatatcacttgatatgtgcaccaatacctactgaatcagaaatgtaaggcattggtgatgtttgcatttaccctcctgtaagcaacactttaacgtcttacattttctctgatgatgtcacacaaaattatcatgacaaatattaccagagcaaagtgtaacggccaacactttgttcgctcattttacgctgtctctgacataaggagtgcctgaatagcttggaaaagtaacatctcctggccatcccttcatttaaccaagctattcaagtattcctatgccagagcagtgcccaactcttggaggtcccagagtgcagccaatgccctttgtgtggtagttctaaattttaattgcacctgaaaaacctgggcacctaagcaatgagccacagcaaaaagtaaagaacaacaacaaaataaagctgttgttaaattttaaacaatattactaattgcccaaaatgtcaatttgatgtagttcttttcatgcaagtataaattcaattgttagttataattgttggacctccttgagatagtaacaacaaaataaagcaagctatctgcacctcaaaaaaaaaaaaaaa

SEQ ID NO: 15983 - DNA, 1460 bp, Homo sapiens
ctagaattcagcggccgctgaattctagaacgggctgcaggagaagatggcggtctccacaggagttaaagttcctcgtaattttcgcttgttggaagaacttgaagaaggacaaaaaggagtaggcgacggtacagttagctggggccttgaagatgatgaagatatgacacttacaaggtggacaggcatgattattgggccaccaaggacaaattatgaaaacagaatatatagcctgaaagtagaatgtggacctaaatacccagaagctcctccgtcagttagatttgtaacaaaaattaatatgaacggaataaataattccagtgggatggtggatgcccggagcataccagtgttagcaaaatggcaaaattcatatagcattaaagttgtacttcaagagctaagacgtctaatgatgtccaaagaaaatatgaagcttccacagccaccagaaggacaaacatacaacaattaattttagtggatctcaaacttgtcttaaatcaacaaccttctactcatgttaatgtcttgattaaatatcacaatgcaaaatacacattaagtaaaagaattccagctggtaaacatgacctggacatttgtaagaatatatttaatatatgtacacccattatgttttcaggtaacaggaggaaaaatgcagcacaattttttttccccttgaaggcctggtcatttaaccttaacctggagtactcgaaatagaattcaggtttacaagatgaaagccgtgtggagaagtgtcagatggcagtggaagcatgtgtgtttctaaaaagtaaaaatctcaagaaaacagaaatggcatgctttacccatcttacttagtgaaagagagctgcagttgaaattgtttaaaaagtagcaggtacaatgaatattgtcacagatgtgttaatttttgaagcaatgtgggtgctgactactagtagtatcaaaaatatgttcaggattgttttgatacctgtatttataataaaaaatgttggggggagttgatgaattcctgttaaaagctgttcttgtgtgttacatgtaacagacatggtaaatatttgtttacagtctttgtttaacaaaccatgcatttaagtttaagtgaagtcaacaaaaaggaaataggtgtatggatatgtgattttgagattaaagttagtcttaaaatgtaaataaaatgtgaaacgtgtcctcagagactgtgccatttctattatgttgatgtatatgtacagtaccttgccagggaagcaaaaattggaattattgtagcttttcatgtatacacacttttatttaccctattttgtgtacttcttgtgaattataatttgcagactatttcagaaaagaaattatctagtttaatttcttctttggacaaggagtcctaggtattatattttgagtttgatttcaccagaaataat

SEQ ID NO: 15984 - DNA, 359 bp, Homo sapiens
ttactataaagtaaaaattattgtaggccttctaaggaatttataattcattaaaatacatataataacactaaaaagctaattaatatataatattctagttaaaaattaggcatatatgactatatgcaatagtgtggaaaacaattaggcatggaaattattgttagagtttattatttttcaaaagataatgataaaacacacctgtaaatttaatataattataaattcgtcaaatctcaggatggtaaaaccttaaatataccatttgtaactgacattatgtattctctttcttcttcagagggaaaaccctggaggaactatgggaaatttcttttttattttatttattt

SEQ ID NO: 15985 - DNA, 1152 bp, Homo sapiens
ccgccccgacaggtttgttttgtgaccgcgggcggccgctgcttctttcccgagcttggaacttcgttatccgcgatgcgtttcctggcagctacattcctgctcctggcgctcagcaccgctgcccaggccgaaccggtgcagttcaaggactgcggttctgtggatggagttataaagcaagtgaatgtgagcccatgccccaccccacccttgccagctgagcaaaggacagtcttacagcgtcaatgtcaccttcaccagcaatattcagtctaaaagcagcaaggccgtggtgcatggcatcctgatgggcgtcccaagttccctttcccattcctgagcctgatggttgtaagagtggaattaactgccctatccaaaaagacaagacctatagctacctgaataaactaccagtgaaaagccgaatatccctctataaaactggtggtggagtggcaacttcaggatgacaaaaacccaaagtctcttctgctggggaaatccccagtacagatcgtttctcatctctaaagtgcctcattgagttcgggtgcatctggccaatgagtctgctgagactcttgacagcacctccagctctgctgcttcaacaacagtgacttgctctccaatggtatcccagtgattcgttgaagaggaggtgctctgtagcagaaactgagctccgggtggctggttctcagtggttgtctcatgtctctttttctgtcttaggtggtttcattaaatgcagcacttggttagcagatgtttaatttttttttttaacaacattaacttgtggcctctttctacacctggaaatttactcttgaataaataaaaactcgtttgtcttgtaaaaaaaaaaaaaaaaaaaaaaaaggtttgcggccgctagcaatcgcatcatcggtgccaaggaccacgcatccatccagatgaacgtggccgaggttgacaaggtcacaggcaggtttaatggccagtttaaaacttacgctatctgcggggccattcgtaggatgggtgagtcagatgattccattctccgatgtgccaaggccgatggcatcgtctcaaagaacttttgactggagagaatcacagatgtggaatatttgtcataaataaataatgaaaacc

SEQ ID NO: 15986 - DNA, 621 bp, Homo sapiens
cgaacattttcaacctcagcatcccgatttcagtcagacaaatactcatttcagagattctatacttcatggaatcaagaagcaacgagccataaatctgaaagacagcaacagaacaaagaaaaatgccccccttcagccggacagacttactctcaaaggttctttgttcctcccactttcaagtcggttggcaatccagtggaagcacgcagatggctaagacaagccagagcaaacttctcagctgccaggaatgaccttcataaaaatgccaatgagtgggtgtgctttaaatgttacctttctaccaagttagctttgattgcagctgactatgctgtgaggggaaagtctgataaagatgtaaaaccaactgcacttgctcagaaaatagaggaatatagtcagcaacttgaaggactgacaaatgatgttcacacattggaagcttatggtgtagacagtttaaaaacaagataccctgatttgcttccctttcctcagatcccaaatgacaggttcacttctgaggttgctatgagggtgatggaatgtactgcctgtatcataataaaacttgaaaattttatgcaacaaaaagtgtgaagatatttaacg

SEQ ID NO: 15987 - DNA, 721 bp, Homo sapiens
acaaaacaacagcattttaattgaattttctaagtgatcatttccggttgtttaaatgcacctgttcaaatcaaagttcatcattttgtttggaacaacttttgtttgagaatcaaatggtcacgtaaatgacaaaacaaataagcatataatcgacagaaaagtaagtggcaaaataactacaaactttgttccactggctactgcagtagaataaacaaaatgacagttaaccaaaaacacctttattttcatctgcaaagaagaagctcttttcttctttttccaggataatcatgattaacttacaaaaatgggtacacatcttcaaagcacttccctttaacgggaaacttagctttatgggatttaaacattagaaagtgggaaaaaaaattccattttcttgtcattataagccaaaacaaaatctagtgtaagtcaaggaaactcattcacacttcaggtccttctcctccaggaaccagcattgttatattatttccatttagcaaaatctgatctaatttagtaatccttcttccttctggtgtgatttcaaactcagtgacatcttccagtaccatattgacaaagtcatcaaatcctagaagagtaccaacaatttccttatcactcttcatcacgatgtgaattcttgatcctatacatttgtccacaagctctaacggcagcagctgcgacgggttggtagtagcgt

SEQ ID NO: 15988 - DNA, 3078 bp, Homo sapiens
tttcaccacggtttccatgtttgccagcaggacccacggggccatgaggaccaggtgcacctgcagcaccaacgggaccaatattgccagggtaaccgcgctctcccttgtgtccgggttgaccatcgcgacctgggggaccatcgttcccagggttgccatcacgaccagcttcaccaggagcaccgttgactccaggactacccacagcaccaggaggaccacgggccccaggagggccggcaatgccaagaggaccaggttcacccacagcaccagcaacacctggtagaccacgttcacctctcgagccagggagacccagaataccaggagcaccaagaagaccctgaggacctggagtgccaggaggtccagcagtaccagcctctccagagggacccttctcaccagcgaagccagggggaccaactgcacctacttctccagttcggccaactggaccttggtcaccacgaggaccacgaagcccttctttcccagcaggaccagggggaccaggagggccagaaataccagagggtcctgggggaccagtccgtccagcagcaccagggaaaccagtcataccaggggggcctccatcaccacgacttccagcaggaccggggggaccatttggaccagctgggccagcagctccaacggggcctgtgggaccaacaacaccgttttcacccttaggccctttggctcctctttctcctttagcacccggttgaccagcagcaccagccggaccagcaaatccgttggggccagcaggaccgacctcgccacgttcaccagggcttccccgaggaccagcaggaccagcaggaccagcagccccagcttcgccccggtcacctgtggctccagcaggaccaggggcacctacagcaccatgagcaccacgagcaccatctctgccagggttaccaatttcacctctgagaccaggttcacccttttctcccttgcctccaggtatgccagcagcacccctctctcctgggagtccactaggaccagatggaccagcagtgcccacagcaccaaccacaccaggttcacccttgtttccatcaggccctgggggtccagaaggacctcggcttccaataggaccagtaggaccggcagcaccactctcacctgggggaccgcgttcccctcttggaccagcaggaccagggagaccaaactcaccatggagacccctttctcctggtttgccaacttcaccagcgggacctgaggggccaggcagaccctggaagcctggaggaccagcgggaccctgttcaccttttccaccttgaacaccctgtggtccaggaggtccctgagcaccattgtttccatcaggacctggagcaccccgagcaccagcaagaccagcatgacctttatcaccgtttttgccaggatcaccagtggggcctttgggtccagggaatccaatgttgccaggctctcctcttgctccagctgggccaattgggccaggcctgccgtcgatgccagggaggccgacaggaccttcttttccagcggggccgatatttccaggggaaccaggaagacctctgggtcccatgagaccaggctccccagggcgaccagcatctccattaggtcctcggactccagcagggccacttgcaccacgactaccaggagggcccatgacgccagctctgccatcagctccaggaagaccacgagaaccaggactacctctcagcccaggaggtcctggagggccggcagatccagcttccccattagggcctctctttccttcttcaccactgggaccaggaggaccttggggcccagcagagccgggctcacccttgttaccgctctctcctttggagccagctggaccaggctcaccaacaagtcctctggcaccagtagcaccggcagcaccaacagggccaggaataccgcggggtccagggaggccgggagccccagcaacgccgggaaggccagcagcacccttggcaccagtaaggccgtttgctccaggattaccaggaggtccaacggggccggagaggcctggaagacccacttcaccacggggaccggcgggaccagcaggaccagcgttaccaacagctccaatttcacccttggggccaggggcacctgggaagcctggagggccagcagacccaatgggaccagcaggacccacgggacccacacttccatcactgccacgggcaccagctgggccaggggcaccaacacgtcctctctcaccaggaagcccacgggctcctgtttgacctggagttccattttcaccaggggcaccaggttcacccttcacaccaggagcaccgggctgtcccttcaatccatccagaccattgtgtcccctaatgcctttgaagccaggaagtccaggagttccagggaaaccacgagcaccctgtggtccaacaactcctctctcaccaggtcgtccgggttttccagggtgaccatcttcaccagccttgccaggagggccagctggaccacgagcacctgcaggaccagtttgaccaggttcaccaggctcaccagcaggtccttggaaaccttgagggcctggggctccagctgcaccaggtgggcctctaggtcccattaagcccattggtccagggccaagtccaactccttttccatcatactgagcagcaaagttcccaccgagaccaggggggccaggaggaccaggtggaccaggagggcctgtgggaccatcttcaccatctctgcctggggggcctggtggacccctttctccacgtggtcctctatctccggctgggccctttcttacagtttcctcttgtaaagattggcatgttgctaggcataaggttactgcaagcagcaacaaagtccgcgtatccacaaagctgagcatgtctagcacttagacatgcagactccttgtgtcgcagagcccctgggtcaccggcggaggtatcacctggcgggcgcgggcatgcagtcgtggccagtacctccaacttagccgaaacctcctgctgccgtggtgct

SEQ ID NO: 15989 - DNA, 1494 bp, Homo sapiens
aagttaaaatcactatagggagaaaaaacttttttcaagatttccaaagagatgaaattttcttaatccttttaagttttcatagtaaacagtatggcagattgggttggttgtcctacctggtctatttttaaaagtcaccttttaaagtgacattattagatacacttaaatgtttccaaggcactctctgcattacccttgtttttctctttggatactgtcctgggactaagtgtagatttctgcttcaagcacttctggcattgtgtgtttttgtatgcactccccttcatgccacttcagatgtttatttggatgtggttggggacgagagcagacaccaaggaaagggagttggagagaatgtaagtcctgacctggaaggtcttttgtgatggcatgtataggatttgccctgacacacaccctcctttcttgggattataccagccatcttcctgagagttttggagccctctaggatattttttctagtaccccaccccccacccctaaagaaagaccttaatatgttaaaacagcattgcttgggagaaggtgtcattgaattccgggacgagccggagcctttaaatggggtgcttccaccactacaggctcctgacacgagtaacaggcactgttgcttagaagaacacacgaagttgccgaacacagggtaaaatttccaaggcgctgatcgttgccctggccagggcctgatgagagccagtcagtacattctttttttcctacagttcttgggtttcaaacttcagtttcagggaatttcaagtcaacaacaggtagaatgaataaacttggttaccagcctaataatgtgaattgctacagaattattcttattatgtaagaaaacaaaaactttatgcagatactttagctataaattgatgtaaaatactgatttttttaaaggaaggagagaacagtatcttgttcaattattatgcaatcaatcagtaaatgtttttaaaatgatactacaggagagcttagtaaggagagggcatggatgggccagtttggcatagttgggagaaatcagtctggtttccatcccagtcggggaagagagaggtgagagggaatcagaacgtacctagttgattccttggtgacaagtgcaatggggtatgggtagaatttattttcagagccaagaggacttgatggttataaataaagttgcctttagcaatggaatttacagatcgatcatgttgttccgaaagatgtgaataggatccacaataacaagttgattcagactaatgtagatatttagattagcaagtattgaacatttgatttcttagactgaggttttaaatgaatttcattatttctcccggtaatacacagagcatcgggattaggaaattagccattttggattctgtctgccacaaacagacctattctaaacagtgctattaaattttagactgttgttcaaatattttattt

SEQ ID NO: 15990 - DNA, 569 bp, Homo sapiens
gccaagggccatggttggcccttgcaaggggccggaaacccttggggacaggaagaagcccctggtctggtcctgctggaaaagtgaggctcccgggggaacagggtgccgggcccagcctcgtacccgtcggaaaaccaagagcaaaaaggagaggaatcaacccaaaccgagagccggggtggccggggtccctgctgccccttgggaagcgaccgcaacccatgccccaaggaccggggtatggtggcggcggcggcggcggcagctgtggacatctgtggacatctgtgctgttccgtagggaagttaacctgaattggaattaccgaggtagctggctagaaaactgagacccccccacgccacacggtgccgcaccctgggcccccgccttccccgggggttcctgaccacacgccgggtcttcaaaataccaaattattgcactttcaaaaaatacaacacatctgtggctccagtcagatatccagtagtacaaattagcttcaagttacacatactgaacaaaagaggttgagcgagcgaaggaggggaggagtgagggg

SEQ ID NO: 15991 - DNA, 745 bp, Homo sapiens
atcaagttgaaggtcttaagcctagaggtgcctcccacgatgctctgtggcatctcctcgtgtgttaagtccacgaggagtacggagtccccccagcggcggtagtgcgccagctctgtcaggtactgtgggtctccggtgggcagctctagggagtccatgatgtgcaggtcgtcctgggccagcttgacggtcagtgccactttgagacccagcgcccgcaccttcatgggcagcatgtagtagtaacttgtggagcccgggggccatgggcaacacctcctcctcgccagagcggagagcggatgctgccatgccgggcccgcccagtgcctttctgcggccaaggcttccggccaccgccccgcacctcggctctcgtcttggtcttggcatagctaattctcttgaagttcttctgccacatagcaacctggtgcagtatgtccagcctgggcgcggtggcgaaaacatcggggtgcaggtcggccaggcccacgcgctcctgctcgaagccccgcaaggactcgacccaggcctgcactgggcgtcgatgagtgggtaccgggagctcgactttgcgcagcacgggctccgggagaccctcgctcgccacctgctccgggttctcggtcgcacgcgctgcctcttccgccagggaagctcaggccctggctgccggtaggccgaagccaggcccgcgccccggcccggacgaactgcagcatcgccgcgcagcctccca

SEQ ID NO: 15992 - DNA, 502 bp, Homo sapiens
agtgttgggatgagcccctgcaccatgcctggttttgaaagttactatggttatctacattgataacattgagaaaagctgagtaaacactgtactgttactgagatcttttctgtgagtttctgttaggatgcatttcaggatcctacactgcacttggttgtgtctcatttcatccagtctgtgagggtatcttagtctttgtctttcattgtaaagatgggctttaaatatttaagggtagtcacattaaaagattggcattaggaatgcagttaaattactaagaaagtgatctaagctacataaacaatctggatgtgagagatgggtaataatagggtaacaaaagttttgtggagtaatattgtgttatctttttacaggcacctacaaaggcagcacctaagcaaaagattgtgaagcctgtgaaagtttcagctccccgagttggtggaaaacgctaaactggcagattagatttttaaataaagattggatt

SEQ ID NO: 15993 - DNA, 1065 bp, Homo sapiens
aagtggtacccctcaggtcccgtccggattcccggtcgattctactacaaattgccggccgcgtcgaatgcagaatggctcccgcaaagaagggtggcgagaagaaaaagggccgttctgccatcaacgaagtggttaacccgagaatacaccatcaacattcacaagcgcatccatggagtgggcttcaagaagcgtgcacctcgggcactcaaagagattcggaaatttgccatgaaggagatgggaactccagatgtgcgcattgacaccaggctcaacaaagctgtctgggccaaaggaataaggtgctaaagttatctgtattcgaaggaatgtgccataccgaatccgtgtgcggctgtccagaaaacgtaatgaggatgaagattcaccaaataagctatatactttggttacctatgtacctgttaccactttcaaaaatctacagacagtcaatgtggatgagaactaatcgctgatcgttcagatcaaataaagttataaaattgccttcatgtttttgttctttttagttgcaacataatgtacttgtataccctatcctaattatgggatcatttgaagagcttttcccaaattgatggcctgtgctgccttctccccatcccctggggttttaaagtgatttcaaactgcaacctagttttagaaccactgttctgggtagttgggatactgaaggcatattgttaattattctacttgtatgttttgctaattctaagataagcatttttccagaaaccaggatgtagaatccagttgccattgacatcttaacattttaggaaacaactttaaaatgatatactatctatctatctatctgtagcattttaaaggtaatgaaattaatgtggcagtaggtcttttaagcttctgcctacatccatattgagtatagttgttgtcttctaaaataattaattgatttttggtgagataaccagattcatattttaagccttttgtaatggccccgtggtacctggagtcaaggttcagaagtaaaaagttccttaaggtatcaataacaaa

SEQ ID NO: 15994 - DNA, 334 bp, Homo sapiens
cccacgcgtccgcgaaagtggctgcaagccggccgcccactgtcagggttggggggacagagaaagtgatgtgcgccttctaaagcctcgcccagcgccgccgaagcagcttcacctctccaactttctcccaccgactgcttgtcttgaccctgccctccacccttccccagagccactttcgggtgcgcgctcttgggtaaagggggggtcaccggctgtctgggatggcttccaattttaatgacatagttaaacaagggtaccgtgaggatccggagcaaacgcctcgggatttatcagcgatgctggtttaatattcaagaaagctttc

SEQ ID NO: 15995 - DNA, 1666 bp, Homo sapiens
gcggccgctctgtcaccttagaaactattctaagcatgcctggtttctgtaacttaaatatgacataaaaacctgtttcctttgaattcacttgatagcagtagtcaaacactaataatgcttgctaatttcctctcactttcttaagaaagcccctatatttagcctctgcctccatgtcgcatgtggtggttaggtgacagcataagtacactagtggctttagcactaaactcgaggcctgggtcacttctcccctgaagaagaaaggtttaaaaattcctaaatcacaatgtagaactaagttacaccctacctcagaactggagatattaaaataccatctctttattaagtgtctctacaataaggatatttgctaagatcaagatgtacaattttgtgggttctgtttggttgtggtaaatattgcccacgtctttttagtttgcttcaaacatttactaaaaataaaaaattttaaatctttgcctacttaaaaataaaaaaaatactcaaaacaaatttaagctgaagatatatactgtataaagtgcttcatctacctaattctctgaagtcttttttttttctgtgttttaagactttatcattaaaaaaagaagaaattagagaagggaggtgggggggacaggagggtgaaagaatctctccaaaatgtcggatccgggcgaccctccttccctgactgcccagccaccctgtcccttctctgtcctcgcggcgaggccctagctgccatcttctggggaccaaggcccaggagcccagctcgggtcccaggcagaggtgaaggcagaagcggggctcagagcctggaggccttgccgggtgtccttgagagccccttgggtgggcactcaggcccccatgtcccagcagggccctagggaggtaggcgttgagcggagaggcctttggaggtgggatcctgaagccagaggaccaggcgggaaccagaggcaggtgtgaggctgggggtcacagccggaggctgggtctctcctgcatcagcctctatagataatgccattctccttccaagttcaaactcatccccactgatgctggagcccggaaggccacgtgtggctgcgtctcggtatagcccccgatgggctggccctctgggctgaaggctgcaccctgccctgtgcggttggattgatcgatcataggttgcacgatgcgtctccgggcattaatgaaccagttgttgacttgcaggatggtaagccccgtgtcctgcgccagctgtttcttctgctcctccgaggggtacgggtgtgagaggtgctggaacaaccaggctcgcatgatgttggtggccaccttggggaagatccccctcttcttgtttcgccgtggctcctggtccaagtcctcatcttctccaccagaactgggagaggccacgctggtgtccagcccgactccttggtcactggagttgtccccactctgggaggccagccccccgctggatggacctggggtccccaaatgtacagacccgctatcctcatggtctcgaatccatatattattctggtctgggaggctggggcaggaggctgggtagtcctcgaagtcctccctgcagccgccatcccgatcctcgatgaccaggtcgatgggcggccgc

SEQ ID NO: 15996 - DNA, 1616 bp, Homo sapiens
ttttttttttttttttttgtataaaaacggcatattctttattttgcatactttaatttcagaacaaaatgaagaaaataaaataaaccacaatacacaacatccaatcctgctgtcaagagtagagagggaatggggcttgacacccttagtttactgccttcaacacaaggacaggagagggaaaaaaacactagacaccagcagggggagccaggtgggacaggggcactcgaggctgcagtgggagcccatggggacactatacaagggcacaagttttccaactatgaactcctaacctaatcgacttcttccatgcgagacgcatcctcatcgccctcgagaggggggatctcatcaggaacttgcagcattgggttcctctgctgccacttcatcttcatcaatacctagacctagcttgatcatgcgatagatgcggttggagtgggtctggggatcctcaagggaaaagccagaagatagcagggcggtttcaaacagcagcaccaccaggtccttaactgccttatcattcttgtcggcctcagccttctgccgcagcgtctccacaatggggtggtcagggttgatctccaggtgctttttggccatcatatagcccatggtggagttgtcccgaagtgcctgggctttcatgatcccgctcccatattggctgtccagccgtaggtgctggtcacaatgcaggcaaggtgaagacacaagtctatggagattgtcaccttctcaaccttcttatctaagatttctttcatgagcttgcagaggttctcaaactttggccttggctctcttccatcttcttcttctcctcctcatcctcaggcagctccagaccctccttggtaactgagaccaggctcttcccatcaaattccttgagctgctgcacacagtactcgtcaatgggctcggtcatatataccacctcgaagccccgtttccgcactcgctccacaaaagctgagttggccacctgctctttgctctcaccagtgatgtaatagatggacttctgtgtctccttcatgcgagaaacatactctgacagagatgtcatctcatctccagactgggaggtatgatagcgcagcagctcagacaggcggcggcggttagtggagtcttcgtggattccaagcttgagatttttagagaatgcctcatagaatttcttgtaattctccttgtcttctgccagctcagagaagagctcaaggcacttcttaacaatgtttttgcgaatgactttcaagattttgctctgctggagcatttctcgggagatgttcaggggcagatccttcagagtcaaccacacccacgggataaaattgagatactctggtatcaactcatcacagctgtccatgatgaacacacggcggacatagagtttgatgttgttctttttcttcttgttctcaaaaaggtcaaagggagcccgacgaggaataaatagcaatgcccctgaattccaactgaccttctacagaaaagtgcttgactgccaagtggtcttcccagtcattagtgaggctcttgtagaattctccatactcctcttgggtgatgtcatcagggtttct

SEQ ID NO: 15997 - DNA, 1646 bp, Homo sapiens
tagtggttcttttctccaaaaggtgttaattttatggagatgttgaaaggtacatgccaaatctgagtatacgtgtgaaaataatatgaaagaggagcaaatactaaaccttgtatatcaagtttacatggggaaaaaaacattagataaataaatacatttacatgcctctttaagaaatagccctttgggcccacaggatatactgtttgaaaatggaaagttattactaaaaagcccgcccataatttattttagtcttgcacttacagtcccactttcacatagttcaaaatcaggatatgtggatcttgattgggccttaagatgtcagttttgaagggctcagtcagctgcgtgatactaagatgggccctttgaatctttaggaaagttcatccatttttagtcaataaaattggtgtactgtcaagtataagatttcttgaagtaagccacttgaaccattgtgaagctacacataacttgatgtctgaatgaggttaaaaatgggtgtataagtctttaatacagtaaaccatgctattaacccaacatctgtttgatattgtagcaagtttaacctgctttgcagtcttaatttctgttaatgtgcaaactttaccatgctaagacattagtaaatttataaattttcttgttgaacagcagcttcaatgcaaacacaatgcttccagcattggtattttggctaaggtaaatctacaaatcactcactgttgatgtttatggaatgaagcttttcacagcattggtttttaaagtcagtcaaaatagttacacaatgaatgtacttcggagatgtaacagggcttctaaaagggcaggaatgacatcttggggacctgttgatcctacacctgccattacttcagtaatcacatactgatggcttctcaggcctggggggaaggagttttgtgtaactggcaggaatttgaagccatttttttttaatgctcaaaattgttctttaaaagtggcaggtttcttaaaatggtaattatgtccaaatgaactaagagtcattagtgtaggaaattttcttccacaataatgtttttaggttatttagtatcaaagaatgttccatttccatttgatttgctgtgactttgagagcaatacaagaataaagctgcttttctaattcttcacgaatttcacttggagcaccacgcagtaggtagtctttgagtaactgacaagcttttgccaagtttggttgtatcacttctgaagtacacttcattgtactctgatcacagctagttctacaatctgtgccatagacacagtccaaatcagactcacagtgacgatccttaataagttctttcaggtttgtctctggcacaatttttctcatatccaccattttcaaatcatacttatcattatatcctaggtttttggcactagtatcgcacatgaggaaatttccgtaggggccatggaaaacatcttccacaaattctagaagtcctatggctattttggcctttcttggccatgatggtgtgaacagctgatccatgcttcttctgaacccagatggaataaaaagttcaatgacccaaggaaggcttattccataaagagaggtatattcaacactttccatc

SEQ ID NO: 15998 - DNA, 558 bp, Homo sapiens
ttttttttattggtgaaaagatatatatatatatatattcagaattaggcagctggactcagtttagatgatcccaattttgttggcaacatccaaagcatcgtaatcaggagccagtcgaacatatgccttcttctctccatcaggccgaatcagggtgttgaccttggccacatcaatgtcatacagcttcttcacagcctgtttaatctggtgcttgttggctttaacatccacaatgaacacaagtgtgttgttgtcttctatcttcttcatggcagactcagtggtcagcggaaacttgatgatagcatagtggtcaagcttgtttctcctgggagcgctcttccgaggatatttgggctgtctccggagtcgcagtgtcttcggccgccggaaggtgggtgacgtgcggatcttcttctttttgtggctgtggacacctttcaacactgccttcttggcctttaaagacctacgctttggcttcagctttaggaggggcaggagcttccttcttcgctttcggcgccattttgtgaaaagcccacgcgtccg

SEQ ID NO: 15999 - DNA, 738 bp, Homo sapiens
ggcaatacgggcacgagcacgcttcccaagcttggggcgggcaatgtaggcaagtcgatcgagcttgcggctgataccctttgggatctcgggcttaacctccttgggctttacgagggccttgatagcctcggcacgtgcactcatggccttggcatcgttggcctgcatcttctttaggccctttttgtctgtgcttcttggcaaagcgcatgttcctcaggaacttggggtccacccccttaagagattcgtatctttgtgatcggggtttcttgataccatttctgtgccattttcgggagccgcggcttatggtgcagacatggccaagtccaagaaccacaccacacacaaccagtcccgaaaatggcacagaaatggtatcaagaaaccccgatcacaaagatacgaatctcttaagggggtggaccccaagttcctgaggaacatgcgctttgccaagaagcacaacaaaaagggcctaaagaagatgcaggccaacaatgccaaggccatgagtgcacgtgccgaggctatcaaggccctcgtaaagcccaaggaggttaagcccaagatcccaaagggtgtcagccgcaagctcgatcgacttgcctacattgcccaccccaagcttgggaagcgtgctcgtgcccgtattgccaaggggctcaggctgtgccggccaaagcgccaaggccaaggccaaggatcaaaccaaggcccaggctgcagccc

SEQ ID NO: 16000 - DNA, 644 bp, Homo sapiens
tttttttttttatttctgaaaacaagttttatttaaataagggtttaaatacattacacataacattaaaactgaaggggaaaaaaaaaccaaaaaccagtttgttacttcacatggcattgggcagctgctgctattaagttgcaagctctacagctagctacatgactgatggatcagtttgagatttgttcccttgtcaaaagtttaactctgatagaaggttggcctcacattctgatgtttggacatcccttagctaggatatgtctggtcgaacagacctttgtggcaagccagatgtcctatcacctcgctagcggtaagagggcctctttgagctctgtccacctagtcaggttggagacaccagggggatctaccacccaaaagctcccttctagtagtacagctggtgcttctgccttaccccatcctctcctctcagattcaccgaggactgttcaggtggtaacattctcttagggtagggaactctgcagagggagagctgaggaggttccggccatagttgtttgtaacttaggggctctgggcttggctgaaacatgacggtattgcttggtttcaggcttgacactgcccaggcgcctattgcttgacctctgtttaaatgagggact

SEQ ID NO: 16001 - DNA, 1334 bp, Homo sapiens
acacaggtctggatggtacctcggggttctctcctgcccccaagctggtggaatcccccaaagaaggtaaagggagcaagccttccccactgtctgtgaagaacaccaagaggaggctggagggcgccaagaaagccaaggcggacagccccgtgaacggcttgccaaaggggcgagagagtcggagtcggagccggagccgtgagcagagctactcgaggtccccatcccgatcagcgtctcctaagaggaggaaaagtgacagcggctccacatctggtgggtccaagtcgcagagccgctcccggagcaggagtgactccccaccgagacaggccccccgcagcgctccctacaaaggctctgagattcggggctcccgggaagtccaaggactgcaagtacccccagaagccacacaagtctcggagccggagttcttcccgttctcgaagcaggtcacgggagcgggcggataatccgggaaaatacaagaagaaaagtcattactacagagatcagcgacgagagcgctcgaggtcgtatgaacgcacaggccgtcgctatgagcgggaccaccctgggcacagcaggcatcggaggtgaggcggggttgcagtgactggtggccgcaagcccttccctggggagtacctgatggctgccctttgacccccggtggctgccctttgacccccgggtgtgctctcagcgcaagtggtcctagaacaggattctttttggaaatgtctgtcgactggaccttggtggatttggaaatggaactgagggaccggtgacacgtgcttcagaccggtctggggtgcggcgcacacctgggcccgtgcagggctcagctcggcagcagctctgagggcagctcaatgaaaaagtgaatgcacacgcccttgttggcgtggcctggcatggcctggtgctatcggcagccgctctccactccccgactgatactcaattacgtgaagccaagaaagatgatttttagaacctttgcctatattaggttgtacttatgtacatattttgcagtgtttcacaggagaaagtggccttaactgccccttattctctctccacgttgtaaataaacatgtgtttaatacaagttaaagctatgtatgaaaactcagaacttgaatcccgtcagcttaaaacttgtgtagggaatcctgacttttaaaatgtgagggtatttggatctgtgttgaaagtcgtatatttttatctgtgcggtgctgagtgcaggccaccagctcctaaatagaggttccctatatgcgcgtatgacatggtgaataaacacaactctctcc

SEQ ID NO: 16002 - DNA, 1831 bp, Homo sapiens
  misc_feature (1)...(1831): n = a,t,c or g
acatgtttaaatcacttttattccttgctttcttacattgtttttgtgacttctattattgatgttataatagaagtgaaaagggatgactaaggaaaaacggggggtaacgaaggggattaaaatataatggcatctaaaaattacacattgggaagtcctgaaaaatagtgcctctaacatgtgtatctggcatcagcctcacctagttgccggtaagtcaggttacacttgacctcaccggcttcacgcaactaggctcccgaggagagaacggggactggacatgagggagggcatataagaaatgggcacagtctccgtcatctttgccttttaatataagatttggtttcatcatttctgagtgtaacatatttcttctaaaaatagagctctctgcttgtctgaaacttcttagcgttcactgggaggtgaaggggaataaggctgaccgtaattctggggtgacgttgtcagtttcatagtcataataaacttctcaagggccctggatgctcacagcaaggatgagttcatttcaaatccatggtactgaagaagcatgacaaagcgtttcaaggccccatctgtgcctggtgtggactcctgaacgcattactgaccaaaggcaatcaatcacagctcacagggcaccagacagcagcggcccctttcccaggaggtacaggagacaggatgaccctgcacacatttaccagaagacaacagggtgctctcctgacacgctgcttaagaacgtgtacagacacaagatgtaggaatgcagggccgaagatgttaaactcttgccccgggccaatgcagacctggatttaatatcatggaacttgctgggattttctcacaatacagattaagagtcagaatctcccccgcccccgaggaagagcctggttagctcctgaatccaaagatgcccttgatgtatccagtgaggccactcttggtcttctgttccaacttgtcctcaaggggtgggaaagccacatggttgagggccaggtcaaagaacaaaggcttgcagggaatgggctggaagcctggtgggaagtgcacaaggttggcttgcttggtgacaagggaagggtccaggcagaatgtctcaaaccgttcaaccagaggcttattgtccttgacttgggaggaggaggtctctgtttgatgagcgtcgtttgcatcaaggatggctgcggcctgcagggagcacttctctgaccgcacttgagtgatgagctcttgcacatcaggcaggtcctttaggctgttcttgaaggcgccagcatcagaatttacttcatttgcatatttcaggactctgtcatacaggacaaaggcttcgctccacttcttcaccagcacataggactgagcaatgaaaaaacacctgtaagctttgaacaccagagtcttgaggcctatctctttctggaaggctttgtcttcctctaaaccaggaagctggagcaattccaccagattctgtaagatgatgtcatagagtcggatcaggtcctggggccggggtgagcgcttgctgtcatcctctggctgctgctgcagcagagccctctgcagacctttggccatgttctcattacgcttgattgccgttgatagcttgatgtaagtcaggtagctatgcaagtattgaagattagacaccttccctggctctccttcaaggatataatctctctgtttctgatctggcttgagctcctcccgaaccacctggatggcgtcccgacactcgctgagcattgattcaaatgaggcgctccttagtntcgttcgtttcagccgtcgc

SEQ ID NO: 16003 - DNA, 2022 bp, Homo sapiens
  misc_feature (1)...(2022): n = a,t,c or g
taaccatcatcctccaggacaaatagcaaggaaatacagttcctgctccaccattttcctagatgatagcacagtcagtcaaccaaacctcaagtatacaattaaatgtgtcgctcttgcaatatattatcacatcaaaaacagggacccagatggaaggatgctcttagatatttttgatgaaaatcttcaccctctttcgaaatccgaagtgccaccagattatgacaaacacaacccagagcagaagcagatttaccggttcgttcggacactgttcagtgctgctcagctgacggctgaatgtgccatcggtcaccctggtgtaccttgaaagacttttaacatacgcagagatagatatctgtccggccaactggaagcggattgttttaggggcgatcctgctggcctccaaggtgtgggatgaccaggctgtatggaatgtggattactgccagatcctgaaagacatcacggtggaggacatgaacgagctagagcgacagtttcttgaattgctgcagttcaacatcaatgttcctttccagtgtctatgccaagtattattttgatcttcgttctctggcagaagcgaacaacctgagctttcccttggagcccctgagcagggagagggctcacaagcttgaggccatctctcgcctctgcgaggacaagtacaaggacctaagaagatccgcgaggaagcgctcagccagtgcagacaacctgactctgccccggtgggtccccagccatcatcttttaactacggaggcccgccggaggccacaccatcccttagtttctcctttagtttgagaaaagacagacttggggtgggtttgtttttgttttttctttccttttctttttttacgcatagctccgtcaagctgcctggatgagcgcccatgcagcaaggcttggaggaagcgtcagtgccctggagatcccagctcgctctccccactgtcagcaacagcacttccttcgtggaggaagtggactcgaatcctggaggaggaaataaagggaaagggaagtcgtggagaggcagggaaaatggttaagcagcccggccctctggaagtccccatgggggcggtagctgaagttggcgagcgcagcggtggatgcagagctggctgcacccagggctgggccagtgtgtcctgtaagacttcttgcattccttctgctgcttttttgggatgggggtatttttgttcatttgtttttgccctgttttgattttggtcccacagagcaggggatgtagtttgtacccaccatggcgcagacttccaaataaatagtactggtcatttctctccgcactatttctgcgcgctgtcttctgagctttcttcctcaccagtgggctgtgcttgttccatttctgtacacccttattttataccgtttttcttcaacaatggcgaaattgactgtagtgctgaaccaaaagtatccctttccctccttattcctcaccccaagaacattctagatcacatgggtgcttgtgccttccgattttcttgcatttgtttttttcctgacctgaagttgttgttacaaaatcagtcagactttgtgggctgaaggacacggtgcagcagagggtgtccctgtgagagttctgcagagtgctgggcatgtgcctggaactaccgagtaggagccatttctttgtacccctgcctaatccattcctctccttccaagtccattgttgcaagcaatattcttctcaatttttatatgtttactttaaatcaaagttagtctatttgtataaaatttttaaaaaatctactcgtgccgaattcttgggcctcgagggcaaaatttccctataggtgaggtcgtatttaaattcggtaatcatggtcataggctggtttcctgtggtggaaattggttatcccgctcacaaattcccacacaacatacggggccgggaggcataaggtgtaaggctggggggntgccctaatgaggtgaggctnacct

SEQ ID NO: 16004 - DNA, 671 bp, Homo sapiens
  misc_feature (1)...(671): n = a,t,c or g
gcccaaagcctgagtttgcagaagtttccaagttagtgacagatcttaccaaagtccacacggaatgctgccatggagatctgcttgaatgtgctgatgacagggtaaagagtcgtcgatatgctttttggtagcttgcatgctcaagttggtagaatggatgcgtttggtatcattggtgatagctgacagtgggttgagattgtcttctgtgctttcgtctgtcctatcttcaatctttccctgcctatggtggtggtacctttctgtttttaacctggctataaattaccagataaacccattcactgatttgtaactcctttcagtcatgctctaactgtaaatgaaggcttaaactgaagtagaacagttacaaggttttacttggcagaacatcttgcaaggtagatgtctaagaagannnnnnnnnnnnnnnnnnnnnnnnnnnnnnnnnnnnnnnnnnnnnnnnnnnnnnnnnnnnnnnnnnnnnnnnnnnnnnnnnnnnnnnnnnnnnnnnnnnnnnnnnnnnnnnnnnnnnnnnnnnnnnnnnnnnnnnnnnnnnnnnnnnnnnnnnnnnnnnnnnnnnnnnnnnnnnnnnnnnnnnnnnnnnnnnnnnnnnnnnnnnnnnnnnnnnnnnnnnnnnnnnnnnnnnnnnnnnnnnnnnnnnn

SEQ ID NO: 16005 - DNA, 1517 bp, Homo sapiens
agccgggtcccaagcctgtgcctgagcctgagcctgagcctgagcccgagccgggagccggtcgcgggggctccgggctgtgggaccgctgggccccagcgatggcgaccctgtggggaggccttcttcggcttggctccttgctcagcctgtcgtgcctgcgctttcgtgctgctgctggcgcactgtcagacgccgccaagaatttcgaggatgtcagatgtaaatgtatctgccctccctataaagaaaattctgggcatatttataataagaacatatctcagaaagattgtgattgccttcatgttgtggagcccatgcctgtgcgggggcctgatgtagaagcatactgtctacgctgtgaatgcaaatatgaagaaagaagctctgtcacaatcaaggttaccattataatttatctctccattttgggccttctacttctgtacatggtatatcttactctggttgagcccatactgaagaggcgcctctttggacatgcacagttgatacagagtgatgatgatattggggatcaccagccttttggcaaatgcacacgatgtgctagcccgctcccgcagtcgagccaacgtgctgaacaaggtagaatatgcacagcagcgctgggaagcttcaagtccaagagcagcgaaagtctgtctttgaccggcatgttgtcctcagctaattgggaattgaattcaaggtgactagaaagaaacaggcagacaactggaaagaactgactgggttttgctgggtttcattttaataccttgttgatttcaccaactgttgctggaagattcaaaactggaagcaaaaacttgcttgatttttttttcttgttaacgtaataatagagacatttttaaaagcacacagctcaaagtcagccaataagtcttttcctatttgtgacttttactaataaaaataaatctgcctgtaaattatcttgaagtcctttacctggaacaagcactctctttttcaccacatagttttaacttgactttcaagataattttcagggtttttgttgttgttgttttttgtttgtttgttttggtgggagaggggagggatgcctgggaagtggttaacaacttttttcaagtcactttactaaacaaacttttgtaaatagaccttaccttctattttcgagtttcatttatattttgcagtgtagccagcctcatcaaagagctgacttactcatttgacttttgcactgactgtattatctgggtatctgctgtgtctgcacttcatggtaaacgggatctaaaatgcctggtggcttttcacaaaaagcagattttcttcatgtactgtgatgtctgatgcaatgcatcctagaacaaactggccatttgctagtttactctaaagactaaacatagtcttggtgtgtgtggtcttactcatcttctagtacctttaaggacaaatcctaaggacttggacacttgcaataaagaaattttattttaaacccaaaa

SEQ ID NO: 16006 - DNA, 2523 bp, Homo sapiens
tatttattatttttttttttattatttattatttggcttcaaaaaactgacaatattatttgtcaaatatataatgatgttaaatccaaattacaacagcacaacaatccaaagtagtatgattgattgataatactttttttttataaatacaatataaaggtggcaaaataatgctagttaatcccaaacccagcaaatcagcaaaaaaaggtcacattcagaaaaatttgccaagtaagacataagtcataattctacaatagagataggtccatgagagactgtgtatggtatcttaaattccatattaggcaatgcatataagtgcggtcaaagaaacttgaaccacactgcatagaacatctgccacccggtgctcaagcctattaatcacttaaaccttggttggttggtgttcttacaaagaagtagaaagctgtacatgtgaaacagtaatatgaaatatatggggtggtacacagatataaaattattttaaaaaatactacgtatgaattgagtaactgagctaagagaggccacttataaataatgaaagatacatgtgttttgcataaggaatacagtgttttcttttcatagcaaagtaccattaaagcctcatgttttatactactaggtcaaattattttttctcctttttaaaatttatcggttccgacttaaaaccatcaagtctggtcagaatcaactcagtctagctgatgcaaaatcatatgcattcaaaaagcagtctttaccgagatgcctttacaaaccttggaatccagcaccttcttaaggcaaagtttcatggcagcagggaagtgaactaataattttcatttaccacatcttggtgtctttgaaaaaatactttatggcacaaacctgtttttgtctctccttatgtctccacttccttcaagtagactagatgctacaggcaatttctcatttatgccaccatgcagtctcaatccattttcaacttgctctacatacctaaaatcttccactactacacaaacctcagacacactgcaatctccacagcatgtgtgctccacagcatgtgtgctccacacttccagctggccctgggttccttgacttgtgaatggcagtgtttttttcacctatgtttgaagaaaaccaaagaaaagcctggcctttgctacctctcctgtgccttctacttttatctaaatgaacacactataatcatgctggttgcattttccttcattctcctccctactccttccaaacccctgattcctccaaatactatatatgccttggtcatttgggtggtttggatgctttctgtggaatgaactgtaatatatttctgctttattcagagcactttatattatttatatttaaattagccttttaatatggtttgtaaataagtttcctaccaaggtagcatgaaaacactacacataaagaaaaaaaatgttaagaactaaggtattaaccttgttagaaaactcttttgatattaacatttaaggcaagtagttccttccttatgatttaatataaaaacatttgcaaagacaaggcatttacttggatttctttgtcatctcttcttctttcatccttacatattgcacttggttcactgtatctgtctgaatacactgtgcttcagaatcattgtagtactgtttgtggtacaactccctcattaaacatttccactgaacccatacttcatgagtttaaaacaaccaaaacagttcactttgttggcaaaggccatctctacccaagtaagattatttactcgttattcaatttagtaccgacacctccatccataacctacactattgtccactaaacactccctacctgtgtaaattccgtatcaagggtaaaaccttataagatttttcagacaactggcatttaagtgacttgtttataaattttaaaataaaccatgttctttgcagtatcctgccaggcaacacatcaaatatttcaaaaggcagccatacatttgctttaatgcttgctaaaacagcttaaggtctaatataattttaaaatagtcaaacaaatttgttttcactcttcatttcacaactatagagcagagaataagcccaatagtggccacttttactaactcatcaccatattcataaaactttcctctgcaattcattctacttcacatatcaatgcacttggtaagaaaataacaaaatgacaagcagtaaaatctaattcatgccagaacactggagaagttacatgggaagcaaaaacatacacaactttacaaaagttgggaatactgttttcaaataagcaataatcaaagtgggactttcatgctagaagtctcactcagtcaaaatcacgatttgtaagaacaagtggtgccacgagtgtccaaacatacagcacgatgccaatccaactggaagagattttcacccagacagctgtccactgacttttcatctcacgagagggttcatacctgtacca

SEQ ID NO: 16007 - DNA, 491 bp, Homo sapiens
ggcacgagcggcacgagcatccacagctctggggaacagctcatctctttcagtcctagagggccagtctctgcgcttggtctgtgctgttgacagcaatccccctgccaggctgagctggacctggaggagtctgaccctgtacccctcacagccctcaaaccctctggtactggagctgcaagtgcacctgggggatgaaggggaattcacctgtcgagctcagaactctctgggttcccagcacgtttccctgaacctctccctgcaacaggagtacacaggcaaaatgaggcctgtatcaggagtgttgctgggggcggtcgggggagctggagccacagccctggtcttcctctccttctgtgtcatcttcattgtagtgaggtcctgcaggaagaaatcggcaaggccagcagcggacgtgggagacataggcatgaaggatgcaaacaccatcaggggctcaacctctcagggtaacctgactg

SEQ ID NO: 16008 - DNA, 1463 bp, Homo sapiens
gagccagcgacgccctccattcactctccgcgcccgttctccggctgtcctcccgttccgctgcccgccctgccaccatgacggaacaggccatctccttcgccaaagacttcttggccggaggatcgccgccgccatctccaagacggccgtggctccgatcgagcgggtcaagctgctgcttgcagggtccagcacgccagcaagcagatcgccgccgacaagcagtacaagggcatcgtggactgcattgtccgcatccccaagggagcaggggcgtgctgtccttctggagggggcaaccttgccaacgtcattcgctacttccccactcaagccctcaacttcgccttcaaggataagtacaagcagatcttcctggggggcgtggaaaaagcacacgcagttctggaggtattttgcggggcaacctgggcctccggggggtgcgggccggcgcgacctccctctgcttcgtgttacccgttggattttgccagaacccgcctgggcagcggacgtgggaaagtcaggcacagaactcaagttccgaggcctgggagactgcctgggtgaagatcaccaagtccgacggcatccggggccctgtaccagggcttcagtgtctccgtgcagggcatcatcatctaccgggcggcctacttcggcgtgtacgatacggccaagggcatgctccccgaccccaagaacacgcacatcgtggtgagctggatgatcgcgcagaccgtgacggcccgtggccggcgtggtgtcctaccccttcgacacggtgcggcggcgcatgatgatgcagtccgggcgcaaaggagctgacatcatgtacacgggcaccgtcgactgttggaggaagatcttcagagatgaggggggcaaggccttcttcaagggtgcgtggtccaacgtcctgcggggcatggggggcgccttcgtgctggtcctgttacgacgagctcaagaaggtgatctaagggccgcggcctcctccacacacacacacacaccaggggaaccaagagaaccacgtagaatcctcaaccgtgcggaccatcaaccttcgagaaattccagttgtctttttcccagccgcatcctgcctgtagatggccggggaaggctctagaaaaggggcgcattgcgatccaaccatcggcagccgattccgtgtcttgatcacggggtgggagggaaccgtggcgtccctgcgtggggcccatgggtgagacactccagtactgagacctagagtccagatgcttgtaggagccaagtcgtgttctaagtatttatttaaaacaaaagaatcacgttttcccatttgtacttcagcgctagcccctgttttgcacagccgagtactggcgagtatgttctatgttgggcctcctgctgcaaaacaataaacagaggacgcagaggtcctcctgcctggccaaaaaaaaaag

SEQ ID NO: 16009 - DNA, 877 bp, Homo sapiens
cggacgcgtgggtgtttctgtgctcctgggggtactgggaatctgaaaccatctgctctgggaaaggctgcggcgcggctcccactctcggaaccttgtcctgtttgtcccccagctcggcaagcgccatatgagcctggcggcgccagatgcgaatcctgttgtgggctttttggcctattcccgcccctcagtcttgccgggatggcaccgcccgcataggacttccagggttgggctgagtgggagttcgactgctgggcctcgtaattctcgctttggggctgctccttccaggctgggacacactggggcccgctgtcggtctcccgtcctccgacatcttgtctggaacttccgcctggcagtctccagtaggagtggagctctgtgcggcgtagtttgggtggaaaaacgggccttgcgtcggcctcacccccagtgtttgtgtttcagaatgaagactattctcagcaatcagactgtcgacattccagaaaatgtcgacattactctgaagggacgcacagttatcgtgaaggggccccagaggaaccctgcggagggacttcaatcacatcaatgtagaactcagccttcttggaaagaaaaaaaagaggctccgggttgacaaatggtggggtaacagaaaggaactggctaccgttcggactatttgtagtcatgtacagaacatgatcaagggtgttacactgggcttccgttacaagatgaggtctgtgtatgctcacttccccatcaacgttatccaggagaatgggtctcttgttgaaatccgaaatttcttgggtgaaaaatatatccgcagggttcggatgagaccaggtgttgcttgttcagtatctcaagcccagaa

SEQ ID NO: 16010 - DNA, 468 bp, Homo sapiens
  misc_feature (1)...(468): n = a,t,c or g
ttgannctttganaccttatgacnnnnnnnnnnnnnnnnnnnnnnnnnnnnnnnnnnnnnnnnnnnnnnnnnnnnnnnnnnggcacgagaactggaatgtgggaacaggggaagcccttataaacttggacgatatgcattcagacatgatttacaatgtgagctggaaccggaatggcagtctgatctgcacagcttccaaagacaagaaagtgagagtcattgatcccaggaaacaagagattgttgctgtgagtattcctaggatgaaaactcagtagttggagcacttgagtgagtgtgagctttctgctttttaaggcaggcagcggtactggtcagtgggaccctgttgtgtgtagacaccaactgtgaataagagaaggcttataaaggcttctgtctccccagttgtgcttctctccagagttgtacattttccagcttttactcaagtctctcactttg

SEQ ID NO: 16011 - DNA, 505 bp, Homo sapiens
  misc_feature (1)...(505): n = a,t,c or g
tgattacgaatttaatacnnnnnnnnnnnnnnnnnnnnnnnnnnnnnnnnnnnnnnnnnggcacgagctgggggggcctgaagcacaatgtagcgcagatgcttcctttccaggccattctctcacccagcctgcacggaggagatgggagatgctgggggtcctgccctcagtctttttgggccttaggcgtttcgttcatcctgctaaggggatgaagcaaacacgaggtgattcctttgcctttcagagtggaagccctggagtttgttttgaaggccaggaggctgaaggatctctaagctacggtgtgggcttaatagcagcaggctttgtcctcctgtctcctccaagccagtgtctgattccttggcaacacaggtcttagtctgtggagtggctctgctgtggccttcctctggccgggcaggcactgtccagccatagccagctcctgagaataggtcagcctctcctttctgtctccccccaaaaaaaaaaaaaa

SEQ ID NO: 16012 - DNA, 550 bp, Homo sapiens
  misc_feature (1)...(550): n = a,t,c or g
aattaaatttgaanacctntggatacncttatgacatgattacgaatttaatacnnnnnnnnnnnnnnnnnnnnnnnnnnnnnnnnnnnnnnnnnggcacgaggaaatatatctttagaagacaaatgacataatttcactttcatagaggaattttaaaaattaatttgatctaaaagaaactgaagtttgtcaatctatacaagtaagaatgtgactaaaataaaataaatatattttagtaaaatttctggtaaatcagattatgtagtgttaatttcttttcctatcttagtctttgcagctgcataattacttttccaaatagnnnnnnnntgtttgtttaaagtgatgtcccttattcnggcctaancnggccgattttatgnanccctngtctggctnntanaccntgactagccagnggntanggtnggntnnaaggngncccnntgcttntgcagcttcncgcnnnnctgntnntnangtncnnttnncntcantttngntgnnnntnccntannnnttnnntnnnctctnntnntcaccc

SEQ ID NO: 16013 - DNA, 1426 bp, Homo sapiens
gtggcgagctgaggtggaggcaggctgcggcagacggcgacagtggcggcggcgccatggcagggcttgcaggatccctgctgccttggtgatcccgggctgacagccagagagcacagcggctcagctcctggagagtgagggttgaagaaagcggagggcagccgcctgcgcccgctggctcccattaggtcggttcctgcagcggtgcccggcagccttggtgaaggccctgcccggcagagatcatgtgttgcctccagtggctgctgcccgtcctcctcatccccaggcccctcaaccccgccctgtggttcagccactccatgttcatgggcttctacctgctcagcttcctcctggaacggaagccttgcacaatttgtgccttggttttcctggcagccctgttccttatctcgaatttgaagagattgctgacgcccgagagcctcgctttttcatccttctttccttgttcagcagggctagacagaaacatgtcttgactgttagttgtccacaaatcttcagtattttctccacttcatttttaagaaaggaagcaacagatagatgttgctctttcacctgggtgtctgggctcaagctttcccgcccagcctcacttcctttgcccttcctcctgcctttctcaactgtcccaaggagggggcctcattgtgtctcccgtgcatgctctgcagcattgaagtatggtgtgttcacgtagttctagcagtccccagctgagtgagtgggagagtacctgtgtgtttcgtaacggccttgatccccttgatagatgtttggatattttttggtgtgccctgtgtgtgtgtgtgtacaaatacatgtgtatattccttttaaagaagctttatcgaacgtggtctgattttgaggtttagcaatagctagctatatatggtaggtgccgctacagtttttatttagcatggggattgcagagtgaccagcacactggactccgaggtggttcagacaagacagaggggagcagtggccatcatcctcccgccaggagcttcttcgttcctgcgcatatagactgtacgttatgaagaatacccaggaagactttgtgactgtcacttgctgctttttctgcgcttcagtaacaagtgttggcaaacgagactttctcctggcccctgcctgctggagatcagcatgcctgtcctttcagtctgatccatccatctctctcttgcctgaggggaaagagagatgggccaggcagagaacagaactggaggcagtccatctagggaatgggactgtgaggccatacttgtgaaacgtctggactgctattctagagcttttatttggtgtgttcgttgcacagctgtttgaaatgtttaataaagctttataaactttaaaaaaaaaaaaaaaaaaa

SEQ ID NO: 16014 - DNA, 756 bp, Homo sapiens
gggcctcagggctatggacagactcctgtcccatcccagagacccctcgtgatcgttccctggtgggtgttgcccccgcctgcctttgcctccgccgtggccctgagagtcctgggctctgccccgcccggtcccttgctccccactcagttctggatttggggctgcccctaacccagcccgttgctgctttgcaccttttcctgtcattgggcatcccccagtagtcaccccactccaccgaaaagtaaactgcaggtgaggccgtgccccgagtctttcttcggtgtgtttggcttttccggggcgcttgccttgccatgattctaactctctgcccttccccaaggcacgtgggccgtggcccggctgggtcggctgaagaactgcggatggaagctgcggaagaggccctgatggggcccaccatcccggacccaagtcttcttcctggcgggcctctcgtctccttcctggtttgggcggaagccatcacctggatgcctacgtgggaagggacctcgaatgtgggaccccagcccctctccagctcgaaatccctccacagccacggggacaccctgcacctattcccacgggacaggctggacccagagactctggacccggggcctccccttgagtagagacccgccctctgactgatggacgccgctgacctggggtcagacccgtgggctggacccctgcccaccccgcaggaaccctgaggcctaggggagctgttgagccttc

SEQ ID NO: 16015 - DNA, 1148 bp, Homo sapiens
  misc_feature (1)...(1148): n = a,t,c or g
tttgaaacccttnnnnnnnnnnnnnnnnnnnnnnnnnnnnnnnnnnnnnnnnnnnnnnnnnnnnnnnnnnnnnnnggcacgagcggcacgagagagcagagagggagcgcgccttggctcgctggccttggcggcggctcctcaggagagctggggcgcccacgagaggatccctcacccgggtctctcctcagggatgacatcatccgtccacctccttgtcttcaaggaccacctcctctccatgctgagctgctgccaaggggcctgctgcccatctacacctcacgagggcactaggagcacggtttcctggatcccaccaacatacaaagcagccactcactgacccccaggaccaggatggcaaaggatgaagaggaccggaactgaccagccagctgtccctcttacctaaagacttaaaccaatgccctagtgagggggcattgggcattaagccctgacctttgctatgctcatactttgactctatgagtactttcctataagtctttgcttgtgttcacctgctagcaaactggagtgtttccctccccaagggggtgtcagtctttgtcgactgactctgtcatcacccttatgatgtcctgaatggaaggatccctttgggaaattctcagaggccctgggtgggcttctggaatgagcatgctactgaatcaccaaaggcacgccccacctctctgaagatcttcctatccttttctgggggaatggggtcgatgagagcaacctcctagggttgttgtgagaattaaatgagataaaagaggcctcaggcaggatctggcatagaggaggtgatcagcaaatgtttgttgaaaaggtttgacaggtcagtcccttcccacccctcttgcttgtcttacttgtcttatttattctccaacagcactccaggcagcccttgtccacgggctctccttgcatcagccaagcttcttgaaaggcctgtctacacttgctgtcttccttcctcacctccaatttcctcttcaacccactgcttcctgactcgctctactccgtggaagcacgctcacaaatgtaaagacttttctgtggcttaatccttgtcatgttttcggctcatggacacaaggacacattttcattccttcact

SEQ ID NO: 16016 - DNA, 2803 bp, Homo sapiens
ctacaaactgccgccgtgcagacactgtcaatcggccccactatggggcaacatctttttctcctttcccacttttctttattacttacctggtaacctttatccggcaactgaaagtaattgtgaaaacagtgcttcataaggcgtggaatacaaggccttggtttccaacgccgggcgaggatgaggcccagtccccaaactcccctcgcaggcacccttgcctaaagatgtccctccctgggtgacccaaaaagggtgggtaaacatagcccaaggttactttttaacttgggtaggatgactgcagaaggaaatggctacacagagcttccagacctttccatgcgttgtgctctccagaggatgcgccaggtgtatcagatttgcatgcacaaagacaggtgtgcgccccacccaccctgggctgggcagcaagaggtctgctcacctactgcaccagactttcctagcctccttccacactccgaatcttcaagcaggatgaaaagagaccacagaaactgaagcaagactaggatgctgcaaagaaagatgctctgatacacaaaagccaaaacataagacaaggagggaagagtaaaatgagggagacagacaggaagttaaactatgcagttacactgccgatttagaaagatgttaagacacacactagatacaaatgaaacccatcctgctcccttcctccagaagacgttgtaatgcagaaagccaaaatactacatccttcttgtagtcagcactgttagtattcaacactttaatatttatggtgtatcacataaaaaacaaagtcatatacttttgcattaatcaaaaaatagcaaatccatataatggcaaaatcaggaaaaaaattctagtatttccacaaaatacataatgtcttacagatgattatgtgaactttaaatgtctgcagccctacagagcttttgttgccaattgaaaaacaaaaaaatcccaacacaggatgttcaaaaagcctaattcataaaaagacaatttattccatgtttaatatagtgttttttaggatggtaacataagtcatgcaacagctctgtaaaacaaaacaaaacaagaaactacgatgtcggctgcgggttaaataaaaagaaaaccacacatacaaaaaagaatgtaaggaatggttagtggtgctgccaattaaaaaaaaaactgtaaatcatcttaccacccaaaagtgatatggaaaactgtttgaatctgagcatggacatggttgtagtcatcttttggaattataagtgaaagtgataggtaactccttgtgttccatttctcagagtagattgctatatccaaatgatcatgaacacccctcccatcccacactcagatggaaagcagccagaacccctgccactggattcttcagcacccttgggacagtctccaactgacacttcccagcaggggaggagggcaggcacctttggtgactcttcagtgagactccatcgacattcagaatcttaaaatgttggtaatgaaaaccatggacctccaagtcatcccttacccaaccttaaatgtagtgttgtgacatcccaacgaaggactttcccacgtcacgtgggaataaatttgaacagatacatcccaattgaacatagtgtctcagatttcaaacaaatacagctcatcttttgccaaaaaataaatatagtggaatgcaagtttgagggatggaagaatatataatctatcaactgtcaaggagtacaatttcattgcagacacaaagacttaagagtttcaaagaattttttaaaataaaaaaaaaatttgcacttattcctcacaaaatcttcacttttggaactatcccaattgaagctacacactgaatttattaatacagcattaagtttctttgtgtaaaaaaatctttgtacacagtaataaaaaaagataaggcaagatgcattaaacagaaaccttctggctcttttcctctgcgtttttacagagccactgatgactatctgcaacaaaagagttaagtttctgattttccgtatcaagcatcttatgcctttgctgtggtaagaattctgtccgagcaccctgaaggacagatgctggtgatggtctttggcacttatgctggcaaactgagcttctttcccttgagtacttttgtaatgtacaagtagaagaagtcacagtataggatggtctggactacgccggccaccacagcaatgaggtcaaagaagccctcaaagtagaagcgccagatccagttgacaagatacaaagcacgatagaggcccaggaagaacaggtagtgggtggtgatggtctcggcctccccagtcttgctgatcataaacagctgcggaaggatagccacggactccaggtagatggagaaggtccagaggatctcaagaggagagaaatcgtgattaactaaaaatgagaggcctcccacagggaccaccagaaactccactcggaaggtatcatgatttccatcgtaggttgccttaaatttcaggtagatcaggtacactgtggcataggagcaggcaaggtagataaccttcatagatgtgttatacaatgaaataaatgaagtaaaaagatccaggtaacgagttgtgaagaccagtgcaaacagaagctggcttttcccagaaataccggcgcaggagcgggtcttccagatcttcagcagcaggatgacgatggccgccaggtgggacaggtccccagtcagccggaaaatgttcatggcggcggcggc

SEQ ID NO: 16017 - DNA, 1619 bp, Homo sapiens
gttgggggctgatacagagtttattgaattagatttttctatttacaactgagatcacatctacatactattttgctagtctacatgggtacattatttccaacaagcttaagacttaccatgaatgggctcattcatacaaaaacacactcacactaattcttttaaaacagtagtgcatacattatactcctcctataaagccaactttgattaaaaaccactagtttcaaagctcagtctctgattttgaagatgaaccaagatatacgccatatgatcctacaatctattttagtcattttgtacagctgctatcttattggactacagtaaatattttttaaaaggacaccaatgaggggcaccatctggtgttaaccttaaccagaaagctggtttcctcctcctccccccaaaaacctttggccaagagttctccactgtgaagactgaaaggacctggtgacatttcggcatcagtcctgttaccacttggaggtaacagaagcaggctcgtgtcctcctttaattctaccacactacatgactcgcaattggttctgaaattagaacgttcaccatcgtacttaaaatcttaggggcatgaagagtcagctagaacaaggaaaaagaaagtcgcaggtagtaggtaagtaggtgggcacatgaaaagccaagctgctctgtccaacaccagtgtacatgtgctttaactaaatgaactccagaggccaacagcagcagacctgctcaattcaccttccaaatcagaacaagaccaaaaagctcaggcttgagttgtcaactatgcataggttccgccagtgatgaggagctcgtaagcaggatctctactccttctgcacaacacgatgcaagcacacagcatgcccagcagctgaatagctgcaaatgccagtgcggcccagatcacatgcatcatgatttcttgtagcttcttcactactagagcctcacacccctcagcatagaggtcggaagggtgggccaggctgccattacaattgctggcagtctctctgcagcagctaagagggacactctggtttttggtttctttgaaccaatctgtattttcccagtctgagtagttgtgaattccacaacaatgcagctgtctctgtacataatcaatagcccggctagcagcatcagggttggttccattgtaggtcttatacactttctgaatgctgcgatcaacctcattttccacctttgctctgtaaacatatcccaaaaccactacaacaacttctgtgacaaaaaccaagagcaggatgatgacaaacgtggcaagtccacagcgactttcccggattgtggcacagcagccaattagcccaatgatgaaaagcagggctcctacagctatgatcactacagcagggatgagcgtgtacacatcttcaaagaagtggtcatagtcatcataagtgatgaagacataggctcccacatagcataaaatgccagctgccccccagaagatgaggttgagaaagaccagcacggtcttggaggaggtgatgccgcactggcccatgtagactagcaaaatagtatgtagatgtgatggtcagttgtattaaggc

SEQ ID NO: 16018 - DNA, 596 bp, Homo sapiens
  misc_feature (1)...(596): n = a,t,c or g
ccttnnnnnnnnnnnnnnnnnnnnnnnnnnnnnnnnnnnnnnnnnnnnnnnnnnnnnnnnnnnnnnnggcacgagctcgggtgtagacctctgaagctgagatcacacaaaaacctggcctccccgccatgtagctgttggagagtagaaaaatagagcacgcctgatgtttctaaatgagaagactttcaatagtaatgaagaatccatggcactctcctcaccctcaaacacatggcagtcattcacatacaggccccaaagccactgttagtgctgcagtagctcctgtggacattggaaagcccggagagggcgtggaagaaatcagctggcccccggcaggttctctggggttttgtgcccaaggctcctggagccctaaaaactttcaaaagttaactccccacgtccccatcctgcttgggtttctggacttttctgaggcaccggcagaggggtctcgttgctcccttgagtgtaggggcagccctttaacctggctccttgagtccctgctttttctgcttctgttgccttcttcctcgtcttcctctctctcaatatcgccctctctttgtccctccccagttcct

SEQ ID NO: 16019 - DNA, 609 bp, Homo sapiens
gcaagctcagttctaggctctgaagattaagagagaaacaaggctctgtctgctcctgttgtctctgtgagcatctttgacagagtgctcagattgttgggatatagtgcatcggactggcagcctgaatttgtggagaccgcagtcagtaactttgtgatatatggaatatttagaggacagtaacccatttccctacgccctacctgatcacatcgtgccctgctgggccataccccaaacagcccaccttcctctaggcctggccatggccctgtgcctgccacattgaggattaagtcaggatatcttgagccctctcaaatccctgtttattcaggcctctgccacatatagagccagccttctgtccccaccacttccactaccatggagcccacttaagtaaaacgctctctggggcccagcttcgccagaaaagacaccaggggagcaaggctcaaaaccaggggcagctaaatctgatcttgtggaccagtctctagtaagggctttcagcgtggctgtctgtccattgctttccaaataggatgcagcaatgattggtacatgggtattaagatccggtagtaggggctagtccaagtt

SEQ ID NO: 16020 - DNA, 3870 bp, Homo sapiens
  misc_feature (1)...(3870): n = a,t,c or g
tctagagccctctcccaacatggcggcctcagcaaaaaagaagaataagaaggggaagactatctccctaacagactttctggctgaggatgggggtactggtggaggaagcacctatgtttccaaaccagtcagctgggctgatgaaacggatgacctggaaggagatgtttcgaccacttggcacagtaacgatgacgatgtgtatagggcgcctccaattgaccgttccatccttcccactgctccacgggctgctcgggaaccccaatatcgaccggagccgtcttcccaaatcgccaccctacactgcttttctaggaaacctaccctatgatgttacagaagagtcaattaaggaattctttcgaggattaaatatcagtgcagtgccgtttaccacgtgnaacccagcaatccagagaggttgaaaggttttggttatgctgaatttgaggacctggattccctgcctcagtgccctgagtctcaatgaagagtctctaggtaacaggagaattcgagtggacgttgctgatcaagcacaggataaagacagggatgatcgttcttttggccgtgatagaaatcgggattctgacaaaacagatacagactggagggctcgtcctgctacagacagctttgatgactacccacctagaagaggtgatgatagctttggagacaagtatcgagatcgttatgattcagaccggtatcgggatgggtatcgggatgggtatcgggatggcccacgccgggatatggatcgatatggtggccgggatcgctatgatgaccgaggcagcagagactatgatagaggctatgcattcccggataggcagtggcagaagagcatttggcagtgggtatcgcagggatgatgactacagaggaggcggggaccgctatgaagaccgatatgacagacgggatgatcggtcgtggagctccagagatgattactctcgggatgattataggcgtgatgatagaggtcccccccaaagacccaaactgaatctaaagcctcggagtactcctgaagaagatgattcctctgctagtacctcccagtccactcgagctgcttctatctttggaggggcaaagcctgttgacacagctgctagagaaagagaagtagaagaacggctacagaaggaacaagagaagttgcagcgtcagctggaatgagccaaaactagaacgacggcctcgggagagacacccaagctggcgaagtgaagaaactcaggaacgggaacggtcgaggacaggaagtgagtcatcacaaactgggacctccaccacatctagcagaaatgcacgaaggagagagagtgagaagtctctagaaaatgaaacactcaataaggaggaagattgccactctccaacttctaaacctcccaaacctgatcagcccctaaaggtaatgccagcccctccaccaaaggagaatgcttgggtgaagcgaagttctaaccctcctgctcgatctcagagctcagacacagagcagcagtcccctacaagtggtgggggaaaagtaggttccagctcaaccatctgaggaaggaccaggaaggaaagcagatgaaaataaagtagatgggatgaatgccccaaaaggccaaactgggaactctagccgtggtccaggagacggagggaacagagaccactggaaggagtcagataggaaagatggcaaaaaggatcaagactccagatctgcacctgagccaaagaaacctgaggaaaatccagcttctaagttcagttctgcaagcaagtatgctgctctctctgttgatggtgaagatgaaaatgagggagaagattatgccgaatagacctctacatcctgtgcttttctcctagtttctctccaccctggaacattcgagagcaaatcaaaacctctatccagacaagacaaaataaaactcaccatctcctgaagacctttcttacctttttttaaaaacaaaaaatgaaattattttgcatgctgctgcagcctttaaagtattgaagtaactggagaattgccaatacagccagagagaaagggactacagctttttagaggaaaagttgtggtgcgttatgtcaccatgcagttgccagtgtgattagtgcctaggggtctccatttagcagaaatggtaatgacagtgatataatgcctggaacctggttgggcagtaggggagggaggtagaaggaaaagtgtgagatttctaccttttagtttttatcctattgtggcatatatgaattctcaaacattatctgaataaattttccactcttggaaaggtagatttagcctcaagttgttctagtctccaggaggctgccagcccctcctcttatttaattctgagttttgggggccagcctagagggaattcctttttttttttttttaaccccccaggggggtagttgggagtgagactataggccataaagaatgggactgcattggaccaaaataaatggggaaaatcgtggttttgaaaagaagcttttggggaagtgatgagtcattttgcaccaggtaataggggaaaattgtgtgacctccagcaaacacatgaatggttatttcctggagccggaagcacttgggggtcgtggtaattcccagtgttttctgtgtcctagttttaccctttctaaacactgtcctttttgaaagttttgaatatatccacattctattgaaaccttgaaactaaaaatttagactcttatcgtcatcttaagttcttcatgctactcttaacctcccaaaaagcagtatctaagtcacatacatgatgtcttgggcattttctgagccatggagaactctgaaaggaagaatcgctgcttttctcaagcaaatcggtttcttgatgtcttttggttctccttgcctggctcctgatgcttgggaccccttttattgatcagagtgctctagaataatggatggtcttggatgatggataaatagggacagggacagttaaattgggagcctttcttacaaccttgatggggatttttccccccaagtttccttctccactgaaatgccacactaatgcttgttgggattcatgaggtggccagaccaatgtgttgttttgttgttgttttttttttaagcttcccttgagagaataaatggtaatggagagaactatttaacaaggtcctggtttctcttgcaacacagtagctaaacttgcctgcttttatatgcatttttgtagggatcagcttggtagacagtattagcggagaaacaccttgatcttggtttgcaagcccttctcccatcagtcctagattaggccctgttcagccatgcaggggtgttggtttatgcgtgctgcagcagtgggcataatgaatataatttacccagtggacaaaggtgtgtacccaagtgaatttaaataattggtgtggattggccagtagctaagaagtgggcttttaaagagtattgaagattgaaagggtttttctttcttttttaaaaaagaaaaacaaactattgattgtagataatgaaaagctagggtttgccctcttcatgtctactctccttccaaatagttatatccaaaactgtttttccctctcccctaccttgtcccccctattaaaatagaaacagggattgattaatgtcccgctcctgaatacatgtaaaatttgtacaaaaatatcttctatgaaaatgatttgtaatctgtagacttattacctgggagatgtcttgatgtaaaatcccatcctttgggttgtgggttttttgttttctccaaataaatctgatctttaaagttcaaaaaa

SEQ ID NO: 16021 - DNA, 868 bp, Homo sapiens
  misc_feature (1)...(868): n = a,t,c or g
ggcacgaggaacgggggccttgctggtcgcgtccctgcattcacccgcgcggccatcccgtcatccaacagttgatcctaactgagcacgcccacggccctggtctggcctgggcaccggccaccgtagcccatcccttgatggcctctgtgtccccaggagggcgggccggggggttgcccaggggctggagcagaggactgtggctccataaaggtaggccggagggtgtgagggcagattcaagctatccccagggctctgctctggtcggagccagccccttctccctctctgccttccccgccccattcctgatgctgaactgttctggacccctggccctgagtctctcaggaccaaagtgggcacgggaacagctgtagtgtgtgcccccccgggctttggccacaggtctccctntcgaggtgtggttgtgantgcgacccttcccttgccgtgatgccttcctcccccggggcttggtccagctccttcactctctagcagctgctggggcccacctcccatgccgaggaccagcaggggaaacctccagggagcatctgcaggctctgcttctgcccggctgctggcttgctctccctggtggctctccagcggccagcttcctcacccacccggcactccgctttgctctgtctcctgaggtgggcctgaccaacctccccttctctgcctcagtccctgggctccagggctcagctccacagccctctgcctagcaggctggttctccctgccaagcccatacctgtggtcacctggccctcctgtggtctgagtaccactcccctgccccaggagccactcccactccagntgnctgttnccagcangtcnccac

SEQ ID NO: 16022 - DNA, 975 bp, Homo sapiens
ggtccgacattcgtagcagcagctgccccccaagcatcagtgtacccagcccagtgactgacgtggagccctgggcttcgcgtagagtcacctagacggggcgaaaacgggaaaaggggccttaactggggcacctggctcctttgagagctcggagtttctgactggcctgcgcaacaccccagaggcaaggtgaacgcgagggcctataatgcaagaaccaaggcgagtcacgccctgtctgggcaaaagaggagtaaagacccctcagctgcagcccggcagcgcattcctacccagggtccgccgccagagctttcccgcgcggtcggatagttacactactgtccgggacttcctagccgtgccgcggaccatctcaagtgcttccgccacactcatcatggcggtggcagtaagtcacttccgcccgggaccggaagtgtgggatactgcgagtatggcggcgtcaaaggtgaagcaggacatgcctccgccggggggctatgggcccatcgactacaaacggaacttgccgcgtcgaggactgtcgggctacagcatgctggccatagggattggaaccctgatctacgggcactggagcataatgaagtggaaccgtgagcgcaggcgcctacaaatcgaggacttcgaggctcgcatcgcgctgttgccactgttacaggcagaaaccgaccggaggaccttgcagatgcttcgggagaacctggaggaggaggccatcatcatgaaggacgtgcccgactggaaggtgggggagtctgtgttccacacaacccgctgggtgccccccttgatcggggagctgtacgggctgcgcaccacagaggaggctctccatgccagccacggcttcatgtggtacacgtaggccctgtgccctccggccacctggatccctgcccctccccactgggacggaataaatgctctgcagacctgaaaaaaatt

SEQ ID NO: 16023 - DNA, 1463 bp, Homo sapiens
  misc_feature (1)...(1463): n = a,t,c or g
acatccaatgaactctgaactttttattggcctcctgctccccaaagggtaccctgcttctgctggcttaatgcctcagaactttggtgtcattggtctcagacaccactttgccatccactatccggcgggtggtggtcttttggatggtttgcatggagttgctgctgtccaaggcatcaccaagattaaagtcctcgccatcttccagcaggcggcggtaggtggcgatctcagcctccagcttgaccttgatgttcagcagggcctcatactcctggggcctggcgctgtccctctgcccgggtctgtgccaagctctgactcaaaggtgcagcaggatcccgttgagctgctccatctgtagggcgtagcgggcctccacctccctcaggctgttctccaagctggccttcagatttctcatggagtccaggtcgatcttccaaggactggactgtacgtctcagctctgtgagcgtcgtctcagcagctccaacctcaagcagactgtgtgggtgaccactgtggtgctctcctcaatctgctgagaccagtacttgtctagctcctctcggttcttccgagccagctcgtcatattgggccccggatgtctgccatgatcttggcgaggtcctgagatttgggggcatctacctccacggtcaacccagagctggcaatctgggcttgtaggccttttacttcctcttcgtggttcttcttcatgaagagcagctcctccttgaggagcctcgatctctgtctccagctgcagtcgtgtgacattggtgtcatcaatgaccttgcgggagccccatggatgtcggttctccacagactggcgcatggccaagctctgtctcatacttgactcttaaagtcatcaggcagcaagacgggcattgtcaatctgcagaacgatgcggggcattgttccacagtatttgcgaaagatctgagccctcaggtcctcgatgatcttgaagtaatggctccagtctctgacctgggggtcccttcttctccaagtgctcccggattttgctctccagcctccggttctcggtctccaggctcctcactctgtccaggtaagaggccaggcggtcgttcagggctttgcatggtctccttctcgttctggatgcctcccattcctgccagacccccgggctatcccggtggccaggcccccggaccccatgccgcccctgaagctggtggagcgggacacggagatccgggaaccagagctcatttccatagtgacccatttggagcaggagtgcctgacattgacatctgggatcctgacaccattgatagaagtgaatcaagcaagtttntgccacccagaagaaacctccacctgcattgggaagctctngcaactgtacccctaaaactcttaattcctcaaatgttaatgtttgccacaaatagtattgtcaaatgggg

SEQ ID NO: 16024 - DNA, 567 bp, Homo sapiens
  misc_feature (1)...(567): n = a,t,c or g
ggaaggctgaactgctgagtctgacacttaacaggacttcggcattcccctgaatacagactagatcagagattttatttttttaattgaaaagtaacttgggttctctttagaaacccttatttggtgtgcgcatctggctatttcacagagatttcagttttgcaaagaagtcggagttgatttcttccctcagacaagctattggttgttggtgggcaacagaagttgctcagcatagacaggggaaaaaacggttacggatgagactgaaagaaaacctcaaaggagaactctgagaattcatctcaggatgaagctgcaagggcaaaggagaagtacttgtgacacaagcaaatgggtccattgatcaacagatgcaagaagattcttctcccaactactgtacctcctgcaacgatgagaatctggctccttggaggcctgctgccattcctgctgctcctctctggcctgcananaccccaganggntntgaggttgcaataaaaacgactttnctttgacccgntttttgggacnagnnccanntttnnnaccggtttt

SEQ ID NO: 16025 - DNA, 4227 bp, Homo sapiens
  misc_feature (1)...(4227): n = a,t,c or g
ttcagctggagtgctcctcaggcccangccccacccttagaaaagacgttttccatgaggatcgtctgcctggtcctaagtgtgggtgggcaccagcatggactgcagatagtggtgaaggtgactttctagctgaaggaggaggcgtgcgtggccccaagggttgtggaaagacatcaatctgcctgcaaagattcagactggcccttctgctctgatgaagactggaactacaaatgcccttctggcttgcaggatgaaagggttgatttgatggaagtcaatcaagatttttacaaacaggattaaataagctcaaaaattcacctatttgaatatcagaagaacaataaggattcctcattcgttgacccactaatataatggaaattttgagaggccgattttcccctcagcccaataaccccgtgataaatcccctacaacccgagtgtccagaggatcctgagaaggcagaattgaagtccctgaagccgcaaagtcatagaaaaagtacagcatatccagcttctgccagaaaaatgttagagctcagttggttgatatgaaacgactggaggtggacattgatattaagatccgatcttgtcgagggtcatgcagtagggctttagctcgtgaagtagatctgaaggactatgaagatcagcagaagcaacttgaacaggtcattgccaaagacttacttccctctagagataggcaacacttaccactgataaaaatgaaaccagttccagacttgggttcccggaaattttaagagccagcttcagaagggtacccccagagtggaaggcattaacagacatgccgcaggttgagaatggagttagagagacctggtggaaatgagattactcgaggaggctccacctctttatggaaccggatcagagacggaaagccccagggagcccttaggccagtgctgggaagttgggaactcttggggagctcttgggacctggaagtactggaaaccgaaaccctgggagctctgggactggagggactgcaacctggaaacctgggagctctggcccctggaagtactggaagctggaactctgggagctctggaactggaagtactggaaaccaaaaccctggggagccctagacctggtagtaccggaacctggaatcctggcagctctgaacgcggaagttctgggcatgggacctctgagagctctgtatctggtagtactggacaatggcactctgaatctggaagttttaggccagatagcccaggctctgggaacgcgaggcctaacaaccccagactggggcacatttgaagaggtgtcaggaaatgtaagtccagggacaaggagagagttaccacacagaaaaactggtcacttctaaaggagataaagagctcaggactggtaaagagaaggtcacctctggttagcacaaccaccacgcgtcgttcatgctcttaaaaccgttactaagactgttattggtcctgatggtcacaaagaagttaccaaagaagtggtgacctccgaagatggttctgactgtcccgagggcaatggatttaggcacattgtctggcataggtactctggatgggttccgccataggcaccctgatgaagctgccttcttcgacactgcctcaactggaaaaacattcccaggtttcttctcacctatgttaggagagtttgtcagtgagactgagtctaggggctcagaatctggcatcttcacaaatacaaaggaatccagttctcatcaccctggggatagctgaattcccttcccgtggtaaatcttcaagttacagcaaacaatttactagtagcacgagttacaacagaggagactccacatttgaaagcaagagctataaaatggcagatgaggccggaagtgaagccgatcatgaaggaacacatagcaccaagagaggccatgctaaatctcgccctgtcagaggtatcccacacttctcctttggggaagccttccctgtccccctagactaagttaaatatttctgcacagtgttcccatggccccttgcatttccttcttaactctctgttacacgtcattgaaactacacttttttggtctgtttttgtgctagactgtaagttccttgggggcagggcctttgtctgtctcatctctgtattcccaaatgcctaacagtacagagccatgactcaataaatacatgttaaatggatgaatgaattcctctgaaactctatttgagcttatttagtcaaattctttcactattcaaagtgtgtgctattagaattgtcacccaactgattaatcacatttttagtatgtgtctcagttgacatttaggtcaggctaaatacaagttgtgttagtattaagtgatgcttagctacctgtactggttacttgctattagtttgtgcaagtaaaattccaaatacatttgaggaaaatcccctttgcaatttgtaggtataaataaccgcttatttgcataagttctatcccactgtaagtgcatcctttccctatggagggaaggaaaggaggaagaaagaaaggaagggaaagaaacagtatttgccttatttaatctgagccgtgcctatctttgtaaagttaaatgagaataacttcttccaaccagcttaattttttttttaaactgtgatgatgtcctccaaacacatccttcaggtacccaaagtggcattttcaatatcaagctaccgggatccagtaagattttttctgtttattgcgatcaagagaccagtttgggaggatggcttttgatccagcaaagaatggatggatcactgaattttaaccggacctgggcaagactacaagagaggtttcggcagcctgaatgacgagggggaaggagaattctgggctagggcaatgacttacctccacttacttaacccaaagggggcttctgttcttagggttgaattagaggactgggctgggaatgaagcttatgcagaatatcacttccgggtaggctctgaggctgaaggctatgccttccaagtctcctcctatgaagggcactgcgggtgatgctctgattgagggttccgtaggaggaaggggcagagttacacctctcacaacaacatgcagttcagcacctttgacagggatgcagaccagtgggaagagaactgtgcagaagtctatgggggaggctggtggtataattaactgccaagcagccaatctcaatgggaatctactacctgggggctcctatgacccaaggaataacagtccttatgagattgagaatggagtggtctgggtttcctttagaggggcagattattccctcagggctgttcgcatgaaaattaaggccccttgtgacccaataggctgaagaagtgggaatgggagcactctgtcttctttgctagagaagtggagagaaaatacaaaaggtaaagcagttgagattctctacaacctaaaaaattcctaggtgctattttcttatcctttgtactgtagctaaatgtacctgagacatattagtctttgaaaaataaagttatgtaaggttttttttatctttaaatagctctgtgggttttaacatttttataaagatataccaagggccattcagtacatcaggaaagtggcagacagaagcttctctctgcaaccttgaagactattggtttgagaacttctcttcccataccacccaaaatcataatgccattggaaagcaaaaagttgttttatccatttgatttgaattgttttaagccaatattttaaggtaaaactcactgaatctaaccatagctgacctttgtagtagaatttacaacttataattacaatgcacaatttataattacaatatgtatttatgtcttttgctatggagcaaatccagggaaggcaagagaaacattctttcctaaatataaatgaaaatctatcctttaaactcttccactaggacgttgtaatgcacacttatttttttcccaaggagtaaccaatttctttctaaaacacatttaaaattttaaaactatttatgaatattaaaaaaagacataattcacacattaataaacaatctcccaagtattgatttaacttcatttttctaataatcataaactatattctgtgacatgctaattattattaaatgtaagtcgttagttcgaa

SEQ ID NO: 16026 - DNA, 170 bp, Homo sapiens
  misc_feature (1)...(170): n = a,t,c or g
tttgnnatttganaccgctatgacnnnnnnnnnnnnnnnnnnnnnnnnnnnnnnnnnnnnnnnnnnnnnnnnnnnnnnnnnnggcacgaggagttgaactggctggaccatggtcggacactgagggagcagggtgtagaggagcacgagacgctgctgctgcggaggaa

SEQ ID NO: 16027 - DNA, 1240 bp, Homo sapiens
  misc_feature (1)...(1240): n = a,t,c or g
gtagaggcctttcctacagggtcggagaaggccaccgcagtcatttcttctgttctgtcagacataattcctcagtttagccttcccacctcaatacagtctgataacagacgagcctttattagtcatatcagccaagcagtttttcaggttcttagtattcagtgaaacctttatatcccttacggtcctccgtcttcaagaaaagtagaatggactaaaggtcttttaaaaacacacctcaccaagctcagccaccaacttaaaaaggacttgataatacttttaccactttcccttctcagaattcaggcctgtcctcagaatgctacaaggtacagcccatttaagctcctgtatagatgctcctttttattaggccccagtctcattccagacaccagaccaacttagactgtgcccccaaaaaaacttgtcatccctactatcttctgtctagtcatactcctattcaccgttctcaactactcatacatgccctgctcttgtttacactgccggtttacactgtttctccaagccatcacagctgatatctcctggtgctatccccaaactgccactcttaactcttgaagtaaataaataatctttgctggcaggactatgctgaatctccttaggcactctctaattggatgtcctgggtcgtcccaattcttagtcctttaatacctgtttttctccttctgttattccatttagtttctcaattcatacaaaaccgtatccaggccatcaccaatcattctatacgacaaatgtttcttctaacatccccacaatatcaccccttaccacaagacctcccttcagcttaatctctcccactctaggttcccacgctgcccctaatcccacttgaagcagccctgagaaacatcgcccattctctctccctaccacccctcaaaaattttcgccgccccaacacttcaacactattttgttttatttttcttattaatataagaaggcaggaatgtcaggcctctgagcccaagcctgcatatatacatccagatggcctgaagcaagtgaagaatnnnnnnnnnnnnnnnnnnnnnnnnnnnnnnnnnnnnnnnnnnnnnnnccaccattgtgatttgttcctgccccaccttaactgagtgattaaccctgtgaatttccttcccctggctcagaagctcccccactgagcaccttgtgacccccgcccctgcccaccagagaacaa

SEQ ID NO: 16028 - DNA, 998 bp, Homo sapiens
  misc_feature (1)...(998): n = a,t,c or g
cacattcctacaatcaagtttattactcaaagcaaaagttgtccatataatacattggtcgtcaatttttatttccacatggttacacaggctgaatgactagctcacaatcccaggaggtattataagttttgctcttcaaaaaatggtgttactgttgtaaggggaaaagtcctcaatgacaaagaaatgacactaatgaaaacaaaatcaagaatgatccactggtactgcaggttacagagaagctgtcagtgagcagttccccacctctcgcaagcaaaggggatcaagggctaaaaataccttagaaaaatcaaacagcacctgcaacacatgcttatataaaggccaaacttgcaaattcttccttctcgtccatgctgcccaaatgtgaaggaattacatataaggctaaaatctggcgaatcttctcacttcttcctcttctttgtggaatataatttttctgcgagtgggactgggacaatcccttcacattcttttagttcctgggtcagagggtgtttgacaatattccctctaatcacatctatatctcggagacaagtgctccaccatgctttcaacagctgcggtgggtgcataaaaatccaccaagaaatacccgcctctgttgtgctgctgacttgtgggcagagatcctataaggaagcgctcgttcaccccaggttttccaagtccctcactattgctcctctgtccatcagggcctctatcgtacgtttcaaagtagcagcagtctctggccgctgcatggctttcaggattaaagccagctcgtagcggggcatgcctggaggatcggcgagtgcggctcggaagcccaagcggttcccgggacgcgaaggggcgggacggcggggacagtggggacctagaaactgctgcgccggacggctcccctcgtgccnnnnnnnnnnnnnnnnnnnnnnnnnnnnnnnnnnnnnnnnnnnnnnnnnnnnnnnggtgtccaa

SEQ ID NO: 16029 - DNA, 540 bp, Homo sapiens
gccaatttcaaatgtaattcaggttacgtggtacaagatgatgttgtgatgggcactctgacggtgagagaaaacttacagttctcagcagctcttcggcttgcaacaactatgacgaatcatgaaaaaaacgaacggattaacagggtcattcaagagttaggtctggataaagtggcagactccaaggttggaactcagtttatccgtggtgtgtctggaggagaaagaaaaaggactagtataggaatggagcttatcactgatccttccatcttgttcttggatgagcctacaactggcttagactcaagcacagcaaatgctgtccttttgctcctgaaaaggatgtctaagcagggacgaacaatcatcttctccattcatcagcctcgatattccatcttcaagttgttttgatagcctcaccttattggcctcaggaagacttatgttccacgggcctgctcaggaggccttgggatactttgaatcagctggttatcactgtgaggcctataataaccctgcagacttctt

SEQ ID NO: 16030 - DNA, 3629 bp, Homo sapiens
aattttgtcgggtttcgttttctctctcaaatcatttagaagtttttggggtttttttaagcaacacttaattactcctgaaactttgtctgaaaacgcaccatttgtatagatcatgaaaagttttaaggaaactcagagaaaaagagaacaacgcagcttaaaacttttaaaatgtcctccctcacccgtgggctcaaacagccctgcatctgccgtggccggcacgtttctggttgaactgcctttatgttaaagttcagatactggtagtgtgcccatttcttaagctgtctatttttatttgttgagctggggtttggctgggctccactccagatgtctctctcacaagatttggtgctgatgatctatttatagaactgtggttctgttgccatggtaacatgctggaggccagggcggctggggagctatttctggactggtgctgtaatgtaagattgattgggcaagttagtatatcctctaagccagactaactctgaactagtaaaaaggaagaggggaacagaaaacttaggcagtttctttaaataaacttttctctctttatgattttcttttctcgttagcccgctttaaaacaattccaatctctacatgcccctccctccaaaaaataactggttttaacattaattttccatattaattaccccaatctttcaaaagtaaattttcctgtgtgtctagtcaagcaacacaaacaagatgctttttttaatgaaaagcgtaatatctggagtgttctatttcatggaccaaacagaacggaagagaactttgtgtttgtttcctgttcaggatggctagggcgagaagggcccctttgtgccaacctcttttgttctctttaatcaatgagattcttaaaaagtaaaaaggaagggatacagattctcagtaactaaaacaatctcgtgtgcccttgaggggaaagtccttgatgtttttaagaatgtcactttattgttttttaactgaatgatatagaggtatacaattttcaaactgtttgccattttaatcaagcaatttgaaaattaaaatgtttttgtcaggcattaccaaatggcacagaatgtgataggccagcctggttttggggtcctttctctactggttgatatgcataaaaccttctaaaaatcaagaatattgccagagagcaacaggaataaagaagctaagtaaagaataaaaaagaaaaatagaaaaaataaaaataaacacgaagaacaaagccccaccaccgtgctgtgctgtttgtgtggccccactgcatcgaggccacaggctagctgctagacgcatctagagttccctgattcctaaaattatttatcttaaatcctgtttgccctaaccttcttaaggcatcagctttgagttacaaatgtaaccaacacacaagcaaatgtgccattgacttagtgctgcataactgtgggacggtcacttccgttgagcctgaccttgtagagagacacaaatagttggcaaattgatgtgagcgctgtgaacaccccacgtgtctttctttttctcccagcttcctggacaagatcgacgtgatcaagcaggctgactatgtgccgagcgatcaggtgtgcaaaacccctccccaccagaggactctgagccctctttccaaactactccagacctttgctttagattggcaattattactgtttcggttggctttggtgagatccattgacctcaattttgtttcaggacctgcttcgctgccgtgtcctgacttctggaatctttgagaccaagttccaggtggacaaagtcaacttccagtaagccaactgttacctttttatataacagagatcatggtttcttgacattcaccccagtccctctggaataaccagctgtcctcctccccaccagcatgtttgacgtgggtggccagcgcgatgaacgccgcaagtggatccagtgcttcaacggtaggatgctgtgggcttggctgttcgtaaagaacgctttgcttctgtgttgttagggatcagggtcgctgctcacgctcttggctttgctctctttggttaagatgtgactgccatcatcttcgtggtggccagcagcagctacaacatggtcatccgggaggacaaccagaccaaccgcctgcaggaggctctgaacctcttcaagagcatctggaacaacaggtttgtggagtgaccgcccaccgcctgcgcttgcccaggaggccctggtctgcactgtttatagagaagaaccccgtgcaagcattccagacccctggccgaaagcgcgcttctcccaagcattcacacggcctcccttcttgtagatggctgcgcaccatctctgtgatcctgttcctcaacaagcaagatctgctcgctgagaaagtccttgctgggaaatcgaagattgaggactactttccagaatttgctcgctacactactcctgaggatggtgtgtatggcttccactcttgctggctgttcattgcggtggttctttttcaaacggtcaggctgaaaacccccatccccctcccaccaccaaaccataaaggatctataagagaagcaagaaaaacgcactcccactaattctcatatggaaaaatcagggttttgaagacttctggagctacagagatgctagcaccccagctctgcttgaattttaaattacattaatatgtattccctttttatatagctactcccgagcccggagaggacccacgcgtgacccgggccaagtacttcattcgagatgagtttctggtgagtcgagcctgtctttagtttcctctcttgttcctcctctttttctcatggatgtaaatttacttaattccaaattcaggggttcagctacccagttccatggttttagttcacgcacatccagtgtggatttgagctctttgcgcccctctttttgcttttgttttcatatgacatcagaggctggctgacagcgtccctggtaggtgtccccatcagggatagggtggttcctggcgagggtgtcactgacaagtccccttgtttgtgcccgcagaggatcagcactgccagtggagatgggcgtcactactgcttaccctcatttcacctgcgctgtgggacacttgagaacatccggccgtgtgtttcaacggactgccgtgacatcatttcagcgcatgcaccttcgtcagtacgagctgctcttaagaagggaacccccaaatttaattaaagccttaagcacaattaattaaaagtgaaacgtaattgtacaagcagttaatcacccaccatagggcatgattaacaaagcaacctttcccttcccccgagtgattttgcgaaacccccttttcccttcagcttgcttagatgttccaaatttagaaagcttaaggcggcctacagaaaaaggaaaaaaggccacaaaagttccctctcactttcagtaaaaataaataaaacagcagcagcaaacaaataaaatgaaataaaagaaacaaatgaaataaatattgtgttgtgcagcattaaaaaaaatcaaaataaaaattaaatgtgagcaaagaaaaaaaaaaaaaaaaa

SEQ ID NO: 16031 - DNA, 1412 bp, Homo sapiens
aaaatgcaaaattctgatgatgaaaggccacagctctagatgaagaacacaggcattcagatgatgaagaggaacaggatcataaatcagaatctgcaagaggcagtgatagtgaagatgaagttttacgaatgaaacgcaagaatgcgattgcatctgattcagaagcggatagtgacactgaggtgccaaaagataatagtggaaccatggatttatttggaggtgcagatgatatctcttcagggagtgatggagaagacaaaccacctactccaggacagcctgttgatgaaaatggattgcctcaggatcaacaggaagaggagccaattcctgagaccagaatagaagtagaaatacccaaagtaaacactgatttaggaaacgacttatattttgttaaactgccccactttctccagtgtagagcccagaccttttgatcctccagtattatgaagatgaatttgaagatgaagaaatgctggatgaagaaggttagacccaggttaaatttaagggtagaaaatctataagatggaggatccccgagatgaagaagaaatgaaattaaagaaagcaatgctcggatagtcaagtggtcagatggaagcatgtccctgcatttaggcaatgaagtgtttgatgtgtacaaagccccactgcagggcgaccacaatcatctttttataagacaaggtactggtctacagggacaagcagtctttaaaacgaaactcaccttcagacctcactctacggacagtgccacacatagaaagatgactctgtcacttgcagataggtgttcaaagacacagaagattagaatcttgccaatggctggtcgtgatcctgaatgccaacgcacagaaatgattaagaaagaagaagaacgtttgagggcttccatacgtagggaatctcagcagcgccgaatgagagagaaacagcaccagcgggggctgagcgcccagttacctggaacctgatcgatacgatgaggaggaggaaggcgaggagtccatcagcttggctgccattaaaaaccgatataaagggggcattcgagaggaacgagccagaatctattcatcagacagtgatgagggatcagaagaagataaagctcaaagattactcaaagcaaagaaacttaccagtgatgaggaaggtgaaccttccggaaagagaaaagcagaagatgatgataaagcaaataaaaagcataagaagtatgtgatcagcgatgaagaggaagaagatgatgattgaagtatgaaatatgaaaacattttatatattttattgtacagttataaatatgtaaacatgagttattttgattgaaatgaatcgatttgcttttgtgtaattttaattgtaataaaacaatttaaaagcaaaaa

SEQ ID NO: 16032 - DNA, 439 bp, Homo sapiens
agggaaacgggcccttgaaaagaaggtaatgtggagcgggtagcctccgtattgattaagaaggggacgggcttaccttccactgtgagagttaccggaagctcggcgtccgtgatggtctacggggcttccgaggcgatcgggcagcatcagttttcagccgctaagccgagaacatctgggaaggagtcagagagtgacagtctgatttccagtagggtctggcacagatgggacatggctcaggaggaatcccaggctgcaggcattccttggcccagtgaccagatttccagcacttgaagaaagatcctgggggaggcggtcctggaggaacacctggccgctgcgattcaggtgttttgaagttcttgtgtgctggaaatgtggctggggtttctctcacagtggaggcaagtaattgcaactcagaaatatg

SEQ ID NO: 16033 - DNA, 1220 bp, Homo sapiens
  misc_feature (1)...(1220): n = a,t,c or g
tgcatcccctttttggaattgctcaaccaggtggtaaccgccgccgcttcctggccttgggaggtggttcctttcttaacccacaagaacctctcccaagagaacttggtcctgatgtctgaccatggagatgtgagcctcccgcccgaagaccgggtgagggctctctcccagctgggtagtgcggtagaggtgaatgaagacattccaccccgtcggtacttccgctctggagttgagattatccgaatggcatccatttactctgaggaaggcaacattgaacatgccttcatcctctataacaagtatatcacgctctttattgagaaactaccaaaacatcgagattacaaatctgctgtcattcctgaaaagaaagacacagtaaagaaattaaaggagattgcatttcccaaagcagaagagctgaaggcagagctgttaaaacgatataccaaagaatatacagaatataatgaagaaaagaagaaggaagcagaggaattggcccggaacatggccatccaggcaagagctggaaaaggaaaaacagagggtagcacaacagaaggcagcagcaattgggaacagggaacagttcccatgccttcgaggagatgatccggaaccaggagctagaaaaagagcgactgaaaattgtacaggagtttgggaaggtagaccctggcctaggtggcccggctagtgcctgacttggagaagccctccttagatgtgttccccaccttaacagtctcatccatacagccttcagactgtcacacaactgtaaggccagctaagccacctgtggtggancaggtccttgaaacctgggagcactgagcaactcagaaagtattcccacaatcgatggattgcgccatgtggtggtgcctggggcggctgtgcccacagtttctccagttaggccagtgccaacactgcccggggagtggagacatgtggaattctctgtggaaaactgatgaggaatgaatttaccattacccatgttctcatccccaagcaaagtgctggggtctgattactgcaacacagaggaacgaggaaggaactttttcctcattacagggntcagcaggggccttcattcacattgggcttggatttcatacttnacccccacacagaccgngttttttttcccgtnttcggaccttncaaattnaattgnttttttacccagtgntttt

SEQ ID NO: 16034 - DNA, 315 bp, Homo sapiens
ggcacgagattgtagtaaagaggtgcaaattagttctaataaaaaatgtctttaacaaaatgtgaatacgtgactaagatgggaaagtaggtagcagtaatataaatatggaacaatgtagactactaattggaatagtaaagggagccattttaccaaataaaattaaaatgtaagattctgcagtcagaaacaaaactttaaaaactccgaacagaggttacctctgacagcatatggactgggaaggggcaaaaggaatgctttttgcatctcagcatagtgagaccttgtctctacaaacaataaagcagc

SEQ ID NO: 16035 - DNA, 1212 bp, Homo sapiens
  misc_feature (1)...(1212): n = a,t,c or g
ctagggttagaggcaacccgtgagctagaaccccgaacgtggtcggttggagaaaatatgtccctccggaggcacattgggaaccctgagtatctgatgaaaaggataccacagaacccaagataccagcatatcaaatcaagactggacactggtaacagtatgactaaatatactgagaagctcgaagagattaagaaaaattatagatacaaaaaagatgagcttttcaagagactaaaagttacaacttttgcccagctgatcatccaagttgcttccctctctgatcaaacactggaagtgacagctgaggagattcaaaggctggaagacaatgattctgcagcttcagaccctgatgctgaaaccactggcaggaccaatgggaaaggaaatccaggtgagcagtcgccgagccctgagcagttcataaacaacgcaggagcaggggactccagccgctcaactcttcagagtgtcatcagtggtgttggggaactggatctagacaaagggccagtgaagaaagcagagccccataccaaagacaaaccttatcctgactgccccttcctgctgctagatgtgccgtgatagagattcttaccagcagtgccacattgttggagcttacagttacccaattgcaactctgtctagaacaatgaacccttattcaaatgatattcttgaatataaaaatgcccatggaagatcatcattctgtatgacgatgatgaaaggctggccagtcaggcggccaccaccatgtgcgagcgtgatttgaaaacctcttcatgctttccggaggcctaaaagctcctagctcagaaacttcccggaagggactgattacctgggttccctgcccggcatcttggcccancagggcccttcctcctgggtctgcccggaaacggttccagccacaaaggggcaacccctaccagctgcgaataaacggagatttaccccagaagacttaaaaaagatagaatattatctggaagaggagcaagggcctgcagatcatcctagccgactgaaccaagctaaactctccggaagagagtccaaggtgcctggtgcccgaagcgctcagaatctgccaggtgcgccccgccagccactcaaacccccgctccctcagcagtggtcacctgcaaggcaaaccctggaagtaaagactttgtctcacttaggcaaaaa

SEQ ID NO: 16036 - DNA, 1324 bp, Homo sapiens
  misc_feature (1)...(1324): n = a,t,c or g
aacatgaagagcanacctccttagaggaagacagnaaaacaggtcttgattcccccaactggcattgacttttcctgatattactgcccaactcttttactgtgcactggattgctcctcgagcccacccatcactggctacaggatccgcccatcatcccgagcacttcagtgggagacctcgagaagatcgggtgccccactctcggaattccatcaccctcaccaacctcactccaggcacagagtatgtggtcagcatcgttgctcttaatggcagagaggaaagtcccttattgattggccaacaatcaacagtttctgatgttccgagggacctggaagttgttgctgcgacccccaccagcctactgatcagctgggatgctcctgctgtcacagtgagatattacaggatcacttacggagaaacaggaggaaatagccctgtccaggagttcactgtgcctgggagcaagtctacagctaccatcagcggccttaaacctggagttgattataccatcactgtgtatgctgtcactggccgtggagacagccccgcaagcagcaagccaatttccattaattaccgaacagaaattgacaaaccatcccagatgcaagtgaccgatgttcaggacaacagcattagtgtcaagtggctgccttcaagttcccctgttactggttacagagtaaccaccactcccaaaaatggaccaggaccaacaaaaactaaaactgcaggtccagatcaaacagaaatgactattgaaggcttgcagcccacagtggagtatgtggttagtgtctatgctcagaatccaagcggagagagtcagcctctggttcagactgcagtaaccactattcctgcaccaactgacctgaagttcactcaggtcacacccacaagcctgagcgcccagtggacaccacccaatgttcagctcactggatatcgagtgcgggtgacccccaaggagaagaccggaccaatgaaagaaatcaaccttgctcctgacagctcatccgtggttgtatcaggacttatggtggccaccaaatatgaagtgagtgtctatgctcttaaggacactttgacaagcagaccagctcagggagttgtcaccactctggagaatgtcagcccaccaagaagggctcgtgtgacagatgctactgagaccaccatcaccattagctggagaaccaagactgagacgatcactggcttccaagttgatgccgttccagccaatggccagactccaatccagagaaccatcaagccagatgtcagaagctacaccatcacagg

SEQ ID NO: 16037 - DNA, 764 bp, Homo sapiens
  misc_feature (1)...(764): n = a,t,c or g
gaccagacaaccaatgaagacatcaaaggatcatggacagggaagaatcgtgctgtgtggccccttgccccccagtgtgctggatcgaaggggtattttgccactggaggaaagtggaagtcgacctcccagtactcaagagaccagtagcagcctcttgccacagagcccagcccccacagaacacctgaactcaaatgagatgccggaggacagcagcactcccgaagagatgccacctccagagcccccagagccaccacaggaggcagctgaagctgagaagtagcctatctatggaagagacttttgtttgtgtttaattagggctatgagagatttcaggtgagaagttaaacctgagacagagagcaagtaagctgtcccttttaattgtttttctttggtctttagtcacccagttgcacactggcattttcttgctgcaagcttttttaaatttctgaactcaaggcagtggcagaagatgtcagtcacctctgataactggaaaaatgggtctcttgggccctggcactggttctccatggcctcagccacagggtccccttggaccccctctcttccctccagatcccagccctcctgcttggggtcactggtctcattctggggctaaaagtttttgagactggctcaaatcctcccaagctgctgcacgtgctgagtccagaggcagtcacagagacctctggccaggggatcctaactgggttcttggggtcttcaggactgaanaagag

SEQ ID NO: 16038 - DNA, 649 bp, Homo sapiens
ttttttgcacagggcatggcttgaattagttttatttttcttaactttaaatatatatatgaaaatatatattaaaatgttctctaaatattttctgcttcttgcaggtctctttttactagatcatggctgttcttcccacctcatccctctgaaaataaaaatgtattgccctccccaccatccatcatagccaggccactaacttgacttggtgcaagagattcttgctgcgaactttgtagagccagtgtgcagatagaatttggctttgagggttcctgatggctttttagtctttaactgtgtgtgtaccagtctcacatttggcccaaacctcaggattctccctctgcctgtcttacttcatggtactagaagaccttcctcgccactctctccacatgagagagtcagctgccctttctcctgtgcctctgcaggaagaactctcttgcatggcacatctcagctcctcattgagggatagttttctttgataagaaacctgggagtccatttactctgacctctctttaaatctatatccagagccactagcccaggaaaaacttgggtgacccgtaatttctcttctcctgctgtccttttgctcttacgccccaccccaactccccttaaattttac

SEQ ID NO: 16039 - DNA, 1198 bp, Homo sapiens
aaattcatggagaagactacagttaagtactaagaatcttctaaatgtaatttcatggattgcaattgaaatgtaaaaggatatccgacaatgccattaaatgattcggaagcactaggaccctagaaaaattcaaggagaaaaatgtaaaccaatttacaaagctattgccctccctgcatttccaggcacaaacaatttatttcaaggtgccttataactgctaggtcttggaagtcaaagagaaatctatcaattcagctttgaggaaccagggctgtggccagccacaggtaccaaaatattatccaccttgtagagtagtcataattttctgttcttcaataaagggatgaagcacgcactgtgattcttaagacacatcttagtgtataagaatccagatctgccgtaggggcatgctatgactcctaatacatacaatcactagaacaaaagtctgtgatggcccagtaaacttccccacatgccctatgatcaagatgttccttgtatgtgtttgatgacctttggtattaccactgcctgatctgggtacttccttgtaatttgactttaaaaaaaatgacaccaattgcaaaatttgcatccagttgacaagacatttaaggtgtttatcaggatcatgccctggccccagcttcccaataccagctgttgaaaagattctctctcatctggagagaactggagtgcacagttcacccacgtggctccgggttattagttactgtgggctggtcttggtcagaggcatctgcagctggagtcacagctggacttgcagtggacgtggcagtgtctggggaggcctgggatggtcttggagggggatcgcttgctgagacagactggaaatactgcacagtccaggcgatcaatatggatagcagaaaggttcccagaaagtagatcagggctgagtgcaggatagcaccccagagaagccgcaagtgcaggtaaagccaggccaaggagcaggggctgaaggactcctcgttactgtggctccagcacctttcgtacagttcctggagaatggagatgttattagaatggagagttgagtcaatttccaagaaatccaagatatggtgtgggattatcgtaccttcctcgattagcagggccaggttaaaaaatccctgggagtctccatccagggcggcttgggcgc

SEQ ID NO: 16040 - DNA, 1369 bp, Homo sapiens
ttttttttttttattcggttcagtcctttgtaaatattgtaactggggagtatagagtagaaaaaaagtatagttaaaacatttgttctacaaattaacctttaaaaatataattactgcctaaaaatagagtgctgttacacttaaggaaaattagtgccattttggaaatgagatcttgtgccataaatacagctgaactgaatataaatgttcacaaattaatgctgtcaaaggaatgagtaaagcagaaaaacttttaaccagcaacatttcaagtacgtagtgtgatcaaacatgatcatccagaatttgtatatttttttttttgtacagaggttacatattctgggtgttcttttataaaggaaacattttaaatcccacaaattgacactttctatcttcaatggactaagatttttttggtcagtaatctctgaaatttccttaaattatatacttaacatagcagagaaactggattgtttttgtatataagactgcttccacctgaaatgctgtcataagtactgggggggtgggggagtgcccatcttgtacatgatattcttagaggtaataaggtaatgatgcatgaatttattttataaactcttggactatgtatttgacatgtaaaatatgtacagtattaacgtcaaccatctctttaaagttagcctataaatattgttgtataattttctttggtcagaaacacttggactgaatagtgacactcggtaaggattttcagtgccatttagcaaaacgtctttagtctatgcaactagcaaaaatctgcataatgcaacaacacagttttcacacttcaaattttacatgaggggttcttcacgattctcctggaccccagtctagcaaaatgagaggaaaggccctagggagatttatttctgttaaatagttaactctgctgagtatgacaaatagtgtctactatctcaaccctccaaaatttgcagagtgttgggactgtcatttgtgattttttttttttttttggtggggtagttgaataaaattgggcagctaaatttttcagttccatgtgcctcccaaataaaaaacagaaaataagtagtttttgtgaattgacttgcagacaaagtagaaactgtgctgcatgacgttattttgtaaacagatgacattttctgaccaggcacatgccatccaattttctgtcaatcacactgttgtataaagcagcagaactgaaggggaaaaatgattgttgtatacactgaattgctttgcatggtctcatttgagataattgatgtaagaatcctgacttttttatatttggaaacatcaaataaaaatggaaaaaatgaaaaaa

SEQ ID NO: 16041 - DNA, 629 bp, Homo sapiens
gggaggcgctggggaagctgaagcagttcgatgcctaccccaagactttggaggacttccgggtcaagacctgcgggggcgccaccgtgaccattgtcagtggccttctcatgctgctactgttcctgtccgagctgcagtattacctcaccacggaggtgcatcctgagctctacgtggacaagtcgcggggagataaactgaagatcaacatcgatgtactttttccgcacatgccttgtgcctatctgagtattgatgccatggatgtggccggagaacagcagctggatgtggaacacaacctgttcaagcaacgactagataaagatggcatccccgtgagctcagaggctgagcggcatgagcttgggaaagtcgaggtgacggtgtttgaccctgactccctggaccctgatcgctgtgagagctgctatggtgctgaggcagaagatatcaagtgctgtaacacctgtgaagatgtgcgggaggcatatcgccgtagaggttgggccttcaagaacccagatactattgagcagtgccggcgagagggcttcagccagaagatgcaggagcagaagaatgatgtatggcttcttggaagtcaataaggtggcccggaaact

SEQ ID NO: 16042 - DNA, 477 bp, Homo sapiens
taaatccagatgatgtatatattagggttctccttgccctgaagcttcaggatgaaggacaggaagctgaaggagaaaagtacattgaagaagctctgaccagtatatcttcacaggcctatgtctttcaatatgcagccaagttttatcgaagaaaagggtctgtggataaagctcttgagctcttaaaaatggccttggagacaacacccacttctgccttcctgcatcaccaaatggggctttgctacagggcacaaatgatccaaatcaaggaagctacaaactggcagcctagaggggcaagatagggaaactgtggacagattggttcaattggctatatgcaaattttgaaaagactataatgttaaagcgaaccatttggagatgggcctatgttgacctggctgaaacgtatgcagaaataggccaccacagaaaggctgaggaacatttttcagaaagggttacgca

SEQ ID NO: 16043 - DNA, 186 bp, Homo sapiens
ttggcgacgatgggtgtccagcagaggaatgggactggtagtggaacctaaatttgtacttctatgtataatatgaagcaaatataacaaaaaattagtatttgttcattgtaggtgactaaacagctgtttaatatattgtcctttatatttttccatacaagtattttaatttttttttttttt

SEQ ID NO: 16044 - DNA, 2543 bp, Homo sapiens
  misc_feature (1)...(2543): n = a,t,c or g
atcataaaactcaattttattcaataaaataataccacaaaagataaaatgttattcttttatttatgttaaataaaaacatgagaaaatccttttttaaaaagggtcagaatattccttatgtctccaaaccaagtccatggatgcaaagaaatgctgagttcttgatacactttcatgtcataataaccaaaggagacagcacgggctcgagtctttcagctgccgcttaggaaagtcacatgcagtatttgggaaagcaaggaacagaacacaggcatgagtattttctggaaatacctcctgccctggcaatgaacctcagtaccaaatatttttgttttcttttttgtggtcctgataaatttttaagccacacatcctactgaacttcaatgatacaatttctcacaattccagaattctactggcagtacagtttacttggccaacgtggataatcttataaattttaaaattacatacaatagaacactattgcaaattttgccagtagaaacatgaccccaaggaactgccatttccaaaacataactgggcacacatttacaatgcacctgctaggttttgaattcatttgtcatttctgatctacccttaagactatgcttgaatctctgaaaacaaatgctagattcatgatttctatacccacatactccataaatccatcacaaaccctacagtctgatttacgtacggcaaatgattcatccaataggccatggtatgttcacaattcttcaatcttattcaggttgtaaagacgtttttctacgactggagtcactaagaatttctctgttagagaaagcatcattttcacctttggcacactgccaagatgatactttactacagaatttatgaaactacaatttagtaacttgcaggctttattaaaagaaaaagaaaaacaaagaataatttaatataaccccatgtcccaaaactttctagttttttttttttttttttagtgcaagaaatgctgcatcattgaagcacttgagaattaccatgaaatctaacaaaaaatgtcatcaactcaggagtaataataaaaaagagaaacaaccagagaggcacacagattgttgtttttttaaaaggatttttatactatattaaaaaaccacaaaataaaaaagggatcaatcaacatatatcttagaagtccttccaagagtcttggtatgcaacagccatggaggctgtgacctttttccttcttttctcagcctgcagttcatttaaggatcaccggagatgactcgtgctctagttcttaaaatcaaacttgttctgccaaatccaagaccctgaatttgtccaaattgtagaaacatgcttttaccacccgtccaccaaaatacctcccattcaagtcaacaaccgctttaattgctgattcaactctctcaaattctaaaaatatccgtactgcttcatcatcaggggcaccaggaatttcaaatatcacacattttccaactttgccatatttttcacattcttccttggtttcaacttccaagtcttcatccacctctcccgcaccaaccatgttccttagtaagaccactttagtaggacacttaagtatttcagtcagcggatttgaatctgacttcttggatgcatctttctctgtggcgtcgcccacgatgatcttgccgccacgcttggctggtcttctccactgacaaggcagtgctcaggccctgctcatgcttccccagaccctgggccctcccggaagccgtacttctgcatgatcttgtgcgccaccgtgccccccatgttagcgaggaaggagttgctaggtccgggttggagatctcggtctgtcttgttcctcgtacactgggggaggaatggctgctttggaagactgtgatcgaggtcttgagtcctcttcataaggaaaatctcggggtaactctttgtctttctctaccagagaagtgggtggggcaatggcagccgcccatacttcttttcctcctctctcgctcataatcttcatcttcatcagaatctggatctggtctccttgcaaacccacttgcttcatgtctgtctttacgccttttttccctttcttctatttccttttgtctttccagctcccgctgtctctgtcgttcctctctttggcgcttcactactttctcataatcattaggaaacatagggtcatattcgtcagctaagggaatcagaacttcccctgcagaaaacccactgggaacaggatccttcagcccagctgctaccatgcggtggagtgtccacaatttgccggtcatctgaggagccacctcgcttcaggtcaatgactggggcgaggactgtactttgtttcgtcctttggctctttgcctgagtgagagctgccttcttcacctgaagctnagactgcagaagtttgaagtttttggaccagccttctgtttttgagtcactggtctccactcctaggtcagcgnacagggacatcttttcttcagttgaattcc

SEQ ID NO: 16045 - DNA, 1107 bp, Homo sapiens
  misc_feature (1)...(1107): n = a,t,c or g
agagcagctcagctcgctagctgcgcgctttcccggcacaggcagtgccaactgcgcaggttgatcagcgaaacagcatccattttaatctgcggggagcccctgccttaccagggcgttctctccgcccgccggtggatgctccgcgcctgccctccgcagcctcgctcagcagtcctgcgttggggtctgcgccctaggatgcactgagatggtacatcaggataactgctcgtatcaggcacagaaaaatgagagagagtctatcagacagaagttggcacttggaagcttctttgatgatggcccagggaatttataccagctgtagcaaaagtgggaagccaagcctttcctcccggcttgaatgaagagttggtccagctgcttctcatccgagatgagctgcacacagagcaggatgccatgctggtggacattgaagacttgaccagacatgctgaaagtcagcagaagcacatggcagagaaaatgcctgcaaagtgaaaagaagccattcaaccagagaacaagctagaatttattttgcttctgtggttgtaaaaatgctgttgctaaaggtggcgcagaaacaaatatcagtgttagtcattgataatgtctgaagcttaatgtccagtgattggcctttgcttcttaatttattttaattttttacttgtgccacttaatatcaggcattttaataaaatattgttacaaaaaatgtacagtactgacaccaccacaaatcatggttaataaaagagagtagttttaactttatttttatttgtttagagattttaagttggaacagtattttcccattgactacttttcattcttcactgtagttttaaagaagaactgtaaatgacggtgctatacaagtcaaaaaatacatgcctgcctcgtagtgaagttgtagctctccgtaatatgtatattttactcagttttcaacattttgtgaatgttgactacctgaagttcctttttagatgtgctattaacattctgttggattcagagggttccttgaaagttttatgtataaatntgtaaaataaaaattaaaactttgaantaaanaaaaaaaaaaaa

SEQ ID NO: 16046 - DNA, 359 bp, Homo sapiens
ggcacgagcaaatcctctctctgagcaccgtcatccaccacatggctgggcctggctcccaggaccagtccagtcctctagtgccttatctgaggctgcagccgccagtctccaccccaaggagacagcccctgctcctagatgcccttggcctccgcagtgcagcccccaggtgtcctgactgaagcacaggccatagccccatttccccggtgcctgcagggctaacctccacgggagcccaggagctctggccggcaggtccatggcacagggcatcggaagactgcaaaactgctggacttaccctgggctgcagtccattgtcggcccctgggttgaatcaagatagtacttgc

SEQ ID NO: 16047 - DNA, 2562 bp, Homo sapiens
ttcggcacgaggaactgagggggcgtgctgggatctttctctctgactatacttagtttgaaatggtgcaggcttagtcttaagcctccaaaggcctggatttgagcagctttagaaatgcaggttctagggcttctcccagccttcagaagccaactaactctgcagatggggctaggactgtgggcttttagcagcccacaggtgatcctaacatatcaggccatggactcaggacctgcccggtgatgctgttgatttctcaaaggtcttccaaaactcaacagagccagaagtagccgcccgctcagcggctcaggtgcccaactctgttctgattcaccaggggtccgtcagtagtcattgccacccgcggggcaccctccctggccacacgcctgttccccccagcaagtgcctgaaacctcacctagacccgtctgccctgtttccgaaatggggaaagccgtgcgtgcgcgttatttatttaagtgcgcctgtgtgcgcgggtgtgggagcacactttgcaaagccacagcgtttctggttttgggtgtacagtcttgtgtgcctggcgagaagaatattttctatttttttaagtcatttcatgtttctgtctggggaaggcaagttagttaagtatcactgatgtgggttgagaccagcactctgtgaaaccttgaaatgagaagtaaaggcagatgaaaagaaagaaaaagcctttttatgttcttttatgttctcggctcaaaaagaaacaagggagtgtaggtttaaaaccaaaacaggagagaagacaaaccccgctccggctggagttagttagaaccagaactttattgtagcggatacactttctgacctatcatgagtatacacatctgcgaagggaaaccgcgcggcgacagcgtgaggacatcccctgggcgtgagcgtctgtccgctgtctaaacagagcagctacagggacgggacatggaggatggccacacatagcacagccaccagtgtcctcagaactagcagtcagggtcacagaacagtattcaaaatgattgcccacctgttttagaaatctaaaattttacatgtaactaagagcaaagtgctatgtgggttttagaccatgactgtttgtttgctctcctgccctaccaccaagcaaagcagcagggctcctggggggagagggatttcaacccccctgatggcagggggtgctctggggaggagagaggagagaacaggctgttttggaaaattccagcactttgacttcgggccatgcgtctctcctggacgttctgagtacggatcgctcaggcctcctgccgtctccaaaaggagtggtcagccggtctgcaggacacctctcagtttctccttttaccagcaggaaaatgtacatttaagcataaaccacaaggctgcacacggtgagaccaggccactgccccagggagctgctgtcggaggaggagtgtggaaaaggggcccagggaccccgcaccccacaccaaattaggaacaggtagaatcccaaaggcaaggcccggccacttgtagctaccctgatccagtctcttgagcagcacagctagaggcctgtggcccccgactcccagccatactcagacctgagcaggggctggggcggggctgggcggggtgggcctctccctctggggtctggggagggaggacccggcgggaagagcccgtgctcagagctccgaacttcactttacattccagtcccgggttacactagcacaaaggacacaaggaatccgatttatttacaaaatattaaaaagtcagttaatcatctacacagtaccccccatcctgccattatttatacatgcactagtttggaaaaaataaaaactttttttaaaaaaagaaaaaaatgattaccgggtgggagtgagcatgttttaccctttgtcaacgagcccagctggcatggcttttctggagtgcgaggggccagtgtcctctccccggggggagactccagacacaaacgcggggcctgaggcgctgggaggcccctgtgcgagccggatggcggccagagaggacgtgtcagctcctcgtgggactgaagagcgcgaccaggcagagggtgggcggggagcctagggtcctacacaccaagcacagcgacgatcgtggcggggaggggtctgcacacctactggccgaaatgactttgtacatcgtggacccttgggactgggagaacggatggcagcagagtcttcgaaagcagaaaccgaggtggccgggggcacgggtcagtagctgagggtggagtcgctcaatgacatttctcagttgaaggtatttgggcattggctgtacccttccgcttacctatgcccatgtgcctgcccttccggcgggccaaggtgtttttccggcatcgagcccgggaatggaccgtcacaggcttgcggatgatcagcccatctttgatgagcttccggatctgctgacgggagttggcattggcgatttcattggtctcattggggtctaaccagaccttct

SEQ ID NO: 16048 - DNA, 191 bp, Homo sapiens
ccagggcccagctggaggggtagctgggagctctggtcagtcccagtgagacgtcaccatggagcactggttttacattctgcctctgctgggaggatgagaactgtcgactctcccctggctccagaaaactcctggaagacccgatcttcacccatgcagaataaccaagagtgggcggcaaaacaagg

SEQ ID NO: 16049 - DNA, 388 bp, Homo sapiens
  misc_feature (1)...(388): n = a,t,c or g
accaatagggcttgtgtgtgtgtgcacgtgtgcacgtgtgtgtacatagacaaatttttaggaactggatcatgccattgtgggggctggcaagtgtgatgtcttcagggcatggcagcaatctggagaagcagggaagagttgaggttgcagctccagcctgaagacagcatggaggcaaaattcctttcttgggggacagcagatannnnnnnnnnnnnnnnnnnnnnnnnnnnnnnnnnnnnnnnnnnnnnnnnnnnnnnnnnnnnnnnnnnnnnnnnnntatagattgnnnnnnnnnnnnnnnnnnnnnnnnnnnnnnnnnnnnnnnnnnnnttggtatggacaaacatcctgccagcatggcctagccaagttgacacattta

SEQ ID NO: 16050 - DNA, 1495 bp, Homo sapiens
aggactttttttttttttttttttttgaatgagaaaacatttattccgtctccaaacagcatcccaggccgggcatctcccccacgattttataatacactcggcacagacagagtctgggagccatggggcacccctgccctccccaggcttcctaagtaacaactgcagaatatttacataaagctgggtgttgtcaggcaaagcccttccctgctgccaggggtgggagcaaggaggaagtgccatgagcaccagccccgccctcacaccacgggaggcagcccagaggccaccggcacagggtggtggcccccagatcatacagcagtgggcacaggggaagcaaacctgagtgaggacacaagagcctggtccggctccgctgcacagggcaggtgtgatggcccccacgagtctttggcagagaacgcagataatagcggctcccacggcctgacccgggccggggggaagctgaggcacttgtcagtagcacatgggcacctgctggcttctagccactgcaggcggggctgaggtcattaaaagcgaggaaaaacactagctaaaaaccctttcctaaaagtgccctggaggagtgagcggctgactgaacgctctgggcacaggcacttggggtgtgctctgccagcccccgccaggctatgaggctccttagctgtgtgtcagctgcacaggatggaacaggtgaaagagaggggctggcagttccaggaggctcatgggaaagtcccagggcagaggggagggcccctctctgtcccccttccccaacctaaccgccgctcagtacacagggggcggctggtagccctcggtggtctccgcgttctgggtgaagggtggctgttggtagttgtccacagatgcacctgggtaggaggcgtaggcagtgttggggtccggagtggggtcaacgtaattctggatgaagtcgtccacgccagccttgtagcgctggtaggccagggaggccagcacaccccaggagaagatggaaaagaagctgaaggtgatggctgccctcacagagtcggcccccaccagcacgtccttcgggttggtgactgcccactggttggtgaggaagcagaaaccaacaaaccacaggaaggtccagagagctgagaagagcaggtcaccaatgacccaggtacttgcggtcagtggcgttgctgatctgggggaaatacgcgtcgaccaccaagaagaaggccgaggccaggaaggccagcaccccgcatggcactgccatagcggcaggcatcctcgttgcggttgaacacgcagtacatctgcttagactcgtgggcattgctgtagccctcaccatagatgcaggagaacacgatcaaggcgaagaccaagcacacggcgcgcgccaccacctgcggctgcgtcaggaagcgccgcaggtcgaaggagccgcccgccttggccgccgtaggccccgctctccatcctgtgccga

SEQ ID NO: 16051 - DNA, 674 bp, Homo sapiens
  misc_feature (1)...(674): n = a,t,c or g
ggcacgagtagaaatgcctactaaatatttagttcagttttagagtggaagcaaaacacaaaaaagtcctttatcctcaaagtttaggtatacatcttatgttagcccattctcactctgttacccacatgccattacagactttatccatatgaacgaggcatttgcattggagagtgacgtctttgtgcatcaatcatctaagaacgtgcaatgatattaacaacacatgttgtgtgaatatatgatatacctataaatgtagaaattgctttcacatctgttatttcattttaaatgtccagcaatccttaggaacataataaagtggcttatcttttagcagctaaagtaactgaggaacaaagatgtcaaaggtctactttatgttactacttcattagtgacagtcacaactagaactaaggactatgggttactaaattgtgtcttatatggatattttaatagaaaatttggatgttattactgatgctttatacatctatgcagatgttagatttttttgatgcaattacacttgacccttgaacaaaatgggggaagggacactgtaccatcacagttgaaaaatctatgtatacttttgacactccaaaattaactactaatactactatcntggaagcctaccatacataaccggtggatac

SEQ ID NO: 16052 - DNA, 3381 bp, Homo sapiens
gagttagcatgtatgaatgtaaggatgagggaagcgaagcaagaggaacctctcgccatgatcagacatacagctgcctacctaatgaggacttcaagccccaccacatagcatgcttcctttctctcctggctcggggtaaaaagtggctgcggtgtttggcaatgctaattcaatgccgcaacatatagttgaggccgaggataaagaaaagacattttaagtttgtagtaaaagtggtctctgctggggaagggttttcttttctttttttctttaataacaaggagatttcttagttcatatatcaagaagtcttgaagttgggtgtttccagaattggtaaaaacagcagctcatagaattttgagtattccatgagctgctcattacagtgctttcctctttctgctctgccatcttcaggatattggttcttcccctcatagtaataagatggctgtggcatttccaaacatccaaaaaaagggaaggatttaaggaggtgaagtcgggtcaaaaataaaatatatatacatatatacattgcttagaacgttaaactattagagtatttcccttccaaagagggatgtttggaaaaaactctgaaggagaggaggaattagttgggatgccaatttcctctccactgctggacatgagatggagaggctgagggacaggatctataggcagcttctaagagcgaacttcacataggaagggatctgagaacacgttgccaggggcttgagaaggttactgaggtgagttattgggagtcttaataaaataaactagatattaggtccattcattaattagttccagtttctccttgaaatgagtaaaaactagaaggcttctctccacagtgttggtgccccttcactcatttttttttgaggagaagggggtctctgttaacatctagcctaaagtatagaactgccctggggggcaggggttaggaatctcttcactaccctggattcttgattcctgggctctaccctgtctgtcccttttctttgaccagatctttctcttccctggaacgttttcttctttccctgggacagggcagcctcctttgtgtgtatttcagagggcagtgatgacttgctgtccagggcagctccctcctggcacacaggaatggcttcaggggtcactggaaccactgcttctcttttgaaagtagagctagctgccactttcacgtgggcctccgcagtgtctccacctacacccctgtgctcccctgccacactgatgggcttcaagacaaggctggcaaaccctcccagaaacatctctggcccagaaagcctctctctccctccctctctcatgaggcacagccaagccaagcgctcacgttgagccagtgggccagccacagagcaaaagagggtttattttcagtcccctctctctgggtcagaaccagagggcatgctgaatgccccctgcttacttggtgagggtgccccgcctgagtcagtgctctcagctggcagtgcaatgcttgtagaagtaggaggaaacagttctcactgggaagaagcaagggcaagaacccaagtgcctcacctcgaaaggaggccctgttccctggagtcagggtgaactgcaaagctttggctgagacctggggatttgagataccacaaaccctgctgaacacagtgtctgttcagcaaactaaccagcattccctacagcctagggcagacaatagtatagaagtctggaaaaaaacaaaaacagaatttgagaaccttggaccactcctgtccctgtagctcagtcatcaaagcagaagtctggctttgctctattaagattggaaatgtacactaccaaacactcagtccactgttgagccccagtgctggaagggaggaaggcctttcttctgtgttaattgcgtagaggctacaggggttagcctggactaaaggcatccttgtcttttgagctattcacctcagtagaaaaggatctaagggaagatcactgtagtttagttctgttgacctgtgcacctaccccttggaaatgtctgctggtatttctaattccacaggtcatcagatgcctgcttgataatatataaacaataaaaacaactttcacttcttcctattgtaatcgtgtgccatggatctgatctgtaccatgaccctacataaggctggatggcacctcaggctgagggccccaatgtatgtgtggctgtgggtgtgggtgggagtgtgtctgctgagtaaggaacacgattttcaagattctaaagctcaattcaagtgacacattaatgataaactcagatctgatcaagagtccggatttctaacagtccttgctttggggggtgtgctgacaacttagctcaggtgccttacatcttttctaatcacagtgttgcatatgagcctgccctcactccctctgcagaatccctttgcacctgagaccctactgaagtggctggtagaaaaaggggcctgagtggaggattatcagtatcacgatttgcaggattcccttctgggcttcattctgggaaacttttgttagggctgcttttcttaaggtgcccacatttgatggagggtggaaataatttgaatgtatttgatttataagttttttttttttttttgggttaaaagatggttgtagcatttaaaatggaaaattttctccttggtttgctagtatcttgggtgtattctctgtaagtgtagctcaaataggtcatcatgaaaggttaaaaaagcgaggtggccatgttatgctggtggttaaggccagggcctctccaaccactgtgccactgacttgctgtgtgaccctgggcaagtcacttaactataaggtgcctcagttttccttctgttaaaatggggataataatactgacctacctcaaagggcagttttgaggcatgactaatgctttttagaaagcattttggggatccttcagcacaggaattctcaagacctgagtattttttataataggaatgtccaccatgaacttgataccgtcccgtgtgtcccagatgctgtcattagtctatatggttctcccaagaaactgaatgaatccattggagaagcggtggataactagccagacaaaatttgagaatacataaacaacgcattgccacggaaacatacagaggatgccttttctgtgattgggtgggattttttccctttttatgtgggatatagtagttacttgtgacaagaataattttggaataatttctattaatatcaactctgaagctaattgtactaatctgagattgtgtttgttcataataaaagtgaagtgaatctgattgcaaaaaa

SEQ ID NO: 16053 - DNA, 356 bp, Homo sapiens
ggaagagagagaggataagagaagaaataatatcagcttagcatcataaaggcagagttgttggctttcaatacttttgaattttaaaagaatactgtactggaatgggttaacatcatcatctttagcatcctggtagcattattcagtagttaataaacagacattaaaacctctgcctggctggtttttgaaaaaggaacctgagggaccccaaactcagccactcttgtagtttccatctccggttcttttaatcctgggccaagatggcggccttgggagactttcttccggtcataggccagaccgagggcggcccatgcaatcaatgaagaatgtggtgaagttgatgt

SEQ ID NO: 16054 - DNA, 1770 bp, Homo sapiens
ctccgccctagtttctaaggatcatgtctgcgagccaggattcccgatccagagacaatggccccgatgggatggagcccgaaggcgtcatcgagagtaactggaatgagattgttgacagctttgatgacatgaacctctcggagtcccttctccgtggcatctacgcctatggttttgagaagccctctgccatccagcagcgagccattctaccttgtatcaagggttatgatgtgattgctcaagcccaatctgggactgggaaaacggccacatttgccatatcgattctgcagcagattgaattagatctaaaagccacccaggccttggtcctagcacccactcgagaattggctcagcagatacagaaggtggtcatggcactaggagactacatgggcgcctcctgtcacgcctgtatcgggggcaccaacgtgcgtgctgaggtgcagaaactgcagatggaagctccccacatcatcgtgggtacccctggccgtgtgtttgatatgcttaaccggagatacctgtcccccaaatacatcaagatgtttgtactggatgaagctgacgaaatgttaagccgtggattcaaggaccagatctatgacatattccaaaagctcaacagcaacaccccaggtagttttgctgtcagccacaatgccttctgatgtgcttgaggtgaccaagaagttcatgaggggacccattcggattcttgtcaagaaggaagagttgaccctggagggtatccgccaggttctacatcaacgtggaacgagaggagtggaagctggacacactatgtgacttgtatgaaaccctgaccatcacccaggcagtcatcttcatcaacacccggaggaaggtggactggctcaccgagaagatgcatgctcgagatttcactgtatccgccatgcatggagatatggaccaaaaggaacgagacgtgattatgagggagtttcgttctggctctagcagagttttgattaccactgacctgctggccagaggcattgatgtgcagcaggtttctttagtcatcaactatgaccttcccaccaacagggaaaactatatccacagaatcggtcgaggtggacggtttggccgtaaaggtgtggctattaacatggtgacagaagaagacaagaggactcttcgagacattgagaccttctacaacacctccattgaggaaatgcccctcaatgttgctgacctcatctgaggggctgtcctgccacccagccccagccagggctcaatctctgggggctgaggagcagcaggaggggggagggaagggagccaagggatggacatcttgtcattttttttctttgaataaatgtcactttttgaggcaaaagaaggaaccgtgaacattttagacacccttttctttggggtaggctcttgccccaggcgccggctcttctcccaaaaaaaaaaaaaaaaacactaatccatttccctaacctagtaacctccagatcccagaggctctcctcacctcagctgagctcctttgaaagtgattcaagggactatgtcactcagcctcatttgctggaccaaatctggagggagaacccctaaaacccctaagtgaggttgcccagggggttgtccccagggtggggggaagcaggggagagaaaatggtagccatttttacattgttttgtatagtatttattgattcaggaaacaaacacaaaattctgaataaaatgacttggaaactgccaa

SEQ ID NO: 16055 - DNA, 249 bp, Homo sapiens
  misc_feature (1)...(249): n = a,t,c or g
ggatcatgtctgcgagccaggattcccgatccagagacaatggccccgatgggatggagcccgaaggcgtcatcgagagtaactggaatgagattgttgacagctttgatgacatgaacctctcggagtcccttctccgtggcatctacgcgtnccctctgncntncngcagngagcctttcttccntgnattnngggttatgnngngnnngntnnngnnnnnnnttganntnngnnngngncntgttt

SEQ ID NO: 16056 - DNA, 404 bp, Homo sapiens
  misc_feature (1)...(404): n = a,t,c or g
gaggtgtnnnctttgancccnttggaacgcctgcaggtaccggtccggaattcccgggtcgaccccgcggccgctctagaggatccctcgaggggcccaagcttacgcgtgcatgcgacgtcatagctctcnnnnnnnnnnnnnnnnnnnnnnnnnnnnnnnnnnnnnnnnnnnnnnnnnnnnnnnnnnnnnnnngatctgctagcttnnnnnnnnnnnnnnnnnnnnnnnnnnnnnnnnnnnnnnnnnnnnnnnnnnnnnnnnnnnnnnnnnnnnnnnnnnnnnnnnnnnnnnnnnnnnnnnnnnnnnnnnnnnnnnnnnnnnngctgcatatgcttgctgcttgagagttttgcttactgagtatgatttatgaaaatattatacacaggagctagtgatta

SEQ ID NO: 16057 - DNA, 1373 bp, Homo sapiens
ctttttagaggtcccatatttctggaggctttgttcattccttttcattcttttttctctaatcttgttttcatgctttatttcattaagttgatcttcaatctctgatatcctttcttctgcttgatcgattcagctattgatacttgtgtatgcttcacgaagttctcatgctgtgtttttcagctccatcaggtcatttatgttcctctctaaactggttattctagttagcaattcctctaaccttttatcaaggttcttagcttctttgcattgggttagaacatgctcctttagctcagaggagtttgttattacccaccttctgaagcctacttctgtcaattcatccatctcagcctcagcccagttctgtgcccttgctggagaggtgttgtgatcctttggaggagaagaggcactctggcttctggaattttcagccttttcatattgatttttttcttatctttgtgggcttatttacctttgatctttgaggttgctgacctttgaatggggttttcatgcagacatcctttttgttgatgttgatgctattcctttctgtttgttagttttccttctaacaagtcaaggcccttcttctgcaaggtcttgcttgaagtttgctgggtggtccacttccagatccttttgcctgggtatcaccagcggaggctgcagaacagcaaagattgctgcctgctccttcctctggaagcttcatcccagaggggcacctgccagatgccagccagagctctcctgtatgaggtgtctgttggcccctgctgggaggtgtctcccagtcaggaggcatgggggtcagggacccacttgaggaggcagtctgtcccttagcagagctcaaatgctgtgctgggagatctgctgctctcttcagagccagcaggcaggaacatttaagtctgctgaagctgcacccacagctgccccttcccccaggtgctctgtcccagggagatgggagttttatctataagcccctgactggggctgctgcctttctttcagagatgccctgcccagagaggaggaatctagagaggcagtctggctacagcagctttgctgagctgtggtgggctccacccagtttgaacttcctggcagctttgtttacactgtgaggggaaaaccacctactcaagcctcagtaatggtggacacccctccccacaccaagctagagcatcccaggtcgacttcagactgctgtgctggcagcaagaatttcaagccagtggatcttagcttgctgggctccatgggggtgggatccactgagctagacctcttggctccctggcttcagccccctttccaggggagtgaatggttctgtc

SEQ ID NO: 16058 - DNA, 542 bp, Homo sapiens
ggcacgaggcacacttggcagcattgggcagtggggtggtaagtgctgctgagggaggactgtggggtgtgggggctgctagtagctgagtcttcgccttggccctgggctcactggtgttggggttatcctgtttggctgatgcctgggtatctgaatagggacaccccataggtgttgcttcttagttgtgctgagaacttcagaatagggttatactgagaagtttcaagacttcaatgcaaagaaaaggacagggatggaaaaccatctgagataagcagcagtgggtttagttgtacgtggtccctgcttaggtctcattaacgtgttttctgaggtacatacacacatatgactttgcttatcatccctgtgtcctgcatggagttctggaaagataactaatttggtatattagctggcagctacagcacagtcactgatttttcccctctttctttttcccagctgacaccttggtttcaccagttgctcattaaagctggaaagtggtgtctgcagaagttttttgtttttgg

SEQ ID NO: 16059 - DNA, 379 bp, Homo sapiens
gaatgaaaatggcatatttgaacataaacttagggcagatttttactacttttgaaaaaatgttggaaaatatttctgtatgaaacgtaaaacaacttttaattttttttagaagttgagaggattctattttgcaaagctgtattatgaagctaaagaatatgatcttgctaaaaagtaagtacaaactgtaacatgtattcttttttttaaaatcaatgccttttctcattttcttctttgaaataggtaaaaatatgttcttagtagttcttcctaagtgtattctggaataagggatttatcactcagactgatgctaaggaccagcctagattccattgagattgaaactgcaattagtggtttctgcatgctg

SEQ ID NO: 16060 - DNA, 2844 bp, Homo sapiens
ttgttcttgcagcccggcatgccagtgcttcctccacggtaaggtttggaaaagaagactaagaataagaatcattgcggccagcctgaccttggggcagaggatttggcaaccacctggcctcttattatcctgaaatttgaaagacatattggctgacctgatacctaaggagcaggccagaattaagactttcaggcagcaacatggcaagacggtggtgggccaaatcactgtggacatgatgtatggtggcatgagaggcatgaagggattggtctatgaaacatcagttcttgatcctgatgagggcatccgtttccgaggctttagtatccctgaatgccagaaactgctacccaaggctaagggtggggaagaacccctgcctgagggcttattttggctgctggtaactggacatatcccaacagaggaacaggtatcttggctctcaaaagagtgggcaaagagggcagctctgccttcccatgtggtcaccatgctggacaactttcccaccaatctacaccccatgtctcagctcagtgcagctgttacagccctcaacagtgaaagtaactttgcccgagcatatgcacagggtatcagccgaaccaagtactgggagttgatttatgaagactctatggatctaatcgcaaagctaccttgtgttgcagcaaagatctaccgaaatctctacagaggaagggcagcggtattgggggccattgactctaacctggactggtctcacaatttcaccaacatgttaggctatactgatcatcagttcacgtgagctcacgcgcctgtacctcaccatccacagtgaccatgagggtggcaatgtaagtgcccataccagccatttggtggggcagtgccctttccgacccttacctgtcctttgcagcagccatgaacgggctggcagggcctctccatggactggcaaatcaggaagtgcttgtctggctaacacagctgcagaaggaagttggcaaagatgtgtcagatgagaagttacgagactacatctggaacacactcaactcaggacgggttgttccaggctatggccatgcagtactaaggaagactgatccgcgatatacctgtcagcgagagtttgctctgaaacacctgcctaatgaccccatgtttaagttggttgctcagctgtacaagattgtgcccaatgtcctcttagagcagggtaaagccaagaatccttggcccaatgtagatgctcacagtggggtgctgctccagtattatggcatgacggagatgaattactacacggtcctgtttggggtgtcacgagcattgggtgtactggcacagctcatctggagccgagccttaggcttccctctagaaaggcccaagtccatgagcacagagggtctgatgaagtttgtggactctaagtcagggtaaaactggagactgggtgaaagtgactaccagaaagtgaggaagcctaaataaaaagtatacttttgtttcagggggcctttaaagacttaagattaaattatatctgaggcactgataatatgtttgaggttaaaatataaattaagactttaaaagatgaaaaatggtcccttcttccctaatcagctcccttcccctgcctggtatgagttgcccatcatacgcatggtcctggaggatgaccaggactaatgcatgtggtatgagtaggtttggccccctcactatctctagagtgagaatctggctcctgtttccatgggtcaaagccggttgcagagaatctgtagtcactttggagctttagcttctctgccaagccctcaataagccagcaaaccaggactctgccccttctgtttccataggaatcatgttggatagtcagctgtaccaagccccttggccctctcccatgcacacaaacacctcctagcaagacctgttggttagctggacatgctttggcaatttttttatactaccaagtgaccataaaggcatggcatttgttgtgactggcacccaatgtttgattttttttttaaaactatccaattaaaattaaggtctgggagtgttctgtttcccattactttaatactcacctcctcccagactttctacacctgttgcacctcaggcagaggatgttctggacctccccctcttggtccctactagagacctctcaacagatctgtgggcccagtcattgggttttatcagtgcttaatgtgaactaagttttttacttccacagaatacaagccactaccttctgacctccccaccccccaccaacccccatcttttaatatgctgtggggcatagaactccgggaatgaccagcatgatattttcagagtcttgtccccggggtattagcacctctttttgaacagggaattgattcaagattggacatggtctcctctgattatcaggtactgggggctgaggggcattaaaaatagtaagcctccctcctcgtcccctgcctcaagaaattgcctccttatttatcaacatctttttcctccctttccctgagagctcacagtacaatgtttcagaagccccatttgcacaggttttcagcaactcagaatgctctacttctttttctttgagaaaggattaagatacactcctgctgtgcccccatctttcctccaaactcctgcctgtgtttgtgtggatacccagtcccagaaccacactgttgagttggacacactgtaaacccctgggtaactgtcaagtcatgatggagacttcaggttgttctgtataaaatgcaaaataaatgtttttattaacaatgaaaaaaa

SEQ ID NO: 16061 - DNA, 434 bp, Homo sapiens
aaacgtgaactcagagatgttaagtaacttaacttgcccaacacatacttagtaattagcagaattgcttttagcgcagagcccttctacacagccctgaggaacactgtccttaaaccacaggactcgctggtagcacctgtcctcagtagcgtgtgggtttccctagcatctcccagaaaacagctcactggattggctcaggtgtgtaagggtacctggatatgtgagcagggcaggggtggcagaagatggaagattcaggaacctaggggtgcctgtccatctttgttcttgaattatattatttcctctggaattcctgcttctgctctctccctctttccttctgtgacaccctctctgggtgctcaaactcctccttgtccccagctacccccagtcttttactcaggcttaataaaacttgtcct

SEQ ID NO: 16062 - DNA, 1327 bp, Homo sapiens
aagctttctggcacagacacccctcctactgaaatcctctggcccacacaggacgccactgataatgaagacagctgcgcatccgtgaatttggaattttgaaaaacataactgaaacagagtactgtgaatatatactttttatttagtcatttttgtttacaattgaaactctgggaattcaaaattaacatccttgcccgtgagcttcttatagacaccagaaaaagtttcaacctacaagaaaagaaagaattcatcacagaactttgaaatacacactcagcttaaaacctaatagtttgtgaaattgttgccctgtattgtttttctcctcagcaactaagtacacacaacatgtctgcagcagtcttcacgaccggggacaagctcttctccaatgctgtgggacagaactgtacaccactgcaccggggaagccatcaggggtaccccagcagtcacccacatggttatgtgggcccaagacactgatcccatcaccacccacccctaactaccaagaatatacagcctaactaaaagaccacagaaagagtctacttccaaaaggtacagagaatttcaagtgttcaattcttgaaacatctccatttaacacctgacacataatccaaaggagagcaggctgaagtgcgggtaaaagaactagtctgagtttactacagtcattgctatggttggcgcatggagactggttacactaaaatccactctcactgtggctgaacctttccatgataaaatgttgacctattaccttgtgttccacattgttctgctgtgctttgtccaaatgaacctttatgagccggctgccatctagtttgacgcggattctcttgcccacaatttcgcttgggaagaccaagtcctcaaggatggcatcgtgcacagctgtcagagtacggctcctggggacgcttttgcttattttttgtacggctttttcgaagttggcttaaggcagaattctcctctgagccgataaagacggacatgctttcccactgaactttttctccaattcgcgtactagccgggacttggattttctggaaaagatttcagttgaggaacgggaacaaagattatgatagctttccgaccaccaccaacttcaatttccttagctgccgtaatattcagctccctgagctgagccttgaggtccgagttcatctccagctccagaagagcctgggagatgccggactcgaactcgtccggcttctcgccattgggcttcacgatcttggcgctcgaactgaacatggctttctcctgggagaacttgccggtcgac

SEQ ID NO: 16063 - DNA, 512 bp, Homo sapiens
tcatacacataatttaaaaaaatatattcaagacaccgaaatcagttaacaaatataagaactaaacattaattagtgacagtaaaatggcagaagcaaatataaaatacaaaaaacagctttactcagactttttgactgccatgtcctcctttagaaggactacagtttggctacttggtctcttctggggcagatgtggcatcctgaggtgtgttagcttctgccggtgcagatacagctcctaccacagtaggggtggtctcagataaagcagggatggcttctggagtggaagtggctcctgtctcactgggggtggtgtcagtttgaaaggctggagtttcttgacggcagctggtgtctgttggactgggtatgatgtcagcttgaacagtcatggcctcttcttctgtttccaattctgtttcttgattttgaacttcctcaccctcttctaccatagcaggtggtagttgtaataaagtctgatgataatgatgtgtagtctg

SEQ ID NO: 16064 - DNA, 469 bp, Homo sapiens
  misc_feature (1)...(469): n = a,t,c or g
tttgnaancctttggacatcattacgaatttaatacgactcnnnnnnnnnnnnnnnnnnnnnnnnnnnnnnnnnnggcacgaggaaaaggataggatagaaaggggcatagaattcctaggaaatgaccactgattctggttcagaggcctagcagttgaaagctagagctggaaatctggaagctttattaatggtatttagtaggtatctggcagcacatctggtagcctgcatgtgcattatttacacaggtattcaggtagatgaagtgactaaatgaagaaatatctttatcacacacaatgaatcatgttctaacgtaagggcaaagaaggaaggtgaagtggtggaggaataagtttctgagttactggaaaatatgaatgtagacattattaataaagattaataataaaccttttctggtttagagcctaattcacatgcttttaaacagttgacatgaa

SEQ ID NO: 16065 - DNA, 483 bp, Homo sapiens
  misc_feature (1)...(483): n = a,t,c or g
acctttgaacaccgctatgactgattacgaatttaatacgactnnnnnnnnnnnnnnnnnnnnnnnnnnnnnnnnnnnggcacgaggctcggcgtggtagtaggtcaaaaagtctccagcaggccccaagacacagaagtttgggggcacatatgacttgggctagtttctagccatctggagttgtgggctcctttcataacagaaacatggagatacctctgtggcccacatccttccccagggatgcaggggtaagactaggccagatacttttcatattcttcaagtctttctcccttctctgtctactcagccatttggatcccaattggtgcaaggttattgatcttctctgcctgtccctagcagcccagtgttctctctcacccttgcctcccgtcactgtcaagatgctgtcttcctgtctacggctaatcctttcctttggttctttgttgaaactcctcctaaacttctaac

SEQ ID NO: 16066 - DNA, 583 bp, Homo sapiens
  misc_feature (1)...(583): n = a,t,c or g
ggcacgagagagtaaatggactgtaatgaggatggtttgtaatctagattatatgttccacatgtaacatcgaaatgaaatataaaattgagttgttggcatgtggttgtggtgagcagaagcagttattatacattacttggtaaaattcatattcatatcttgtcagtttacagtgagccagagattaaaaataacatttgtttctgttttagtaactgcttaaaaatatccaaaatcattttattttctttagcctgacttctagtagtgttttgaatatgtggcctttcaagcagtaatgaaatgcatcaatgcgacttggcaatgcctcacaggacatgcttctaggatcatttttaatgattaaaagtcaaattgagttctaaaaaactgacccaaaatatagatgagccaagtaaaaacggaaggaaatctgaataaaatcttggttcttggtcctctgcatgtatcctccacatctgttttctccagatctcttttttcttgcttgttgatagcacagaggaagatcgcagagagtaatgtactggatatgtttcacatcccccttcctcnttag

SEQ ID NO: 16067 - DNA, 1118 bp, Homo sapiens
gcggcgagcgggaggcactggcctccagagcccgtggccaaggcgggcctcgcgggcggcgacggagccgggatcggtgcctcagcgttcgggctggagacgaggccaggtctccagctggggtggacgtgcccaccagctgccgaaggccaagacgccaggtccggtggacgtgacaagcaggacatgacatggtccggtgtgacggcgaggacagaggaggcgccgtccggccttcctgaacaccttaggctggtggggctgcggcaagaagcgggtctgtttctttacttcctccacggagtcggcacactatggctgccctctgggctcccagaacccacaacatgaaagaaatggtgctacccagctcaagcctgggcctttgaatccggacacaaaaccctctagcttggaaatgaatatgctgcactttacaaccactgcactacctgactcaggaatcggctctcgaaggtgaagcgagaggaaccagacctcatcagcccaacatcaaagacaccatcggaacagcagcgcccgcagcacccaccccgcaccggcgactccatcttcacggccaccccctgcggcggacggttgaccaccagccaccacatcatcccagagctgagctccttccagcgggatgacgccgtccccaccacctccctcttcttctttttcatccttctgtctctttgtttctggagctttcctgtcttttcctttttttctgagagattcaaaagcctccacggactctgtttcccccgtcccttcttgaatttaatttgcactaagtcatttgcactggttggagttgtggagacgggccttgagtctcagtacgagtgtgcgtgagtgtgagccaccttggcaagtgcctgtgcagggcccggccgccctccatctgggccgggtgactgggcgccggctgtgtgcccgaggcctcaccctgccctcgcctagtctggaagctccgaccgacatcacggagcagccttcaagcattccattacgccccatctcgctctgtgcccctccccaccagggcttcagcaggagccctggactcatcatcaataaacactgttacagcaaaaaaaaaaaaaaaa

SEQ ID NO: 16068 - DNA, 837 bp, Homo sapiens
  misc_feature (1)...(837): n = a,t,c or g
gggagccggggcagacgtccgtagcgccccctcccgaggaggtcgagcagggcagtggggtccgcatcgtggtggagtactggtgaagcngccccggctggaggacccgcaccctggtcccgcgggccggacggaggtgggtccacgggaggccccacccccgaatccccagcccagccccatctcttgactccccagtgaaccctgcggcttcgaggcgacctacctggagctggccagtgctgtgaaggagcagtatccgggcatcgagatcgagtcgcgcctcgggggcacaggtgcctttgagatagagataaatggacagctggtgttctccaagctggagaatgggggctttccctatgagaaagatctcattgaggccatccgaagagccagtaatggagaaaccctagaaaagatcaccaacagccgtcctccctgcgtcatcctgtggactgcacaggactctggggttcctgctctgttctggggtccaaaccttggtctccctttggtcctgctggggagctccccctgcctctttcccctacttagctccttagcaaagagaccctggcctccactttgccctttgggtacaaagaaggaatagaagattccgtggccttgggggcaggagagagacactctccatgaacacttctccagccacctcatacccccttcccagggtaagtgcccacgaaagcccagtccactcttcgcctcggtaatacctgtctgatgccacagattttatttattctcccctaacccagggcaatgtcagctattggcagtaaagtggcgctacaaacactaaaaaaaaaaaaa

SEQ ID NO: 16069 - DNA, 1271 bp, Homo sapiens
ggtcagttggcagcggcaacgcgctgcggttccggtggcgccatgtcgttctgcagcttcttcgggggcgaggttttccagaatcactttgaacctggcgtttacgtgtgtgccaagtgtggctatgagctgttctccagccgctcgaagtatgcacactcgtctccatggccggcgttcaccgagaccattcacgccgacagcgtggccaagcgtccggagcacaatagatctgaagccttgaaggtgtcctgtggcaagtgtggcaatgggttgggccacgagttcctgaacgacggccccaagccggggcagtcccgattctgaatattcagcagctcgctgaagtttgtccctaaaggcaaagaaacttctgcctcccaggggtcactaggcgggcagcccacacccaccccagacggccaccacactgaggccacacgttggccattccaccttggagttggaaccctgggcgtcgagacaggaaggcagggcgcagtggttgaaacatcaggacactcccaaggccccggctctgaacaagaccttttcgtttcttggaaaagagactcatttgctgatggttcatgccttctgctgggacaggcctgggctgtgcagccacactgtcggctgacttagccccctgctcactctaggtgcctccaggaggtgagccctgggtgcagctggtctctgaatgacgttacaccctcaccttcttttcctggccctgtctctggactctcccctgtgaggcccaattccaagacagactctcgtcctcaccgaagcttaggcccacatctcccaggctgcttaggagacagaatggaaacggaggccgcccctgccagccgccctggccctggtcactgcatgatccgctctggtcaaacccttccaggccagccagagtggggatggtctgtgacctgctgggaaggcaggctgatggggcacacccttggcctctcgtccacgaggggagaaacctaaaccctgtttcacaatctgtgcggaagtagcttgcctcacttctgcttaggaaagcggctgttgctccataactctaaccagcacagggctgaggcctgcagtgcacacctgcagggaggcccttcccaaggtgtggtgactgtgccttactgtacatgctcggaggcctggccatataggagggtgggtgatgctgaaatcaccccccatcttaagtaattactttctggagtaatcaggtggaaatccatagacaaatgaaaaaaaaa

SEQ ID NO: 16070 - DNA, 624 bp, Homo sapiens
  misc_feature (1)...(624): n = a,t,c or g
gaagctaaccatgctaaccaccaaggcaaagcagcacagtgtgaatagaacagagcgggatcaagaatttcacagaagacaggtcagctgaggggcctgcacacacagggtgttgaggaaccacagatgggcgccgagaggcctgccttttgcctggcccaggcttacccccaccttgggcctcacctcctccaggaagccttcccagctacccgaagctcaggtggccttcttgcaggtccccgtagcaccctgagcttgtaccttgggtggcacttgttatgctatcctgtgctagccgtttgtgcctcgtctcgctgttagattgtgagttcccatgggcagagacccactgtcgttccccgtgtgtccccagcccagtccctgtcacatttgttaaatgaaagaacaatgaagcccantgtaacgtcagtccacagaaatagccacagcttccaatggtggccgtagacttggctcggaacttaatggcaccagagtaactctagtcagttacagtaaatccactgtgtgtggaaagcaaaattagcggttgttccaagcatcttttgtatttgncttanacattgctgattctctgaatactatactggngttccttcc

SEQ ID NO: 16071 - DNA, 660 bp, Homo sapiens
agaagactgtttgtccagcgtgtatttcaggatatctggatcccttttattgactcacaatttgtggcaccactttctcatcccagaacttcattcttatttctctcctcatctggcctcccaagtgctccgttgagctgatgaaaagttctttgtactccctcaacgtgtcggaaacaggaggccacacagcacagctttgtttggggtgggcaggagtcaggagtcttgagcagatgcatcactgtgaagaagaacgacatgtcggggctgcacctgtcctcccgtcggcatttgacgaaagctccctgaagcggggcagcactctcctcctgagagatttaccatttattgcccctgtgaggaatgtgtgcttgggaactgccaagtcttaccccttctggaagaagaggttttctctgacaagagcctagagcgtcggctctattatgctgggacttgacagaggagccatggggtttaaacagtaggaaagaggagccacggtgcccagcccatctcttagtcttccattcccttggtggaatttggaaacttgaaaacttgggggacttgacagcaggctccatgttcttctggcctcactgtactgtgtaaggaaagagctgcttgtcaggaacggaagaggggacgctagta

SEQ ID NO: 16072 - DNA, 1199 bp, Homo sapiens
ggcacgaggcgaagcgaggagcagcgatggacggtcgggtgcagctgataaaggccctcctggccttgccgatccggcctgcgacgcgtcgctggaggaacccgattccctttcccgagacgtttgacggagataccgaccgactcccggagttcatcgtgcagacgtgctcctacatgttcgtggacgagaacacgttctccaagcgacgccctgaaggtgacgttcctcatcacccgcctcacagggcccgccctgcagtgggtgatcccctacatcaagaaggagagccccctcctcaatgattaccggggctttctggccgagatgaagcgagtctttggatggggaggaggacgaggacttctaggccgggagaccctcggggcctggggcgggggtgctctggggagggtccgctgtgttactggccgccgccagggtcgccaccggcgccctccctccgcgcctccctccccctcgagccgccgcgatgtcccctgcgctcctgttccctcccgcgtagtgcttgcctttgttccaggaatagcgctccaggctcctgctgccgcccctgggcctcactctggagcgagccgccgccctctccttccagccagccagcccctcccatgtacatttggacgctgtcctgcgctccagctgcaagctgggctcctgttacacactggacagaccacccactgccgccgctgccaagccctctcctccccaccagactgccagacgactacatcattctgcccacagacctgcgctgccacagccatcgccatccatcgcatcccaccgacagactgctgctcctagtgatctggactcacctcggaggtatctgggctggccacagtccctggacagtgatccagacagctggccgccccccaagggatctgtcaccttcagcgagacctatttcctccccacccccagaaacctcttgtgttcttgcctaggcccaggtgttcctggcagccaaatcgagtctctcattttctcttgtggaccagttagttttgcccataacgcagtattctgagtttgcaactgtctctctgatgtgtgccttttgttcaacacagtaacccctgcattctgctctgctctaatacactacctggagaaagtcttttccttattttcaataaatgtcagacattattgaaaaaaaaaaaaaa

SEQ ID NO: 16073 - DNA, 461 bp, Homo sapiens
  misc_feature (1)...(461): n = a,t,c or g
aaagaagcagacnnnnnnnnnnnnnnnnnnnnnnnnnnnnnnnnnnnnnnnnnnnnnnnnnnnnnnnncattatacattaattataatgcattaggatgttaaaagnnnnnnnnnnnnnnnnnnnnnnnnnnnnnnnnnnnnnnnnnnnnnnnnnnnnnnnnnnnnnnnnnnnnnnnnnnnnnnnnnaacacctcagttccaggaattgcccacccctttcccggaaaactcatgnnnnnnnnnnnnnnnnnnnnnnnnnnnnnnnnnnnnnnnnnnnnngtatactcagtcaagcagtccatgctgctgctctgcctatggagtaaccattattttattcctgtgctttcttaataaacttgctttctcttttctgtctcgtgccnnnnnnnnnnnnnnnnnnnnnnnnnnnnnnnnnnnnnnnnnnnnnnnnnnnnnnnnnnnnnnnnnnnnnnnaggg

SEQ ID NO: 16074 - DNA, 1829 bp, Homo sapiens
gccagcgcaggggcttctgctgagggggcaggcggagcttgaggaaaccgcagataagtttttttctctttgaaagatagagattaatacaactacttaaaaaatatagtcaataggttactaagatattgccttagcgttaagtttttaacgtaattttaatagcttaagattttaagagaaaatatgaagacttagaagagtagcatgaggaaggaaaagataaaaggtttctaaaacatgacggaggttgagatgaagcttcttcatggagtaaaaaatgtatttaaaagaaaattgagagaaaggactacagagccccgaattaataccaatagaagggcaatgcttttagattaaaatgaaggtgacttaaacagcttaaagtttagtttaaaagttgtaggtgattaaaataatttgaaggcgatcttttaaaaagagattaaaccgaaggtgattaaaagaccttgaaatccatgacgcagggagaattgcgtcatttaaagcctagttaacgcatttactaaacgcagacgaaaatggaaagattaattgggagtggtaggatgaaacaatttggagaagatagaagtttgaagtggaaaactggaagacagaagtacgggaaggcgaagaaaagaatagagaagatagggaaattagaagataaaaacatacttttagaagaaaaaagataaatttaaacctgaaaagtaggaagcagaagaaaaaagacaagctaggaaacaaaaagctaagggcaaaatgtacaaacttagaagaaaattggaagatagaaacaagatagaaaatgaaaatattgtcaagagtttcagatagaaaatgaaaaacaagctaagacaagtattggagaagtatagaagatagaaaaatataaagccaaaaattggataaaatagcactgaaaaaatgaggaaattattggtaaccaatttattttaaaagcccatcaatttaatttctggtggtgcagaagttaggaaggtaaagcttgagaagatgagggtgtttacgtagaccagaaccaatttagaagaatacttgaagctagaaggggaagttggttaaaaatcacatcaaaaagctactaaaaggactggtgtaatttaaaaaaaactaaggcagaaggcttttggaagagttagaagaatttggaaggccttaaatatagtagcttagtttgaaaaatgtgaaggactttcgtaacggaagtaattcaagatcaagagtaattaccaacttaatgtttttgcattggactttgagttaagattattttttaaatcctgaggactagcattaattgacagctgacccaggtgctacacagaagtggattcagtgaatctaggaagacagcagcagacaggattccaggaaccagtgtttgatgaagctaggactgaggagcaagcgagcaagcagcagttcgtggtgaagataggaaaagagtccaggagccagtgcgatttggtgaaggaagctaggaagaaggaaggagcgctaacgatttggtggtgaagctaggaaaaaggattccaggaaggagcgagtgcaatttggtgatgaaggtagcaggcggcttggcttggcaaccacacggaggaggcgagcaggcgttgtgcgtagaggatcctagaccagcatgccagtgtgccaaggccacagggaaagcgagtggttggtaaaaatccgtgaggtcggcaatatgttgtttttctggaacttacttatggtaaccttttatttattttctaatataatgggggagtttcgtactgaggtgtaaagggatttatatgggg

SEQ ID NO: 16075 - DNA, 487 bp, Homo sapiens
  misc_feature (1)...(487): n = a,t,c or g
gtctnnnnnnnnnnnnnnnnnnnnnnnnnnnnnnnnnnnnnnnnnnnnnnnnnnnnnnnnnnnnnnnnnnnnnnnnnnnnnnnnnnnnnnnnnnnnnnnnnnnnnnnnnnnnnnnnnnnnnnnnnnnnnnnnnnnnnnnnnnnnnnnnnnnnnnnnnnnnnnnnnnnnnnnnnnnnnnnnnnnnnnnnnnnnnnnnnngtcatttttcttgtatgttacataagagcttgcattcacaagagatgggctctgtggtctgtggaatgaaatggttaaagatggagaaattgtatacactggaacagaatcaacccagaacggatagctccctcctggaaannnnnnnnnnnnnnnnnnnnnnnnnnnnnnnnnnnnnnnnnnnnnnnnnnnnnnnnnnnnnnnnnnnnnnnnnnnnnnnnnnnnnnnnnnnnnnnnnnnnnnnnnnnnnnnnnnnnnnntattgggttccttatgaaaattatactgg

SEQ ID NO: 16076 - DNA, 459 bp, Homo sapiens
  misc_feature (1)...(459): n = a,t,c or g
cttganancncttgacnnnnnnnnnnnnnnnnnnnnnnnnnnnnnnnnnnnnnnnnnnnnnnnnnnnnnnnnnnggcacgagcaggtacaacagctacaagtcttgttgctacaggcccatggaggtaccctgcctggatctataactgtggaaccatcagagaatctacaatccctgatggagaagaatcagtccctggtagaggagaatgaaaaattaagtcgtggtctgagcgaggcagctggtcagacagcccagatgttggagaggatcattttgacagagcaagcgaatgaaaaaatgaacgccaagctagaagagctcaggcagcatgcggcctgcaaactggatcttcaaaagctagtggagactttggaagaccaggaattgaaagaaaatgtagagataatttgtaacctgcagcaattgattacccagttatcggatgaaactgttgc

SEQ ID NO: 16077 - DNA, 2782 bp, Homo sapiens
atgtctgaatatattcgggtaaccgaagatgagaacgatgagcccattgaaataccatcggaagacgatgggacggtgctgctctccacggttacagcccagtttccaggggcgtgtgggcttcgctacaggaatccagtgtctcagtgtatgagaggtgtccggctggtagaaggaattctgcatgccccagatgcctggctggggaaatctggtgtatgttgtcaactatccaaaagataacaaaagaaaaatggatgagacagatgcttcatcagcagtgaaagtgaaaagagcagtccagaaaacatccgatttaatagtgttgggtctcccatggaaaacaaccgaacaggacctgaaagagtattttagtacctttggagaagttcttatggtgcaggtcaagaaagatcttaagactggtcattcaaaggggtttggctttgttcgttttacggaatatgaaacacaagtgaaagtaatgtcacagcgacatatgatagatggacgatggtgtgactgcaaacttcctaattctaagcaaagccaagatgagcctttgagaagcagaaaagtgtttgtggggcgctgtacagaggacatgactgaggatgagctgcgggagttcttctctcagtacggggatgtgatgggatgtcttcatccccaagccattcagggcctttgcctttgttacatttgcagatgatcagattgcgcagtctctttgtggagaggacttgatcattaaaggaatcagcgttcatatatccaatgccgaacctaagcacaatagcaatagacagttagaaagaagtgcaagatttggtggtaatccaggtggctttgggaatcagggtggatttggtaatagcagagggggtggagctggtttgggaaacaatcaaggtagtaatatgggtggtgggatgaactttggtgcgttcagcattaatccagccatgatggctgccgcccaggcagcactacagagcagttggggtatgatgggcatgttagccagccagcagaaccagtcaggcccatcgggtaataaccaaaaccaaggcaacatgcagagggagccaaaccaggccttcggttctggaaataactcttatagtggctctaattctggtgcagcaattggttggggatcagcatccaatgcagggtcgggcagtggttttaatggaggctttggctcaagcatggattctaagtcttctggctggggaatgtagacagtggggttgtggttggttggtatagaatggtgggaattcaaatttttctaaactcatggtaagtatattgtaaaatacatatgtactaagaattttcaaaattggtttgttcagtgtggagtatattcagcagtatttttgacatttttctttagaaaaaggaagagctaaaggaattttataagttttgttacatgaaaggttgaaatattgagtggttgaaagtgaactgctgtttgcctgattggtaaaccaacacactacaattgatatcaaaaggtttctcctgtaatattttatccctggacttgtcaagtgaattctttgcatgttcaaaacgggaaaccattgattaggaactacattctttaccccttgttttaatttgaaccccaccatatggatttttttccttaagaaaatctccttttaggagatcatggtgtcacagtgtttggttcttttgttttgttttttaacacttgtctcccctcatacacaaaagtacaatatgaagccttcatttaatctctgcagttcatctcatttcaaatgtttatggaagaagcacttcattgaaagtagtgctgtaaatattctgccataggaatactgtctacatgctttctcattcaagaattcgtcatcacgcatcacaggccgcgtctttgacggtgggtgtcccatttttatccgctactctttatttcatggagtcgtatcaacgctatgaacgcaaggctgtgatatggaaccagaaggctgtctgaacttttgaaaccttgtgtgggattgatggtggtgccgaggcatgaaaggctagtatgagcgagaaaaggagagagcgcgtgcagagacttggtggtgcataatggatattttttaacttggcgagatgtgtctctcaatcctgtggctttggtgagagagtgtgcagagagcaatgatagcaaataatgtacgaatgttttttgcattcaaaggacatccacatctgttggaagacttttaagtgagtttttgttcttagataacccacattagatgaatgtgttaagtgaaatgatacttgtactcccccctacccctttgtcaactgctgtgaatgctgtatggtgtgtgttctcttctgttactgatatgtaagtgtggcaatgtgaactgaagctgatgggctgagaacatggactgagcttgtggtgtgctttgcaggaggacttgaagcagagttcaccagtgagctcaggtgtctcaaagaagggtggaagttctaatgtctgttagctacccataagaatgctgtttgctgcagttctgtgtcctgtgcttggatgctttttataagagttgtcattgttggaaattcttaaataaaactgatttaaataatatgtgtctttgttttgcagccctgaatgcaaagaattcatagcagttaattccccttttttgacccttttgagatggaactttcataaagtttcttggcagtagtttattttgcttcaaataaacttatttgaaaagtaaaa

SEQ ID NO: 16078 - DNA, 540 bp, Homo sapiens
  misc_feature (1)...(540): n = a,t,c or g
ctgaatacccnttatgacatgactacgaatttaatatnnnnnnnnnnnnnnnnnnnnnnnnnnnnnnnnnnnnnnnnnggcacgagcggcacgagnnnnnnnnnnnnnnnnnnnnnnnnnnnnnnnnnnnnnnnnnnnnnnnnnnnnnnnnnnnnnnnnnnnnnnnnnnnnnnnnnnnnnnnnnnnnnnnnnnnnnnnnnnnnnnnnnnnnnnnnnnnnnnnnnnnnnnnnnnnnnnnnnnnnnnnnnnnnnnnnnnnnnnnnnnnnnnnnnnnnnnnnnnnnnnnnnnnnnnnnnnnnnnnnnnnnnnnnnnnnnnnnnnnnnnnnnngtcatcccattgtactccagtctgaaaacagcaagaccccgtctctaaaaaattaaaaaaaatatacaacataaacctaaactataaaacagcaatggttccaggtaatgttggccgtgacatttaaagaacaaaattgcttatgaagttgagatggttgccaaattgtaaattcctaactcagggctttgaaaaatcaattgtaggaaag

SEQ ID NO: 16079 - DNA, 467 bp, Homo sapiens
  misc_feature (1)...(467): n = a,t,c or g
tttgannccttganncctnnnnnnnnnnnnnnnnnnnnnnnnnnnnnnnnnnnnnnnnnnnnnnnnnnnnnnnnnnnnnnnnnnnnnnnggcacgaggcgagggctacgagcgtctcctgaagatgcaaaaccagcgtggcggccgcgctctcttccaggacatcaagaagccagctgaagatgagtggggtaaaaccccagacgccatgaaagctgccatggccctggagaaaaagctgaaccaggcccttttggatcttcatgccctgggttctgcccgcacggacccccatctctgtgacttcctggagactcacttcctagatgaggaagtgaagcttatcaagaagatgggtgaccacctgaccaacctccacaggctgggtggcccggaggctgggctgggcgagtatctcttcgaaaggctcactctcaagcacgactaagagccttctgagcccagcga

SEQ ID NO: 16080 - DNA, 451 bp, Homo sapiens
  misc_feature (1)...(451): n = a,t,c or g
ttganntcnattgaantctaannnnnnnnnnnnnnnnnnnnnnnnnnnnnnnnnnnnnnnnnnnnnnnnnnnnnnnnnnnnnnnnnnnnggcacgaggccttgctggttctccggctgtgtgcctggcccccactcgtcactcacgggctgttgctccaggcctggtctcggcgactcctgggctcccggctctcaggcgcatttctccgagcatccgtctatgggcagtttgtggctggtgagacagcagaggaggtgaagggctgcgtgcagcagctgcggaccctcagcctccgaccactgctggcagtgcccactgaggaggagccggactctgctgccaagagtggtgaggcgtggtatgaggggaacctcggtgctatgctgcggtgtgtggacctgtcacggggcctcctggagccccccagcctggctgaggccagcctcatg

SEQ ID NO: 16081 - DNA, 1173 bp, Homo sapiens
aagttaaatacagtttattaaaaaaaaaaacccattcacaaaatggaatttgagctgcagaacagctcatgtaaactgcatggcagtgataacgaagtacagtggctcagataaaggtcttcacaaggacgttcctgcaaaaggcaaaagaggttgtaaagtattcatataagcagaggtgaatgactacacagttatatccactgtcactactgggaatacctggttggctaataactctttttgcaattggatgagattacgaagtgttttggtttaaggtacagcttgtcattcttttactttgggaacgcagggcattcttttgctgagcactaatttgtaaaaacttacctttctgccacgaacttggacagatgagtttctgtttttaagagctgataagactagtagcagactcctccctagaaaagtaaacaacctttagaactagctctaagaccaagtcccatctcaagctaaaccccccatacctcccattaataacccacccatccccccaccatttggggaagtctattactttgagccattattttaaggaaatgggtcaaaggaagataaataaaagggcaaaaatttatattcacagtacaaataatgtgctcacttccttcaactgggagccatcaatagggtgtcaatttaaaacaattcatctccagaaaaaccaagttcagcttaactggactagttttggctcaatatattaagaaaaatgtttaacagaaaactggactttaagtaactatatggatgtaagtaaaatctgttcttacctacccgcatagcaataaaacctttcctcctggttctgactgctagtcctaagagtcaggtgtgccttactcttgtctgcctccttccttgcgatgatcactgatatttcactccctcctagctttcatggagcgtgccgtggcctgcccctggcttatctgtactccacataccacaagtgtctactctcagctgtagagtgtctgagctcggagccattcgcgctatacttgctagcagttcctagtagctgaacatctctcctggatctttaaaggcattgtcacgaatcctgaggtatctgcaaactccctcaatagttagggttccacctgctattgcaaactcagccagtatcatggaactatcacc

SEQ ID NO: 16082 - DNA, 716 bp, Homo sapiens
  misc_feature (1)...(716): n = a,t,c or g
tttgaacaccnnnnnnnnnnnnnnnnnnnnnnnnnnnnnnnnnnnnnnnnnnnnnnnnnnnnnnnnnnnnnnnnngcacgagtctttttatagttaaagtctattttgaccaatataagtatagctacttgatatggtttggctgtgtctccattcaaatctcaactttgaattgtatctcccagaattcccacgtattgcaggagggaccccagggggaggtaattgaatcatnnnnnnnnnnnnnnnnnnnnnnnnnnnnnnnnnnnnnnnnnnnnnnnnnnnnnnnnnnnnnnnnnncaggggtttctgccttttgcctcttcctcattttctcctgccaccaccatgtaagaagtgcctgtcacctcccgccatgactcaggcctcccagccatgtggaactgtaagtccaattaaacctctttttcttttcagacttggatgtctttatcagcagcatgaaaacggactaagacnnnnnnnnnnnnnnnnnnnnnnnnnnnnnnnnnnnnnnnnnnnnnnnnnnngtgaggatgcagggaaatgaagactctctacgctttgggttggaatttaaacttgtaaattagacttgtaaagtcttcagagactcacatatgacttgcgagatcaaggctgtgttctggcaggtctctcaccagtggcaaaaaaaccaaaaaagtatcattcccattgaatatcctgctcgtgcc

SEQ ID NO: 16083 - DNA, 598 bp, Homo sapiens
  misc_feature (1)...(598): n = a,t,c or g
aaacctgggctttaaaatcacctcctctggaaggcctccctctacttctcacagttcaggcctgttctgccccacacagcagaaaatgcccacgatgcaataccagagtctgcatgggaccatttcaacaacccttagaagctgactcagctgtctcctggccctgacttttcctaagatgagaggagctggaacccctcaaaggctgagagtatccccaccccacttcacagatgaagcaaactgaggccccagagaagggaaattacttgccccaagatcaccccagcaagtaagaaacagagctggagatgagctcaggccagcacggaaccacgcaaactccttctgtaggctttgtaaaggattgatgagaaaagcagatggttaagagctctacaacttctgtgaggtaaagaatatctgcannnnnnnnnnnnnnnnnnnnnnnnnnnnnnnnnnnnnnnnnnnnnnnnnnnnnnnnnnnnnnnnnnnnnnnnnnnnnnnnnnnnnnnnnnnnnnnnnnnnnnnnnnnnnnnnnnnnnnnnnnnnnnnnnnnnnnnnnnnngatctttaattaagcgtgtcgcaagcttat

SEQ ID NO: 16084 - DNA, 449 bp, Homo sapiens
tacctaagttatacagtttgaaacctaggaaggtccagttatatgaaagggtcttggaacaccggacctaaggaaccctgggacctagcctgccagggatggggcagggcctgataatgggatcagattcgtaaacccagaagatgactcgcctcatggggccctctgggaaggacggagttagtgaaagacactcccggcaggaagatggtaaaacattccccaggatatcccatccttccctcagtggatgctctatgaccaagtgttaaagccattgataaaaatggggccaaaccaagcacaaagaattcctctgccaatctctgaatgacaagatgctttgtagggaaagaaaacatgtacagtttggaagccctacatcagaagtggcaaaatgggtcaaaactggcccttgggcttgttttatttggcctgagcaaaaaaaa

SEQ ID NO: 16085 - DNA, 1098 bp, Homo sapiens
tttttttttttggatgaatatacttcctttatcgagggtgacaaaccaaaacaaaaaaagaccaaacatgtaaaaacccagggttctagaaatacaaactcaattcattcaaattcaagctcatccagaccctggtcacaaaccctagtgaggtgcatgtgagcaccaagtcagggagagggggcaggagtgactctgaggccaacagagagggtgggaaggggatctccctaggtcccctggtgatcaccccccacccaaactggtatctccacattctcaatgactatgaagacataccaggctctgtccttttggcccccaccccatccctggccagagcttcaaaggccagtcccaaaaggttctaccctcacttgctcaggcttctagccttcctcttctcctccttcttcacatttttctctgtgattagtagcaggttagggtactgtataagccgcagtgaggctgggggccaagggggtggggtagagatgggatgaagagaggagaagagctgtccaaggacccctctcttcatgggatcccaaactgtacaaccagctcctcttttgcgtccacacggatctgagaaagtgcactgtaggcataagcagctatcctggagacctgctgcaaatcagagaacgggatgggctcactggccagcacttggtggggctggctggtaagagacggcagcggtggcagcttcttccaatgggtcaaggctgctgctcagcacagccaagcgggtgctgtactgcctggcacggtccatgtactcatgctgctccatgccctgtgagtctgcagcagacacatcaatgatgttgctggctgtcttggcaaggatggaagagagcagggcctgctcatcagtgcgagcggaaggcaggctgtggtagttgggctcggctccattgagagctttggtaggggggctgctagggtccagcagcagcttccgctcctctcggtcctggtccgagtcctcgttctcgctgctgtagcagcaccccatggccggggtcgggccgggcgctcaggccgcgccgaggagggacggcgtccgtgaggagcccttccggtcac

SEQ ID NO: 16086 - DNA, 882 bp, Homo sapiens
gcaagagtccctctgaagcttttgaaacacactgttttttatgtcactgtggagccgtgcattattggtccagctgctctccgcctgataatctgtcttataaatcccgctggttgtatatggctgtcagaatgaacgatttggtggttgtggctctgttctaaatattgcctctgctgacctaccaaacactgggagaccatttcagtgtatccctggatatcgggctgaggaagcagtggaaatgttaaagaccttctacaaacaagaaaatccaaatgcaccaaaatcgaaagttcggaaaaaggaatgtcagaaatcttgaacatgttctgatgaaagaaccaagtgacccaaagtgacctggacaagattcatagactgaaagctgttgacatcgttgaatcatatgtttatatattgtttttaatctgcaggaaaatggtgtctctcatcatttgctctgttaagggaacaaattagcactttttagaagtctgacaattgtaaacagttattagcttttccagaagctgattcccattttaagatgggggaaaattaaggtttgaggttttagaaattagcaagtagtgcatacccttctagccacaagtgcccagtccaggaaagtgctgacttcttagagaatgtgtggccagacccagggacctggagtgtgtttggactgcagtttgccaccctgagaacaccttctccaggactggcatttcagaatcagattcttcattttttgcagctacgatgttcttccagggcactgggggctgtgacttctctctaaattgtatataagttgtgtatatagagaccataattatatggtccttagaaaagactttgcttttataaagcatttag

SEQ ID NO: 16087 - DNA, 601 bp, Homo sapiens
  misc_feature (1)...(601): n = a,t,c or g
gntnnnnngnnnnnttttgganncccnnnttggaanacnnnnnnnnnnnnnnnnnnnnnnnnnnnnnnnnnnnnnnnnnnnnnnnnnnnnnnnnnnnnnnnnnnnnnggcacgaggggactgcgagcagaagcaacatcgctcgccatctgcaaaccaatctcattctattttgtgtcgaagtggactacactcatgaggccgtcaccataaagtgtaccttctccgcaaccggatgcccttctgagcaaccaacatgcctgtggtttcgctacggtgctcaccagcctgagaacctgtgcttggacgggtgcaaaagtgaggcagacaagttcacagtgagggaggccctcaaagaaaaccaagtttccctcactgtaaacagagtgacttcaaatgacagtgcaatttacatctgtggaatagcattccccagtgtgccggaagcgagagctaaacagacaggaggagggaccacactggtggaagagaaattaagctgctcancanggaactgcggancttctgcagctctggatactgntctntgctatgnnaccgngngnnnnngccttnnnactcntntcnannnnaancnaccc

SEQ ID NO: 16088 - DNA, 507 bp, Homo sapiens
tgatatatgttcattaacactgccatagctcctggagttggattttcagtgacttcattgaaaattaaaacgtttctatggcctttcatagttggaaagtactcttctgttttcataagtgttgttatctttctcagattgctgatttgtttccacatgtctcttatggtatagttcttgagcaatttcctgaaaaatacgccgagcactcttcttcttttgtgagtcttcttttatttctttgtttcttagagtgttggattttgatttggagaggagtatgaaggccacgcacacaccggtcacatagacagagagcagtgatacaagagctgtcaggaagctccgcagttccttgctgagcagcttaatttctcttaccaccagtgtggtccctcctcctgtctgtttagctctcgcttccggcacactggggaatgctattccacagatgtaaattgcactgtcatttgaagtcactctgtttacagtgagggaaacttggtt

SEQ ID NO: 16089 - DNA, 654 bp, Homo sapiens
gcaacggcaagggccgcagccagcaccgggcggagagggctaccatggggaaaatcgcgctgcaactcaaagccacgctggagaacatcaccaacctccggcccgtgggcgaggacttccggtggtacctgaagatgaaatgtggcaactgtggtgagatttcggacaagtggcagtacatccggctgatggacagtgtggcactgaaggggggccgtggcagtgcttccatggtccaaaagtgcaagctgtgtgcaagagaaaattccatcgagattttaagcagcaccatcaagccttacaatgctgaagacaatgagacttcaagacaatagtggagtttgagtgcccgggccttgaccagttgatttccagccgcaggctgggtttgctgctgaaggtgtggagtcagggacagccttcagtgacattaatctgcaggagaaggactggactgactattgatgaaaaggcccaggagtctgtgggaatctatgaggtcaccccccagtttgtgaagtgctgatccctcttccttcccagttgcccttaagaactgagaaaggacaaagtactctaagcagcagagcccacagaggctcgttcctttgacccttgtctcctggtggctatacgaaaccttcacaatctgcg

SEQ ID NO: 16090 - DNA, 325 bp, Homo sapiens
  misc_feature (1)...(325): n = a,t,c or g
attttctctttctaagaagagcaacctcagccggagtgagttttttctgactttgcagctgagtctggagaaaagtggcatgccagagcgggtcggtgggaaacagggtgaactttagcttccatcaacagctctggtagcaaaaccagtcccctaccccctagagaatgcatccgtttccccaccnnnnnnnnnnnnnnnnnnnnnnnnnnnnnnnnnnnnnnnnnnnnnnnnnnnnnnnnnnnnnnnnnnnnnnnnnnnnnnnnnnnnnnnnnnnnnnnnngaatntgggggcagtttcngccatactgtctggnganatgaa

SEQ ID NO: 16091 - DNA, 425 bp, Homo sapiens
ggcacgaggagagaatgacccacagccagagagtatatgaacctctgagtcagctaacccagcaatagttatgccttctagagagggagtccacaccaggccatggggaggagtcatccagcttcaatatctataacaaagacttatttcacttgcttaggagaactcaagtttaaaatagtgagtgagactttttttagcattgcccaaaagatgaaactgcagcccttttccagccagagagatgagctgtgcattagttgacttgcagagttcaaccgaatggaatggtcttggagtaaggcagtaatagaaaaatcagcctttgtgtctggcctgctttttaatattcccactgaactctcagtctgttaagaatctcatgatatatttgggctaatctcttaggtcatatctcctctcag

SEQ ID NO: 16092 - DNA, 3478 bp, Homo sapiens
cccgcctaatcttcacccgctgctaggctcgtttaatgagtcttctgagagctaaggagtcctcggattcattcaaagcattctacaatgaacgctaggggggaaaaagaacaaacaaaatacatttcaaatataggattcaattacttttcactactcaatgatgtgtcaaaggcacgctgtgttttgttttgagggcggggagatgacaggagggaatcctgggcccccattggctcgccgctcgccgctgcagttgagctccagccgctccgagagcattattgatctgaagggtaaatgtggagggagccacagagaggggtccaggcttttctgagaagagaggcagcctcttccaggaagaaagtggtgtctactggctgcccggcctggagaaccttctttgaatgaaaacggacaaaatgcaaagcagtgcgttggcacagtgatttggaaaggggaaacagaagagaagggtctcaccttccgcgcaaggctgagctgttggcaccctgctgcggccgtcggtgctgctgctcctgcagctgccttttctgccatcagctttgttacctaacagcttggctcttttgggaatatagacaagctggaacccaggagcagttgggagttttaaagaatgccagcctttttaaagctttgatgtccagtgctatagaatcaagttactgtggaggtcaaaacaatttgagatacataagctggccttagaaaataaattgcctctaacttacagtgaggagctcaacataacagggaaaaggagcacaggatgcagctacttggagggtgttgattgaaaacttcgatctccccaccccattcacggttgatttgacggatttctcaccttgttcacagagaaaatttcaattaaggcccctttagatggaatataatacagcagaagccttttcatcaaaaggattaatgcctgcatcatcatttctgcaataaaacaagaagctaagtggtggaggccacagacacctcaaacctggattccacaattctacgttaagtgttggagtttttattactctgctgtaggaaagcctttgccaatgcttacaaggaactgtttatccctgcttctctgggttctgtttgatggaggtctcctaacaccactacaaccacagccacagcagactttagccacagagccaagagaaaatgttatccatctgccaggacaacggtcacatttccaacgtgttaaacgtggctgggtatggaatcaattttttgtgctggaagaatacatgggctccgagcctcagtatgtgggaaagctccattccgacttagacaagggagagggcactgtgaaatacaccctctcaggagatggcgctggcaccgtttttaccattgatgaaaccacaggggacattcatgcaataaggagcctagatagagaagagaaacctttctacactcttcgtgctcaggctgtggacatagaaaccagaaagcccctggagcctgaatcagaattcatcatcaaagtgcaggatattaatgataatgagccaaagtttttggatggaccttatgttgctactgttccagaaatgtctcctgtgggtgagtaggcaaatcaaaattctgtgagatacaatgagacctcttcaacattgactttttgcaggttgatgtaaacatcttatctatcatctaaaagaattatttttcaattctagaaaatacagttcttttcatttatttttgtaacttttttgtttttctttctgcttcattatgaagataactacaggaatatataacattagttcctgttttccaccctgtgaatttacctgaattcatagaatccttgcgtgctttaagcaaaaaatgtattttgtattgaaattgattcttatctcaattccagacacctatacagtgctggagacacctaccctacaccacgaaatgccagacagtaattcctagatcaaagtaaatgatctaaagcatgcatcacatctgatctggaagtggtccagaaacaggtgtgttgcatcttctgtagctgtaaatagagattctggaagggtgatactgtttccttttcagggtaaataacccatacttgttatgccatcaagccaagcagcaaatgaataatgtcatgaaaatattattagaacaaattaacaaattacaattacaattatcaaattaacaattagaatatagtagcaccatcattctaaaaatttaaatttgatataaatatacatttccatatcagcctaaatttacaaagtcctataatatgtaggatataaggtcaataagttaagaattccagccttaaggacaattttaaattataatttttattcctcagtcaccactgctaatccttcaatttatttcaaagtaacttctggtttttattacatttggaagataaagcaacttatcacatgtaggttacaacttaaaattcgtgtatgagccattgcttatattttctaaatctgacatgcacccagggggtttctactgctcctaccaccacccaggacatgcgatgaagattgtggacgttaccgtgagggcggaagcaggttagtagctgtaggagctgtcacatgggatttactaataatgcacttgaaaattgtgtatgtgaccttatcaggcatttaaggaccataatctctccttgacctaagaaatcagcttgaagtaattcacttagatttcaaattttaatgtggatacccaaggctgcaaatctgttattcagtacctgctacacttttggggttgcctcttttatgcactgttagaattgctagaaatttagaagtccaattggaaagaagcatatcttgttagaaagtattcccagaaaatgaggaaggctacattttaactgtgtcttgattttacagggagaaaaataaagttaatattttgaggaaaaaataaggcttttaagatgacatgctatatagtagacaaatagtttaactcggtgcctacttcatgtacactggatgtgttaacatgaatttatgaccttcagtgactttttattaccaaaacagcttccttaaagcaaacacacacacatgcctctacagtattggaaaattccgtctccttagataaaacaattaggatttttcttgggccaactagaataattagggctgcagagttggagcctttatataaggagtttgcagctcatatccgaagagagaaatgtatttggaaagtcaaaagtgtaggtaagtgagaaagcagagtagtttcagcttttgcagttggagtgggtataatttactgtgttgtcataagatactggaaagatctttggaagaataggttcttaaagtgttttctcatgtgcccttactgacatttcccattgggccttcaagacaactccgagtaaatacttaaattgattttcagtgcacgtgct

SEQ ID NO: 16093 - DNA, 1009 bp, Homo sapiens
attcccctcctcacgccagcctaggagaagaagttcgtagtcccagaggtgaggcaggaggcggcagtttctggcgggtgagggcggagctgaagtgacagcggaggcggaagcaacggtcggtggggcggagaagggggctggccccaggaggaggaggaaacccttccgagaaaacagcaacaagctgagctgctgtgacagaggggaacaagatggcggcgccgaaggggagcctctgggtgaggacccaactggggctcccgccgctgctgctgctgaccatggccttggccggaggttcggggaccgcttcggctgaagcatttgactcggtcttgggtgatacggcgtcttgccaccgggcctgtcagttgacctaccccttgcacacctaccctaaggaagaggagttgtacgcatgtcagagaggttgcaggctgttttcaatttgtcagtttgtggatgatggaattgacttaaatcgaactaaattggaatgtgaatctgcatgtacagaagcatattcccaatctgatgagcaatatgcttgccatcttggttgccagaatcagctgccattcgctgaactgagacaagaacaacttatgtccctgatgccaaaaatgcacctactctttcctctaactctggtgaggtcattctggagtgacatgatggactccgcacagagcttcataacctcttcatggactttttatcttcaagccgatgacggaaaaatagttatattccagtctaagccagaaatccagtacgcaccacatttggagcaggagcctacaaatttgagagaatcatctctaagcaaaatgtcctcagatctgcaaatgagaaattcacaagcgcacaggaattttcttgaagatggagaaagtgatggctttttaagatgcctctctcttaactctgggtggattttaactacaactcttgtcctctcggtgatggtattgctttggatttgttgtgcaactgttgctacagc

SEQ ID NO: 16094 - DNA, 435 bp, Homo sapiens
gctttgagctgtacgtggctacaccactggctgccctcttgaacataaaggagaaaactcggctgcgggcacctcccaacgccaccttggaacatttctacctgaccagtggcaagcagcccaagcaggtggaagtagagcttttgtcccggcagagcgggctctctggccgccaggtagcgcgttggttccgtcgccgccgcaaccaggaccggcccagtctcctcaagaagttccgagaagccagctggagattcacattttacctgattgccttcattgccggcatggccgtcattgtggataaaccctggttctatgacatgaagaaagtttgggagggatatcccatacagagcactatcccttcccagtattggtactacatgattgaactttccttctactggtccctgctcttcagcattgcctctg

SEQ ID NO: 16095 - DNA, 406 bp, Homo sapiens
gctgagggcagtgctacccacatatgttaccttcaaaagacacatctatccatagccctggtaacaggcctgctgaactcaccctacctcagtgctgaagcagccctgtgacttgactctatcccccatctattgtggttaatgggtgtctagtaggagccatgcctattaagaccctgctaatgggcctgccatctgcagacccagaagtcctcttgtgacccacctccaaccttgcttgaccatggttccagaggtagttcccatctgattgggtaccaggggagggaattgtggcccacctgtggcccgcagtaacaggcccttcaactgtgtaacctgactacaggacccagcagcatccatgttgacacagctctagccccagttaatcgtgatcttggag

SEQ ID NO: 16096 - DNA, 507 bp, Homo sapiens
ttaaaaatggcccctcaagcaccgttaatttacattccagttatttacatgataattcatgacattctgaaacttgcctgtatattatctgaaaaatggatttcttgaggaaaagatctgtttattgtatgtaaggaaaaattttacctgaaaacaaacaaacaaaccctaaaactcagcaccactaccatttccagaagcttttttagcaagtgaatattttttacataatggataataaatggtatttattcatcatgattttctaagtaatgcttatcagccccttcagtggtgttattctaacaaaatgaatacattacaaattattaagttagcttttcagagttttaatatagaagttactagcactgacacactgattttgaaatgtttcaaaatgagtagatacgattagatcctttaccttttaatatctagtttttccaaaaatgatagtaatatcttttgaagaactatgctttttcaaaagcaaaatcaactctg

SEQ ID NO: 16097 - DNA, 621 bp, Homo sapiens
  misc_feature (1)...(621): n = a,t,c or g
atccccttttnnnnnnnnnnnnnnnnnnnnnnnnnnnnnnnnnnnnnnnnnnnnnnnnnnnnnnnnnnnnnnnnnnnnnnnnnggcacgaggcgaattttcccgaccaacctgattcgctagattttttttaaggaaaagcttggaaagccaggacacaacgctgctgcctgctttgtgcagggtcctccggggctcagccctgagttggcatcacctgcgcagggccctctggggctcagccctgagctagtgtcacctgcacagggccctctgaggctcagccctgagctggcgtcacctgtgcagggccctctggggctcagccctgagctggcctcacctgggttccccaccccgggctctcctgccctgccctcctgcccgccctccctcctgcctgcgcagctccttccctaggcacctctgtgctgcatcccaccagcctgagcaagacgccctctcggggcctgtgccgnactagcctccctctcctctgtcccatagctggtttttcccaccaatccttanctacagttactttacaattaaacttaagngagctcttttttcaaattngggnacctttggccctnngctnntttngnaaccaaggcagggg

SEQ ID NO: 16098 - DNA, 628 bp, Homo sapiens
gcgtcgaccggcgaacgcggagagcacgccatgaaggcctcgggcacgctacgagagtacaaggtagtgggtcgctgcctgcccacccccaaatgccacacgccgcccctctaccgcatgcgaatctttgcgcctaatcatgtcgtcgccaagtcccgcttctggtactttgtatctcagttaaagaagatgaagaagtcttcaggggagattgtctactgtgggcaggtgtttgagaagtcccccctgcgggtgaaagaacttcgggatcttggctgcgctatgactcccggagcggcacccacaacatgtaccggggaataccgggaccttgaccaccgcaggcgcttgtcacccagtgcttaccgagacatgggttgcccggcaccgcgcccgagcccactccattcagatcatgaaggtggaggagatcgcggccagcaaagtgccgccggccggctgtcaagcagttccacgactccaagatcaagttcccgctgccccaccgggtcctgcgccgtcagcacaagccacgcttcaccaccaagaggcccaacaccttcttctaggtgcagggccctcgtccgggtgtgccccaaataaactcaggaacgccccggtgaaaaaa

SEQ ID NO: 16099 - DNA, 2540 bp, Homo sapiens
ttttttttttcattaaacaaacatttattgagtgctttctaggtgccaggcacaaagccaggcactcgttaatacaaaaattccaacacaatccttgccctcaaggagcttacagtctactggggagatgaccattaggcaggcaagtgagcccagagtgatctgtgtagtatgccagggtgggggtcgggaggagagagtatagccaaagctccttggaggaagtcaagtctaagttgagatttgacagagaaagtaccctttctctgtgaccaaaagaaaggaggaatcagagtggcaatggagagccactgcatctctggatacaggaggctgggacccagaatgcaagaaggcaagtgatgagaccagagaggtgagcagggacaaggacaccatgagtctcacaagccatgctgaggggtccagactttatcctgagggcagcagggagccaaggaaggttttaggccagagagtgacttgatcaactatgcaatgcattttaggaagatagctctggccacatgatagagaagcagtaggaggctgtcacgataatccaggtgaaagctgatgacagtgggagtggctcaaatcaagagatgttaaggtagacctgaccgttttgagagattggatgtggtgggcagaaagagaaaacaggaatagaataagtttcctgtctggctcctgagtgatctcggggtcaagggaagtacccagaaggggcaggtttgcagaagacagcaagtaccatctgggccatggacctgaattgtctgtgcacctagagggcagcaaaactgtggttcaggtgatcaggaaggatgttggggctggaggtcaactctaaattcctcaccatccttgaaaccatccagatggatgggcttccctagggagcccacagcagaaccctgaaagaccctactgtgcatgggcaagtggagaagcctgcacggaagcctgaaaggaacagccagggaggtaggacaactagccacagaggtgccagggaagtgccatccaagaagcaaggggtgatcagccatgtcaaatgctgcccagatctagtaagacaggaaaggggtctgctggatttagcaacccctgggaaaaacactggcaagtagagtggagggggcgaagcccacatcatcaaggtgagggaccaagcagcagagggaggaaagtagggcccagctgtcagcccaatgggaggatgatgcaggctgccagtatcccctgccttgtctatccctggtgtgcataggagaaaagggccctggcaatctcgttcacactaagaggagaccaacatgtgctcttcctctcagggaaaggggaaagctggtattcttaagagaaggtaaatgctaaagccaaggaaatgaagggctatgatggaactccaggcatgatatagaggaaatattttcaagcacaggggtttttccagtggcttaaatgtatcacatgtgtacagttcatctctgtacctgccagcctcactttgaggtatagaacatggccagaaatggctctcatagggacttcattccaatatgtactgttgagcacttgcaaggcactatagttggagtgcaaggtcaacaaatgcaggtctgtgcccaagacctggcctgccttcttagaaggcagatatatctccccaggagccaagagtgcacagacgggccagggcttggatgctcttagagtgacaaacagcttctcccattagtcccatttctttaaaaacaggctgcctggaagctaatttttattttgtttctccttgagcctaagatagtattcagccagaaaccactccttttcccagaggaagatttataaataggatattgtagatgttcttctgaaaatctagcccagtcctaaattgtcccctctcctactcccagtttgacagtcacggagccttggggaaagagatggaagagagtgcatcagagaggctgcctatagccccacttcccactccttgagcaggctcagctcctcacccctgcccccttcccattaagggccacaagaacagtcccttgggaagggcaagacccaaacccagaaaaggagtccctggagcagaaaagtgagtccagtccagagcagaaggttagcaggaagaaaggaagatgaactgtcagggtattaaggcaaacagtgccacctagaagcgaagctttattcaaacggaaatctgcacttggacagaaatcaccgttcaacagcaaaaactatttctgttggacatgccaagccatggcccctccccatggccacctgcccagagaacttgtcaccatctgctcttaagcttcacagaccctgccctgcctgccccagcggggccagaacctcctgacccaccttggaagggacaggggaggactgagggacctcggcctcctggctaagcaggctctgccaccctccttggtgccctctgaggttacagcctcttgaagcatcagatctgagccaagctgagccccccaaggagggtggggatg

SEQ ID NO: 16100 - DNA, 1911 bp, Homo sapiens
taatattaaacaggttttattagcatcttatacatctgacactctctcctaagcatccagtttattttctagtcacgggttacttactaaaagtctgtgtaacatgagctcacatcagattagaaaacatcaagtgggtagtatttttgaccgaattaacatacaaaagaaattgcctatatcatgtatatgggctccaagggtagttcatacttcagcctcttcattcttttctgcttttgtcacctgttacagaaaatgatctataaaatcctcataaataagacatgagttttgcctgtaatgagtaggatgaaaaaaggccagtgccgcatgctatgaaacaatagcaactttacaggggaatccaaggtttgtgtgcacaaaaattataagcggcattttctgctatgctggaaaaactgaagtataaaacacaaatgaactaagcctttcaaggatgaggtatcaccaacactggtagctgtttaatatattcatcttacaactggatgctaaaaatgcaatcactgtaattaataaagttgaggaaaacacaaagattagctaacaggggtaaaagatcatttagagtaaaataaatgtgtaacattctctatgttctcaatcacctgggaaggcagtctatggaatatcaggaagtaagagttttcttgttttcaggaacatggaggtatatacacttcagaattcagaaggtaactggggctataaatagtaattaaaagaacaaaatagaagcaggggggttccattatgcagctgtcgccattttcctgaaatcttgatgtttttgagcctctcctatttaaggacaaaaccatttagcacaaaacacaaacctcagaaagggtgccagctggaccacaaagcactgatgaaaaggcagagaggatatacttcccaaactttcattaggatgtaaaagccattttgaaaaagtctccactctatgtcaagttgactcctcaatgcaacatgcatctcaatgaaatataatttgagtagtgttgtgttggtatgcatcatgattatgactccaagaaaaatatatctagtgcattctagaggttttgtggaggacgctgtaaaacaaagtttgaagtaaacaataataaaatacaaaaataaaaaaccagggttttttttttctccaaattcctggtttaataaggacttgtttattttgaggaaaaaaggtcccaaacatcaggctgttcacaaaaataacccacagtatcaactttagaaaacaaatcttaagactataacactaattatttttctagaggatgcatttgacatgccaactctcattcacaaaaatacattgttacatttgtgttgaactgccccacacagcacactaatgtgagggtgtaacacacatacttctaactcaaagctgctttcaagagctactcaactaaatgagattgcctttgcagttaggggaagcaactactgaaccttatgtatgaatgaaaagaactgtactccctgcataacaagagattattttggagacagttgataaaaaccatacatcctttttattgttaagtcataaagaggtatcaaaattaaaagcaaaaattacagggtaagacttaacaaaactactaggagcgtcaaaggaagtgaaaatgggactaggcgcggggcaatatgaattaatgaacatgggaaggacaaggatggggagaacagtgagcatgtgctgaagatactaggggagaggatctggtgaaaaatttgatcttagacaagcgcctaggtaaagaaataatgggataagatttctaaaccccactatgtgcttaagagtcattcctcgcccattggcgctggtctctgtcatcctctccttccctcagcctctttttcatc

SEQ ID NO: 16101 - DNA, 302 bp, Homo sapiens
tgaaatgacatgacatgatgaaatgaaataatgaaattaataatgaaatgtgggtggcgcactccagcctgggtgatagagtgagtctctgtcatgaaatgaaatgggaaatgaaatatgaaatgaataatgaaatgctgggtgcactccagcctgggtgttagagcgagtctacgtcatgaaattgaaaaatgaaatgaaatagatgaaatgaaaaaatgaaataataatgaaatgccgggtgtggtggtgcactccagactgggcgatagagcgagtctctgtctcgaaatgaaatgaaa

SEQ ID NO: 16102 - DNA, 370 bp, Homo sapiens
  misc_feature (1)...(370): n = a,t,c or g
gaaatttatgccaaagtcttcccaagacacctcttagtaagaaagctaaaaggtggtttgttgactttctcttaggcaaaaaggacagatttttgggcccaagattttaattagaattgtcttccccagaagaaatttagtaaagtgaacagtaagtgtttccttactctcaccactgtttggtgacactgtttgacttgacagttctagtgctgagtaatagtgtcttctcctatcactgtctgtaaaactgttactgcactattggttgatgatatctctctctttttttttcttaaggggacagagtctctctctgtcacccggggctgggagttcagtgggcgtaatctncgggcttcactggtaa

SEQ ID NO: 16103 - DNA, 479 bp, Homo sapiens
ctctgcgttctaccaatttgtatgtaaaaagacacatctgttttgtggtaggattttttcacatttttgggtactatgagctgcattgatggaagacagcaggcaatatgtggtgacagttaactcacagacataaacatgcaaaatactttgctgtctctggggatattgccatttttcttactgtgagcaacagcaccaacaccaagttaacaggatgcaacatgtgtatgactctaaaagccctaagtagttggtagcttcctgggccttcaatcatagcaatttgatgagggaaggaaggggagaggatttgttgggtaatcaagacattcccgtatatgtctgatttcatggaactgctctattttgtttgtgtgtattgtatatgtatatgtgtatgtgtgcgtgtatgtgtgtgtctgtagcttcagtttttaagtgtaaggactaaataaactaactgaaattttactttc

SEQ ID NO: 16104 - DNA, 768 bp, Homo sapiens
ctcgtgcgcttgttttggccggttgcctttctttcgcaagaggggaaaatatcctcacagactttctgtgttctcagagacgatcttcttccctagaaagaagtcgcttacggttggcgtttccctcaggcagcgccgtgggcagcccacaggcccttgtaaggcgcgcgccgcggccccgcctctttcctttcggccggaaccgccatcttccagtaattcgccaaaatgacgaacacaaagggaaagaggagaggcacccgatatatgttctctaggccttttagaaaacatggagttgttcctttggccacatatatgcgaatctataagaaaggtgatattgtagacatcaagggaatgggtactgttcaaaaaggaatgccccacaagtgttaccatggcaaaactggaagagtctacaatgttacccagcatgctgttggcattgttgtaaacaaacaagttaagggcaagattcttgccaagagaattaatgtgcgtattgagcacattaagcactctaagagccgagatagcttcctgaaacgtgtgaaggaaaatgatcagaaaaagaaagaagccaaagagaaaggtacctgggttcaactaaagcgccagcctgctccacccagagaagcacactttgtgagaaccaatgggaaggagcctgagctgctggaacctattccctatgaattcatggcataataggtgttaaaaaaaaaaataaaggacctctgggctacaaaaaaaaaaaagtcgacg

SEQ ID NO: 16105 - DNA, 798 bp, Homo sapiens
tttttttttgcatgttgggattaatttaatggggatgggggggttgatgacactactgcaaccaccccgccccaaggacaatgacagtattctgaagggctccagcctaggtggcttggctacagtagtatctcttccaacctgggagctagaggatgttcccaccattccctcccaaggcctgggtccaagcatcctcccatccttcccccaggccttctggacccaggctttcagttaggtggtggtgacagcagaaaggaggcagagacagcagtgagggtccaggtttactctttgggaatagggaaggatgaagagaaggggtggatgggatgggggcacccctcagtagtcagctgtgtaatctgtgccatggagaccccggcacagcagtgtgaactccttcaccatctccttcacccgcctcttgttcactcgctcgcgaaggatctgctggctgaaggtatccttctgttcagggctgaggcgggcagaggggaaaccaggtggctgcagggcctccttgatccacatgctcaggaggctgaagcagtgcttgttcagggcgaacaggatatcggcaaagcagtccatgaggctgcgggaggcctggcccccaatggcctccagcactgctatgagcagcatacgaccgtctttcctgtaccacctttcccacagactctacttccccacaccgaggcagcagctctgtaaagaagccacaggaggccttgacagtaggtgcctcagggaacttgagggccagcacagcacactggaacacagctttgc

SEQ ID NO: 16106 - DNA, 589 bp, Homo sapiens
ttttcaggtttctaacatttaatctccacttagggaattggaggtcagaaatgaataaaataccatgccccagtaggctccagtctagggaagtgggcagcaggcagaaaccaagacacagaaagcaacgacacataacagatatgctatgatacaaatggtgctgcaggagctgcacagttcggaggccatttctggccagaggatgggatgcgtgaaatccaggaaggcttccaggaaggagtagctggcactgggatgggcaggaacagcaatgtctctactgatggtttcattggagaaagctgggcaaagttgagaagtttggagactaaccgtgacaaaatttaaacatcaggtatgtgaaggcaagggggaccaactgtgacaaaatgtaaacgtcaagtgtgtgaagtcaaaggggaaccaggaaagtaaaagagtgacaatcagcagtgcttttggcaaaaaggcctctggcagcagtgtagaagagaaacgcagagatcacaggtataagaatgacagtaggagaggggaggagggtacatatttcagaggcatcacaggggggtgtactgctcgtgcc

SEQ ID NO: 16107 - DNA, 4775 bp, Homo sapiens
  misc_feature (1)...(4775): n = a,t,c or g
cgtcgacttttttttttttttttttcagagtctgatcttatttatttgttactcaaaaaatcttatttctgactggattcagacttagaagtagaagctcgcagagaggaaagtctgcgtctcttcgcaatttgttcctggcgcttctccttagcctccttcattctcttggccaaaagtttagcatattctgcagcctcttctttatttttcttggtacgctgcttcttcagagcaatacgccgccgtttgtgctgcaggacacgtggagtaacaagacgctgaatcttgggtgctttggtcctaggtttcttacctaaaaattcaaaggactcaatcatttcaatatttgttttgttagaatccacatctactttaaaaacatcagaaataaacgtaagcttaacagcatctatgaaaacctataatgaggcctttaaaatcaaatcagaactattctaaaatgctttttgcccctccacagaaatctagaagattggttaaatattataaaaatataagggaaaccaagtcctgaaaaataaccaggctaacttttactaccttccagttttactaaaatacagtggcattatgttaatatataactgtgcatagttaatttgtctgtgaaaaccacttaacacattatctacataatcatcctgccatacttttaaatttgatgtaagcttgcatctctatttcctttgacaattcctgccaattcaggggtaacgttaactattaacatcagattaggtggcatgttgttaaagtatcttcattaatctgatctgtactccaaaactgctcatggattacagatctgcattggagcataggccttttcagatgtatttgtttcatggacactttgtagggagttaactgccttaggctaaatgctcagatgttcagattctgctaaaatgttaagcctcctactatagacataagaaccatctaaaaatacccatcaaccagaccacgcttgtattatacggattatttccagggctatggttatgggcaactgccacctatttgtcaattgcttttttttttttttttgcaacatcagcttcataagggtaggaaatttgtctatactgtattctcagcaccttgaacagtacctgtgctcaagtaagtgtaattactgacttaacagacgtatactatctatgccatgtatgttaagtacaccagtcctgaaaagctaaaatccagagaaattctttcaaattttgtcaggaaaacccaaccttgactgacatgctgtttatttaacataaatatccccaaatttcaccacagaaatattgctatttgaggtcctcactggtgagtatgttgtctactatatggacaaaagttcttaaaaggtaaagctccaaaatccctaacacctgctccctagtattctgagtaaggtctctaacttctaattctcacaactcttaactattgttatccatatcctacagatgaaacagaagtttaaagcaacttcttttgtaagccaaaaaataattttgggctgggtgtggtnnnnnnnnnnnnnnnnnnnnnnnnnnnnnnnnnnnnnnnnnnnnnnnnnnnnnnnnnnnnnnnnnnnnnnnnnnnnnnnnnnnnnnnnnnnnnnnnnnnnnnnnnnntattaataatttagaacatctgatataaaattacaaagtgtgtggtgctaatagtcccagaattctcaaacatgtgactcctaaaccagatagcaatgaccttaaagtcaggttatttttggataatgtatacatcaaagattcacaagcagattttcaacgaaattactgcactctacaaggcactggatataataagcaaggattaataccaactgggtatgctggccacccccaaatattttctgtaaaaactccaagtgaatagtgctaaggccttccaaaggcacatatttatcttctgatatgcacacaaaatgatagacaaattaccaaaattaagcaagccctaattgcataatccctcctaccttctttatttaagggctttcttacaacatactggcggacatcatcttctttagagagattgaaaagtttgcggattctgctagctcttttggggcccaggcggcgaggcactgtagtatcagtcagtccaggaatatccttctctccttagaagaaacagttgaagagattttaattcaacaacttccttaagaatcctaaatcagaatgtttaatgttgaattgatggtagagaaacaaatccattggtctgtaagtctggatactgcaaatgaataagcatttggacaactggctttaaatcaatttcaacgaaaattgaacacaagtaaccctcacctttttttacaataaccaagttgagaacgctcagatttgcatccacaatgcaaccacgaactgattttctctttctttctccagttctccttggtctgtaacaggaatgccccttactcagtagcaggcggacacggccatgggtcaagacaccctgcttcatggggaaaccttgtttgtcgttcccaccactgattcggaccacataaccctgcaagagcatacaatgaatgacacatttactatttctattccaaaattatacagtacaggattgtgacctctgtgaacacacctatatgagaaagtataattatgaaaaccaatttgaacttaagcacgttttctctgttcagtgagttttgtctatattcccaacttgtcaagttcaattatcaaatgtctttcaagtcgcatttctaaccgatgttttattagagataacagcactaagaagataaaatatcaaacagcaacaaacaaatcagatacaaccctttttggcactttggggattatgaggacagctatgtgacatattgccaaatgcatgatgcagggcaagaattatgttgatgtaaactttacgtatattttatggcttactctacgtccccccctccaaggtaatacctctaactttataaagtggcattcggaaacaacttaccaaaggtcagaagccagaacccggagtctgaaccccattccaaataccagttaccaatggcgtttaccgtctctgacttaaatacctgcaacaatttgtcaacttttaccttccattcttcacccagagcgtcagcagcaacttctgtggccatacgcttctcatagaaagtacgaagtttgcgttcatcgtccacttcaatgagtttctggcagccagtggctgggaaggagatgttcagctaaggattaaaaggggggaaatagtttacgaaactatctatacaggtaattgtagagccatctacaaagttaattccactgcaaaaagcctttcatgttgcctccacacaagcaggaaatataagatgccgactgtactcactaaaagcacgtgaaagcagagtagcagtcaagaagcgccgcactcagcaggacgttttcccctcaagccccgcggaatgactctgggggcgagggcactccgcagccgttcaccctcccgaagcaagaaagccggggtcaagagccgcaccacaggcctgccgcaaactgggcaacacgccgcatccgtcccggctgggcgcggggacgccaccatggcgctcccggcccgccgctccagccgcaatcgcctgccatccgttcggccaaaaagctccatgccccagaaaggcgagccttctcctacttgagacccttctccacctaaagccaggatcctggagtgctggaactgaggcaatgccgcgttctgggactcgattcacgttccccaaacccagtctaacactcgccaccatcacctaccttcatcttgaagcagctgaacgcctccgaggcgccacggaaaagagggccaacttccgcttagcgcaggtcacataggcgctttcagttctcgcgagatgagcagaagtacgggatagcggaagtgagcatgggtgggcggtacttccgggcgagattaatcagggcctgggaggtaaagtcggttgggtgtgggtctgaggttgtgccagtggtggtagtctggtaaggcaaacccgcgtgtaattctgagggctaaccccttccctgtctagtcttttccacgctgcctgggttttggagctgggcgccagcggagccccacttctgtcccaggcactttgcatctgacggtaccaaaataggagggctaannnnnnnnnnnnnnnnnnnnnnnnnnnnnnnnnnnnnnnnnnnnnnnnnnnnnnnnnnnnnnnnnnnnnnnnnnnnnnnnnnnnnnnnnnnnnnnnnnnnnnnnnnnnnnnnnnnnnnnnnnnnnnnnnnnnnnnnnnnnnnnnnnnnnnnnnnnnnnnnnnnnnnnnnnnnnnnnnnnnnnnnnnnnnnnnnnnnnnnnnnnnnnnnnnnnnnnnnnnnnnnnnnnnnnnnnnnnnnnnnnnnnnnnnnnnnnnnnnnnnnnnnnnnnnnnnnnnnnnnnnnnnnnnnnnnnnnnnnnnnnnnnngttcgagttcgagaccaagtaaacaagaataatttttactatctaaaactatcacataccatctccccactttagtgtcccaaaggtttgagtttaggactgttttacattcgaagttgaacgattctactgaatcctctttgatcatctcacattgattcatggaatcttggtgaaatgatgctttttaaaatctgagtactgtgtgtcatttttttgttgaggtgaaattgacataactagt

SEQ ID NO: 16108 - DNA, 358 bp, Homo sapiens
ggcagtagctgctggaacgcagggttgagagagaagtactgacagaagaggattcttcgggtggaagtgcagagtcagctggtgatggctacaggagagggcagctcccagcctgtgccgtggccatccccaggtgcaagtgaagaaagaaagaggtggggtgaaaggaggagaatcaccatatcaccatttttattttgatgcttacactcatttattctgtttttgtaaaacagtttcaagaatttaaaaacccttccagttaatagagcttttgttattatattataattttgtaaacccactttgtttttcccactttaaagccacagggtcgactcatggatgatacctctat

SEQ ID NO: 16109 - DNA, 407 bp, Homo sapiens
  misc_feature (1)...(407): n = a,t,c or g
ccgnnnnnnnnnnnnnnnnnnnnnnnnnnnnnnnnnnnnnnnnnnnnnnnnnnnnnnnnnnnnnnnnnnggcacgagcggcacgaggatgtgcactgcttttcatgacaatgaagagacatttttgaaaaaatacttatatgaaattgccagaagacatccttacttttatgccccggaactccttttctttgctaaaaggtataaagctgcttttacagaatgttgccaagctgctgataaagctgcctgcctgttgccaaagctcgatgaacttcgggatgaagggaaggcttcgtctgccaaacagagactcaagtgtgccagtctccaaaaatttggagaaagagctttcaaagcatgggcagtagctcgcctgagccagacatttcccaaagctganttgcg

SEQ ID NO: 16110 - DNA, 403 bp, Homo sapiens
gcttcctggagtagggaattgtctttgccatttaatgtgaatgcataaaattaggggaaaaacccaagtggctaagagctgtgttattcctgggaagaactaccaatctagggcacacgtctctctgaattgttgattatgcgctttatgaagagatttttcaatctcgtgtgctttactttgtgtggtttagaccctctgacctagacttttatttttaaactgaaaaagttggtcttgtctatataattgctgcttttacataatttattttcccctctcaggacaaattctgtcttgctccatcttacagcttttccatgttctccaagaatggtgtggaacattttcattaaacagctgttgctgaggcttctgcttgaccttctgcgtgcccgaatgc

SEQ ID NO: 16111 - DNA, 1164 bp, Homo sapiens
ttaacttcaaaaattttattttagtctcatccatcaagggcataggatacctgcatcagctgcaacttctgcttttctcctttgcctctgctcctttacccttaccgagggatatcccatacaggaagccgcctacaaccaaaagctatcttcgccttctgggttgagtgctcaagccaagtgtggaaatgcaagtcactgcttcggcaggattgcaagctgcccaatataatctaagagccttctatgccagcctgcagactggagaaggttcactagtgtcacccacttgggttgtcacaggtagtaagcagaagctaactcatcaccgtagccaggtttctgtactttgtttccagacacgctacagcatagcacgttccaacatctgatcttaatctcattctgaagcacagtgaggaatcaagtgtgcttgttccagagctgattatgaactttctagaaaagcgggtcattatattgcattctttcataggagctcattatcacgacctgaaagatacctactttaccttccctccaaaatatcacatttgaaactaacccaaacttttgagaaagcaattttaatagggcataactttaagcagttgctaacttcaaacgtggaacgctttgatgactgctggctctcatgctgtctcactgacatccacgtactatgctttagtggccatcatcgcacaaggaaactggtttcatactgaagtttaagactgagttctacacctgtgggcttctacactacggaacgggagtgggggggctgaaaagcttattaatatactttgtcttagcccacactgcaaatacagcactattatggcatcttaatcaagcagagagctgttcacatgctttctacagtatctttataaataaaaggttcctttatccaccaaacaacacctgaaatgatctaagttcaaaacattagtatacaaggacctagataatgggacatgtgaaaacttagtacattcaatttaggttttggacacttagttggataaacaagtttatttgtaaatttagtcaacatacataattgacctaaaaacttcagtaaattttaaaaccacttggaaggccatctctataaaaatgattttcccaggacagtaaccagatgtaacctaaccg

SEQ ID NO: 16112 - DNA, 372 bp, Homo sapiens
ggcacgagaagattcaggtggaggtagctcatttagaatgtgttcccaggaggcacaaggaagaatgagagggtgagaggaacagccaataaagggttaatgagcagatttctgctgcggctgtgcattgttttactattgctgcaaaaccacctcaaaacctagtggtgtaaaacaaccacttattgtgctcacagcttctgtgggtcagaattgggataggcacagagtgcctctgctacacaatgtccgggatattggccaggagagtttcaaaggctagggttgcaagacagctagaggccagaatcacatagaggtgtctttagtgcctgctggttgatgcagacaccccagtggggcctcaacgga

SEQ ID NO: 16113 - DNA, 549 bp, Homo sapiens
ttttttgttttttttttgtcagaaaagccagtttttgttttatttgtaaagctctgccataaacttctaggcgtgtgccaatggtcacctgccacactcggcaccaggttgtccgtgtagccagcaaacagagtctggccatcagcagaccaggccagggaggtgcactggggtggttctgcccttgcctgctggtactgataacttcttgcttcagttcatctacaatgatctttccctctaaatcccagatcttgatgctggggccctgtgcgaggcacacagccagtagcggttaggggctgaagccacagggcgttgatgatgtccccaccatctagcgtgtaaaggtgtttgccttcgttgagatcccataacatgggcctgggcccatcgcttggcctccagaagcacagagggatccatctggagagacagtcaccgtgttcagatagcctgtgtggccaatgtggttggtgcgtcagcttggcagttagccaggttccataccttgaccagcttgtcccagccacaggagacgatgatagg

SEQ ID NO: 16114 - DNA, 906 bp, Homo sapiens
ggctctgggttcgttgacctagggaacaagattggatgaggcagatctttgagcccatgtgactatagaatttgctgatgatataattttacaataacaatggataggaattttacctctctttttattagtttaatattatttaatattatgtacataagtgttcactcgcctaattaaaaacattgagtaaaccaagtttttatatagactacccttgccatatgatgctctttttctctaataatatgcagtttaaatcctgaggaatcaatgcccagcatttcaccacatctgaactctgtgtgggcattcttcactcgcctacaaggggtaaacaaggctaccagaacttgaatttgacttatagggagctacccaggaaggggaaagcccttggggactttttccaaaacaatcttctatttgaactgttcatcagccaaagtagtccactgaggtgacaaagctttcagaaatacaaagatgggaagataaaggtaacactggcccacttggggctttgacattggattgggtggactgaataaacacagcctaggtggcctggggcttgagcctcagcttacttctccttgatacatagttcctggtctaccttctgaccctttttctaaaatagccagtgtctatttcactaggccatttacttacaagttcccagcttttagggaaaaaagagggaggggggagcatctagttttgaattagatatacatcttagaagtaatgagctattggcagctgttaaatcagattcagccacaaaccagaattctttcttgttgaacaagaccaatgagttagatgactttaataattccacttttctctccctctcttctcctcttcctgaaatcagagagatgagaacctactctttga

SEQ ID NO: 16115 - DNA, 943 bp, Homo sapiens
aattgatgcattcaaatatttattgagcagctaaggagatacaaaggcgatttaaaacattgtcaggtgaggcaaatgcacaagtaatagaaagcaaagggcaaggttcactgaatcacagcagtcagaagaaagtgctttagggaaccaagagattgtttccagcctgaagaggcatgggtggcaaatcagaaaaggggattgagattaaaatagaagacttcagtctggattgttgatgacactcagtatggactatatttgtctctccttttcctttctccccatctttgggcttaatttacatgtagtgcccaggactgttcaatgcgctttttctatacttgcttgcatttttgctttaatgtcttctacagaactaggtccttttggtgttttaggagttttttcctgtttcttgaaggattcttgtccttttgatcttggtgttgatgatggttttgagtcttttccattctgatttgacttttgtgcatttttggctggagtatctcgtatagatttcttcactggcgctttttcttcagcttcctcatcatcaaaatcatcatcatcatcatcttcatcatcatcctcttcatcatcatcgtcatcatcttcatcagcagcaagttttaacttttttctgtggaaccttgctaccacctccaggggcagaccgcctttcagatatacttaagagtttcacattctcctcctcttcatcttctgactccgcatcttcctcacagctactaagtgctgtccactaatatggcacggccctgaaacacacttcaatccttagaccactgttggttgtatttcaaagcccccagggaaaacgttggctgaaagacattttcaaggtggcagtgttatcttaattgaacggcctcgaatgtcatgcccctgctccacaatgtgcaaccatcctttgcac

SEQ ID NO: 16116 - DNA, 499 bp, Homo sapiens
  misc_feature (1)...(499): n = a,t,c or g
ggcacgagacaaacgcacttttgatgctggaaaacttcatagatggaaaatttttaccttgtagctcatatatagattcttacgacccatcaacaggggaagtgtattgcagagtgccaaatagtggaaaagacgagatcgaagccgcggtcaaggccgccagagaagcctttcccagctggtcatcccgcagcccccaggagcgctcacgggtcctgaaccaggtggcggatttgctggagcagtccctggaggagtttgcccaggccgagtctaaagaccaagggaaaaccttagcactggcaagaaccatggacattccccggtctgtgcagaacttcaggttcttcgcttcctccagcctgcaccacacgtcagagtgcacncanatggaccacctgggctgcatgcactananggtgcnggccccgtgggannccntnaatgctgttcannnnagnncacnnccccggtttcttcnaaaggncgaaaaaatatt

SEQ ID NO: 16117 - DNA, 896 bp, Homo sapiens
ttgattttattttattttatttcatttaaatttaacttaaatagcgacacttggataggggcaaccatactgtacagctcagtcccagagctttcttcctacagggacagcctcaccagctgaaccccaagcacgtttaattttcaaacaattcagttgaaagcagggccacaaagtacgtgtttctaaagtacaaattcagtttattcatctgtttatgacacagtacacaggaggcaaagtgtttcacatcatagacttcacttccaactccttggaatgttcatttctttggcttacaggagagactagacaggaaggcccaggccaatgcttaggcaactaaaatgaggttgggggtaatgctaacgtcacccctcacagggatggccacggggactgttattcgcaagctggttttctagacctggttagctggaagcatgggtgagcacccatttctggacgctcaggccgtgtcgggcttcagtcatctccaccacacaggtaacagcagcgctttctggtaatcgcccctaagtggtcttgctacaatggccccaggaaagaaaagaaacgtggtatcagaaaaaaagccccagactcctcaataacacagaagtagcctcaacgcacaatgaagcttctcccatgacaaagagaagactctgcaggagacctgccctgatacaaaagcctggaaggccacacccaaaccattgcccagggaagcctccaggagtgtggtcggaggaggtgctggggaagacactcaaggctccttaggactgtggggtggagggagtgcaaggtgctgaggattgacataggttagtgaccagggctgttcttactgcagcaaggtcctacaaacaccctaactttcctctctcgtc

SEQ ID NO: 16118 - DNA, 445 bp, Homo sapiens
  misc_feature (1)...(445): n = a,t,c or g
ccgtnnnnnnnnnnnnnnnnnnnnnnnnnnnnnnnnnnnnnnnnnnnnnnnnnnnnnnnnnnnnnnnnnggcacgagacttaatagtataacctaggcgttttgtttattatatataactttataaaaacatttttgttagctgcatggtgttctaccttgtggatgaatatcgttttacctaacaattcccttattaatgaatattatgcaattttcagtttttgtttatagtaaataatacgcagtgaatatttttgtgcctataactgagtgtgcattttacattttttttagggaggagaaattgctggtaaagtcctaaaaggaaatttcctaagtaacaaggtattatttttacattaaagagtagtgtatttttattaccaaatctgtcgtgtttattattgagaaatttaaaagtataaataggaggccaggctaga

SEQ ID NO: 16119 - DNA, 1616 bp, Homo sapiens
tttttttttaagtctataagctttattgatactttgcttttacagttcacaatgcattccacagatttagttcagtacagcttaaaccacaatggtataaatcttcattttgtaattaataatttcttgcataacaatgtttgatatttgcaaacaaacaacatttttggaagcattagattcagtccatagattctgtgacaaaattaactacagtcagtcagtctgtgcaatgaaattgatgttgttggagttctatgtgtgtggcatttcatgttgaaaacagatggtagtgctcctagaaatatttcttcttctagcttatgtgctttggaactacacatgtataaccaatgactgactctgaaatatcaagcactgtggggtggctggaaggtaaaggtctaagctttgtgaaacactatacatatataatctatatttacttatattggcaattaatataacagtaaaagtcacaatacacctagaacataccagaaaagcaagctttgtcattcctgctttaccggtatgatctcgtctaaacaaacatttcatttcagaaaatctgcatcaatctacacggaccatacacagtgcacaaactgaaaagggcttttttttttttttttctagctccaccatctctgcaacttgccaagatgcggcaagactatctgcaacaaagtaaaatatacaggttttttattccaccagtgcctcagatagataggaaaaagatatgattacggtttaaatccatacatagcagcttacaatacttaagatgatgaacacatggcagtcaagacaggtaatttttcctcacaacagtgcatggctaaaaataaagatctaacaacgatctgtgaaactgcactgcaacgtcaaggttcgttcttccctgaccctcccccgtataatcaaatgaatatcccctttaaagatgaactcctactaattattttggggcgttttcattccagctttgcgcttcaatcccagggatttttgcttggattttagccatagcatctttaacattcttatttgcaagtcctagataatgatctatctgtgcctgatgccgttcataaataacaggaacactgaagagtgaaatgagagccaaaatcagtagtgtcagaccattaaaccaaggcaccaacataggtagatcattatctaggacttgcaaataagaatgttaaagatgctatggctaaaatccaagcaaaaatccctggattgaagcgcaaagctgaatgaaaacgcccaaaataattagtaggagttcatctttaaaggggatattcatttgattatacgggggagggtcagggaagaacgaaccttgacgttgcagtgcagtttcacagatcgttgttagatctttatttttagccatgcactgttgtgaggaaaaattacctgtcttgactgccatgtgttcatcatcttaagtattgtaagctgctatgtatggatttaaaccgtaatcatatctttttcctatctatctgaggcactggtggaataaaaaacctgtatattttactttgttgcagatagtcttgccgcatcttggcaagttgcagagatggtggagctag

SEQ ID NO: 16120 - DNA, 379 bp, Homo sapiens
caaaggataaaaccaaagcacaccactatgcatagcttgtacccccatccacccacaagccaagatcccagccccactctactgtcagatagttacatagaggtcatgtcattgagggcgtggtccagctcctcgctaatggccttgtacttcagtttctgggcatagagctcatctggacaggcacaggaaccacagggaggaatgaggggacagagtgaagggtttcagaagcagatgaagagagggaatcattagaaattaggaaagtgtgactgtgggtctaataccacagttaggaaaatatctactctggcaaccatgactggacattttcagatctactctctcctatgaccaacttcctttcttgatactc

SEQ ID NO: 16121 - DNA, 985 bp, Homo sapiens
ttttttttttttttttttgaatgttctcaccaaatgtaaaacaggcccagtcaatgccatttattatacatgtcaaacagcttctaagaccgacgggctcccataataaggttttggggattttttgttttgtttttcattttcttttttgcatcaaacaggttcttccaaaagcctgctcacaaggtagacaaaaacataaatcttcaggaaaatgaaacaagagaagctgaaacaatctacacctgaatgttaaaaaactcatcagacacaaaccacaccaaacactcatcccatttaatttcctgttacatgctctgaggaagccaagaacatcaggccccagggcagcaatgctctaggattccagctcggaccccctctatatgacagattcatgcacacacatccacacaccatagaaccaggcagaaatacacatgcatgcacaggtggctagagaaccatagggcaggatgggaaaaagggctgatcaaggatatgcaatcaactggaaactgggacctagagaatgcttctgttgcaggatgaacatgagttaaaattaaaacaaaggcagaacacaggataaaggtgggatgttcagacaagaggtgggatagatgaagagataaagatgcagggggagttttgggaaagcagcctcagaaggggaggtttttctttattgggaactcaggtgggcagggtcctgtgactccagtgatacactgaggcagaagcaatatgccacagcattacctctgcaatctgtgccctctcccaaagtagagggaaaccatgagcccccaccctctatccctccccattgacactcttaagaactttcccattacccaaaaagaaatgaccccctactacacacacacacacgcaaagttaggtccagcataggccaaagtcaggccaagcacagaaagcctcagtaactcttcttggtggaaccaaagccagagaagcccac

SEQ ID NO: 16122 - DNA, 538 bp, Homo sapiens
ggaattcgcggccgcgtcgaccgccgcttgtgctgcagccatgtctctagtgatccctgaaaagttccagcatattttgcgagtactcaacaccaacatcgatgggcggcggaaaatagcctttgccatcactgccattaagggtgtgggccgaagatatgctcatgtggtgttgaggaaagcagacattgacctcaccaagagggcgggagaactcactgaggatgaggtggaacgtgtgatcaccattatgcagaatccacgccagtacaagatcccagactggttcttgaacagacagaaggatgtaaaggatggaaaatacagccaggtcctagccaatggtctggacaacaagctccgtgaagacctggagcgactgaagaagattcgggcccatagagggctgcgtcacttctggggccttcgtgtccgaggccagcacaccaagaccactggccgccgtggccgcaccgtgggtgtgtccaagaagaaataagtctgtaggccttgtctggtcgacgcggccgcgaattcc

SEQ ID NO: 16123 - DNA, 427 bp, Homo sapiens
ggcacgagcggcacgagcagaggtccaatacttgaatataagcagctccaaaaagattgattaggaatgtggaaaggagggaattctcaacaaaataattcgataaaatttcccagaactgaaggacttgaactgcaggattataagggcttaccaagtacccagcatagtgattgagaaatagacccatttaactatgtgtccttatagtgaaatattctggcactgttaaaaatgtaaagatttatgaatggcactaatatgaaattattgtatgtggtttttggcatacatgtatatatctgttagatatgttatctgggagtagaattcctagatcatagagcatgcatacataatgtcatagttttccaaaatggttggtatctggcaaaatacagtgcactggttaccagtctcaagaaag

SEQ ID NO: 16124 - DNA, 678 bp, Homo sapiens
  misc_feature (1)...(678): n = a,t,c or g
atgacnnnnnnnnnnnnnnnnnnnnnnnnnnnnnnnnnnnnnnnnnnnnnnnnnnnnnnnnnnggcacgagaaagtgctgggattacagatgcaagccaccatgcctgtccaagagccatatttatttggttacaacttatttagttgcttttgtttctgcatatttttccataccatagagctgaattttcaccaatgcaaaatttagataatttggcgggggggctgttactgtcattaggaagtactcgacatccagtgatgtcgcttgctgctaggtcttgcaccacctagtggcctgatttctaaatggcataaaagccttcggacggtgagtgttgtggtgacctgtctgaggcctttgctaatgcgagtatttcccatttttccttctgaaataaatgttaatagtgaaacgtcgcatatgcaagaattccattaaagcactgccgataatactggaatctgttaaaagcaaaagtgtgaagttaagatgttccagttattcatagagattcccactgagttaaaaaattatagataatgnatgagaataattatactaaagagcctaataagaaaaattaagaaattcactagtgaagccctaatttagagggaganctttngntttctgataaaaaaaaaggngccccntntaaggntttangtataaa

SEQ ID NO: 16125 - DNA, 3336 bp, Homo sapiens
  misc_feature (1)...(3336): n = a,t,c or g
gtcctggcaaccgctccggcaacgcaagccgctccgctgcgcgcaggcttgggctgcaggctctcggctgcangctgggtggatctaggatccggcttccaacatgtggcagctctgggcctccctctgctgcctgctggtgttggccaatgccccggagcaggccctctttccatcccctgtcggactgagctggtcaactatgtcaacaaacgggaataccacgtggcagggccgggcacaacttctacaacgtggacatgagctacttgaagaggctatgtggtaccttcctgggtggggcccaagccaccccagagagttatgtttaccgaggacctgaagctgccctgcaagctttcgatgcacgggaacaatgggccacagtgttcccaccatcaaagagatcagagaccagggctcctgtggctcctgctgggccttcggggctgtggaagccatctctgaccggatctgcatccacaccaatgcgcacgtcagcgtggaggtgtcggcggaggacctgctcacatgctgtggcagcatgtgtggggacggctgtaatggtggctatcctgctgaagcttggaacttctggacaagaaaaggcctggtttctggtggcctctatgaatcccatgtagggtgcagaccgtactccatccctccctgtgagcaccacgtcaacggctcccggcccccatgcacgggggagggagatacccccaagtgtagcaagatctgtgagcctggctacagcccgacctacaaacaggacaagcactacggatacaattcctacagcgtctccaatagcgagaaggacatcatggccgagatctacaaaaacggccccgtggagggagctttctctgtgtattcggacttcctgctctacaagtcaggagtgtaccaacacgtcaccggagagatgatgggtggccatgccatccgcatcctgggctggggagtggagaatggcacaccctactggctggttgccaactcctggaacactgactggggtgacaatggcttctttaaaatactcagaggacaggatcactgtggaatcgaatcagaagtggtggctggaattccacgcaccgatcagtactgggaaaagatctaatctgccgtgggcctgtcgtgccagtcctgggggcgagatcggggtagaaatgcattttattctttaagtttcacgtaagatacaagtttcagacagggtctgaaggactggattggccaaacatcagacctgtcttccaaggagaccaagtcctgggctacatcccagcctgtggttacagtgcagacaggccatgtgagccaccgctgccagcacagagcgtccttccccctgtagactagtgccgtagggagtacctgctgccccagctgactgtgggccccctccgtgatccatccatctccagggagcaagacagagacgcaggaatggaaagcggagttccttaacaggatgaaagttcccccatcagttcccccagtacctccaagcaagtagctttccacatttgttcacagaaatcagaggagagatggtgttggggagcccttttggagaacgccagtctcccaggccccctgcatctatcgagtttgcaatgtcacaacctctctgatcttgtgctcagcatgattctttaatagaagttttattttttcgtgcactctgctaatcatgtgggtgagccagtggaacagcgggagacctgtgctagttttacagattgcctcctaatgacgcggctcaaaagggaaaccaagtggtcaggagttgtttctgacccactgatctctactaccacaaggagaatagtttagggagaaaccagcttttactgtttttgaaaaattacagcttcaccctgtcaagttaacaaggaatgcctgtgccaataaaaggtttcggaattccgtcccctttcaagttttagggaaatttaactgaagtgtatacaaattagacattgctaatatgtacaaaagtattttatacagtttttgaacgatactagctatttgcaataaacaggatgttacaaaaacagtccaataatgcatttcctattaagaagcacaatacacaacataattcaattttattaaaaaataacttcaaaatgtagaacaatcccctttaggaagaaaagctatttctgtagttcactctgtcagtaaacacacaagttgaacgctgcagcagagggctgtccttttccatggagaaaagaaatgaggcttctagggcctatcttttctgggtaaaaattccacctacagctgagatgggcagttattgcctgtggtaggcagaatttgaaaatgcccctcccactttcaatgagctaatctccagaacccgtgaatatgatgagatgagacagtactcctgcaattatgttctatcgcacaatcaaccttaaaatatatctgtgggcttgagctaatcatatgcccctaaaacaggaggacgggagagagatatgaagcatgagaaagagcaggaaggctggtttgaagctggaggggaccacataagaaggaatgcaggcagccttgaggtgagagaggggcctccagctgagagccagcaaagaactgaattccgccaacaacctgaatgaacttagaagcagattcttccccagagcctccatgaaggaatgttgtcctgccaacccttatttcagcctttaagaccctgagcagagaatccagccacactgtgccagactcatgagctacagaactgctatgggtattgttttttaaactgctaaatttggggtaattttgtcacacagcaatagaaaactaatacactgcccaagggtaacttttcttaacctaattacatttggcagtttctgcttgggttctgaatgcatttttttcctgctgactagtagtaatattctccctttgcaggcaacctttggaaacctttaatataaatcatactgttttgtattcagtatccagtattgtttgtttggcctaagtcctgttttctaatgtactttctgtctattgacctggcaaacaactgaccaccttaccctgttttcataccttctttgggtgatagttttaatacattcaagggcaccctccctccaccaagggttgtcagctccctccaactgagggctcttttccacttcccaaatacaccagacaaggcctgtggtagggtggtgctgagctctacatcaggcaaccaatatgaatttcttctgcataactggattaaactggcactaaggtgattaagtacacttggggaacaaattcaaagtacagatt

SEQ ID NO: 16126 - DNA, 1110 bp, Homo sapiens
tggacaggaagtagaatttagtggtgagtaagcgcagttgtcgtctcttgcggtgccgttgctggttctcacaccttttaggtctgttctcgtcttccgttccgactctctctttttcgttgcagccactgaagatcctggtgtcgccatgggccgccgccccgcccgttgttaccggtattgtaagaacaagccgtacccaaagtctcgcttctgccgaggtgtccctgatgccaagattcgcatttttgacctggggcggaaaaaggcaaaagtggatgagtttccgctttgtggccacatggtgtcagatgaatatgagcagctgtcctctgaagccctggaggctgcccgaatttgtgccaataagtacatggtaaaaagttgtggcaaagatggcttccatatccgggtgcggctccaccccttccacgtcatccgcatcaacaagatgttgtcctgtgctggggctgacaggtgagcttggtctgggccttttaaggcagttggagtctctacattattaggcttgcattattttatcagagcatagaggtggccccagtgactcagccactatggctactagaaaagccaggctggcaagtgactttcagtggtcactcaggaccccttcctgcagatacaaacaaagcatgagtaagtcttagccaagctcttccccacaggttaggggaaacactggtgatgggagtagctcttcttgcttttagctgaatgacaaccatcttgccagcaggtagctgaagctggcagaggagcccagtggcgccttttcagtggttcttgggatgctccgcagccaattaagccgactgagttcctttcctcatggggacccagtgtgcgatggctgcacacagcagcttccttggtagtgtacgcagcctgttggttgtatgggttgctctaagggaccttggagacaggcctttcaggtggatgttcatgtttctgaccttgcactaccccaatgtaaggctccaaacaggcatgccgaggtgcctttggaaagccccagggcactgtggccagggttcaccatttggccaagttatcatggcccatccgggaccaagcttgcagaac

SEQ ID NO: 16127 - DNA, 3737 bp, Homo sapiens
taccatcactgtgtatgctgtcactggccgtggagacagccccgcaagcagcaagccaatttccattaattaccgaacagaaattgacaaaccatcccagatgcaagtgaccgatgttcaggacaacagcattagtgtcaagtggctgccttcaagttcccctgttactggttacagagtaaccaccactcccaaaaatggaccaggaccaacaaaaactaaaactgcaggtccagatcaaacagaaatgactattgaaggcttgcagcccacagtggagtatgtggttagtgtctatgctcagaatccaagcggagagagtcagcctctggttcagactgcagtaaccaacattgatcgccctaaaggactggcattcactgatgtggatgtcgattccatcaaaattgcttgggaaagcccacaggggcaagtttccaggtacagggtgacctactcgagccctgaggatggaatccatgagctattccctgcacctgatggtgaagaagacactgcagagctgcaaggcctcagaccgggttctgagtacacagtcagtgtggttgccttgcacgatgatatggagagccagcccctgattggaacccagtccacagctattcctgcaccaactgacctgaagttcactcaggtcacacccacaagcctgagcgcccagtggacaccacccaatgttcagctcactggatatcgagtgcgggtgacccccaaggagaagaccggaccaatgaaagaaatcaaccttgctcctgacagctcatccgtggttgtatcaggacttatggtggccaccaaatatgaagtgagtgtctatgctcttaaggacactttgacaagcagaccagctcagggagttgtcaccactctggagaatgtcagcccaccaagaagggctcgtgtgacagatgctactgagaccaccatcaccattagctggagaaccaagactgagacgatcactggcttccaagttgatgccgttccagccaatggccagactccaatccagagaaccatcaagccagatgtcagaagctacaccatcacaggtttacaaccaggcactgactacaagatctacctgtacaccttgaatgacaatgctcggagctcccctgtggtcatcgacgcctccactgccattgatgcaccatccaacctgcgtttcctggccaccacacccaattccttgctggtatcatggcagccgccacgtgccaggattaccggctacatcatcaagtatgagaagcctgggtctcctcccagagaagtggtccctcggccccgccctggtgtcacagaggctactattactggcctggaaccgggaaccgaatatacaatttatgtcattgccctgaagaataatcagaagagcgagcccctgattggaaggaaaaagacagacgagcttccccaactggtaacccttccacaccccaatcttcatggaccagagatcttggatgttccttccacagttcaaaagacccctttcgtcacccaccctgggtatgacactggaaatggtattcagcttcctggcacttctggtcagcaacccagtgttgggcaacaaatgatctttgaggaacatggttttaggcggaccacaccgcccacaacggccacccccataaggcataggccaagaccatacccgccgaatgtaggtgaggaaatccaaattggtcacatccccagggaagatgtagactatcacctggtacccacacggtccgggactcaatccaaatgcctctacaggacaagaagctctctctcagacaaccatctcatgggccccattccaggacacttctgagtacatcatttcatgtcatcctgttggcactgatgaagaacccttacagttcagggttcctggaacttctaccagtgccactctgacaggcctcaccagaggtgccacctacaacatcatagtggaggcactgaaagaccagcagaggcataaggttcgggaagaggttgttaccgtgggcaactctgtcaacgaaggcttgaaccaacctacggatgactcgtgctttgacccctacacagtttcccattatgccgttggagatgagtgggaacgaatgtctgaatcaggctttaaactgttgtgccagtgcttaggctttggaagtggtcatttcagatgtgattcatctagatggtgccatgacaatggtgtgaactacaagattggagagaagtgggaccgtcagggagaaaatggccagatgatgagctgcacatgtcttgggaacggaaaaggagaattcaagtgtgaccctcatgaggcaacgtgttatgatgatgggaagacataccacgtaggagaacagtggcagaaggaatatctcggtgccatttgctcctgcacatgctttggaggccagcggggctggcgcctgtgacaactgccgcagacctgggggtgaacccagtcccgaaggcactactggccagtcctacaaccagtattctcagagataccatcagagaacaaacactaatgttaattgcccaattgagtgcttcatgcctttagatgtacaggctgacagagaagattcccgagagtaaatcatctttccaatccagaggaacaagcatgtctctctgccaagatccatctaaactggagtgatgttagcagacccagcttagagttcttctttctttcttaagccctttgctctggaggaagttctccagcttcagctcaactcacagcttctccaagcatcaccctgggagtttcctgagggttttctcataaatgagggctgcacattgcctgttctgcttcgaagtattcaataccgctcagtattttaaatgaagtgattctaagatttggtttgggatcaataggaaagcatatgcagccaaccaagatgcaaatgttttgaaatgatatgacccaaaatttttaagtagggaaggtcacccaaacactttctgcttttcactttaagtgtctggccccgcaatacttgtagggaaccaggcatggatcttgtttactgtggattattttaaatatccacagtactcacttttttccaaatgatcctagtaattgcctagaaatatctttctcttacctgttatttatcaatttttcccgagtatttttatacggaaaaaattgtattgaaaacacttagtatgcagttgataagaggaatttggtataattatggtgggtgattattttttatactgtatgtgccaaagctttactactgtggaaagacaactgttttaataaaagatttacattccacaacttgaagttcatctatttgatataagacaccttcgggggaaataattcctgtgaatattctttttcaattcagcaaacatttgaaaatctatgatgtgcaagtctaattgttgatttcagtacaagattttcctaaatcagttgcctacaaaaactgattggtttttgtcacttcatctcttcactaatggagatagctttacactttctgctttaatagatttaagtggaccccaatatttattaaaattgctagtttaccgttcagaagtataatagaaataatctttagttgctcttttctaaccattgtaattcttcccttcttccctccacctttccttcattgaataaacctctgttcaaagagattgcctgcaagggaaataaaaaaaactaagatatt

SEQ ID NO: 16128 - DNA, 474 bp, Homo sapiens
  misc_feature (1)...(474): n = a,t,c or g
tgcctatgaaacnctttnnnnnnnnnnnnnnnnnnnnnnnnnnnnnnnnnnnnnnnnnnnnnnnnnnnnnnnnnnnnnnggcacgaggttcctggaagctctgggctacacctggcatgacacttgctttgtatgctcagtgtgttgtgaaagtttggaaggtcagacctttttctccaagaaggacaagcccctgtgtaagaaacatgctcattctgtgaatttttgaaagtcaacagttcaggagaagagaaggaatttgaagagaaaaaggaaaattaaaattactaattaatttttagattcaatatttatatggagttttgaaaaataatagtggccctgaaggaataaattccagctttaaaaaccaagtctgaggaaatatttggcttcataaagtaaagagacggtttggcatttattattactttttcctgtattttatgcccataaaataagctttataaaaac

SEQ ID NO: 16129 - DNA, 1304 bp, Homo sapiens
  misc_feature (1)...(1304): n = a,t,c or g
tatgacnnnnnnnnnnnnnnnnnnnnnnnnnnnnnnnnnnnnnnnnnnnnnnnnnnnnnnnnnnggcacgagaaaagacagacgagcttccccaactggtaacccttccacaccccaatcttcatggaccagagatcttggatgttccttccacagttcaaaagacccctttcgtcacccaccctgggtatgacactggaaatggtattcagcttcctggcacttctggtcagcaacccagtgttgggcaacaaatgatctttgaggaacatggttttaggcggaccacaccgcccacaacggccacccccataaggcataggccaagaccatacccgccgaatgtaggtgaggaaatccaaattggtcacatccccagggaagatgtagactatcacctgtacccacacggtccgggactcaatccaaatgcctctacaggacaagaagctctctctcagacaaccatctcatgggccccattccaggacacttctgagtacatcatttcatgtcatcctgttggcactgatgaagaacccttacagttcagggttcctggaacttctaccagtgccactctgacaggcctcaccagaggtgccacctacaacatcatagtggaggcactgaaagaccagcagaggcataaggttcgggaagaggttgttaccgtgggcaactctgtcaacgaaggcttgaaccaacctacggatgactcgtgctttgacccctacacagtttcccattatgccgttggagatgagtgggaacgaatgtctgaatcaggctttaaactgttgtgccagtgcttaggctttggaagtggtcatttcagatgtgattcatctagatggtgccatgacaatggcggtgaactacaagattggagagaagtgggaacggaaaaggagaattcaagtgtgaccctcatgaggcaacgtgttacgatgatgggaagacataccacgtaggagaacagtggcagaaggaatatctcggtgccatttgctcctgcacatgctttggaggccagcgggggctggcgctgtgacaactgccgcagacctgggggtgaacccagtcccgaaggcactactggccagtcctacaaccagtattctcagagataccatcagagaacaaacactaatgttaattgcccaattgagtgcttcatgcctttagatgtacaggctgacagagaagattcccgagagtaaatcatctttccaatccagaggaacaagcatgtctctctgccaagatccatctaaactggagtgatgttagcagacccagct

SEQ ID NO: 16130 - DNA, 8747 bp, Homo sapiens
cgtctgaaggtcacgagccccgccgacagcccagacccagtccgggctagcccgaggcctccctggaggtggacggtttcagtccacacatactgggaccccagggagacactcaccagcatccgagcctgccatgtttcagaggcaggtcgccgccggactccgacgcggccgggaaggcgacggtgtcctggaaggaccgatccacgcagaccgacactgggcgcggacgcacgaaccaaagcgcgggaaggaggcgtgaagaaggacggacgttaaagagcttctcgccgctgattggtcatcagaggagcacttccttcacaggacgtgaaacgggggcggtttgggaagtttagagaccattctccgccgaccaaaacccgtcaaaggattatcagacacgcgggtcggacggtccacatcagccggcagcccgggcgggtcccggggtgcgagcagcgcacttccggtgagctatttcgttttgtatccctccgccgacgtcaacgggaaagtagtgcggaccgctctctcggtggtccggggtggtacagccacgtgacaacgccaggccccgccttccccctcttttggttacagacgtgagggctctttggagacgtaaacatctccgagtggcgagggtgggcggggctagggcttgggaaagggcggggtggcttgcttgaggtgtggaaagaccagaagaaggtgaggtcaagagagtgcgaatgaggcattccaatggtgggtgggccctgacctgagagagtggcgcggggaggggtgaaagcgcggcgatcctggaacgccagcgggcgttgcggcctatgcgcgaggggcggggcgattaggtcatagagcggctcccagcgttccctgcggcgtaggaggcggtccagactacaaaagcggctgccggaaagcggccggcacctcattcatttctaccggtctctagtagtgcagcttcggctggtgtcatcggtgtccttcctccgctgccgcccccgcaaggcttcgccgtcatcgaggccatttccagcgacttgtcgcacgcttttctatatacttcgttccccgccaaccgcaaccattgacgccatgtcgggttattcgagtgaccgagaccgcggccgggaccgagggttattcgagtgaccgagaccgcggccaccgagggtgagtttgggagccgagctgtcaggccaggcgggtggggggatgggagggcgggtcagggtggcggccggcgggggctttgcggcttggacttggcctttccgggctatcttgggacttcctttcccgaacgttgcgccattttgatattcacgtcacagtgattggaagagatttgacggtgtagtgtcttcaagcttgctttttgtgtggggatttggggagctgtcggggcggctgccatttggtagctgttgagggagttgagagggagcgtattgtgcggatgaaagcggacgcttcgaggcatgacgaaggaacatctgttaggtgcggcgtttcggtaggtgtttttggggtggccgggcattctgtgggagcgaggggaccacttccaaagccctggtgctgttggggtaggagggcggccggcatcagccatgtggctgagtcgcgagtacaaaatgccggcctcggacatggcggcggcgcctttgttaccccgcccggcggaggagctcaaaatggcagcgtcgagaaaatgtggcgcagagagaaatgcgagacaaagggggaagcgccgccccagcgggaacgccgcccggccgactccgcccgggccgggactcctcccccggtagtcgccggctcctccttttcttttttcctgcgttatataattttgattcgttgatccggagctctaccgcggcgttcccccagctgggtttgctagcagaagtgtttctgagaaaacccttgttctgttatcgctgactgtactgtttaggttcttaccatcaaagctgtttggttccaaaacggccatatgagtaacatcgtcgtgatgctcttcggttcatgtagccttgttattgctgatagtgaattgctaggctggtggggaagattacagtaaccacaagaagtggtgtgtgccagaatcccaaattctggcatgtgggtgacaagtttccgacatgataaatccccggcttccgacatgataaatcccaggctgtttacatgacctaagtaatgtgtacttgggactacgggaaatgttaactgtggctgttgagagagagagagattttcacgaaggacagtgctaggtttacctctcgaagtctgttttcagtggtttttagcttgtgccaatggatgacaaatctatacagaaacctgggtatagcctaaagaaaatgtgaataacgttttttttcattccaggtttggtgcacctcgatttggaggaagtagggcagggcccttatctggaaagaagtttggaaaccctggggagaaattagttaaaaagaagtggaatcttgatgagctgcctaaatttgagaagaatttttatcaagagcaccctgatttggctaggcgcacagcagtgagtaaattcatgtggcttcatcaggctgtaactcgatcgtggattctagtaaatgaaattctgacaggtgttttgcaaataactcaattttggtagagttacatgttctgacttcataattgggaaaggtgtgactcacttttggaatataggtggctttgggatttttacttaaattaggttgagtataacaagaaatttttttttcataatagggtgttcataggtgggtcagattaaaatgaaggctactttaactagttactaaattatgaagttaggggcttatcaattacgtatttacgtagggtggtgtcatgaatttagactgtatattgtttgcagcaagaggtggaaacatacagaagaagcaaggaaattacagttagaggtcacaactgcccgaagccagttctaaatttttatgaagccaatttccctggtaagtgctacttttcagttctacctacccgtgtttttgtttccacctaccccctctttttcttggcatcactaatttttactaaatatctgttactaattatagcaaatgtcatggatgttattgcaagacagaatttcactgaacccactgctattcaagctcagggatggccagttgctctaagtggattggatatggttggagtggcacagactggatctgggaaaacattgtctgtaagtttgggagaactcttgagttgatctgatatatgcaagaaaatgtaatggtaatttaaaaacgagtattttaatgtgatttctgtttgtccccactttcaccctaaatagtatttgcttcctgccattgtccacatcaatcatcagccattcctagagagaggcgatgggcctattgtaagtatatattttacttttattagaagcataatgtgtagattttagactacatagctaaagatgtaatcatttgtggtggttttatatagaggttagctcatcctattcagctggagctgttttgggtattggacaacacatgaagaaaggatctgctagtataataagttagcagtttaaaactagtaccaggtttgtgctgaaagctgtttctcttttccttagtgtttggtgctggcaccaactcgggaactggcccaacaggtgcagcaagtagctgctgaatattgtagagcatgtcgcttgaagtctacttgtatctacggtggtgctcctaagggaccacaaatacgtgatttggagagaggtatgtaatgaaaagggttttatttgtcattggtgctaaatatcctaggtattgtagttacacttacgtatttaattaaaggtgtggaaatctgtattgcaacacctggaagactgattgactttttagagtgtggaaaaaccaatctgagaagaacaacctaccttgtccttgatgaagcagatagaatgcttgatatgggctttgaaccccaaataaggaagattgtggatcaaataagagtaagtgtcctttgaaatatgtgatcaaactgaattgtgtttcactcttaagagtctgatactaatttttccccccaaaatccattagcctgataggcaaactctaatgtggagtgcgacttggccaaaagaagtaagacagcttgctgaagatttcctgaaagactatattcatataaacattggtgcacttgaactgagtgcaaaccacaacattcttcagattgtggatgtgtgtcatgacgtagaaaaggatgaaaagtaagttttattaactctgttatatttgcttcctaacaactttgctgtaaaattgaggatcattgtttggtgagttgttttaggttatttcagttggtgtgatttcatttagttagcctactaatcctgaaaatttcttgaatcttcaaataatggccgtcaccatttatagctttccatatgaagaattgaattcatgtctccctggttgacttaaggaccaagggtcgaactgctcgataagtggattagcaggcgtcttccttccttttgacctttccagccatgtaaattgaacttaatgttttgctgaccataaatgtgtggccctagcaatggtcttttaaaactcaggattttcctttctctctcctattattagacttattcgtctaatggaagagatcatgagtgagaaggagaataaaaccattgtttttgtggaaaccaaaagaagatgtgatgagcttaccagaaaaatgaggagagatgggtatgtgtgagctcctccttgaagcagattgattaaaacagcttaggaagggcaaacttggatcacgagcagtggatttttttcatatctgatagtgaatttaactttttcatttctggcgaaattaaagagatctgtgaccaaaagtggtcaagcactggagtctgaggttttcaatgtgagtttaataacacaacttgtcttttaacttaggtggcctgccatgggtatccatggtgacaagagtcaacaagagcgtgactgggttctaaatggtaaatatttcaaatgaagtatttttcccccttacttaacctagctagaattcaaacatggaaaagctcctattctgattgctacagatgtggcctccagagggctaggttagtacaaactcgcattcatggcttggtttcccagaagatctccatttaacttttttaaagaaagtttattgctttctttaacctgcattttttctaagttttttttcacataaaggtgctgtctttgtggcaaggcctaggcatgacaatcggaggactcgagggggatggaggactagtgatcggctggctgcttccagtcgattagagaggtgaaaaagctgaacgtgtgccagtaatcttcaaaaggcagaacatatcacctctgccccgtaaactgttctctccgagggaaaaaatggaagttatcctcacagttcactgccgtggtatttcttctgtcccatgctttgcatgactgccatggtacagccttgtttcaaactgttcactgtgatctgtgggtctttgagtttcagtgagtttgctgaaatgtcgaagaagtagttccaaacttcaatgttcaatgaaatttttgttcaagtttgaaatggagagagcagctttaaaaggtactaagccttttacaaattggtgagtactggcacatgagatctagagcaggagcaacttctcacacatagtaagtgggaaaagaaagtgctttgaaagttcctccctcacctacacagtagtcgtcatgtcgagacctgccagagagagacacattctcaagtgaatcctgggcttcttggaagcgcttgcctagacgagacacagtgcataaaaacaacttttgggggacaggtatgttttcttgcagctgcggttgtaaggtcttggcaagacaagcagtgtggccagaattttgaacttctgatgaatgtgtaatgcaaaggaccttgtacatttttttgtttcaaggtcctcaaaatgagcacatgaagaggttgctgtgaaactttaagtggccctactgcgcagaagcattcagatgtcacttgatgatctgtaagggaacttgctgatttgggaatgtgcttagggaacacacattccttttgacagggtctgtccactgggtgggtgatgaattatacagatgacatgtgcttttttttcttttttcaacctcaatggtattcctacaggaaatgggataaccatttttaactgtattttttgcagcccgtaccttcttggggaatacaattgtctaactttttatttttgggtctgggctgttgtgggtgtggcaaaactccgtacattgctattttgccacactgcaacaccttacagatgtggaagatgtgaaatttgtcatcaattatgactaccctaactcctcagaggattatattcatcgaattggaagaactgctcgcagtaccaaaacaggcacagcatacactttctttacacctaataacataaagcaagtgagcgaccttatctctgtgcttcgtgaagctaatcaagcaattaaatcccaagttgctttcagttggtcgaagacagaggttcaggtaaggatgactgataggaaatgttggtagttacgagtcacatcgttgtctacaaatccatttaaatggtattggagggtgagtaaaaccttgaatgtgaaaacttaagctgaaaaattgtaaaaacatttcacgcctaccatgaatagatctgtttctttctgtccacaatgatttgtgtcatagacataattgatcaatttgcaattgttttcttgacaggtcgttccaggggtagaggaggcatgaaggatgaccgtcgggaccagatactcctgccgggcaaaaggggtggatttaatacctttagagacagggaaaattatgacagaggttactctagcctgcttaaaagagattttggggcaaaaactcagaatggtgtttacagtgctgcaaattacaccaatgggagctttggaagtaattttgtgtctgctggtatccaggaccagttttaggactggtaatccaccagggacttccagaatggttatgatagcactcagcaatacggaagtaatgttccaaatatgcacaatggtatgaaccaacaggcatatgccatatccccggctactgccagctgccccctatgattggttatccaatgccaacagggatattcccaataagactttagaagtatatgtaaatgtctgtttttcataattgctctttatattgtgtgttatctgacaagatagttatttaagaaacatgggaattgcagaaatgactgcagtcagcagtaattatggtgcactttttcgctatttaagttggatatttctctacattcctgaaacaatttttaggtttttttgtactagaaaatgcagggcagtgttttcacaaaagtaaatgtacagtgatttgaaatacaataaatgaaggcaatgcatgggccttcgcaataaaaaatatttgaggactgaattaagtggaaattgtactttattttatataatgtcatgtaaaactttgctagtatggttaaatgagaaaatagtaaaatagatacaaagtcatctatatagtgtgagaacgtgggtgactttttcaaagtttataatttaaaaagctccaaataactggctttttcaagagacttatactcatgctcttggctatactgtgaattactgaaatgttgaacaaacctgtgaaagacatacattagccctttaagatggccaggagctaagcttgagtctcctttactgaatttcgttcttagtgcaggttacttgtagattctagtcttcacaggctccctggggctcttaactagtcacactgggagtcatgaatgtctttccaataattcagggaattctagagatcctcaaactgtaaggtctattcatactcaacacaaggaaaaaacctcattaaaattaatgactaatcaggaggcaacgtaaccaaaagcacagtgaatgaaagttttcatggtaggttcaacatgggtttattgctagaaagatccaggggatagctttaggtttaacttcggctcaccaacgtaactttctaatcatttatttcagtaatagctagaagtgggtctgaatgttttcccagagtctgatacgtgtttttttttgcccagaagagaggtcttcaggagacttcatttaaattctgattattaaactgaggctttaattgatgttaatgccttatgtcaaatgtaaagttagaatttgctagggctgggatagggagtgatatttctaggacttagacattgaaaactaattcagcctgtagtaacctggatggttttcaatggcatggttagtcaaattcatggttttaaacttagaagcagctttcgggggagagggtaggttggagcatttattacatattttactgtttaatgtcttaaccgtgggccttttaatttgtaaacactgaaatgattgttgggctgtggaaaacatttacctatttaccttggaagttttaaaagacagtccactttttagcatgtgtgttgtgtccagcctgtggtcgtcttaactaataaatgtgatttttctccccaaaaaaaaaaaaaaaaaaaaaaa

SEQ ID NO: 16131 - DNA, 928 bp, Homo sapiens
gtcaccgagtcgttggcgctgtcatggcgggtgtgctgaagaagaccactggccttgtgggattggctgtgtgcaatactcctcacgagaggctaagaatattgtacacaaagattcttgatgttcttgaggaaatccctaaaaatgcagcatatagaaagtatacagaacagattacaaatgagaagctggctatggttaaagcggaaccagatgttaaaaaattagaagaccaacttcaaggcggtcaattagaagaggtgattcttcaggctgaacatgaactaaatctggcaagaaaaatgagggaatggaaactatgggagccattagtggaagagcctcctgccgatcagtggaaatggccaatataattattaagtgactttggtgtgttcatgggaaactgatgtaattaaatattctgttatattaagagcgtgttcttattactgacattttgtaatcaagaaaagtgatatagaaaatatgtaggagactgttaaaattggtgattatggtaatatggtcatgtgaatcaatttttgatttataaagtactcacacaagttgtttcaaagatgatatttctgtgaacagagaggccatgggaagatttgaaaattattaaagaaaaattcctacagattttcaatgcagagaccataatcaaaaagtaaactttctttagtagtatgttcaatacatcatttaattttttaagttatcctgaagaaggaaaggtccttaattattatagtctaaacaaatttatagattactgtttgaagtaaataatacgagtgaatattttcaaatgtgataaaatagcacaagtggctggtgataaaatttgaaattatggttaacctcagctgtgatcttatgtatgtaaagtgaaatttaaatagataattataggttgatt

SEQ ID NO: 16132 - DNA, 1515 bp, Homo sapiens
  misc_feature (1)...(1515): n = a,t,c or g
tttatgcaagaacaaatttaataataagctgtatctataattccagactttttttccctgcaaaacctgggaaacaagagggatgaaggaatataaacatcctaaaagcctcatattgttgaaggagactttgaaattcttggcgttgatagatacatgctcagatatttattaaacatttacagataccaaccagcaaaataaaaagggaattggaacttctgtacctcccttttcttttatcatgtgggaaagtctcaaagccctggcactgggagctgctcagaagggcaagggccaccatgtgcccccagcttccccccacccccagcacagggccaggaagccactgctggtgggctccctgtctgctgcctcccgaggcagtaggtcccagcgaggtggggtggtaataggttgggctgggcagcagattagcaaaccctctcctccccgcaaggaaataacccaggccaagataagactagccataaaacaaaacaagggctgatgtagaaaaggattggatcataagacacgagcaagccatagcatcactcattacacagagctgagctttactgctcccagcactacagtcctgggcctgacaccagccccaggcatcggagaacccaggtgccacccccaaaaaacagtgtcacagaactaaacattatcccacactgcccccaggtgaacaacagaccccaggcaccccaggagaaaatagagaaattaggatcctagtcacaaaggtcacagggactttggtggcccctggtcacatgtgtgaaatcttggcaatgtgtaggaatcagtgagtgcgcgctgagtgtgtgtttgtctgaaattagaaaatacccaagtgtgggcctgagtctccctccctaccccagggcccagacttgcccacccagggccctaaggcaggtgttgggcctcaccctcaaccgtggctccctgagggcaagggctagaatttcctgagatggagagtgagtctccccgcttcagctaaggattcctggggcccccacacaggcctcttgaaggccctgccaagtctgggtgtcccactcctgaggccagctccgtcctccctgtgggagtctacccagggtccagctcagtgctctgcctccagggggcgccaaagggacacttcttaaaggctgctggagttggggaggagagctgagtgtaccctgaccgcacagatggtcatagctgaacgaacctgaaggctggcaagttcattcctacctgacaggagatggctaaggctcaaagaaggtgatcccaggcgagtgcagaacntggctggggcccagcatggagggcagcctggcccactatggctcactttgctatcctagggccccagggaaaggtatacttctttccacccaggaaagcctggccccaggacagctggctggctgggggaaggaggaagaagaccctcttgctccagaaatggccaacacagcaaatgcccaaacaactctttgg

SEQ ID NO: 16133 - DNA, 814 bp, Homo sapiens
tttttttttttttttttaagttaattgttactttattgtagaggaaaaatatcctgaaatatttattaaataacaataattcctgacaaaatcattcttcgggatgtgttagccaaacaatctggtcaaatggagtaagctgtccctcaccccagtaataagctccattcatattgccataaaccacaggaaaatccaaaagattttctaaatgggcttccaaatttctggcacagatgcccttattgagcccagaggtaaatataaacaaattgaaattagagagaaattagaaggatagctgagaggaaaaaaatgttaacaattggtgaatccagaaggaagggtatatgggggttcattataccattctttcttaatttctgagctacttaatttctgagtaacttaatttctgagttacagttgcttttgggtgaccatgttctctttctgacttgcctaaaaaatatgttcagttatttcttttcaaacctgaaatacaaaatcagctctttctcaggtgatgcccccctttctactatctacaaaaacttccaaagctttctagaaagcttaaattaaggggctacagtacactgatatggttttgttgttcttggaaggtgttggactcaaacgctcatcgaaggtctgtgatggtcactgctctgtccacaacagtcacgtggctgcagctacagaacagaggtggatccttgctgtgtggatgaaatcctttctggcgacaggaagaaatctcctctagtccatggtcagttagtttaaagaatccagtttcctggaactttgg

SEQ ID NO: 16134 - DNA, 652 bp, Homo sapiens
ttttttttcactcatccaacagttatttattgaacgccatggaccaggcaccgtgcccagcagctgggatgcagcactgaacacgagacaagcccctgccctggaggggcttacatcccggcagggtaaacagccagtaacttcagaaaccaaacatccagtacgtcagagtgccatgggaaaggtacgctgagcaagggcgggcagtgccagggctggggtgccactgtacagggtgatggggaggccctcctccctggagagggcggcatgatcctagtgggccgaggtcaaccgccagggtcaaacggaacacaacccactctcaggaagacatccctaacacaaatccagggactttgtttcttaaccttaaaattggaaacacttcttgctaccagggatggggggtggggctcagcgtttggggaaacggagtgggagtcttttgctgaacagacttttgttttcttaagttttgaactacatgaatgtatttccttttttgaaaggaaaattgaaataggaaaaaattttaagtcttttggaaagaattaatcattttcatggaactgcttccctataggggcctgttttcgtatctgccaacttccactgaaacacgcagatggagaaccctccagtgctcccg

SEQ ID NO: 16135 - DNA, 2396 bp, Homo sapiens
tgcaggggaggccgcggcggggaaaatggcggacggaagccgggagacgagaagcctgaaaagtcgcagcgagctggagccgccggaggacctgaagaagaagcagaaaaacctgtgaaaactaagactgtttcttccagtaatggaggggaaagttccagtcgcagcgctgagaagcgatcagctgaagaagaagctgccgacctcccaacaaagcctacaaagatctccaagtttggatttgccataggtagtcagacgacaaagaaagcatcagccatatccatcaaacttggatcaagtaagcctaaagaaactgttccaactcttgctccaaaaactctttcagtagcagcagcttttaatgaagatgaagatagtgaaccagaggaaatgcctccagaagcaaagatgaggatgaagaatattggaagggatacaccaacatcagctggaccaaactccttcaataaaggaaagcatgggttttctgataaccagaagctgtgggagcgaaatataaaatctcatcttggaaatgtcaatgaccaagacaattaaatgatgttttgaaattggggtgtggggtgggtgtaaacttaaaaggaacagtttccttttttaaagaatggtataagactatctttggagccgctttttttttctttttcatttttttaaaagattgagtggtacactcaataaatgagagtttgaaattagaggtaatttatgttttatatacagatttcaagacatttgctaattttgtagtttcatgtgattagtttccaaaggttacagataataaagaaatcagaaatggtacctttttaagaattgcatatttttttagacacaactattagcacattaagagggaagcaaagttactgtctatttaaaactgcaagcagttaactctcttaactcccttattacctaaacttgtctggctcccaggaacagccttatagagagagggagtattgtattgggaagaaaatgttactgaactattgactgaaagtaaatttagataaaatacagcttttttccttatgggcatttgttttgtttcaagtcatcataaactaggtattgcattgctatccgtggatacagacgcttagctcttaaaagattttttttttatgtaaactgttgaatatttgaaatagtccacttcaccttaatgggtcttgtctatcttcattagtcttcaaagaaaaaccatttgctaccaaagtaaatcagtattttgaatgtgcttctcttgttttttgtttattagctagttcctgtaagcatttccaccagaacttgaggcaaatcgtaaggaagctgtttcttttaaaacacaaaccaccaccaaaaatttaaatgtacatattgcttaagtatttggctgtttttattttttaaaaggtataaacaccaaaaaaaaaattaacattgtatgaagatggaaaataagaagatgcactttctgtaactttgtctaaggatttaaattactaacttatgaactccaatttgaattgaacttaactatcggctttcttactggtaaaattatatggtttattttaaatgcgtacatattgaccaatggcctctgaaaaagcacattttagatactgaaattgaaggaaagaaaatgcatcttcaaacattttttggaatctcaccacatatactttgttagatttgtgtattgtagggtgtttgttttgtatttttgtattgtatatgaactttttttaaatgtgacagttaaacacatctttaaaagcatagtcacagacaaaagcatacagtataaaaatttccttgaaaactcctacaatattatatttggaggcagcttcagactgttttattggtggtagctgcttgctgaggtcttttagttggtaataactccagagaagcagcctgtgtatattcctaacactttgttcactagcatttaagtttagaataagcccaagtaagacaatggaaatgtatatagaactcttagttcttacatgatttaattatatcgatacatgaatttaacttactttaatgtaggcaaactatcaattttttgtccattttcctgtttgttaaaataacatacctctcctacgtattattttcttgacccaaatgaaatattaacctaaggtcaagctgggagagagaaatgactgagatgaatgtctttactaaagtaccaataaatttgtcaaactcaaaaaaaaaaaaaaagtcgacgcggccgggatttagtggtagtagtcgtcccgtgaattctgaccggttccgttggtgtaccgtcttcccttgatgaggcgtttggtgctgtgcgtatcttgtcagatcgtgtcctgggtttttgttttcct

SEQ ID NO: 16136 - DNA, 500 bp, Homo sapiens
cgtaggcactctcgcagttcctccgccttcaggaaggtctttttggcaggggccctacggtgcgcgcttcggtcctggaggccttatccaagcctcctctccatcagcgccacccgtctggggtccgaaagagggagctttccctctgtcccccagcctttggactgtcaccaaacaagccattcgttcaccaaatacttattaagcgcctaccaggcactatcctcaattgtcctgtgatatttacaatctagaaggcaggagagagaactaagaacagagagcatgttctgagatgtctgctgtgtttgcagaaagaggcttctccccaggaccaggattccacgaaggcagcccttttctagatggagaaaatagaacctgaaggcagccgtttccctaaactgctctcgctcatgtctgtcagagaaaggaaatgaagcagtgaaagcatcctcccaaaagggacttttaaatccttctacctgggctgaactaca

SEQ ID NO: 16137 - DNA, 733 bp, Homo sapiens
  misc_feature (1)...(733): n = a,t,c or g
gcccttacgaattcannacgactcactatccnggaatttggccctcaaggccaanaattcggcacnaggtagctcgatgatgcanactctgttgacagtgacccagaggctcgggaggcacctgccacccaggcctcatctactactcagctgactgatacccaggttcnggcanctgaaaacaagantctagcagctgacaccaagaaacagaatgctgacccgcaggctgtgacaatgcctgccactgagaccaaaaaggtcagccatgtggctgatacnaaggtcaatacaaaggctcagganactgaggctgcaccctctcaggccccagcagatgaacctgagcctgagagtgcagctgcccaatctcaggagaatcaggatactcggcccaaggtcaaagccaanaaagcccgaaaggtgaancatctggatngggaagaggattggcagcagtgatcagagtcangcttctggaaccacangtggccnaaaggtctcaaagntctaatggctcaatggcccgcaaggcttcaaggggtccatancttttgggcccncaaggcatcaaggaccggtttggctgcttgggcccngaaaccttgcncnccctgaaatcacctaagcccttagggcnaaggtccccttaancctgccaagctccatnattccaaaagcctgaaacacnacanctcnggattntgnccttttnaagganggnaaatnattt

SEQ ID NO: 16138 - DNA, 402 bp, Homo sapiens
  misc_feature (1)...(402): n = a,t,c or g
tggagtgagtggacgcactcgggaattgtaggaggacgaggctcagctcttgccaggccaaattgagacatgtctgacacaagcgagagtggtgcaggtctaactcgcttccaggctgaagcttcagaaaaggacagtagctcgatgatgcagactctgttgacagtgacccagaatgtggaggtcccagagacaccgaaggcctcaaaggcactggaggtctcagaggatgtgaaggtctcaaaagcctctggggtctcaaaggccacagaggtctcaaagaccccagaggctcgggaggcacctgccacccaggcctcatctactactcagctgactgatacccaggttctggcagctgaaaacangagtctancanctgcaccaagaaacanaatgctg

SEQ ID NO: 16139 - DNA, 251 bp, Homo sapiens
  misc_feature (1)...(251): n = a,t,c or g
gctagcagctgacaccaagaaacagaatgctgacccgcaggctgtgacaatgcctgccactgagaccaaaaaggtcagccatgtggctgatacgaaggtcaatacaaaggctcaggagactgaggctgcaccctctcaggccccagcagatgaacctgagcctgagagtgcagctgcccagtctcaggagaacnnnnnaaggtcaaagccnagaaagcccgaaaggngaagcatctggatggngaanagga

SEQ ID NO: 16140 - DNA, 1197 bp, Homo sapiens
  misc_feature (1)...(1197): n = a,t,c or g
accctnnnnnnnnnnnnnnnnnnnnnnnnnnnnnnnnnnnnnnnnnnnnnnnnnnnnnnnnnnnnnnnnnggcacgaggagaaatgaatgcttcttgcaacacaaagatgacaacccaaacctcccccgattggtgagaccagaggttgatgtgatgtgcactgcttttcatgacaatgaagagacatttttgaaaaaatacttatatgaaattgccagaagacatccttacttttatgccccggaactccttttctttgctaaaaggtataaagctgcttttacagatgaacttcgggatgaagggaaggcttcgtctgccaaacagagactcaagtgtgccagtctccaaaaatttggagaaagagctttcaaagcatgggcagtagctcgcctgagccagagatttcccaaagctgagtttgcagaagtttccaagttagtgacagatcttaccaaagtccacacggaatgctgccatggagatctgcttgaatgtgctgatgacagggcggaccttgccaagtatatctgtgaaaatcaagattcgatctccacccactgcattggccgaagtggaaaatgatgaagatgcctgctgacttgccttcattagctgctgattttgttgaaagtaaggatgtttgcaaaaactatgctgaggcaaaggatgtcttcctgggcatgtttttgtatgaatatgcaagaaggcatcccatatgaaaccactctagagaagtgctgtgccgctgcagatcctcatgaatgctatgccaaagtgttcgatgaatttaaacctcttgtggaagagcctcagaatttaatcaaacaaaattgtgagctttttgagcagcttggagagtacaaattccagaatgcgctattagttcgttacaccaagaaagtaccccaagtgtcaactccaactcttgtagaggtctcaagaaaacctaggaaaagttgtgcagaagactatctatccgtggtcctgaaccagttatgtgtgttgcatgagaaaacgccagtaagtgacagagtcaccaaatgctgcacagaaatccttggtgaacaggcgaacatgcttttcagctctggaagtcgatgaaacatacgttcccaaagagtttaatgctgaaacattcaccttccatgcagatatatgcacactttctgagaaggagagaccaatccagaaac

SEQ ID NO: 16141 - DNA, 721 bp, Homo sapiens
  misc_feature (1)...(721): n = a,t,c or g
cgtagaggcccctttaccttcccccctttatattgtagtcattatcggtaatatactgataggacttggcagtgtccccacccaaatctcctctttgaagtcccacaattcccatgtgtcatgggaggaacctggtgggaggtgattaaattatggggcagatctttcccacgctgttggagtttccctgcacaagctctctctttgcctgctgccatccatgtaagatgtgacttgctcctnnnnnnnnnnnnnnnnnnnnnnnnnnnnnnnnnnnnnnnnnnnnnnnnnnnnnnnnnnnnnnnctttttcccatgnnnnnnnnnnnnnnnnnnnnnnnnnnnnnnnnnnnnnnnnnnnnnnnnnnnnnnnngaacagcttttgcatttttgtaaaaacccagttaaacatattttgtgagtctatttctgagatctctagtctttcccttgatttatatgtctatctctctaccagtagtaccacaccatcttgataactgcaacaatatagtaagctacaagatcagagtgaactattcttcccatttctgtcttctttgtcaacattgtttaagctattctagggcctgtgtctttcaagtcttgaataagtttgcctatttctacaaaaatcttattggtatttttgtaagaacttcctcgtgccnnnnnnnnnnnnnnnnnnnnnnnnnnnnnnnnnnnnnnnnnnnnnggattc

SEQ ID NO: 16142 - DNA, 1893 bp, Homo sapiens
  misc_feature (1)...(1893): n = a,t,c or g
tgttgccctttttcaaccacatttgtgtttcaggtgtagagaggagagagagtgaacagggagcggggcttttgtctgttggtctccctggactgaagagagggagaatagaagcccaagactaagattctcaaaatggtttattacccagaactctttgtctgggtcagtcaagaaccatttccaaacaaggacatggagggaaggcttcctaagggaagacttcctgtcccaaaggaagtgaaccgcaagaagaacgatgagacaaacgctgcctccctgactccactgggcagcagtgaactccgctccccaagaatcagttacctccactttttttaatcgtaacacctccatttgtattacatatggtgtatgggtattgatgaggtcatggtatcatatatgggatttttttctgtgtaaatcatcaagtataagaagaaactatgggactctgagccttgctttagagaatttacagtggacaaataggtgtcatcaaaccagtttttaatcattctgactcaagtgaaaacgctcagaatttcacactgtgaatccacgtttacaacccttacaggtgggccttcaggcctggttcgctacaacaatgtcttccacaactcaaactcccaccgcgctcacacaaccggtccactcctgccttttcactcacacagctcccgactgcttcttgcagaggctgagagtccccccccccaccttttttttcatttaggatgtaacaaacctagtagtttatgttcatcaattgtctgtatatctctatattttatccatgtactcttttgatgtataggaagtagtttggaaactcattgtttccttgtggtaagtgaccgagatgctgccacaggacctgagacactgatgaatggtgctattttggactttcaacatgctccttggcgaggtagctctgatggagttattttttatttccatgttctaagaaggtgttggtactctgtttccctgaatgttgttctctagactggattgacttgttttccttgtgtcttcagtgtggctttcttcctcagtgttgtaggttgagcgaatgctaccagagtgtgagagaccattgtctcgttgggctggcgctcacggacatgcagtcacggtagcgggagcaatcacaaaactgtaatttacttaccaaatctcttcctttccgtagcctcgcctgcctgacttacttagagaaagaaaagcaataattttacaggcattttgaggtgtctctttctttgggttctttctgtttgaaaggatatttgtcgaaaaaaagagcaaaaccgttttaaataaactccccctgggaaaaaaacccaaaacactggcatctgagtaggaatatgaaaatgacaccttttccaaatattaaattgggaaaacaaggtctacaaaatcatgatacttttttaaaaggcagagcattcttttttcggcaattttgataagcaaggtgtagatttacatttttgtccttgctcccaacgaaatggataaacaaaaataacttaccatctactcatggaatgttgttgtgttagccagtctgaaagcccaccttaatttttatataactgtctttagctcttcttttgacagggcaggccttgttctgaactgtttcgcttctgactgttaaacaccgatgacgcatgcactgcacttcttcgttttcttcttgctcccccattggcctgagtttcttgtgcattactcctctccctcctcgttagaataggtatatcagctgtgtaaatagagcaagaaaacagtattctgcatctgtggcatttatgtagagttgcagttgtgtaacngttgaaaatgcagggcttttgtaacagtgtgatcttt

SEQ ID NO: 16143 - DNA, 609 bp, Homo sapiens
gcagagctacataaatataaccttattagaatgggatttttcctactttgggtaactatcaaaagtctcacacacacacacaacccaaagaaaacatatccaagaacgtggtcagttttcagtttttatcattatttattattttattttttatatcccagccctcccatgtaagactggtcattttttagaatcctcagccatatcaaggatacagaaggggtctaggatagagaccaatgaagaaatttctttggagaattgttaagtgctcaattcagccttcttggacaaaggagttactaccttctactttgaaacccagtgaaagggaacttcaaggaagcccttcagagagctttgaaatgtgtttcgtacaaccatttagctggggagcccagagagggctgctgccatgcgatctccctgaaattgtttttttcaggccagggatgtgagaatgtttcctgaggaccagatgtgtgacactcaggagagagccggcataaaatagcccccagaggtaaagaaaacctcaggactgaggctggatactaagggttaggaaagaattacagacttttcttgagacagggtctttgtcatcca

SEQ ID NO: 16144 - DNA, 465 bp, Homo sapiens
  misc_feature (1)...(465): n = a,t,c or g
ggggngtnnntttgnnntttggantccgganaccttatgacnnnnnnnnnnnnnnnnnnnnnnnnnnnnnnnnnnnnnnnnnnnnnnnnnnnnnnnnnnggcacgagctttaacgtcttacgttggagccgctaaccttccccaggtgtttgtcttcattgctttcacagggaaagaattactcgtcccactgacgagttctgtatcctttccacaggaacggctacctgctgccttctccctttctccttcactcccccaaaaagcggggagggggattgttttgattacttcagattaccctctcctcacaatgattttgaggataccnnnnnnnnnnnnnnnnnnnnnnnnnnnnnnnnnnnnnnnnnnnnnnnnnnnnnnnnnnnnnnnnnnnnnnnnnnnnnnnnnnnnnnnnnnnnnnnnnnnnnnnnnnnnnnnnnnnnnnnnnnnnnnnnnnnngag

SEQ ID NO: 16145 - DNA, 549 bp, Homo sapiens
cagagaaagacgtagagagatgaaggcttgtggaggaaaagatggtgagagacttgggcagaaaatgagtagtcctcaggaagaaatcttggttatgtgtttagagcatgaaggacagagccatatagtgtggcagtgaatatacctgctatctccatctcagaggtcgtctctacttttcccttttgccctttcagtatagatgtgatttctgattctcttacagattgtttgctttgcgagatctgatgttatgttgcagtctcttggtaaatgatgcctagttggtgttttattttcatttaatttttacagtctgttctgtgttgagggaattcaggaaagagacaaacatatgttagcattttaatcagggaattaagtttgagtcagcctagctgaacttcctttgctaaagaaagaagaaaacttttctggcagccccgttcatggcacagcttagggataacattcacgagcctgacaggtggagtggccagaaaccaacagttgtcccgacttgtggaggttattccgaagtaaggcagc

SEQ ID NO: 16146 - DNA, 429 bp, Homo sapiens
  misc_feature (1)...(429): n = a,t,c or g
cctntgnaaaccctntgacatgacacgaatttaatacgactcnnnnnnnnnnnnnnnnnnnnnnnnnnnnnnnnnnggcacgagatttttagaatcaggagatatggactagattattttcagcatctttttaactcagatatttataattctaagaatcttagcgtttttcccctaaaaagcaatttttataataataacaacacagtgaaaaatattgaaattcagataaaggcagaaaaatggattgggatgtaggaagtcttttgtaaattccaaactgattagcattgccagtggcataattctttcatatctatgtgacaatctaatttttaaattatttttttgcccgggctttggantataggaattttgtaatggaaatgcttgcacagcttcagctacatggnattaacatgcccctgg

SEQ ID NO: 16147 - DNA, 345 bp, Homo sapiens
gtgccagcttcagaggatgctctccatagccgtagaggtggacaggacccccacctgcagctccaataaaattgccgagatgatgtttgggtttgtgctggacattcctgagaggagccagagagaaatgttctttactaccatggaaagccaccttctgcgctgcaaagtgttagaaatcatattcctccacagctgtgagacacccacccgcctgcctctgtctctggcccaggccctctactttctgaataattctacgtcactgctcaagtgtcagtcagataaaagccagtggcaggtcgacgcggccgcgaattccagatctatgaatcgtagatctgg

SEQ ID NO: 16148 - DNA, 403 bp, Homo sapiens
ttttatttgccaaaataaattggtttgcctcaaaccacacactaggtgctaagtatcttcaaagcaaaattcaatgaaacttgaaagtgctataggactgaggttgtaagtgacagaaacccaattcagactaagcagaaagagagctttgtctccaggatccgagggtgcattctggaggcccgagctaggatgtggagcaagggatgtggctgagcccacagtgcagctggaaccaggggatgcaaatgccgccagggcctctctgtttctcacctctggcttccatccgcatcttctggcctcctccaggccaaattttggtggaacagtggactgtgtcccattcttttatatctccatcatttaaattatggggaagagtcctgcgtgcaaagttccc

SEQ ID NO: 16149 - DNA, 128 bp, Homo sapiens
ctcgagaatacagagagaaaattgagacggagctaagagatatctgcaatgatgtactgtaaaaatagttaacagggaaataacttgagatgatggctagctttgtttaatgtcttatgaaattttca

SEQ ID NO: 16150 - DNA, 605 bp, Homo sapiens
  misc_feature (1)...(605): n = a,t,c or g
ttgaatcgtatgactgattnnnnnnnnnnnnnnnnnnnnnnnnnnnnnnnnnnnnnnnnnnnnnnnnnnnnggcacgagggcagataggaagtatgaagaggtggcccgtaagctggtcatcattgagagcgacctggaacgtgcagaggagcgggctgagctggcagagtcccgttgccgagagatggatgagcagattagactgatggaccagaacctgaagtgtctgagtgctgctgaagaaaagtactctcaaaaagaagataaatatgaggaagaaatcaagattcttactgagccaagctggaaaagacaattgatgacctggaagataaactgaaatgcaccaaagaggagcacctctgtacacaaaggatgctggaccagaccctgcttgacctgaatgagatgtagaacgccccagtcccaccctgctgctgctcctccctctgacccagactccgcctgaggccagcctgcgggaagctgacctttaactgatggctgatctttaactggaaggcttgctttctcctttacnaccctctcttnctgcgtatnttccccntantgatntntttttcncggngantnccnttttttt

SEQ ID NO: 16151 - DNA, 600 bp, Homo sapiens
ggggagctctggacactgtctggcgagagctgcaagatgcgcaggaacatgatgcccgaggccgttccatcgccattgcccgctgctactcactgaagaaccggcaccaggatgtcatgccctatgacagtaaccgtgtggtgctgcgctcaggcaaggatgactacatcaatgccagctgcgtggaggggctctccccatactgccccccgctagtggcaacccaggccccactgcctggcacagctgctgacttctggctcatggtccatgagcagaaagtgtcagtcattgtcatgctggtttctgaggctgagatggagaagcaaaaagtggcacgctacttccccaccgagaggggccagcccatggtgcacggtgccctgagcctggcattgagcagcgtccgcagcaccgaaacccatgtggagcgcgtgctgagcctgcagttccgagaccagagcctcaagcgctctcttgtgcacctgcacttccccacttggcctgagttaggcctgcccgacagccccagcaacttgctgcgcttcatccagaggtgcacgcacattacctgcatcagcggctctgcacacgcccatc

SEQ ID NO: 16152 - DNA, 3336 bp, Homo sapiens
agcaaataaacattttatttccacagcacgccttcccttttcccaaagaacatgagttcacctcagccatcaaagcagagggcgaaactgcaagtgacaaggcaagaggctcctagaaaaatagattatacccaaggctctcctcctggggacccaaacccgtccccaggctccccctcagagcttgccaaatggagtgaaaggcatggaaaggggctgggagaaaagccagctccactgaacaaagtggagaggagcctggcagtgagcagaccttggaggggtgtggggtgggatgagctttgctccttggttgagtgctggaaaaggtcaatagtgtaaaacattgcctaccactctaagattgtaagcatttaaagttaacatgcaaactttggaaatgtgaaaaagtattactctaatcactgtcaatttatagacccctgactttctggaaataaaatgtgtaattaccttttactctgatcataatctcccacctgtctaagaggttatttattccttatttagagggcctctattgccatgtgcctggaattattatatgctcatcactttatgaagaataaaatttgtctttcctgccttaaagttacattcgttcttccgctcaaatcctgatctggtccattaaagagtgttcgcagacaaagtttctgaaagattagagaagaatcccccccaagattgccccaacactgaactacagacaaacactattttatttaaataaggagacagctttctaaaagtatacattctctaataaaaatagtttattattttgaatgatttaatggttttctacacaatttacatcacaacatgtaaattttagcagtaacatctgattctaacagcacatcatgctattcctttcatagagccttcagagattcaatgctaaacaaatttccttagttggcatcaaggcactgatcactttagaggcttttaagaaattatttaaagatgcaaatgcctctgagtgaagtgtactatcccatcactgaagcccacaggaacaagtcctacaattttaaaaaggctcgatgggaaaaatttctcaatcctggaaatcccctagggaaggggtcagggaggaaagtgccatgggttggatatttaaggaactccacagctcttaaaaataagcacttatccctaacatgcaatactgcagatgcaagttaaacttatctgttaacagctgcctgctgttttctgctcccagatgaaatgaagcaactcttctgataacgaagagatacctgtctgaggcaaacgaaacattggcacacagcacagcctcctcaatccacttgatcccaactcatctctcatttatttcggcttcttttattccaggattaatgtagtgtaacattttcatttcttttcgcttttattctgcttttgtaaaagcagtattttgagatggacattgcctcttcattgtatttctcatcaattcattatttttgtggttatagcttgacaagcaattaactttaaaatggtagattccgtaactttaaattggtagctttcatttgcttaaaattttttggcatatgcagataatgttctcatcagtagtaagaatctcagggttatgcttattccccaatggaggtatgacatataatcttttctgcctttacttatcaattcaccaaggagctgttttctctgcatctaggccatcatactgccaggctggttatgactcagaagatgttatctgaaaaaagtctatagaaaaaaaaaaagtttcccctccctcatcaacaaaagcccaccctctaagagacattcaagctgaactatcacaattcttaatcagttacaatttacaaacagataagtttaaaataaacaatttacaaaatttttgaagcataccttaacatcttgttttgcagttaaacaatggaaaagtatttctcctacactaaaaaaaaacttgcttacacacaactgaaaatagaatcttacttgataatacaaaagctaccatcagaagaaatcccttcaggatcattaagccacttcctttgctctgcagtttctatagtagttttaaattattattaaatcacctgaaaaaaattccaaaagagaaccacacactaccatatccaaacaacttttgcatttcccataattgtagttaatgtcagcccagtaggccagaccaacccccagttcaatactttccttccccaaaagctctatactttgaaggaaaacagatacagtatcaaattatgacactttccttgcccaaattaatgcactggtacacccagtggctcatatttaacttcccccagcttcccaattcaaactggggggaaaaaaactaaatcattgggagttacttgccaacttggaagttgatatttctttactttttccattctaagactttaagttctctggcatgagtttatctgcaatcataaactaaacaattacctaaacccaccccaccaatcccaaccgtaacaggccactgccaactaattgccaatatttgcccctcccctttaataaaacttttaagaagtcacattattggaaaacttaacttcaacatttggcctactcaagctcttctgaagttctcctgagatgactgaatatgaaccaaagctgcactgtgctgtacttttcagcttcaactgggaatactcttccaaggataaaagcagctccagtccctgaaggtgttcgtgccaacagcacagcggtacactccttctctaacccagtttgtcaatagtactatagcatctgtggaaaatcttagaaaaaaacattttctcccccaccctctctcttccctgttaagaccatcccaaaatgcttcaagtaaaaaataacaagtttaaggggttaagcacttttaaagtctgattaagggggtggggggaaaaaagagtaactaccagccatttctccaatggacatctcttccacagacctcaacgtgagaactgctctagtttctataaactgtaaacctgtggtggtctgattatcctgatattggattttcttgttttctgttacaccttgagtcatttgcctttaggattctagacagacctaagggaaaaagaactgaaaacatattttgcccccacccccacaaaaaaaaatactgaaaactcccccccgcctcagttacacatccaaactctacatttacaaaacgaattcagggtgaggaagtaaaaacaggtcatctattcacaaaactgaaatacttcattaccccaactaaacatacaaactgcttacagattt

SEQ ID NO: 16153 - DNA, 1489 bp, Homo sapiens
tttgctgtaacagtgtttattgatgatgagtccagggctcctgctgaagccctggtggggaggggcacagagcgagatggggcgtaatggaatgcttgaaggctgctccgtgatgtcggtcggagcttccagactaggcgagggcagggtgaggcctcgctagtctggtctcgccccatgcccttgactcccctggatgctgtactgtctgccaagccagccccagggctgagcggttgagggcatacagcgtcaccaagtccactgtgggccctctccgcaccagaccctgggccgcagtgcctccgtgggaccggcgcccgcagccgagcccctgcagcctccttgctgcgcaatgtcccggggcccccctcccgtgggccgcttcgccctcctggtgatgtcctgctgcaactccccgagcactgcctgtcttcccgctctccagccctcgaggctccggcataggcctgagaaagccgtgccggagctgcccctgtgcctgctactaaatgaattgcggtgggtgaggtggcagctggggacccctctgtcctgtgtcccctgccatgtccctgtctgacccaggcctggggtaccaccccacgtgctggaccctacgctggccacccctgtgctccctccctgccctcttgctctttctgcctggaacgggcccataaccccccagccttgcgcagtctcggctccccccgagaagatgtcacctttgctaactctcctgcccccatcctgcccctctgctgggagggtgtctgcttctccccgccagccctcgatcccctaaacctccttctttcagaaggctggggaagcgaggcctggggagggaagggactcacctgcccggcagatggggtcctcacctgcccgctgctgccagctacacctccgttgcccaggccctgggatcaaaccctgcccaccagctcccctcgtccaaccagctgccacgtcctgtaaccaaaagtgaccgggatgaatgcctggctcccccttctttccagccctagctcaggcccatcgtccccagctgatgtcgccctgtctgcacgatgcctgggcgcctactccacactcctcactggcctcaggccccaccagccctgcctcgagctagcccctccacccgtcatcactcctgccagactccagatgtccaaggtgctccttggctcccacaagctctcctccagcaccccatcttcccctggttgcccctcggttccccacttccccaatcctttctaacgccctgagttctttcttctacatatcttctaattcgtggtctgggagggaaaagggtagtggagttctcaggtggatgacatctccaaaggggagaggacaaagcgctctggcttggcttcctgcttcagcactccagtcagcaggaactcaggcgagaggaggggcagcccaacccgtagtggaatggagcaatgagggaagtcctgagggcatg

SEQ ID NO: 16154 - DNA, 177 bp, Homo sapiens
ggcacgagggagttctggggtaggaagtggtcccgggagattttggatggaaaagtcaggaggattgacagcagacttgcagaattacatagagaaattaggaacccccaaatttcatgtcaattgatctattccccctctttgtttcttggggcatttttcctttttttttttttt

SEQ ID NO: 16155 - DNA, 584 bp, Homo sapiens
  misc_feature (1)...(584): n = a,t,c or g
ggtgatggctcacacttccactacctgannnnnnnnnnnnnnnnnnnnnnnnnnnnnnnnnnnnnnnnnnnnnnnnnnnnnnnnnnnnnnnnnnnnnnnnnnnagctttgtgtttttacggatattaaccatgtttcctgtttaaaaagaaaaaacagcaacaatgtaggagaataagagaaacatttttccaaaaaagaaatcattttgattattttatctcattggaatgttggataatatagtctgcttcattaatcatcaagcatgctgtggatttcccacttttataggatctgtatctcagttcaggtaatactggtaatttttatacagtatttgaagatgaaaaatataggccaaaatgacagaccttgcatagaagctggttaatgaagacagctctggaggaacacatagatacacacagagagacacacacatatatataaagtatacacacatatgatttttaaagttttaagggttttaaagcaaaagccagcccctccactctcccagagcgggcggcccctcccctctctcagagtgggtggggacagcggttgcatgggcagctttcg

SEQ ID NO: 16156 - DNA, 314 bp, Homo sapiens
  misc_feature (1)...(314): n = a,t,c or g
ctgagcctgtctctcacgggaccgggaagctggagagagccccaaccctgcccgctggggccgagctccctgctcctgcagcagtcccgtgccccacactctgagtctgccctatccacagctgctgggcctctctgtggccaccatggtgactcttacctacttcggggcccactttgctgtcatccgccgagcgtccctggagaagaacccgtaccaggctgtgcaccaatgggggactcagcagcgacttatccaacatccagagagcgggagcgagggccanagcctgctggggccactcagggccttct

SEQ ID NO: 16157 - DNA, 1138 bp, Homo sapiens
attttttttttttttttttttcaacgcttaattcactttatttttcttgtataaaaaccctatgttgtagccacagctggagcctgagtccgctgcacggagactctggtgtgggtcttgacgaggtggtcagtgaactcctgatagggagacttggtgaatacagtctccttccagaggtcgggggtcaggtagctgtaggtcttagaaatggcatcaaaggtggccttggcgaagttgccccagggtggcagtgcagccccgggctgaggtgtagcagtcatcgataccagccatcatgagcagcttcttaggcacaggtgcggagacgatgccagtgcccctgggtgcagggatgaggcgtaccagcacagagccgcagcgggcctgtcaccttgcaagggacagtgtggggcttgccgatcttgttccccccagtagcctctgcgcacggggacgatggagagcttggccaggatgatggccccacggaatggcggtggccacctccttggagcacttaacacccagaccgacgtggccattgtagtccccgatagcaacaaatgccttgaacctggtgcgctggccggcacgggtctgcttctgcactggcataatcttcaaaacctcatccttgagagaggcccccaggaagaaatcaatgatctctgattccttaatgggcagggagaagagatagatctcctccagggacttgatcttcatgtccttgaccaagcggcccaacttggtgacgggcatccactccttatcctcggccttgccctccgcgagctccgcggcctcggccccggccccgtccacggccgcgaccccggccccggatgccactgccgaaacctccgcggaagccaccgcggttccccatcccagggccaccgatgcccccgggcccccccgctgcaccggcgaaaagatggccacatcactgacagcttgacacatgcctcctaagagaggagtgcattgctttagtacccgggccagttgagactgaaacaggaacttggattttctttatttggcttgagttcaatgtggagattttctttgtgaaagcttgaagatattatcttctccctgctaaattccagtaaaataatgttgtcaattt

SEQ ID NO: 16158 - DNA, 381 bp, Homo sapiens
atgacatccactggagttgtgcctcttataatgagcaggtggctgcggaaaaggaagaggagacaaattctgttgctaccctttcctattcctctgtggatgaaacacaagtcagaagtctctacgtgagctgcaaatcatctggcaagtttatctcttcagtgcattcaagagagagccaacatagcagaagtcagagagtcacagtgctgcagacaaaccccaatcctgtgtttgaaagcccaaacttggctgcagttgaaatatgtagagatgccagcagagagacctacttggttccatcttcttgcaaaagtatttgcaagaattataatgacttacagattgcagggggccaggtgatggccattaattcagtga

SEQ ID NO: 16159 - DNA, 581 bp, Homo sapiens
cgacctacgcacacgagaacatgcctgtgagtgctttggtccaggtttcggcggagatctcgctgttctgtccgaactctcccctcacgctgatttcggatcgtagagggtcctcatttaccctctgcacttcttaggacattaactccagggaccgcagcggcccacgggccacccgcatagacgggagcggagaggagataagatggcggcccagctgcgcagacaccaggggcggcgaggggcgagctctccccgctcgcaaaggatctccttcatccctctccagaagaggagaagaggaaacacaagaagaaacgcctggtgcagagccccaattcctacttcatggatgtgaaatgcccaggatgctataaaatcaccacggtctttagccatgcacaaacggtagttttgtgtgttggctgctccactgtcctctgccagcctacaggaggaaaagcaaggcttacagaaggatgttccttcaggaggaagcagcactaaaagcactctgagtcaagatgagtgggaaaccatctcaataaacacattttggataaaaaaaaaaaaaaagtttt

SEQ ID NO: 16160 - DNA, 229 bp, Homo sapiens
gtacctaggatatcctgtgaaccctgctctctcccacctcatgacactggtcctctttacttgtccttaaaccgcacatgtgtatttttatttctttgaggaagactgggtggcaggcacctgtgtgtgtgtctggaaacatatagcaagctagaggcagatttcaggcaaaaaaaaaaaatgctcttttgggctgggcgtggtgactcacatctataatctcagcaga

SEQ ID NO: 16161 - DNA, 2956 bp, Homo sapiens
gccctgttctgtcccaacatgaaggcaataatttgttacctcattaatggatctctccttttactttttcaaccacttccttatgctacccatgaaacctagttggggctctgttgtgtctgatttcccctggcttattctttactttttcctccttttccaggctcagcagggagctgctggaggcagtagagcctgaagtcttgcaggactcactggatagatgttattcaactccttccagttgtcttgaacagcctgactcctgcctgccctatggaagttccttttatgcattggaggaaaaacatgttggcttttctcttgacgtgggagaaattgaaaagaaggggaaggggaagaaaagaaggggaagaagatcaacgaagaaaagaaggagaaggggaagtaaagaaggggaagaagatcaaaacccaccatgccccaggctcagcagggagctgctggatgagaaagggcctgaagtcttgcaggactcactggatagatgttattcaactccttcaggttgtcttgaactgactgactcatgccagccctacagaagtgccttttacgtattggagcaacagcgtgttggcttggctgttgacatggatgaaattgaaaagtaccaagaagtggaagaagaccaagacccatcatgccccaggctcagcagggagctgctggatgagaaagagcctgaagtcttgcaggactcactggatagatgttattcaactccttccagttgtcttgaacagcctgacttaggccagccctacagcagtgctgtttactcattggaggaacagtaccttggcttggctcttgacgtggacagaattaaaaaggaccaagaagaggaagaagaccaaggcccaccatgccccaggctcagcagggagctgctggaggtagtagagcctgaagtcttgcaggactcactggatagatgttattcaactccttccagttgtcttgaacagcctgactcctgccagccctatggaagttccttttatgcattggaggaaaaacatgttggcttttctcttgacgtgggagaaattgaaaagaaggggaaggggaagaaaagaaggggaagaagatcaaagaagaaaagaagaaggggaagaaaagaaggggaagaagatcaaaacccaccatgccccaggctcaacggcgtgctgatggaagtggaagagcgtgaagtcttacaggactcactggatagatgttattcgactccgtcaatgtactttgaactacctgactcattccagcactacagaagtgtgttttactcatttgaggaacagcacatcagcttcgccctttacgtggacaataggttttttactttgacggtgacaagtctccacctggtgttccagatgggagtcatattcccacaataagcagcccttagtaatccgagagatgtcattcctgcaggcaggacctataggcaagtgaagatttgaatgaaagtacagttccatttggaagcccagacataggatgggtcagtgggcatggctctattcctattctcagagcatgccagtggcaacctgtgctcagtctgaagacaatggacccaagttaggtgtgacacgttcacataactgtgcagcacatgccgggagtgatcagtcagacattttaatttgaaccacgtatctctgggtagctacaaagttcctcagggatttcattttgcaggcatgtctctgagcttctatacctgctcaaggtcagtgtcatctttgtgtttagctcatccaaaggtgttaccctggtttcaatgaacctaacctcattctttgtatcttcagtgttgaattgttttagctgatccatctttaacacaggagggatccttggctgaggattgtatttcagaaccaccaactgctcttgacaattgttaacccgctaggcctcctttggttagagaagccacagtccttcagcctccaattggtgtcagtacttaggaagaccacagctagatggacaaacagcattgggaggccttagcccctgctcctctcgattccatcctgtagagaacaggagtcaggagccgctggcaggagacagcatgtcacccaggactctgccggtgcagaatatgaacaacgccatgttcttgcagaaaacgcttagcctgagtttcataggaggtaatcaccagacaactgcagaatgtagaacactgagcaggacaactgacctgtctccttcacatagtccatatcaccacaaatcacacaacaaaaaggagaagagatattttgggttcaaaaaaagtaaaaagataatgtagctgcatttctttagttattttgaaccccaaatatttcctcatctttttgttgttgtcattgatggtggtgacatggacttgtttatagaggacaggtcagctgtctggctcaatgatctacattctgaagttgtctgaaaatgtcttcatgattaaattcagcctaaacgttttgccgggaacactgcagagacaatgctgtgagtttccaaccttagcccatctgcgggcagagaaggtctagtttgtccatcagcattatcatgatatcaggactggttacttggttaaggaggggtctaggagatctgtcccttttagagacaccttacttataatgaagtacttgggaaagcggttttcaagagtataaatatcctgtattctaatgatcatcctctaaacattttatcatttattaatcctccctgcctgtgtctattattatattcatatctctacactgcaaattttgggtctcaatttttactgtgcctttgtttttactagtgtctgctgttgcaaaaagaagaaaacattctctgcctgagttttaatttttgtccaaagttaattttaatctatacaattaaaaccttttgcctatcaaaaaaaaaa

SEQ ID NO: 16162 - DNA, 1043 bp, Homo sapiens
gaaacaataatcaacgaatgaaaccccaaaattccaggtcgacctgtccttagtcgaggagatgttcctggcgtttagagaaagggtgaatgcctctcaagaagtggagccagtagaacctgaaaactgccaccttatcgaggaacttgaaagtggctctgaagatattgatatacttcctagtgggctggcttttatctccagtggattaaaatatccaggcatgccaaactttgcgccagatgaaccaggaaaaatcttcttgatggatctgaatgaacaaaacccaagggcacaagcgctagaaatcagtggtggatttgacaaagaattatttaatccacatggggatcagtattttcatcgacaaagacaatactgtgtatctttatgttgtgaatcatccccacatgaagtccactgtggagatatttaaatttgaggaacaacaacgttctctggtatacctgaaaactataaaacatgaacttctcaaaagtgtgaatgacattgtggttcttggaccagaacagttctatgccaccagagaccactattttaccaactccctcctgtcattttttgagatgatcttggatcttcgctggacttatgttcttttctacagcccaagggaggttaaagtggtggccaaaggattttgtagtgccaatgggatcacagtctcagcagaccagaagtatgtctatgtagctgatgtagcagctaagaacattcacataatggaaaaacatgataactgggatttaactcaactgaaggtgatacagttgggcaccttagtggataacctgactgtcgatcctgccacaggagacattttggcaggatgccatcctaatcctatgaagctactgaactataaccctgaggaccctccaggatcagaagtacttcgcatccagaatgttttgtctgagaagcccagggtgagcaccgtgtatgccaacaatggctctgtgcttcagggcacctctgtggcttctgtgtaccatgggaaaattctcataggcaccgtattt

SEQ ID NO: 16163 - DNA, 724 bp, Homo sapiens
ttttttttttccatatccagaaaaaatatttatatgacatatggcctagtattctaaatcaaggcaggatcttccaacaagagcaggagagagaagaaaacatttacattctataacatgattataagaattgagatagatgaaatgaaaaacaacatctttgaacaattacagttgacagaacagctttcccttattctacttgctttaaataactcatatctgtaaacttgaacaccaactctggctgatttaacagtcttaatcccttgattttccatactgaacatcacccaatatatagtgaagatcaaaggcgacttccacacgaacaagcgcgtgtgcgaggagatcgccattatccccagcaaaaagctccgcaacaagatagcaggttatgtcacgcatctgatgaagcgaattcagagaggcccagtaagaggtatctccatcaagctgcaggaggaggagagagaaaggagagacaattatgttcctgaggtctcagccttggatcaggagattattgaagtagatcctgacactaaggaaatgctgaagcttttggacttcggcagtctgtccaaccttcaggtcactcagcctacagttgggatgaatttcaaaacgcctcggggacctgtttgaattttttctgtagtgctgtattattttcaataaatctgggacaacagccaaaaaaaaaaaaaaaaaaagtcgacgc

SEQ ID NO: 16164 - DNA, 442 bp, Homo sapiens
  misc_feature (1)...(442): n = a,t,c or g
ccttaatacgactnnnnnnnnnnnnnnnnnnnnnnnnnnnnnnnnnnnggcacgagccattttagcaaggcacccacttttaatcatggcactcccagcttcaaacctgtcaaatttcatgtcctcaacataaaatctaaatgcctgagcatgaaatgaaaattggaccaattatttcttacattaaaaatctttggattgctcttctctacttaaactataaagctgaagttcttttcgcatgaaactagaacttttcaccacctacagtttccagcttccatttcctgttcctcacgcttctctctgaaaagactgagtttcccattctccagcctccaaatgcatttcgattttattgtccccaaatgtttcttttcttttttttgtttaaccacgtttttctgggccaggcacggtgctcgatccccaatggaaggaa

SEQ ID NO: 16165 - DNA, 371 bp, Homo sapiens
atcatatagtctagtctttattgaaagacttacttcaactgttgtttacagctttggcttaagttggccattttagcctctcactgccagcagacataaaaatcaagtgggaatggcacgggggttgggagtgaaaatactagtagagaaattatgagaacaaagaatatggcagtcagtcagaaacacatcaccaaaataaatctcaaaataattatgaaataaaaaacatttccttgcatgcccaaaaagtctctgctgatgtttttgatgaacggggtggggagcaacgattcttaggcttaagttggatcaagatagcattgggtcatgttataaaatcatctgttagctcaacagccatactttta

SEQ ID NO: 16166 - DNA, 2106 bp, Homo sapiens
tgcaacgccgagcggaggaggcaggaaccggagcgcgagcagctagctgggtgggcaccatggctgggatcaccaccatcgaggcggtgaagcgcaagatccaggttctgcagcagcaggcagatgatgcagaggagcgagctgagcgcctccagcgagaagttgagggagaaaggcgggcccgggaacaggctgaggctgaggtggcctccttgaaccgtaggatccagctggttgaagaagagctggaccgtgctcaggagcgcctggccactgccctgcaaaagctggaagaagctgaaaaagctgctgatgagagtgagagaggtatgaaggttattgaaaaccgggccttaaaagatgaagaaaagatggaactccaggaaatccaactcaaagaagctaagcacattgcagaagaggcagataggaagtatgaagaggtggctcgtaagttggtgatcattgaaggagacttggaacgcacagaggaacgagctgagctggcagagtcccgttgccgagagatggatgagcagattagactgatggaccagaacctgaagtgtctgagtgctgctgaagaaaagtactctcaaaaagaagataaatatgaggaagaaatcaagattcttactgataaactcaaggaggcagagacccgtgctgagtttgctgagagatcggtagccaagctggaaaagacaattgatgacctggaagataaactgaaatgcaccaaagaggagcacctctgtacacaaaggatgctggaccagaccctgcttgacctgaatgagatgtagaacgccccagtcccaccctgctgctgctcctccctctgacccagactccgcctgaggccagcctgcgggaagctgacctttaactgagggctgatctttaactggaaggctgctttctcctttcaccaccccctccttccctgtgtctttttcgccaaactgtctctgcctcttcccggagaatccagctgggctagaggctgagcacctttgggaaacaacattttaaggggaatgtgagcacaatgcataatgtctttaaaaagcatgttgtgatgtacacattttgtaattaccttttttgttgttttgtaggcaaccatttgtaaaacattccaaataattccacagtcctgaagcaggcaatcgaatccctttctcacttttggaaggtgacttttcaccttaatgcatattcccccctctcccatagaggagaggaaaaggtgtaggcctgccttaccgagagccaaacagagccccagggagactcagctgtgggaaacctcattgttctgtacaaagtactagctaaaccagaaaggtgattccaggaggagttagccaaacaacaacaaaaacaaaaaatgtgctgttcaagttttcagctttaagatatctttggataatgttatttctattttttatttttttcattagaagttaccaaattaagatggtaagacctctgagaccaaaattttgtcccatctctaccccctcacaactgcttacagaatggatcatgtcccccttatgttgaggtgaccacttaattgctttcctgcctccttgaaagaaagaaagaaagaagactgtgtttttgccactgatttagccatgtgaaactcatctcattacccttttctgggtttgaagctgctgtctctagaagtgccatctcaaattgtgctttgtatcagtcagtgctgggagaaatcttgaatagcttatgtacaaaactttttaaattttatattattttgaaactttgctttgggtttgtggcaccctggccaccccatctggctgtgacagcctctgcagtccgtgggctggcagtttgttgatcttttaagtttccttccctacccagtccccattttctggtaaggtttctaggaggtctgttaggtgtacatcctgcagcttattggcttaaaatgtactctccttttatgtggtctctttggggccgattgggagaaagagaaatcaatagtgcaactgttttgatactgaatattgacaagtgtctttttgaaataaagaaccagtccctccaaaaaaaaaaaaaaaa

SEQ ID NO: 16167 - DNA, 819 bp, Homo sapiens
  misc_feature (1)...(819): n = a,t,c or g
ggctggttccagtttcttatctcaggagggaagagctgcagatgtctttactgtgaatgagggagagaaacgctaaagcacagaaatgttcagaaccaaagagctggatcactcatgcttctagaaaagacattggcatcttctcattgctcatctactgtgcctggcacagccttattttctagctttctgaatgtgagttccatccatatcctttgcataacggtggtactgggctgtggagagcttggaatgtgtgtccatggggaaatgggctgttctggttattataaaacggccaagggagggctccatggcacgacctctgagtaacccaggacactcctgtttggggaaatggcaaaccatccatacggcaggggggcacaattataaagattgatcctgtcacgggaatggtttcaaatctgaccaacctcatggcatacattggggaagcaattgtgaaaccccttgattctttggatctggacatgctgtactgtgacaatggtttgtgtgtgacagaaaatgtagctgtgtcctaccgggaaagactggggaaatttcttcctgtggagttcctttataaagcaaaagtgcatgaaactgtcagtaatattgtagtctataaagggaaattgctcttagaggctaatattgcacaatgactactttttttgcttatttggaaaagatctttatctcttggagtattaagaagtcaacatataattgccaccctatacattgtgttctggagtgcctgatttattgaaatcagtgtgaaacctattttaaataaatatctcnntccaa

SEQ ID NO: 16168 - DNA, 1067 bp, Homo sapiens
  misc_feature (1)...(1067): n = a,t,c or g
ggctccggcaaccgctccggcaacgccaaccgctccgctgcgcgcaggctgggctgcaggctctcggctgcagcgctgggtggatctaggatccggcttccaacatgtggcagctctgggcctccctctgctgcctgctggtgttggccaatgcccggagcaggccctctttccatcccctgtcggatgagctggtcaactatgtcaacaaacggaataccacgtggcaggccgggcacaacttctacaacgtggacatgagctacttgaagaggctatgtggtaccttcctgggtgggcccaagccaccccagagagttatgtttaccgaggacctgaagctgcctgcaagcttcgatgcacgggaacaatggccacagtgtcccaccatcaaagagatcagagaccagggctcctgtggctcctgctgggccttcggggctgtggaagccatctctgaccggatctgcatccacaccaatgcgcacgtcagcgtggaggtgtcggcggaggacctgctcacgtgctgtggcagcatgtgtggggacggctgtaatggtggctatcctgctgaagcttggaacttctggacaaaccgtactccatccctccctgtgagcaccacgtcaacggctcccggcccccatgcacgggggagggagatacccccaagtgtagcaagatctgtgagcctggctacagcccgacctacaaacaggacaagcactacggatacaattcctacagcgtctccaatagcgagaaggacatcatggccgagatctacaaaaacggccccgtggagggagctttctctgtgtattcggacttcctgctctacaagtcacgaggtgtaccaacacgtcaccggagagatgatgggtggccatgccatccgcatcctgggctggggagtggagaatggcacaccctactgggctggttgccaactcctggnacactgactggggtgacaatggnttcttaaaataccagaggacaagatcactggnggatcnatcaaaantggtggtggaattccaccaccgatcantatgggaaaaaat

SEQ ID NO: 16169 - DNA, 2239 bp, Homo sapiens
  misc_feature (1)...(2239): n = a,t,c or g
ctcgcgaggccccagagagcaggcgctgggcagtgtggaggtcgttggagtcacttccgcgtcaccagctcctgtgcctgccagtcggtgcccctcccgctccagccatgctctccgccctcgcccggcctgccagcgcctgctctccgccgcagcttcagcacctcggcccagaacaatgctaaagtagctgtgctaggggcctctggaggcatcgggcagccactttcacttctcctgaagaacagccccttgggtgagccgcctgaccctctatgatatcgcgcacacacccggagtggccgcagatctgagccacatcgagaccaaagccgctgtgaaaggctacctcggacctgaacagctgcctgactgcctgaaaggtttgtgatgtgggtagttatttccggctgggagtccccaggaaagccagggcattgacccggggacgacctgttcaacaccaatggccacgattgtggccaccctgaccgctggcctgtggcccagcactgcccggaagccatgatctgcgtcattgccaatccggttaattccaccatccccatcacagcagaagttttcaagaagcatggagtgtaacaaccccaacaaaatcttcggcgtgacgaccctggacatcgtcagagccaacacctttgttgcagagctgaagggtttggatccagctcgagtcaacgtccctgtcattggtggccatgctgggaagaccatcatccccctgatctctcagtgcacccccaagtggactttccccggaccagcttgacagcactcactgggcggatccaggaggccggcacggaggtggtcaatgctaaagccggagccaggctctgccaccctctccatgggcgtatgcggncgtccccgctttgtcttctcccttgtggatgcaatgaatggaaaggaaggtgttgtggaatgttccttcgttaagtcacaggaaacggaatgtacctacttctccacaccgctgctgccttgggaaaaagggcatcgagaagaacctgggcatcggccaaagtcctccctcttttgaggagaagatgatctcggatgccatccccgagctgaaggcctccatcaagaagggggaagatttcgtgaagaccctgaagtgagccgctgtgacgggtggccagtttccttaatttatgaaggcatcatgtcactgcaagccgttgcagataaactttgtattttaatttgctttggtgatgattactgtattgacatcatcatgccttccaaattgtgggtggctctgtgggcgcatcaataaaagccgtccttgattttatttttcaaggtcccttctgtaaatgctgtgctttcttccctgtgagagccaactttagagtgtctgctacctcttcattaccaatcagaattagatgatgtttaactgttagactgaagcgtgacgctttcatcagtagcttcaagaaagtctaaattgttaatttatggaattggacacagtattcagtttacccgtacatgctcctcccgcccctcctgttgggcacccttgcatcgcccaggcctgattcctcctgggggtagttcacccccacgggttcatagttcagcggcgaatgcaggcagctgttttctggctgagcaaacagcacctttctcattgagcttcctctactgacctctgtcccccttgggatttcatcttctgaccgaaccctgatgttcagtggcagagacagcccatagccagaactgtgggtagaccagggttggggtgtgcggtttgggacagcccaaaccccagccgctgtgtcaaggcctaggacgccatgctgccatcaaaagggggttccaggtttccatcagtggcctaaagaagggacttcttgttgtactgaggagtgcggaattaaagagatttgactccctttagtattgggggcagtccgttccccagacactgtggcctctgaagtggaaactgaaagctgcatacctgggaaagaactttctaggaataggcaatggccttcagtggaagagggagggctggaggtgtgcccagtacttggatgttcatctgtccacaacagctttttgtttttttaaaaaagctaaaatggaaatggattttatcataaaggatgacatcgttttcttctacaattaatacatgttcattgtataaaacccaaaaagcagctaaaaaataaagcgggaaaggaactactgg

SEQ ID NO: 16170 - DNA, 2531 bp, Homo sapiens
cggagcggagacggcaaatggcggacttcgacacctacgacgatcgggcctacagcagcttcggcggcggcagagggtcccgcggcagtgctggtggccatggttcccgtagccagaaggagttgcccacagagcccccctacacagcatacgtaggaaatctacctttcaatacggttcagggcgacatagatgctatctttaaggatctcagcataaggagtgtacggctagtcagagacaaagacacagataaatttaaaggattctgctatgtagaattcgatgaagtgggattcccttaaggaagccttgacatacgatggtgcactgttgggcgatcggtcacttcgtgtggacattgcagaaggcagaaaacaagataaaggtggctttggattcagaaaaggtggaccagatgacagaggcttcagggatgacttcttagggggcaggggaggtagtcgcccaggcgaccggcgaacaggcccccccatgggcagccgccttcagagatggccctcccctccgtggatccaacatggatttcagagaacccacagaagaggaaagagcacagagaccacgactccagcttaaacctcgaacagtcgcgacgcccctcaatcaagtagccaatcccaactctgctatcttcgggggtgccaggcctagagaggaagtcgttcaaaaggagcaagaatgagcctgcggttgggagggaatggggcgtggggggttagagcaggaccacagcctggtgagtccccgggcagccgtcctgcagccgccactcctgcgcctgccattggcctcctcacagcggaaacacagcttgtgagtgcatgtcagctgttaacaagtggtttttagtacattctggggctttgctgtatctatctagtgcctgtttgtgcgtttttttctttcttccgctgcttccccattttccttctgtcctttttctcctgctccttgttttcccagcagcacatggggttcctcggaggagcagaggtggccgccgtgggggggcgtttgggctgcggtgctgcgtcatttttcctttgctttctctttactttagacactggcccaactccaggcgtttcctttcattccctcagtgcttctcttctgacctgcatgttgagttctgtattgctggggcttccaacaaaaaccagagtcactgacagagggaacagcagagaccttgttggtattcagctgtgatggatatagagaatcagaggcaccttgttttcacaactaggataaaaatatctgcagggtcctttccattcctatttagagggagtcctggctccatgaccccctcccgagtggactgtccaagcagataggctcacacgagaaacagtgaggctgaaagggggggctatggaagagcggtagggagtccacggagaagatgcagtgaatgctttgcatgcattcacgtgtttttgttactgctttttcgaggctgtgtcccaatgagttcactcctttcgccgtgcgtggtggaggctggcctctctggctgggtgcagtgaatggccagcgggtttcttttctgctggggccaaggcgctttgggggtggagggggtggtgctggtgctgcactgggctgactgcggcgctgacgcagccgtttccccccatccctgttgcctgtgtgttgtgtggatctgttcctagtataggcaacataatgagatactgtgcttcccacctccccttcagttcagagccaaaatggggtctagaatctggcactttactcatttcctttgataaattgtactatgcagagctgtcaggaaccttcagatagcagtagaggactgcagctgtctaggtctgcggccacatcttggggacacactgggactgttcccatgtgcagggttcagcagttatgtgggagtgctaggggttaggcttttgagcttgaacgcctgcgtgtgaacagatgaaaaatccttcagtaccccaagtcccagtctgtcctatggggagcagtttgggggcggccggcagcaggagcctgggaaagaggccctcgccaggtgatggcagggccagggtggcctgggggcacccagcggaatgtgcttaagtatttggtcaccagccgtcatcctggggctttttcctactgtatctttgttacaagccctccgcaatccacagaactctctctccttccttccacctgtcagcttctctgcttctgagataagaaccatttgtgtaacaccaacacttaacttcagaaagacatgcattatgtggtgtaatcaaacccgatgctttcagatgacctacttacatcttcaatgtggataagataaagaacaaaacacatgcatctaaactgctgggcaatccagttgacttttaaatgtaagaatggaattccaaacacttaacacattcagctatatgacagaaagtaaatctatggatatggtattttgtgaatgatcttttaaataaaagaaaaccttacgtaatatttaa

SEQ ID NO: 16171 - DNA, 908 bp, Homo sapiens
ggactctgacccccgccccaggtcaaggccagcagagcagtcagtgcctctggagaaggcccttgctctcccacctggcccagactccgaggagcctgggtctggagctgccggtctggttcttccctttagagcccggatctgccacctgcggcccctcccaagccgtgaaccagctcatgagagatgaacactgtgggatccactcaggaaggctcggggctggcacaaaggaccacccagcattgccctgtgccacccagcactcagtggacattctggggacctgccttcagccttttcctgccctgtgcctgacatcagcaccctggctggtcagaatgccgccctcccagaggagcagccgagagatcccctgaaggctggaggcattctgctcagggacccctatcccagctcacagtgcccaaccatctcaccaggagaaagagccacatccccacgttaggaccacggagactgaccaccaccctgaccccccaaacccacgcaccagacgcttgcaggacaggcgccgcgcagcgggcaggggcttgcccggccgaccctcccctccccacctcccccactgcgcgttactccaggatatgccgagtgcacgtataaggtcatcttcgtcgtccccgtggacctcccccttcctctgcacgtcgtccaacgtgggactggcgtgtcgggcttccctgggaggatctggaggttgttctctgcagagaaccagcctggctcctggcgcgcacctctgctcccttctcctcactacccacccacgcatgtaccgggaaaaaaactactatgcccttctagaccatgttctgagaaaagatcgaaaatatttaacaagagataataataaatctgatgccggtctttgtgtgtgttgcgga

SEQ ID NO: 16172 - DNA, 535 bp, Homo sapiens
  misc_feature (1)...(535): n = a,t,c or g
aattcgcttgacatgattacgaatttaatacnnnnnnnnnnnnnnnnnnnnnnnnnnnnnnnnnnnnnnnnnggcacgagaaagtttagcatgatgctctatgaatgattgatatttgggtagcactataaaggaacagatagactgtgattaacaaataccagtataataattagtagccacctctcactggtttgtgtgttgtgtaatagctcattcgatccttgtagccatcctgtggggtaagaaactcttaccccattttataggtgaagaatcaaaggcacagagaagcatctcatttactgacatgtttttcagcccccaaagcagtctctgacaaggtcctggtctttagagattctgtgttactgaaggagggctgaatcaagctcttnnnnnnnnnnnnnnnnnnnnnnnnnnnnnnnnnnnnnnnnnnnnnnnnnnnnnnnnnnnnnnnnnnnnnnnnnnnnnnnnnnnnnnnnnnnnnnnnnnnnnnnnnnnnnnnnnnnnnnnnntctgtgaataacccctg

SEQ ID NO: 16173 - DNA, 653 bp, Homo sapiens
attctacaatagctgatgagggaacatggactttggaggacagaaaaatggttcgtattgttcttacaaagacaaagagagatgcagcaaattgttggacttctctactagaatctgaatatgcagcggatccttgggtgcaagaccaaatgcagagaaagcttacattagagagattccaaaaagaaaatcctggttttgacttcagtggagcagaaatctcaggaaactacactaaaggtggaccagatttctcaaaccttgagaaataactgctttttttcctgcattctgtggatcctagcagatattgccaacttaatcagataaacagattatgtaatggaagaaaaatgcggatgcctacagttaacagattgcaaaatgtatcttaaaatggttctaaaaattgcattcaaacataatttacataggaaatgtactgtgggaactattctatggatatatggtaaagttgttttggacttgtttttgctcagcatgaagttttatatgctgcattttactaattccatatttaaccatatttttaatacaaaagaacattagagtatagatcatgtgaaatgaagggtgcctttggggaaaattaactttttcttttgataagtatgatattcaataaaattttc

SEQ ID NO: 16174 - DNA, 651 bp, Homo sapiens
ttttttttttttttgggagaagagccggcgcctggggcaagagcctaccccaaagaaaagggtgtctaaaatgttcacggttccttcttttgcctcaaaaagtgacatttattcaaagaaaaaaaatgacaagatgtccatcccttggctcccttccctccacaacccattattctgttctggatctcaaacatgctttctttactattcctttgcacccttcatcccagcctctcttcgctttcacttggactgaccctgacacccatcaagctcagcaaattacctaggctgtactgccgcaaagcttcacagacagcccccattacttcagtcaagcccaaatttcatcctcatctgttacctatctcggcataattctcataaaaacacacgtgctctccctgccaatcgtgtccgattaatctcccaaacctcaatcccttacaaaacaacaactcctttccttcctaggcatggttagtgcggtcagaattcttacacaagagccaggactgcaccctgtagcctttctgtccaaacaacttgaccttactgttttagcctagccctcatgtctgcgtgcagcggctgccactgctttaatacttttagaggccctaaaaatcacaaactatgtcgacgcggccg

SEQ ID NO: 16175 - DNA, 903 bp, Homo sapiens
ccctcgaggccaagaattcggcacgagctggaacaggatttctactacgactgtggcatgtactcacatttgcagggcaacctgactgtttgcgactgctgcgaatccgtttcttttaacaaagccagtatcatgcaaacacttgataaaatcacacagctgtcctgcattggcagtggcttcttgccaaagacctgagggctactggtccgactgtggcacacagtcggcccactctgattatgcagatgaagaaagattcctttgtctcagacagttctgaccaggtgcaggcctgtggacgaagcctgcttctaccagaagtagaggattccctttggtgcgctatgcttacaatctaccaagagttaaagactgaactactgtgtgtgtaaccgtttcccccgtcaaccaaaatcagtgtttatagagtgaaccctattctcatctttcatctgggaagcacttctgtaatcactgcctggtgtcacttagaagaaggagaggtggcagtttatttctcaaaccagtcattttcaaagaacaggtgcctaaattataaattggtgaaaaatgcaatgtccaagcaatgtatgatctgtttgaaacaaatatatgacttgaaaaggatcttaggtgtagtagagcaatataatgttagttttttctgatccataagaagcaaatttatacctatttgtgtattaagcacaagataaagaacagctgttaatattttttaaaaatctattttaaaatgtgattttctataactgaagaaaatatcttgctaattttacctaatgtttcatccttaatctcaggacaacttactgcagggccaaaaaagggactgtcccagctagaactgtgagagtatacataggcattactttattatgt

SEQ ID NO: 16176 - DNA, 4248 bp, Homo sapiens
aagctttttagattccggggacattttggctcagctctgccggaggcagcagcccagggcagtcagctctcctcggggcgaagccactgacaatcctggagaaagaaatgagatggtgagtggagaaggcagatgtaggagccaggcagccaagctgtcaacttccagttcctggatcggaaccccaggtttagggcgaagttctccccaccggcagttaggatactcctaagaagcgatccgagtacggaagagcacaacccccggagaagcgccaagaatttatccgctccaggttgaggggcccacgaaggggattaaagggccaagtgccagccgcagcagccggcgcggccccgccctcccagcctgactcactgcggccaggcgaccgggtcacctgaccgcagccgcggcgccggccgctcggcccgctgggaaacgtagtcccgggtgacctggcacgcgcaagcgctcggcggggagtccccaccgccaggacgcagagccgacggagctctcgggctctggcgaaagggggttgggaagcggactccggcgaagagcagtcaggaacggctggacggggccgagagacgacgcagcggagtctgagggggccggggtcacagggagaggcaaatgagggcagaagcactcttcagacggagacggggctgacggctgagcaaaaaaggggcgtgaacttggagtattggcatgaaaaaaaggtgggggcccagatggggagcacctcctcttcctcctgcccaatcgcgatcgtccggcctcccaggcggaaaaagcgtttcgcgggctttccaactgcccgctaattccgctccccctccctccagccgtgactccgcgctttttggcccgcccgccgggctgtgcgcaggcgcttcgggtaggggcggggcgcgcggcagggtcgttacgaagcggggcgcggtgggccaatcagaaggtttcatttccgggtggcgcgggcgccattttgtgaggagcgatataaacgggcgcagaggccggctgcccgcccagttgttacttaggtgcgctagcctgcggagcccgtccgtgctgttctgcggcaaggcctttcccagtgtccccacgcggaaggcaactgcctgagaggcgcggcgtcgcaccgcccagagctgaggaagccggcgccagttcgcggggctccgggccgccactcagagctatgagctacggccgcccccctcccgatgtggagggtatgacctccctcaaggtggacaacctgacctaccgcacctcgcccgacacgctgaggcgcgtcttcgagaagtacgggcgcgtcggcgacgtgtacatcccgcgggatcgctacaccaaggagtcccgcggcttcgccttcgttcgctttcacgacaagcgcgacgctgaggacgctatggatgccatggacggggccgtgctggacggccgcgagctgcgggtgcaaatggcgcgctacggccgccccccggactcacaccacagccgccggggaccgccaccccgcaggtacggggggcggtggctacggacgccggagccgcaggtaaacggggctgaggggaccgcgggaggcggggcggggcgcgcgggaggcccgggcgacctcacaaaggtccgcggcgaagcacgtggtgcgggcccggacggggcgggggtgcacgccgcgtctcgcgaccctccggccaccccgcgagcttccgccgtctgcgacccgggagtggccggggtgtgggcggcgcggggcggaggaccccgcctcgcgactggggaaatggcgtctggcggcgagataatggcggcctgggcgggagcgcgcgggcggggccggccccgctgcctggaattaaccccgctgtgcttgctcgtcccgcccgcagccctaggcggcgtcgccgcagccgatcccggagtcggagccgttccaggtctcgcagccgatctcgctacagccgctcgaagtctcggtcccgcactcgttctcgatctcggtcgacctccaagtccagatccgcacgaaggtccaagtccaagtcctcgtcggtctccagatctcgttcgcggtccaggtcccggtctcggtccaggagtcctcccccagtgtccaagagggaatccaaatccaggtcgcgatcgaagagtccccccaagtctcctgaagaggaaggagcggtgtcctcttaagaaaatggtaatgtctgggaatccgagacacataaccctaattcataaatgggatttggggtaggtctttttgagtcgtgttaatgtaagaatgactcctatcattaggagtgctgctcggaggttactcacctttgggagtaatactgaagagaggggtctgcagaaaggatgtgtatgaagcttagataataatggctgtttcgtaaactgtttgagacctattaatgaaaatgactatttcttgctgtttttatccaacgtctgcattttccccctttaaagctgcggtctcctgtttgataaaagaatattggccagtattgcagattttaactgatttggctgatcctccagggaccagtttctgtgggcgtgtattggagcaggtttgtctttaaatgttaaagatgcactatcctcttagagaaacaatcagttcaactattgttgtactgactgggacttcatattctaatggatgtggcaaaagaattgcaataagaagcagtgaacatttggaaccccaaaagaaagttacaggtattgcactgggtggggaaaggatagtgtgtctttaactcttaaattgtttggtcctattttaaaaggaagggccctaagtagctcagatattaaagtagtatctcaattaccaaatgttcattgaacattacttaatgaaatatagaccaatctctgactcgagttgttttgtttggatacagcccttttttttcttttttttccttccccttacctttcttcaccttggttatttggccaggaatacgtaaattcaaacttgtacatgctgatggtagcctttgtgaaattttcctaattgggccttttaaaaacataggctgggtggaacatttctgtaccctactggtttgaccagagccttagtaagtacgtgcctgaaactgaaaccatgtgcactttaatggaaggtaagctgaacttctttcttttcaaacctagatgtatcggcaagcagtgtaaacggaggacttggggaaaaaggaccacatagtccatcgaagaagagtccttggaacaagcaactggctattgaaaaggttattttgtaacatttgtctaactttttacttgtttaagctttgcctcagttggcaaacttcattttatgtgccattttgttgctgttattcaaatttcttgtaatttagtgaggtgaacgacttcagatttcattattggatttggatatttgaggtaaaatttcattttgttatatagtgctgactttttttgtttgaaattaaacagattggtaacctaatttgtggcctcctgacttttaaggaaaacgtgtgcagccattacacacagcctaaagctgtcaagagattgactcggcattgccttcattccttaaaattaaaaacctacaaaagttggtgtaaatttgtatatgttatttaccttcagatctaaatggtaatctgaacccaaatttgtataaagacttttcaggtgaaaagacttgattttttgaaaggattgtttatcaaacacaattctaatctcttctcttatgtatttttgtgcactaggcgcagttgtgtagcagttgagtaatgctggttagctgttaaggtggcgtgttgcagtgcagagtgcttggctgtttcctgttttctcccgattgctcctgtgtaaagatgccttgtcgtgcagaaacaaatggctgtccagtttattaaaatgcctgacaactgcacttccagtcacccgggccttgcatataaataacggagcatacagtgagcacatctagctgatgataaatacacctttttttccctcttccccctaaaaatggtaaatctgatcatatctacatgtatgaacttaacatggaaaatgttaaggaagcaaatggttgtaactttgtaagtacttataacatggtgtatctttttgcttatgaatattctgtattataaccattgtttctgtagtttaattaaaacattttcttggtgttagcttttctcagaa

SEQ ID NO: 16177 - DNA, 1109 bp, Homo sapiens
  misc_feature (1)...(1109): n = a,t,c or g
nnnnnnnnnnnnnnnnnnnnnnnnnnnnnnnnnnnnnnnnnnnnnnnnnnnnnnggcacgagctccaaatcgagctctgcgcgacgatccaagtcctcctcggtctccaggtctcgctcgcggtccaggtcttcatctatgaccaggagtcctccccgggtatccaagaggaaatccaagtcaaggtcgcgatccaagaggccccccaagtctcctgaagaggaaggacagatgtcctcttaagaaaatgatgcatcatgaagcaacgtgatggaggacttggggaaaaaggaccacataggttattttgtaacatttgtctaactttttacttgtttaagctttgcctcagttggcaaacttcattttatgtgccattttgttgctgttattcaaatttcttgtaatttagtgaggtgaacgacttcagatttcattattggatttggatatttgaggtaaaatttcattttgttatatagtgctgactttttttgtttgaaattaaacagattggtaacctaatttgtggcctcctgacttttaaggaaaacgtgtgcagccattacacacagcctaaagctgtcaagagattgactcggcattgccttcattccttaaaattaaaaacctacaaaaggtggtgtaaattaatatggataattttatttaccttcagatctaaatggtaatctgaacccaaatttgtataaagacttttcaggtgaaaagacttgattttttgaaaggattgtttatcaaacacaattctaatctcttctcttatgtatttttgtgcactaggcccggctgcgtagcagttgagtaatgctggttagctgttaaggtggcgtgttgcagtgcagagtgcttggctgtttcctgttttctcccgattgctcctgtgtaaanatgccttgtcttgcaaaacaaaanggtggccaatttataaaaggccgaaaaatggacttcaatcaaccnggccttgaaanaaaanaangggccaaaaantgggcaaatctanccggggaaaaaaaaccttttttccccctnccccnaaaaanggaaatccgaccaaaccacatgttnaactaacagggaaaggtagg

SEQ ID NO: 16178 - DNA, 1587 bp, Homo sapiens
  misc_feature (1)...(1587): n = a,t,c or g
accacgttctggggcctcgtcggcatcgcgggccctggttcgtgccgaagggtcccaaccgcggagtgatcatnaccatgctggtcgctaccgccgtctgctgttacctcttctggctcatcgccatcctggcgcagtgaaccccctgttcgggccccagctgaagaatgagaccatctggtacgtgcgcttcctgtgggagtaacccgccgcccccgacccaggtgcccagctctcggaatgactgtggctccactgtccctgacaaccccttcgtccggaccctcccccacacaactatgtctggtcaccagctccctcctgctggcacccagagacccggacccgcagggcctgcctggttcctggaagtcttcccagtcttcccagccagcccgggccctggggagccctgggcacagcagcggccgaggggatgttctgctccaatacccgcactgctctggagtttgccctctttcccaaggagatgctgctggggagctggtatgggtggggtctttccctttacagacggggcagatgccaggactcagcccatcctgaggaggacacgtgtcctcatggagagggtgctccggcccaggcgggggagtcggtgcccagtcagcagctctgccaccatccttgctgggaactnggggggcctctattnggttattaggcaaggctttttctctttggcatggaattgtttaattttctgacacgtctaagatgttgaaatttctgaaaatgttgaagcagagaaacattcacacacaaaaagcaacatagtcatgtgggtccagatggcctcagtcctagatgttggcaccctttgctgtgtctcctcagagtatcctgttccgcctcctgccacctggacctccctcagtggatgtcttccctcccccgaccccagcctgtcagtccgagcacagtgcaggtttggctctgacttgggcctttggctgcagtgggggtggatttcagagcctctcatggcagcatctaagtgaccagagctgggatgagagaggggaaggggcaatgtgagtggcgctatgggacgggccagccctgctcctgagccagccccgccctctgccccctggccctgggctctgtgctagggatggtgaagaatgggggcgtgccagcctggcaggagtgggaagcaacacgcaggggtcccggacctctccagccttgccctcacgcttatccgagctcccagtgtggttagcacagagctcacccaccttgcctggctcccagctggggcctgtcctcactggtgctccaggggaagaaacgacagcctcacttctgtatggactgctgatgtggcctgccatcctgttcagcgggcattgtctttggagcagcaggagactaggatgcctctcactcacatcgcagttcctggctggccagctgctcagggctcaggctggggcctcccattgacatcctccccctacactccctctctgagcctccgtcgcccctcctgttgggtaagggtgttgagtgtgacttgtgctgaaaacctggttcatatataataaataatggtgatga

SEQ ID NO: 16179 - DNA, 1630 bp, Homo sapiens
  misc_feature (1)...(1630): n = a,t,c or g
gcaggtttcttcttttgaaaaatttgccttggttgattcccagggaattgaatcaaaggatatatgaccgtaagacctgtcacccttaaaaaggactatgagggcttgctgaggaggggaaaacaaggaagcaagtctctcctaccacggcccaggggactgtgaggacagaaggcttgtgggtttgagggaggactgtcttgcagaggatgatagggtaaaatagaatgaaggatgatttttataaatggttatgcgccttaggatgactacatatttagtcccttataagagaaattgagtagttggtaaacaacagataataattattaaattgaggaaagagagaaaccacaggtgcaaagattcactttatttattcattctcctccaacattagcataattaaagccaaggaggaggaggggggtgaggtgaaagatgagctggaggaccgcaataggggtaggtcccctgtggaaaaaaagggtcaaaaggcccaaaaggaatgggaagggggtccaggctggaaactgaaggaaacaaggtgggggcacttctccctctaacactctcccctgttgaagctctttgtgacgggcgagctcaggccctgaatgggtgacttcgcaggcgtagactttgtgtttctcgtagtctgctttgctcagcgtcagggtgctgctgaggctgtaaggtgctgtcccttgctgtccctgctctgtgacactctcctgggagttacccgattggagggcgttatccaccttccactgtactttggcctctctgggatagaagttattcagcaggcacacaacagaggcagttcccagatttcaactgctcatcagatggcgggaagatgaagacagatggtgcagccacagttcgtttgatttccaccttggtccctccgccgaaagtgacctcagggagattatcatactgctgaacagtaataagttgcaaaaatcttcagggctcccagtctgctgaatggtgaagagtgaagtctgtcccagaccccactgccactgaacctgtctgggaatgccagtggcccctggtggatgcaccatagatgaggagcctgggagcctggcccaggtttctgctggtaccaggctaagtagctgctgctaacactctgactggccctgcaggagagggtggctctttcccctggagacaaagacagggtgcctggagactgcgtcatcactatttctccagtggtatgtttgatctccaccttggtccctccgccgaaagtggcccccggaggccaattgtcacggtgttnnnnnnnnnnnnnnnnnnnnnnnnnnnnnnnnnnnnnnnnnnnnnnnnnnnnnnnnnnnnnnnnnnnnnnnnnnnnnnnnnnnnnnnnnnnnntgccagtggccctgttggatgcatcatagatgaggggcctgggagcctggccaggtttctgttggtaccaggctaagtagctgccaacactctgactggccctgcaggagagggtggctctttcccctggagacaaagacagggtggctggagactgtgtcaacacaatttctccggtggtatctgggagccagagtagcaggaggaagagaagctgagctggggcttccat

SEQ ID NO: 16180 - DNA, 304 bp, Homo sapiens
tgaatggaggtgagtgagttaatggagggagccagggccaccttaattggataccttgtaggctgtgctaaagacttcgtatagttgtggtttatgtgtttacataattaatctagatctgatgaagtgattaaagtgacagtgttcaaatcagtagatttggcaatttttatatttatagtattgtattttactttataggatggaacaaaattcatctgtattggggctctgtattctgaacttctggctgtcagcagtaaaggagaactttatcagtggaaatggagtgaatctgagcctt

SEQ ID NO: 16181 - DNA, 900 bp, Homo sapiens
gcacgagcggggctggcgtgtgggtctcgcagcgttgctcacagaacagagtagaggcggcggcggcggcggccggacccagactggtagtgaggcgttggaccccgagccgctgcaatgccgctggagctggagctgtgtcccgggcgctgggtgggcgggcaacacccgtgcttcatcattgccgagatcggccagaaccaccagggcgacctggacgtagccaagcgcatgatccgcatggccaaggagtgtggggctgattgtgctaagttccagaagagtgagctagaattcaagtttaatcggaaagccttggagaggccatacacctcgaagcattcctgggggaagacgtacggggagcacaaacgacatctggagttcagccatgaccagtacagggagctgcagaggtacgccgaggaggttgggatcttcttcactgcctctggcatggatgagatggcagttgaattcctgcatgaactgaatgttccatttttcaaagttggatctggagacactaataattttccttatctggaaaagacagccaaaaaaggtcgcccaatggtgatctccagtgggatgcagtcaatggacaccatgaagcaagtttatcagatcgtgaagcccctcaaccccaacttctgcttcttgcagtgtaccagcgcatacccggttccagcctgaggacgtcaacctgcgggtcatctcggaatatcagaagctctttcctgacattcccatagggtattctgggcatgaaacaggcatagccgatatctgtgggccgcagtggctctgggggcccaaggtgttgggaacgtcacataactttgggacaagaccggggaagggggagttgaccactcgggcctcgctgggagccgggga

SEQ ID NO: 16182 - DNA, 459 bp, Homo sapiens
  misc_feature (1)...(459): n = a,t,c or g
gggattcattccggcaccaccatgtcgaaggtttcctttaagatcacgctgacgtcggacccacggctgccgtacaaagtactcagtgttcctgaaagtacacctttcacagcagtcttaaagtttgcagcagaagaaatggaataggaataaatcctgcacagactgctggaaatgtttttctaaaacatggttcanaactgcggattattcctagagatcgtgttggaagttgttaatatctgctacttggaacatacgattgcctttcagaataaatattggtattttttgttgttgtaaaattgaaatcaggcatttaacatactatgaaaacaccaggagtcaatgattaatgaaaggnactcatctgnccctttttgttggccatactcttcntatgaaaagggantgcgttgaattaanggtcttcntgnncccaaaaaaantatcttttgg

SEQ ID NO: 16183 - DNA, 320 bp, Homo sapiens
ggattcattccggcaccaccatgtcgaaggtttcctttaagatcacgctgacgtcggacccacggctgccgtacaaagtactcagtgttcctgaaagtacacctttcacagcagtcttaaagtttgcagcagaagaatttaaagttcctgctgcaacaagtgcaattattaccaatgatggaataggaataaatcctgcacagactgctggaaatgtttttctaaaacatggttcagaactgcggattattcctagagatcgtgttggaagttgttaatatctgctacttggaacatacgattgcctttcagaataaata

SEQ ID NO: 16184 - DNA, 950 bp, Homo sapiens
  misc_feature (1)...(950): n = a,t,c or g
ccctnnnnnnnnnnnnnnnnnnnnnnnnnnnnnnnnnnnnnnnnnnnnnnnnnnnnnnnnnnnnnnnnnnnggcacgagatgatatctcctttcagggccccagcttaagggcaaagtgagttaatgtgtagacaaaggcgagggacaagagagagttaacatctagacagtggaaaaagccatggtgtgtggtttctgggaaccaccaacacttgcaggtttagctttttcccagggttgactacaagaaagaaaaccatgtttttgcaagattaaaatgtggttgagtgtgcctaaattaaccatccccatttttatcatatttccaccatcacttcagggttttaagagtcagtgctcacctgggcggagctggtagtacattttgcttcttagaaagctaagtcctgggttccgtctgattttaggttccaggaacttcctgagaacacccgatcgcagagggtaattttctggagtttgttttgcagggatagctgggagtatggccaccctgctccacgatgcggtaatgaatccagcagaagtggtgaagcagcgcttgcagatgtacaactcgcagcaccggtcagcaatcagctgcatccggacggtgtggaggaccgaggggttgggggccttctaccggagctacaccacgcagctgaccatgaacatccccttccagtccatccacttcatcacctatgagttcctgcaggagcactttaacccccagagacggtacaacccaagctcccacgtcctctctggagcttgcgcaggagctgtagctgccgcagccacaaccccactggacgtttgcaaaacactgctcaacacccaggagtccttggctttgaactcacacattacaggacatatcacaggcatggctagtgccttcaggacggtatatcaagtaggtggggtgaccgcctatttcccg

SEQ ID NO: 16185 - DNA, 366 bp, Homo sapiens
tttttttttttttgttctatgaaaagtcagccactgacatttatttagaaagttaagtttcaggtaactgtggggcagcttggatcttatattgcacaaaagctgctcacttacttccacatctgtgaattcaggtgtttttctaccatggagtttagtgcgaatcgaaaacgatcccatcttctatcaaacacatagtaccctcgtcccatgaggcgactcccaaatgagcaaaacgccagaggtctggggtggtgcgtggagaactgacagtctagcttctcggattcgtcggctccgtccatctccccttcatcactggacagtcggctggcgaggtcacctccaaccggtgggagtgggggc

SEQ ID NO: 16186 - DNA, 1241 bp, Homo sapiens
tttattttggtgtttttttttaatttcttatagtcaaaggtatgtttctgccttttacataatgtgacaaaggaatatgttggtcaaggcaatggctgtttcagtgtttcagctttaacaagaatgctggattacaggtcctcactttctaccaaggcagtattcagtgtcaggtgagatgggttggcctcaggttggaacgctgctttgatgtctagtccctggtccgaaagtgctgcatagcgactggctgagggccgtactttttttggcttggtgctctgtgactgctgatgccactgggtgtaaacgtccagcctggcagtacaggacacaatccctgcttcattcttggctgacacagtataccacccagcatcttcttttgtgggctccctgaatgagcaggcagatgtagccgtggttgtcctggtgcatgctcactcggtcagtgctgtgagtgagtgattcattttctttcttccaaaatatctgaggtggtggcactcccaatacacgacattccagccgcactgggtacccatcagcaactcctgtgttttggagcttctcaataaacacagggggtttgtgtgcttctttagcagcaaccacaagctccaggctgaatgagttctgtcctgctcggttggtagctatacatgtgtagatgccggcatcacgtgacgtgactggctctatgatcagagagtgcaccccgttctcacgcaccagcatcttgtgagcactgtcagggcgtacgggctttccatctagttgccagcttagatctggggttggtaacccactgactttgcagtccattctgcagagttttccttcttgaacagtcagatctccaggagcctgcaagaagtgaggtctgaagaatcgctcctgaattggttcattttcgtctccactgtcccttgatctagaacgaggccttctgacatgaggatggcctgagggagaccggggacttcgacctctttggttgacagcctgtaccattagccgtccagtacaactgatgcggccctgagggtttgcagccataattgtataattcccatcatcatctagggtgaaggctgtggtatggagggagcaggtcccatcgagatctctttgaatggtgtagtgatcactctttggagagatctgcttcccatctttaaaccaatagatctttggctttggatttccagccactctacatgtgaaagttactggcattc

SEQ ID NO: 16187 - DNA, 853 bp, Homo sapiens
  misc_feature (1)...(853): n = a,t,c or g
tttttttttttgctttttaaaggtgctttattaacttcactataatgagcatctttccatgcaataggtaaaattcttctgctaacaaaaatcttacagactggttcaaaaacacaatattcaattagaagctggtaataggagacccacgtaaacaagtgacaggtaaaggtttacaacaagggcacatcatgaacatgtaaattcgaaagcaggggtctgtttccgtaataactttagggaaaccatcaggattcagggcataaggcaaaactcatcatgatggtcatggtgaggggggtcagtgctgactgcccgcagactatgactcaactgcttttccctcagcttttccatcagctgtctcacctcctccccaatcctttccatattctcctctctcatccttgcctgtggttctccaagcctatgcatcatatcccatctatactgcaggatgggctgcctaacgcggaaccgcctacgatttcctctaggcacacagtattcaccagcatccaaagggagggccaagggctcccctttattagcaacttgctccttttcatctttttcatcattttcctggttgacattttccatgctgagactgtttactgctcgtttctctttggactccattactcctgggcctatccttgtagtctcctccttctcccgattctcgacgtgaggtgcgccgccgggacacttggccccgcagacctgcagaagggctggtccgctttcccccgggccggatgccaagcccgccgagcgcagggcagcggggagctggtagcgagacacgagtgacgactgcaccgaaggctgcgtantctgcagctcccgg

SEQ ID NO: 16188 - DNA, 474 bp, Homo sapiens
  misc_feature (1)...(474): n = a,t,c or g
ggcacgagctgggtgggaaggtaggggcgggagaatgagggggtttgtaatttattaattgcgtattttctaagagttttcaacatagtttggcttcacacacaacttcaggcccctcatttgagagccattatcctcaactccatctaaactgaatcttggggagaacccagatctgaccaattggggtaggagacagcaggctctccaagaacatgggcaaatttatttttttataaaacaaaaagataaaaagagttgaaagacgtgaaagtggtgagagatggaggaaacagaatcaggaagtggtagaaaagagaggagnnnnnnnnnnnnnnnnnnnnnnnnnnnnnnnnnnnnnnnnnnnnnnnnnnnnnnnnnnnnnnnnnnnnnnnnnnnnnnnnnnnnnnnnnnnnnnnnnnnnnnnnnnnnnnnnnnnnnnnnnnnnnnnnnnnnnnnnnnnnnnnnnnnctc

SEQ ID NO: 16189 - DNA, 417 bp, Homo sapiens
tattagtttgggctcatttaaacaaacaggttacaaaaatacaattaccctcataatttcattcatttatacccaaaacattgccctggtaattactaatattcatctatagttaccattaagatattataaaatacttaaaaagggattggagaataaaaagaggtctgaagaaactaacactccgatacattctttacttttttaatttttaaatggaatgcttcttatgtcatccttgcacaggggccatgctaatctccgtatggttccaattttagtaggtgagctgccaaagcgagcatgacacattcttaatggtcctctaaatctacattttattagcaattacaaatcaatttggtattaagctaagtatctggaatattttaaaattttaaggttaagacagcatct

SEQ ID NO: 16190 - DNA, 974 bp, Homo sapiens
atcttttttttttttttttcattcaggtttctatttttattcaactacaagcaaacagcacaattaatgcaacattcagcaactccagaccagcttttcttacccccatgaagaacgatcaatttaaaaaacacagatctcaggtttcctcccaagctgtcagcgaagcgctgctgccggtctagattgccatgtcccaacaacagcaaagccaccctccctcctgcttcttcccaggattgctctttaaagggaccagagtgacatactgatgcctactgaggcatctgagatgcactgtgttggaggttagcctcaatgccagcctctggttgtctaggtgagtgacatcaccataaaatcacattgtgtaccattctggactcaggatcacaaaggcagaggcaaccaatctttttttttttttttttttttttaaaccttccttaaagattctttgatgctttgctctatcactgtagacctggtctttttccccccagttttttcttttttacattctgggttgctattttcagattaataatttgatgaccccatcacagtaccaaaataccccccaaaatgaagttcaaatttgatcaaaacataaatcagagtgagtgagtaaaattataaaggccaggcagcaggaaaagtcaccctcaactaccatctgactggtcaggtctcacccatgccaaggggggcaggaagaggagaaatctattatacatgcaacactgaactggggaacatggcttggggcctccaggacagttcaggtccccaagctaaccccctacttcccagacagctgctcgtacagtttgggcacatagtcatcccactcggcctggtaacacgtgccagccaccggggccctgagctcatactttttacggaaggacgccaccttgaaattgtccacggtggtctccagatcggttgctgaggattgggctctcagactt

SEQ ID NO: 16191 - DNA, 1735 bp, Homo sapiens
ggctcgcaagcgaggcagccatgtcttatcccgctgatgattatgagtctgaggcggcttatgacccctacgcttatcccagcgactatgatatgcacacaggagatccaaagcaggaccttgcttatgaacgtcagtatgaacagcaaacctatcaggtgatccctgaggtgatcaaaaacttcatccagtatttccacaaaactgtctcagatttgattgaccagaaagtgtatgagctacaggccagtcgtgtctccagtgatgtcattgaccagaaggtgtatgagatccaggacatctatgagaacagctggaccaagctgactgaaagattcttcaagaatacaccttggcccgaggctgaagccattgctccacaggttggcaatgatgctgtcttcctgattttatacaaagaattatactacaggcacatatatgccaaagtcagtgggggaccttccttggagcagaggtttgaatcctattacaactactgcaatctcttcaactacattcttaatgccgatggtcctgctccccttgaactacccaaccagtggctctgggatattatcgatgagttcatctaccagtttcagtcattcagtcagtaccgctgtaagactgccaagaagtcagaggaggagattgactttcttcgttccaatcccaaaatctggaatgttcatagtgtcctcaatgtccttcattccctggtagacaaatccaacatcaaccgacagttggaggtatacacaagcggaggtgaccctgagagtgtggctggggagtatgggcggcactccctctacaaaatgcttggttacttcagcctggtcgggcttctccgcctgcactccctgttaggagattactaccaggccatcaaggtgctggagaacatcgaactgaacaagaagagtatgtattcccgtgtgccagagtgccaggtcaccacatactattatgttgggtttgcatatttgatgatgcgtcgttaccaggatgccatccgggtcttcgccaacatcctcctctacatccagaggaccaagagcatgttccagaggaccacgtacaagtatgagatgattaacaagcagaatgagcagatgcatgcgctgctggccattgccctcacgatgtaccccatgcgtattgatgagagcattcacctccagctgcgggagaaatatggggacaagatgttgcgcatgcagaaaggtgacccacaagtctatgaagaacttttcagttactcctgccccaagttcctgtcgcctgtagtgcccaactatgataatgtgcaccccaactaccacaaagagcccttcctgcagcagctgaagtgttttctgatgaagtacagcagcaggcccagctttcaaccatccgcagcttcctgaagctctacaccaccatgcctgtggccaagctggctggcttcctggacctcacagagcaggagttccggatccagcttcttgtcttcaaacacaagatgaagaacctcgtgtggaccagcggtatctcagccctggatggtgaatttcagtcagcctcagaggttgacttctacattgataaggacatgatccacatcgcggacaccaaggtcgccaggcgttatggggatttcttcatccgtcagatccacaaatttgaggagcttaatcgaaccctgaagaagatgggacagagaccttgatgatattcacacacattcagg

SEQ ID NO: 16192 - DNA, 2732 bp, Homo sapiens
gcagcctccggccccggcggcccctgtctcccgaccccggaaggcgaagcaggctgcccggggaccccgcgcgtgggcgcttgaagccgagaccagcctgcccgggcctgggcaggcggagcagggccttggaccccgcggcgcccctcggcctcggagcaacgagcgcagcgccgcctctgaagagccaatccattcaggatgggaaaccacgcaggcaaacgagaattaaatgccgagaaggccagtacgaatagtgaaactaacagaggagaatctgaaaaaaagagaaacctgggtgaactttcacggacaacctcagaggacaacgaagtgttcggagaggcagatgcgaaccagaacaatgggacctcctctcaggacacagcggtgactgactccaagcgcacagcggagcccgaagaatgcctggcaggatgcccacccagctgacccagggagccgcccccacttgatccgcctcttttcccgagatgccccggggagggaggacaacaccttcaaagacaggccctctgagtccgacgagctccagaccatccaagaagacagtgcagccacctccgagagcctggatgtgatggcgtcacagaagagaccctcccagaggcacggatccaagtacctggccacagcaagtaccatggaccatgccaggcatggcttcctcccaaggcacagagacacgggcatccttgactccatcgggcgcttctttggcggtgacaggggtgcgcccaagcgggggctctggcaaggactcacaccacccggcaagaactgctcactatgggttccctgccccagaagtcacacggccggacccaagatgaaaaccccgtagttccacttcttcaagaacattgtgacggcttcgcacaccacccccgtcgcagggaaaggggagaggactgtccctgagcagatttagctggggggccgaaggccagagaccaggatttggctacggaggcagagcgtccgactataaatcggctcacaagggattcaagggagtcgatgcccagggcacgctttccaaaattttcaagctgggaggaagagatagtcgctctggatcacccatggctagacgctgaaaacccacctggttccggaatcctgtcctcagcttcttaatataactgccttaaaactttaatcccacttgcccctgttacctaattagagcagatgacccctcccctaatgcctgcggagttgttgcacgtagtagggtcaggccacggcagcctaccggcaatttccggccaacagttaaatgagaacatgaaaacagaaaacggttaaaactgtccctttctgtgtgaagatcacgttccttcccccgcaatgtgcccccagacgcacgtgggtcttcagggggccaggtgcacagacgtccctccacgtttcacccctccacccttgggactttcttttcgccgtgggttgcggcacccttgcgcttttgctggtcactgccatggaggcacacagctgcagagacagagaggacgtgggcggcagagaggactgttgacatccaagcttcctttgtttttttttcctgtccttctctcacctcctaaagtagacttcatttttcctaacaggattagacagtcaaggagtggcttactacatgtgggagcttttggtatgtgacatgcggggttgggcagctgttagagtccaacgtggggcagcacagagagggggccacctccccagggccgtggctgcccacacaccccaattagctgaattcgcgtgtggcagagggaggaaaaggaggcaaacgtgggctgggcaatggcctcacataggaaacagggtcttcctggagatttggtgatggagatgtcaagcaggtggcctctggacgtcaccgttgccctgcatggtggccccagagcagcctctatgaacaacctcgtttccaaaccacagcccacagccggagagtccaggaagacttgcgcactcagagcagaagggtaggagtcctctagacagcctcgcagccgcgccagtcgcccatagacactggctgtgaccgggcgtgctggcagcggcagtgcacagtggccagcactaaccctccctgagaagataaccggctcattcacttcctcccagaagacgcgtggtagcgagtagggcacaggcgtgcacctgctcccgaattactcaccgagacacacgggctgagcagacggccccgtggatggagacaaagagctcttctgaccatatccttcttaacacccgctggcatctcctttcgcgcctccctccctaacctactgacccaccttttgattttagcgcacctgtgattgataggccttccaaagagtcccacgctggcatcaccctccccgaggacggagatgaggagtagtcagcgtgatgccaaaacgcgtcttcttaatccaattctaattctgaatgtttcgtgtgggcttaataccatgtctattaatatatagcctcgatgatgagagagttacaaagaacaaaactccagacacaaacctccaaatttttcagcagaagcactctgcgtcgctgagctgaggtcggctctgcgatccatacgtggccgcacccacacagcacgtgctgtgacgatggctgaacggaaagtgtacactgttcctgaatattgaaataaaacaataaacttttaatggtaaaaaaaaaaa

SEQ ID NO: 16193 - DNA, 653 bp, Homo sapiens
  misc_feature (1)...(653): n = a,t,c or g
tttttaaattgacaacattattttactggaatttagcagggagaagataatatcttcaagctttcacaaagaaaatctccacattgaactcaagccaaataaagaaaatccaagttcctgtttcagtctcaactggcccgggtactaaagcaatgcactcctctcttaggaggcatgtgtcaagctgtcagtgatgtggccatcttttcatgacccttaactctctgcatcatgtctcagcaataccaggcatgaattctgaaaaacttcttccacttatatggttttcctcatccagctgagaatgctgctggttactgcaaaactgttcaccaaccatatgctctggtccatacagctttcttcttaaactctgggagaactctcaaggacagcagggtggctttcaaaagatccctggactgtgctgagagggcttctttagggctttccatgatgctgaatagccagtcaatgaacttctggggtctgttccttccatggctctttctgcagcagcagagccatgctattgggaaggagagtgagaacctcctgcagagtgaccctgtgcattggactcctgccaaggaagcttggtactgggccagccgggccattctcctgatgccatggcaaccaactnggactga

SEQ ID NO: 16194 - DNA, 679 bp, Homo sapiens
  misc_feature (1)...(679): n = a,t,c or g
tttttcaactgatgaccaatttattataatctgttagtagcacacagacaaatattagttaaaccagaaccatgtctacacagaagtgggcaatgacatgtgccattctatggcacacgggtgtgcacttaatcatcatgttttagcattttgatcttctgcttatggcgctcaatttctttctgcagacgctcaatctccttcttatgatgaacgatttcttcttcatggtgttttttcaaagctgccagttgttctctactctgtgctcggaaatatcgttcctcttcagcctgctctctctttccgaaggccccaccggcttcccggatggagcccgcgccccggtcgacattctcggactgatccgagccgaagcctcgggcttgcatggtcctcacgccccacacgccaagccacgtccgcgccgccaacgccgtcactgccattgctgctggagctgcacccctgcggtgttccaactgtttaaaattgatcagggaccatgaaaagaaacttgtgcttcaccgaagaaaaatatctaaacatcgaaaaacttaaatattatggaaaaaaaacattgcaaaatataaaataaataaaaaaaggaangggcggccgctctagaggatccctcgaggggcccaagcttacgcgtgcatgcgacgtcatagctctc

SEQ ID NO: 16195 - DNA, 475 bp, Homo sapiens
  misc_feature (1)...(475): n = a,t,c or g
aaaaagagaaacctttatttacaaccatgggagtcccacaggagtacacaaaacacacaatgtgcacacacacaaaatgaaccttttaagtcaataccatgcgtgctcctggccgcgcgccacccctcagtgccctatccgcaccaccatcacagtgacgttgtcggccgagccccgctgcaccgccttgttggccagcctgttgcaggctgcttcgtagcgggcgtcggctgcggacttcccttcccgggtctggatcttttcatcctcgagacaggacaagatgaagttcacggcttcttctggggtaaagaccttgaagagcccatcacaggccaacaaaatgaacctgtcattgggggtcagctggcagcgtctgatgtcgggcacagaggtgacanctgcagcgcttgtactgcccgtccccaatggagcgtgacacctctagcacgcccaaaacacgcccatccctgac

SEQ ID NO: 16196 - DNA, 405 bp, Homo sapiens
gcgtcccccttgatcccctgtggtaccggtccggaattcccgggtggagaggaaggagcttcaggcttgaaaaccatcaaagcaggtttcttccgagatggccagtggtcacctgagatggagcagagagcacctgtggcgggcatcttctctagaagccgcctgtgagccctacggaggccctgggcttcgtgccgtaagacagacggtgtcctgcaggtacgtgggggaaccctgtaggcagggactttgcctgctttctcagaacaggacagaggagtttggctggggcaaccccaaggtgaccgggatgctgtcgccccagctctgggccaggctgatgtgggaagggaggaaggagggacagttacgggccaagctgacgtgggaaaggaagggaagaag

SEQ ID NO: 16197 - DNA, 3667 bp, Homo sapiens
  misc_feature (1)...(3667): n = a,t,c or g
aagcttaaaaaggagtaggcgggaggcgggggcacgatggttccccagaccaccccagcccaggggggttgtgttctggggattcaggaggtcgaggcacccagtccgtggtgagcagggccaggtctccttccttcccaagagcacggtgcgagtgccttccccacagctctcccaggtgtctgtctccctcactcccccagggccaggacagcgagcagggagcacgccttcctcctggtccctcccagaccctcgccaggctcagcagacccctctcctgttgcgttgctccttcggcaggaggtcagcgtgggtgagaagggagcagaggccagatgacccttcatgtcagttcaaggagaggcccccaggtcctcctcacgggttccactcccctcaccctcccagtatccatgagcatcccaccgccaccaagtgcagggcatccagggggtggagagtggatgggcttgaaggggagtgggtatgaggtttggacaaccccagatgtgaagagtgtgtgtgtgtgttgtgcacgtggattgcctgtatggtattgcaggggagaagaggatttggaaaaggtgcaaggaaattgcaagaatagaaaatgaaagaggaagtagaaaggtttgcggtataagaagggtgagagaaaggggagtggggttatggagggatctagaagagaatagtggggagggaaagggcaggaatggaaggcaagcccatcaccccaaggccccttccccatgtctacccctcccccaactccaaagaaggaaattaggaggccactgcggattatgtttgggtcatttccacatgctttattccagcaatcaaaataattaaaaacatctcaaattattatacacatacaaaataggtacagagtcttttgcttcctcccacccctagggaaaaactgctttgtgctttgggaagttgtctctgaaacccggggacagaggacgcaggacagactaggagggagccgggaggatgggctgcagctgtggaggagggtttcagaggagagaggtcggagagcagaggcctgagaagccagaggcaggtggagagagggtggaaagtgagccagcgggctgggctggagccgcacacgctctcctcccatgttaaatagcacctttagaaaaattcacaagtccccatccacaaaaaaaaaaaaaaagaaagaaaaaatatcaaggaataaaaatagactttgaacaaaaaggaacatttgctggcctgggggggcatctcaatttctatagcaccagtgattccctccccaccccacccatcacatagatgtagcacctttggtataaaaatggggagccgcttccaccctgcccccatccccgcccccaggcagttgccccggtgacacatcaagacaagaacgaggtagtctttcagcaacacagttacacaaggaacagaacagaacagtctctcccgcccagcctgcggcacaagggatgacacgcgttccccaaatccgatgtttctgctttgtcgtggcccttcctgactctcctccgaacccagtgaggggctggtggctcccccggcatgaccccctcaaaaacgaaggggagatgttgcaagagccatgggagcgccagatggcaaggcttctttggcagtctgagaaccccaggtccccagggcctgggggtgctgggcgggcaggagcgggctgagggtgggggccacttgggtgtttgagcattgcctttgattgctgggcagacaatacattgtttcctgtgtcttctggggagacagatttgggaaggagtggaggggaggccaaggggggtgtggagaaaggagcagaaagggcagcattggggtttcataacccaacgggcagaaagggacttacccccgcatgggtcttcaagcaagtggaccaagcttccttttttaaaaacttatttatttattcttttttttttttttttttttttggtaaggttgaatgcacttttggtttttggtcatgttcggttggtcaaagataaaaactaagtttgagagatgaatgcaaaggaaaaaaatattttccaaagtccatgtgaaattgtctcccattttttggcttttgggggggttcagtttgggttgcttgtctgtttccgggttggggggaaagttggttgggtgggagggagcccaggttgggatggagggagtttacaggaagcagacagggccaacgtcgaagccgaattcctggtctggggcacccaacgtccaagggggccacatcgatgatgggcaggccgggaggacttggtggttttgtattcaatcactgtcttgccccagggctccggtgtgaactcgtgcagccatcgacagtgacgctgtaggtgaagcggctggttgcccctcggcgcgagatgctcgatctcgttggagcccttgaggagcagggcccttgcttgaggttgcccagtctgctgggnccatgtaggccacggcttttcttgcagtggtaggtgatgttctgggaggcctcggtggaacatcaggcgcaggaaggtcagctggatggccacatccggcagggtcggagccctggcccgccatactcgaactggaatccatcggtcatgctctcgccgaaccagacatgcctcttgtccttggggttcttgctgatgtaccagttcttctgggccacactgggctgagtggggtacacgcaggtctcaccagtctccatgttgcagaagactttgatggcatccaggttgcagccttggttggggtcaatccagtactctccactcttccagtcagagtggcaacatcttgaggtcacggcaggtgcgggcggggttcttgcggcttccctctgggctccggatgttctcgatctgctggctcaggctcttgagggtggtgtccacctcgaggtcacggtcacgaaccacattggcatcatcagcccggtagtagcggccaccatcgtgagccttctcttgaggtggctggggccaggaagctgaagtcgaaaccagcgctgggaggaccagggggaccaggaggtcccaggagggccggggggaccaacaggaccagcatcaccagtgcgaccgcgaggaccagggggcccaatggggccagggagaccgttgagtccatctttgccaggagcaccagcagagccagggggacctcggggaccagcaggaccagaggctccagagggaccttgttcaccaggagagccaggagggccagggggaccctggaggccagagaagccacggtgaccctttatgcctctgtcgccctgttcgcctgtctcacccttgtcaccacgggggccttggggtccggcggggccacgggcgccaacagggccgacaggaccggcgggaccagcaggaccagtctcaccacgatcaccactcttgccagcagggccaacgggccaggggcaccaggagcaccaggagcaccagggagtccagcggggccggtctcaccacggtcacccttggcgccaggagaaccgtctcgtccaggggaaccttcggcaccaggagccccctcacgtccagattcaccagggggtccagccaatccaggggggcccatgggaccagggggaccacgttcaccacttgctccc

SEQ ID NO: 16198 - DNA, 581 bp, Homo sapiens
  misc_feature (1)...(581): n = a,t,c or g
gagaattaattgggtgcttgttctggaccagatactgtgctactactgtgctaggtcctttgtttttttagacatggggtctcgctgnnnnnnnnnnnnnnnnnnnnnnnnnnnnnnnnnnnnnnnnnnnnnnnnnnnnnnnnnnnnnnnnnnnnnnnnnnnnnnnnnnnnnnnnnnnnnnnnnnnnnnnnnnnnnnnnnnnnnnnngcaatttacagaaattgtcactttcatgatttccaacaaaacaacgagcaagttactcgttgttttacaaatgggaaaagttaaacctgttgagatttgcttcctgaagtcatgcacctgtttacatggacaaggctaggaatcaaacttgggtttgtctaactccagagtccctcctaggaattaacctccggtgctctgaactgccatgcaaaagaatgtggacttcattctgaanggaatgggaatggccncgnaaattttaaccacgacngtnnncgctcaacacatnaanacacgccgggctcttttcttnggcatnagcaccgnnnncggcaattacgnnaaatnctggcttttccangnttatttca

SEQ ID NO: 16199 - DNA, 350 bp, Homo sapiens
  misc_feature (1)...(350): n = a,t,c or g
gaagtaaggatgtttgcaaaaactatgctgaggcaggagaatcgaatnnnnnnnnnnnnnnnnnnnnnnnnnnnnnnnnnnnnnnnnacagccaggtgacagcctgggtgacagagtgagactcgtctctgaaaaaacaaaaagcataatagccaaaaagttaaaataacccaattgtccattaactggagaatggnnnnnnnnnnnnnnnnnnnnnnnnnnnnnnnnnnnnnnnnnnnnnnnnnnnnnnnnnnnnnnnnnnnnnnnnnnnnnnnnnnnnnnnnnnnnnnnnnnnnnnnnnnnnnnnnnnnnnnnnnnnnnnnnnctcccgactagctgggattacaagg

SEQ ID NO: 16200 - DNA, 2348 bp, Homo sapiens
ctggccacaagtgattcaccaccttggccccacgaagtactgggattacagtcatgagctaccacactgggccaaagccctcgtattgtaacctccaagatgttttcatttctaaagtcaaaggttgtcagagttgctgttttgcagggagccatgggatggggagtctccgggaaacccaggctggctccttaaatggcatcacccaagttggccatcaagcttccccagactcagtcactcggccccctctttccctggctgtagagcaggggtttggactcgaggctgctgagttcctctccagcttccatgcccagtggcagtgacttatcaactggcccacccggtggatgtaggggtgatgcagccctgctctgtcctcttgagtgctgggtggccatgagagagggaggccatgagagggaggggagggttctcatctgcttagtgccaccccctccccagcccaccccaggtcctctgccgccttgggttcctgcgtgagcagtccttctcactctgggcgatgttcgctttcaccagcccaaccccaagaagtccaccctggggaggacagagggggtctccacggctccacacccccatgctttgtcggagatctggccaggcagagtggtgccctcttgactgagcctcgagcctttgctttccccttactccaaataaagccgcagccctggcgagggagcccagaggcctgaggacagcctgctgggtgcctggcactctctagatcctccctgcctgggcggtgggcatctgcaattctccctgtctcgaactgcagcagaatgtgtgggcagggttaggcagatagagagtgggtgcctggactcattggtcagactctaagaccgcccaccgcccgccgcccccgcagtccttcccaggactggctgacccaccagataggggagggtgttgtttcttattattacattttttgagaaaagctatgcaggcctgggagacgtctgtgccctaggagtcccttctggcctgaagactcaaggctgcaaacaggtgctgagagggaacaagaaggggagttggggtgcaacacacccagtgacagaccaggagtgagtgctgtggccacagattctaatcctcacaactgcagtgtgatttaggctaagccccttgcctactccgattcttgccttaaataagtgaaaaggaaagtcaagtttgatgagttgtggctctttagtgggtggatttgcatgtaccatggattacatttaccagggtctaggaattgtcaagcgcccagcaggctgccatcaggcctctgagctccttcgccaggcggctttatttggagtaagaggaaagcaaaggtttgaggctcagtcaagagggcgccactctgcctggctagctctccgacaaagcagacgggggggtgtggagccgtggtgaccccctccgtcctccccagggtgggctccttgggcttgggctggtggaagtgaatattgcctgcagcaagaagaaggactgttcatgtgggagcgcaaggcggcagcggggttggaaacccacccccacacagtcaacacctgctgtcacaccaggctaatcaagaacacctttctttggtgcattaaccacctgctattaaataaaaggctgttactaggtggcaaagtaacacactgcagtagagcctatttgtaatctgagatcagtggctgtaaggcaccatccttgagccaagcaagtactaatattcttgttatcttaattagaatgcaagagatcgtgtttttaaaattctctttgaatctgtcactttgccctcctcttcctgggtgatacacctggtagtgctggtgggggccatcataatgccccttgtcccagattcccttcttttagatgggactcgagcactgatcatttcagccctgtatctctcaggtcagcgtggttcagtttgctgtgcagagtccaggggagataaccacgctgtgcacacatgagattggctgacttggcaggactgtgcaattgtcagaaggccgtggggagtgggggccagtgcctgcagcctgccctgcctctctcacaggcccttagagcatcgccaggtgcagagctccacagctctctttcccaaggagtaatcagagggtgagaacgtggagcctggtggacaggtgaaagcactgggatctttctgcccagaaaggggaaagttgcacatttatatcctagagggaagcgacagcagtgcttctccctgtgctgaggtacaggtaaggagggtggtttgtaaagttcactggggagggtgatccctctttattgttctaata

SEQ ID NO: 16201 - DNA, 823 bp, Homo sapiens
  misc_feature (1)...(823): n = a,t,c or g
ggcacgagggcgactcccgctcgtgccccggagtcaccgccgtccgcggatccggcgctagtagcggggcctgccgaggaagccgagtgcccgccgccgcgccagcctcagcccgcgcagaatgtgctcgctgccccgcggcttcgagccccaagctcccgaggacttggcgcagcggagtttgttggagctgcggtaattgttgaagcgccaggagagacttttgcgcaacgaaaaattcatttgcaaattgcccgacaaaggtaaaaagatctttgactcttttgccaaactgaaagctgccattgcagaatgtgaagaagttagaagaaaaagtgaactgtttaaccctgttagtttagactgtaagctaaggcaaaaagcaattgcagaagttgatgtgggtacagataaggcccagaattctgacccgatacttgatacttcatcactagttcctggatgttcctctgtagataacatcaagtcatctcaaacctcacaaaaccagggacttgaccgtcctactcttgaaggtgatgaagagacttcggaggttgagtacacagtgaataagggcccagcttccagcaatagagacagggtaccaccttcatctgaagctagtgagcatcacccgcggcatcgtgtttcaagtcaagcggaagatacttccagcagctttgacaacctgtttattgcaggttacagaggatcaccattgcggaccaaggtgaacaacagtcagaagaaanccangtactaagaacttgcaggctttccagtgggactganaanaacctnttacntganngctnnaaac

SEQ ID NO: 16202 - DNA, 432 bp, Homo sapiens
cgggggacctcccttgggagatcaatcccctgtcctcctgttctttgctccatgagaaagatccacctacgacctcaggtcctcagaccgaccagcccaagaaacatctcaccaatttcaaatccgccactcccagagcccctggaactctggcccaaggctctctgactgactccttcccagatcttctcggcttagcggctgaagactgacactgcccgatcgcctcggaagccccctagaccatcacggatgccgagcttcgggtaactctcacagtggaaggttcccacgccgcccctaatcccgctcgaagcagccctgagaaacatcgcccattctctctccatatcaccccccaaaaatttttgccaccccaacacttcaacactattttgttttatttttcttattaatataagacggcaggaa

SEQ ID NO: 16203 - DNA, 513 bp, Homo sapiens
  misc_feature (1)...(513): n = a,t,c or g
gaacaagggaaaaacacaatcaaacaaattagtggcatatatacccacctgagtaaagagaactcggcctcccaaagtgctgggacagttttagaatattaacttgttttttggtttgataatggtaagatgattatgtttagaaaaaaactatcagggttgaaaactgaaatatgtacacctgaaatttagaaaaagttaaaaacatttacactgagataaaattatacctgttcagttgtcattgtctgnnnnnnnnnnnnnnnnnnnnnnnnnnnnnnnnnnnnnnnnnnnngggnnnnnnnnnnnnnnnnnnnnnnnnnnnnnnnnnnnnnnnnnnnnnnnnnnnnnnnnnnnnnnnnnnnnnnnnnnnnnnnnnnnnnnnnnnnnnnnnnnnnnnnnnnnnnnnnnnnnnnnnnnnnnnnnnnnnattataggcatgagccccatgcccagnctgggtttggntatgtantaangggcttgtgtnatttangtggaataaaaggtttt

SEQ ID NO: 16204 - DNA, 440 bp, Homo sapiens
cggcagctctgtgcagtaggtactattaatattatcacacccactttaaaatggaagaaaccaaggcaggaagtggtggggtcaggagctgaaccctgtaggtctgcctccgggcctgtggtttattgtttcttgcaaatagcgaacagataacaagacaatcccaggccacggtgaatgtcatgcagacccaggctgggcgccatcactgcctgcactggtcactcccctgctgggcctccctgtcctctctgactagaggctcggtggtccctccttcctcatgggggctgcgggtgagcttgagctgagcttgagcttgagctgtgggcagccccagcacgtgcaggagccggaagatgcctggccccctctctatggctcagtcttcaccgggtccccagggtggtgggcaggcacaggcactagctcacccttgc

SEQ ID NO: 16205 - DNA, 1831 bp, Homo sapiens
agtttaatagacatttattccttcagttgaacaacctctacacaattaaaatgtatgacttaagatcttttctttttttgtgaagaaatttaggtctcaagaacttttatgaacttgctatgagtacttcctggaaatcaattaactgagtcttttgaaacccctagagaagataggagaaaattggttcagaacgagcatttaaattaagtcagcaaagtcagaatttaaaattgggcaattccttgtctacattttctttacactcaaattgaccctggacaacagtagtctagtctcctggaaggacatggtgcaaacagaaatgcaatgtggtggtatactcataagtcaaagtgggttgcacaagtgatgggtccaactttgtggaatggtaaggatttttagggttgtttggccagaacaagagaaataactgcagaaaacacatatgggttggaaacccatgcgcttgtgactttttctgtagcctatgggagtggacaggagtggggtaaccccaagatgtttttaagacggactgggactaagaatgacggtacttatagccaacttacttccccccctaatggggactggaggggattcataatgatcacaattagcattacgggttaaggtattttggggttgacgtctaagctcacactggaaaggtatttatctaatggccactggctcaccagcttcccaccctagcattcattgctagcttaccaatcttaaggctaataattttatcgcacattcaacttcaaaacacaccagtgtttaccattaccactaatcactgaatgcccatgaagccatggcactgaaccaggagctttcaccttttatgtgaatttaaaatggtactgtggaggctgaggcaattttcttcaggctaacccagattttctaaagcccaacttaaaaagtctacacctgccaaactaaaaaaaacgcagccacttgaaaataaaccagcagagcattgccatcactccgataaagctgcaggtttcatcacatgcaccagacaaatctacagggctagtttcagttctctccttttaaagaatttattaagcctgttataccacacagtatgttttatacactgacatacaactccctaataagataaagcaaagacaaaaaagtttatcttattagaaacaagatacaccaccacttattgtcttcaaacattattgcactttaactttcttaatttgacaaagcattcaagaaacatctgcagactagttttaacagacaaataacacctgtaagcagacatgactgtcctaaattgtttattaagtatgaattttacaaactttacttatattagcggtaacggtggagctggagagtattgcgccttctccaagctgcccggcgagagccaccaatagtgtggtggaacttgtggccctttccaaggccacggctctttcggcctgcagatgtcagcccacgcatctccctgtgcttgtggactggtttggtgatccactgggtgtcaggatttcttctgatagctttatggaatggatcaatgaggataacctcaaaaaatttgtatgtggaatcttcaccaacccagtaagaattcagggactctcagagccccacagtggcggtccagctcgctccctctgcaacggactgaaggcttcgagcaaactttagcctggttaacaccatgatggacaggcttgccgtaagttgcacccttaggaactgggcgttttcggccaccacggcgaacacgaatcctatatataacgtaaccttggcttggcttggtagcccagtcggc

SEQ ID NO: 16206 - DNA, 450 bp, Homo sapiens
atatgacactggcatgttttcatggtccaaattttcgttcaaaatcttgggccctttttcatttagaagaaccaaatattgctttttggactgaagctcagaaaatctgggaagatggctccagtgatcattctacatatattgtacaaacactagattttcacctgggtcataatactatggttaccaaaccatgtggtgctttggaaagtcctatggcaacaataaccaagataacaaggcgtcgccatgaaaatccaccccatgggagtagcaagtgtgaaagaatggttcaattatgttacagctacaagggaatgaaggagcttaaatctgcttcgtaatgttgatgctaacaacacttgaggaataggcactactgtggaggatttctagtttgttggagtgggattacagagggaggtttctaggctacaaccctggaaaccg

SEQ ID NO: 16207 - DNA, 366 bp, Homo sapiens
atttttaatctgagcacatacaaagtcacttattcttcagttaactggaagtgtggctatgcaggtattttagtctcagaccagatgtttgaataccttttcttgaatggggtagggacctccacagccagaattctgaaaagtacctcagcagtaggcactggaattatgctgtccacctgctgcaggactggggcaggaagagagctgctacagctatggtttctcctgggtaacaagactggtaaccagagccagttgacaagctggaactggcctttgtgtgtcactgctgggtgcctcagcctgctcctctgagattgtggtgcacggaaccctttctgcctcaatccaggtcagaactcc

SEQ ID NO: 16208 - DNA, 1432 bp, Homo sapiens
tttttttttttagcaatcacataaggaagcatttatttgaggtttaacatgaaatgatacaaataaaatgtgtataaacaaatccacattgagtcataacacagatagcaaaggacaaagtaaaaacaaagaaaactaattggcagctatatacagttggacacaatggtgtcttgtacactagaaagtcttttacaaaataatcatcttagatcaacagaagaccaatcttcaatgtcgtcctgcaagatgggttactttaacatctcctcctaaaaacaaaaacaaaataccagttagatttgtgcaactctgacaagcttttaaaggtccactttcatgaattgttttaagtcctcactttattttcttcaataattaaagatcatatgcatatttattggtaaaatacagtttgggtagtcaataaactcaccctggagttcccaaatgacattaaattcaaatctattcaggaaagaatctgggaatacaaccttcccatattcagaggttcaactatgctagattaaggtctactagaagcatctctagtaacccaagtaaaatgctatcacaaacaccaatttctaataagtttattacaagaacataaattgatctgtgcatatgatctttaatttatatcccagatttaaaagttcttgttttggtttgtagatttcactattagctataaaaagaaaaagcaaggcattaaatcttaaaagaatgaacacttaaaatgaggctccacaattgaaatacaacactaaacagaagaccaaaatgattaagctgtaaaaaggcatttatgtactttaactcctgtaaaaaaccatttaagttaagtttagacacttaatctccaaaaagattaaaaatgaagccaaagtctgaagttttccactttaatctttacgctggtacatgaagttggaagagaccataccacaggacagcgttttctggtgtatgccttgcgctctgcccgcaacgtgcgacccccagagatagacgtggtcagggtgacacacggcctgcaatgaagttcccgctggcgggtacaaacaaggtataatgtcagagttagaagacaacattcttgttttccttaagttgtacccatttcagtactttacctgttaatagttctaaaatgtttaattattcctctagaccacctggtacacaaaagcaaacagaaaaactcttaagtttttctgcaatactaaagaaagtgagataagactttaaagttaaagatctatagacactttaggcaaaacaggctcataaagcaattaaaaaatcaacaatttagtaaaaacaggctacatagtattttgtttttacgtttcatttgtctattgatctttaaattaaattagacatttctactgttttcctgtactcttatacacacctgttt

SEQ ID NO: 16209 - DNA, 428 bp, Homo sapiens
cttgttagaaattcagaaactcagagtttatttcagatcttctgggaaaaaagaatctgcacaagatctccagtttattgttcacattaaaacttgagaggtgccttctaactcaacatatcttttgtctgaaaaatatacacaactcattctttgtgtggcaaatatagcactaaaaaatgtacatgtttgtgtttatgcctttagctttatactttactattaataaaagtatatatacagtggtgttgtagatcttataccattctcttctctcagagttagagaatacattagagaatatttctgtgttgaaaattgttggataatttcagtcattcctgtaagtcagaacgaattttctttactttctcatttgaccttaattcaaatgataaattttgcccacgtgtaaatgtgtgtgtgtg

SEQ ID NO: 16210 - DNA, 658 bp, Homo sapiens
ctccgtgtctctacgctctcttttctctgggcttgcctccttcactatgggcttgcctccttcactatgggcaagcttccaccttccattcctccttcttctcccttagcctgtgttctcaaaaacttaaaacctcttcaactcacacctgacctaaaacctaaatgccttattttcttctgcaatgccgcttgaccccaatacaactcgacagtagttccaaatagccaaaaaatggcactttgaatttttccatactgcaagatctaaataattcttctaaaataggcaaacggtctgaggtgcctgatgtccaggcattcttttacacatcagtcccttcctagtctctgtgcccagtgcaattcatcccaaatcttccttctttccctcaatcttccttttctacagacccatctgacctctcccttcctccccaggctgctccttgccaggccgagctaggtcccaattcttcctcagcctccgctcctccaccctataatccttttatcacctcccctcctcacaccccgtccggtttacagtttcattccgtgagtagccctcccccatctgcccagcaatttactcttaaaaaggtggctggagctaaaggcatagtcaaggttaatgctcctttttctttatcccaaaa

SEQ ID NO: 16211 - DNA, 900 bp, Homo sapiens
  misc_feature (1)...(900): n = a,t,c or g
aggagattggggttttgagtggttgcgtgggtggtttcaatttgccagggaacagtggcaggctgctagcaaggcagtgagaagctcttggcagccaaatgggtgcattcagggctgatttatagagacccttggcttctccttctcctactccctgtctttctggcattttgtagcttgttagattttctgccagaggggtgggtcagagcagtggaggggagacatcgcccatgtgcttctgctactggtccttgggctgggtggttggtagaggagatgttgacactatgagctaagggttggcttttgtaattacctgaatctgaaaggaatgcctaaggttaccttggggtttctcttctggtgagatagggttcctggtttgagtaagttaatgtcctggatatttcttgtggcagggggtggtcaaagagcctgattgctgacccagtctcaggcctgtggtcgatgacctctcggtagtttcaaagggggctggagggggatatttgacttgttttttcgaaatgtagccttctaaccctcaagtctttagaagctgggtggactcttagtggtcctgcagcgtatcctaaaagactacctttgaaacaggattcttgtatggccaggatcgtgtctgggaaccagaaaccctacaccctccccctccagggaatgctgagttccagttttgagcagaggtgaggcagaatccactgtagccttccgccctggtatttggggggatgaccagcccaggcgttgggtgttagtctgcatgagtttgtgagaggaaatagctggagtgtcctggcagtgcccttgaagttggttaaggaccttcctgtaaactcttgcccctacttctaactactctattaatatntcctatat

SEQ ID NO: 16212 - DNA, 96 bp, Homo sapiens
gtctgcctggggctggtaatcaggaagttcctaaacagctccgaattctgcagtaaaaagtgagcctccgccttggaggagactactggttcgccc

SEQ ID NO: 16213 - DNA, 794 bp, Homo sapiens
  misc_feature (1)...(794): n = a,t,c or g
ttgactgattacgaattaatacgactnnnnnnnnnnnnnnnnnnnnnnnnnnnnnnnnnnnggcacgaggagtgtcccttcagccagtctcagagctctttggcaattcaactgacccttgtccttcagtccagacaatgccccagggcccacctgcattcaaactcggactgttctccttcccacccctattatcttttcaactttatggacagtacatgcaattttctcattcattttctcatttaacatctaacagcttcatgatatccccattttacagataaggaaaccaaggctttaagaggatagggaccctaatcggctaaggcagaattaggatttgaacccagatccccatgatgccagaatctaagccttgaccaaatatgtgttactattacttttgttgttgttgttgttctgggtaactccaaccctctgctcgttggccttgtcacctcagtgctgattttgcagatgaagagactaaggttccgaggtgctagagcacagtggttaggaacacacactctagagccagagtgcctgggtttgagcctcgttctgccgtttactagccgtatggccttgggcaacttgcttaacttctctttgcctcagttcctcttctcttgggttgttangagaatgaatgaggtgatatccacagtgtccancaccctgcaagcggcacgtgtggtggatcacacctgcnatcccagnacnttgnnangccnangaagtggncacttgangcaggagtcnngaccagtntggcaaaangngnaacc

SEQ ID NO: 16214 - DNA, 1079 bp, Homo sapiens
caggaataccaggatggcgtgcccaagattccaacagcctgtattacggtggaagatgcagaaatgatgtcaagaatggcttctcatgggatcaaaattgtcattcagctaaagatgggggcaaagacctacccagatactgattccttcaacactgtagcagagatcactgggagcaaatatccagaacaggttgtactggtcagtggacatctggacagctgggatgttgggcagggtgccatggatgatggcggtggagcctttatatcatgggaagcactctcacttattaaagatcttgggctgcgtccaaagaggactctgaggctggtgctctggactgcagaagaacaaggtggagttggtgccttccagtattatcagttacacaaggtaaatatttccaactacagtctggtgatggagtctgacgcaggaaccttcttacccactgggctgcaattcactggcagtgaaaaggccagggccatcatggaggaggttatgagcctgctgcagcccctcaatatcactcaggtcctgagccatggagaagggacagacatcaacttttggatccaagctggagtgcctggagccagtctacttgatgacttatacaagtatttcttcttccatcactcccacggagacaccatgactgtcatggatccaaagcagatgaatgttgctgctgctgtttgggctgttgtttcttatgttgttgcagacatggaagaaatgctgcctaggtcctagaaacagtaagaaagaaacgttttcatgcttctggccaggaatcctgggtctgcaactttggaaaactcctcttcacataacaatttcatccaattcatcttcaaagcacaactctatttcatgctttctgttattatctttcttgatactttccaaattctctgattctagaaaaaggaatcattctcccctccctcccaccacatagaatcaacatatggtagggattacagtgggggcatttctttatatcacctcttaaaaacattgtttccactttaaaagtaaacacttaataaatttttggaagatctctg

SEQ ID NO: 16215 - DNA, 557 bp, Homo sapiens
  misc_feature (1)...(557): n = a,t,c or g
gtgnnnnnnntttgaaccccttgatnnnnnnnnnnnnnnnnnnnnnnnnnnnnnnnnnnnnnnnnnnnnnnnnnnnnnnnnnnggcacgagtaaaaagtctcccactaaagaaaaccaaggacccgatggcttcactgttgaattctaccaaacatttaaagaagaactaataccaatcccactcaagctattgaaaaatagaggaggagagaatatttccaaagnnnnnnnnnnnnnnnnnnnnnnnnnnnnnnnnnnnnnnnnnnnnnnnnnnnnnnnnnnnnnnaaactgctggccaatttctctgatgaatattgatgccagaatcctcagcaaaatattagcaaactaaattcaacaatacattaaaaagatcattcatcannnnnnnnnnnnnnnnnnnnnnnnnnnnnnnnnnnnnnnnnnnnnnnnnnnnnnnnnnnnnnnnnnnnnnnnnnnnnnnnnnnnnnnnnnnnnnnnnnnnnnnnnnnnnnnnnnnnnnnnnnnnnnnnnnnnnnnnnnnnnnnnnnnnnnnnnnnnnnnnnnnnnnagctt

SEQ ID NO: 16216 - DNA, 476 bp, Homo sapiens
  misc_feature (1)...(476): n = a,t,c or g
ccattnnnnnnnnnnnnnnnnnnnnnnnnnnnnnnnnnnnnnnnnnnnnnnnnnnnnnnnnnnnnnnnnnnnggcacgagcccctttctctgtgcaacctctctgccccttaataaatgtttttggtactgactactgctgctcctgctaataccatcctgtagaaatttttcttgagtgaggaatagtttttagaaggcttttatgatgataacttttaaatttatttttaactatgccagcaggttattagatatataggttcaaaggagattgaggctggagtctgttcaaacattttcagaggtgaagatgacacagggttcatggagatttccttcatggtaccagaacagggcagggtttcactgcatgataatacccatgtttccattgcttgtagacctaatcatttttacttattgattggcactgtgggccaagatcgtgacatccatcctaataagcaggtctca

SEQ ID NO: 16217 - DNA, 1040 bp, Homo sapiens
cccacgcgtccgcaactgcaacgtctgggatgcactcaaagccgaccgggcaggtgtcttggctgggcatgacaaccgcgtcagctgcctgggcgtgactgacgatggcatggctgtggcgacagggtcctgggatagcttcctcaagatctggaactaacgccagtagcatgtggatgccatggagactggaagaccattccaacttggacgcgttaccatgagagcatatcctatccaaccgtactaacgtggacaccctacacctcccctcagaacttcaaaagggcaagatcttttttccttcacttattgctgaaaccaagagcacaattcccattgagagaaagatctctgtgctgtaaactaaaacaaattgtgcattccttccggggccatcgtctttgttttcttttttgtcttgaatgaattttaaaaggaaatatataataaaaatgttaaccagaaggtaaacttgagtgtaattgtcagacagacacgcattcatgcaaaacatgctgagggctttgttcatctggtcatcgtgtccaaatttcagtcatgtttgtagcaagattttggaagcattcatatttcctttttaaaatgtattcctttgtgttcaacagttaatcaaaaccagagagtctagggcagcctctctgatgttgtcaatgatgtaaattcagtccctggtttttaattttctgtctgatgtcacagatcattgttgcacacaaacgtggcatagaaaagaacatgttcagaagccatggggccaagcacatgcggggacggtctcaaatgcgtgatcagagaatccttcacctttgctgaaaagtgagctcagatccagcaccatgttcctcctgacccatcctgtctatcttctcagttgagtttttaatctcactttgggtttccttgtgaagttggagggaagtttataatagcctaacactaccccacccccaactaggaggaacctctgttttcaagagagatgcctgtcctgtgcttggatagtcagtcaattattt

SEQ ID NO: 16218 - DNA, 848 bp, Homo sapiens
  misc_feature (1)...(848): n = a,t,c or g
ggcggcggcaacatggcggacgtgataaatgtcagtgagaacctggaagccttttcccaggccattaatgccatccaggcgctgcgctccagcgtgagcagggtgttcgactgcctgaaggatgggatgcggaacaaggagacgctggagggccgggagaaggcctttattgcgcacttccaggacaacttacattcggtcaaccgggacctcaatgagctggaacgtctgagcaatctggtaggcaagccatctgagaaccatcctcttcataacagtgggctgttaagcctggatcctgtgcaggacaaaactcctctctatagtcaactccttcaagcatataagtggtcaaacaagttgcagtaccatgcaggactagcatctggccttttaaatcagcagtcattgaaggcgttccgctaatcagatgggagtatctgccaaacgtagaccaaaggctcagcccacaactcttgtcctaccacctcaatatgttgatgatgtgatcagccgcattgacaggatgtttcctgaaatgtccatccacttatccagacccaatggaacatcagcaatgcttctggtgaccttgggaaaggtgttgaaagtgatcgtcgtcatgcggagctgtttcattgatcgaacaatagtaaagggatataacgagaatgtctacacagaagatggcaagcttgatatatgggtccaaatccaactatcaagtattccagaagggtgacaggaccatggccaccactggccctgctccattttcagctggccccagatggccggatgttgtgggtccgatcctttcnggacngggttaggaggttactaaaggt

SEQ ID NO: 16219 - DNA, 817 bp, Homo sapiens
cgcacacaaggacggtttattggctagagagcaaacgcaggcagaagtaaaaacaccagataaaaagtgagtgtggagaggtgaagactgcggccgctggacttggcttgagctgtgaggggtgggaggggaggatagcaccggaagatgctgctccgggcccaacaccagccctggccaggctctcccctcccaggggcagcgcccagtccccaggggctgccagagccctgtgtgccttgccgcattcccctgatgcagcttttggcaactgaaaggcagggctctcgctgagtgcacctggggcttcctgagcccatctgcggcggccccaccctggcctaggtgctgagtgcagctgctgcagacagcccctccctccttagtggagcctggagggtggggtgctcggggatgcaggcaggggcaggggctccagagccacaggtcagaagcagggctgggggaggggtggagccattcagcctcaggcaccctcacagctaggtgactaggggcagggacagaatggggtgaattctccccactctgaacaactgtgtcaccaacaaacaagttaagtggcagggctgcgcccatcctctcctgcctaggccagaatgcgggggggatgggggcacctgcctagctgagcagttccaagtaggtgacagggaccttgcccttcttgttgcctctctcgccaatgagccagtcagggtccatgccaggcaggctgtagacagtgatgagctcatcagccagcagggccagctcactgctgtcggctgcctcgtagtcatagagcacccgtcga

SEQ ID NO: 16220 - DNA, 1088 bp, Homo sapiens
cacagttgtcccctatctccagacctcattcgcaatgaagtagaatgtctgaaagcagatttcaaccacagaatcaaggaggttctcttcaactccctcttcagtgcctactatgttgcatttctccccctgtgttttgtgaagagtacccagtactatgacatgcgctggtcatgtgagcacctcattatggtgtggatcaatgcttttgtcatgctcaccacgcaactgttgccatccaaatactgtgatttgctacataaatcagctgctcacctgggcaagtggccagaagttggaacatgggtcctacagcaatgctccacagcacatttggtcagaaaatacaatatggcctcaaggggtgctggtgcggcacagccagatgtttatatagagccatggggccttacaacgtggcagtgccttcagatgtatctcatgcccgcttttatttcttatttcatcgaccattaaggctgttaaatctgctcatccttattgagggcagtgtcgtcttctatcagctctattccttgctgcggtcggagaagtggaaccacacactttccatggctctcatcctcttctgcaactactatgttttatttaaacttctccgggacagaatagtattaggcagggcatactcctacccactcaacagttatgaactcaaggcaaactaagctgcctctcaacaatgagggagaactcagataaaaatattttcatacgttctatttttttcttgtgatttttataaatatttaagatattttatattttgtatactattatgttttgaaagtcgggaagagtaagggatattaaatgtatccgtaaacaaggtgatgtgatctttcatgtgttagtatattcgaataatatacatatgagaggtatgcctgtccagtaaagagattgatttgtttgtatggctctggaataactcattcgtttatgaacacatctcatgtattacttgacacagtacctttggtatgtctgcttttctttcaatcgtcattatctttagccctcagctggccagtacttattgctaaagaaagggagatcaatggagt

SEQ ID NO: 16221 - DNA, 2621 bp, Homo sapiens
gggcattttaggaggaaaaaaaaaaacaatgcacagaaaaagggtaaaacaaaataggttgatgtggtggagacctttgacctcccaggtgcccccacaagcagctggcccaccctggagcaccaaagttgggggccacagccaccactgcctcttggagtccctttttcatggaaatgaagaccccttggtcgtgggccactagtgtacatgggctggaagtggggatgtccatggcccaagagacccctccagcttccagcccctggcaacagcgggagagcaaacccagcaccagggacttggcgtgagccagccgggaggcccccaatcaggctctggggtatcagagcaaccaagttgacgtagtgtgaaaaaatagtattcctttgataaaaaatactgtcccttggtcttctctaagtttgaaacaccccgaattcgggggcagcggcggcagttggcggcttggagagctcgggagagttccctggaaccagaacttggaccttctcgcttctgtcctccgtttagtctcctcctcggcgggacgcctcgtcgacgcgcccggcccggagcccccagcgcagagccgcgtttgaaggatgacctctaggaagaaagtgttgctgaaggttatcatcctgggagattctggagtcgggaagacatcactcatgaaccagtatgtgaataagaaattcagcaatcagtacaaagccacaataggagctgactttctgaccaaggaggtgatggtggatgacaggctagtcacaatgcagatatgggacacagcaggacaggaacggttccagtctctcggtgtggccttctacagaggtgcagactgctgcgttctggtatttgatgtgactgcccccaacacattcaaaaccctagatagctggagagatgagtttctcatccaggccagtcccccgagatcctgaaaacttccccatttgttgtgttgggaaacaagattgacctcgaaaacagacaagtggccacaaagcgggcacaggcctggtgctacagcaaaaacaacattccctactttgagaccagtgccaaggaggccatcaacgtggagcaggcgttccagacgattgcacggaatgcacttaagcaggaaacggaggtggagctgtacaacgaatttcctgaacctatcaaactggacaagaatgaccgggccaaggcctcggcagaaagctgcagttgctgagggggcagtgagagttgagcacagagtccttcacaaaccaagaacacacgtaggccttcaacacaattcccctctcctcttccaaacaaaacatacattgatctctcacatccagctgccaaaagaaaaccccatcaaacacagttacaccccacatatctcttcacacacacacacacacggcacacacacacacacagatctgacgtaatcaaactccagcccttgcccgtgatggctccttggggtctgcctgcccacccacatgagccccgcgagtatggcagcaggacaagccagcggtggaagtcattctgatatggagttggcattggaagcttattctttttgttcactggagagagagagaactgtttacagttaatctgtgtctaattatctgattttttttattggtcttgtggtctttttaccccccctttcccctccctccttgaaggctaccccttgggaaggctggtgccccatgccccattacaggctcacacccagtctgatcaggctgagttttgtatgtatctatctgttaatgcttgttacttttaactaatcagatctttttacagtatccatttattatgtaatgcttcttagaaaagaatcttatagtacatgttaatatatgcaaccaattaaaatgtataaattagtgtaagaaattcttggattatgtgtttaagtcctgtaatgcaggcctgtaaggtggagggttgaaccctgtttggattgcagagtgttactcagaattgggaaatccagctagcggcagtattctgtacagtagacacaagaattatgtacgccttttatcaaagacttaagagccaaaaagcttttcatctctccagggggaaaactgtctagttcccttctgtgtctaaattttccaaaacgttgatttgcataatacagtggtatgtgcaatggataaattgccgttatttcaaaaattaaaattctcattttctttcttttttttcccccctgctccacacttcaaaactcccgttagatcagcattctactacaagagtgaaaggaaaaccctaacagatctgtcctagtgattttacctttgttctagaaggcgctcctttcagggttgtggtattcttaggttagcggagctttttcctcttttccccacccatctccccaatattgcccattattaattaacctctttctttggttggaaccctggcagttctgctcccttcctaggatctgcccctgcattgtagcttgcttaacggagcacttctcctttttccaaaggtctacattctagggtgtgggctgagttcttctgtaaagagatgaacgcaatgccaataaaattgaacaagaacaatgatcaaaaaaaaaa

SEQ ID NO: 16222 - DNA, 1017 bp, Homo sapiens
tgagcagcaacagggccgggctgggcttatcagcctcccagcccagaccctggctgcagacataaataggccctgcaagagctggctgcttagagactgcgagaaggaggtcccccacgggcccttcaggatgaaagctgcggtgctgaccgttggcccgtgctcttcctgactgggggagccaggctcggcatttctggcagcaagatgaacccccccagagcccctgggatcgagtgaaggacctggccactgtgtacgtggatgtgctcaaagacagcggcagagactatgtgtcccagtttgaaggcttccgccttgcggaaaacagctaaacctaaagctccttgacaactgggacagcgtgacctccacctttcagccaagctgcgcgaacagctcggccctgtgacccaggagttctgggataacctggaaaaggagacagagggcctgaggcagggagatgagcaaggatctggaggaggtgaaggccaaggtgcagccctacctggacgactttccagaagaagtggcaggaggagatggagctctaccgccagaaggtggaagcctgcgcgcagagcttccaagagggcgcgcgccagaagctgcacgagcttgcaagagaagctgagcccactgggcgaggagatgcgcgacccgcgcgcccatgtggacgcgctgcgcacgcatctggccccctacagcgacgagctgcgctctagcgcttggccgcgcgccttgaggctctcaaggagaacggcggcgccagactggccgagtaccacgccaaggccaccgagcatctgagcacgctcagcgagaaggccaagcccgcgctcgaggacctccgccaaggcctgctgcccgtgctggagagcttcaaggtcagcttcctgagcgctctcgaggagtacactaagaagctcaacacccagtgaggcgcccgccgccgccccccttcccggtgctcagaataaacgtttccaaagtggaaaaaaaaaaaaaaaaaaa

SEQ ID NO: 16223 - DNA, 482 bp, Homo sapiens
  misc_feature (1)...(482): n = a,t,c or g
ggggaaggctggggtcctggccctgtctccagagctggggaggctgttgaatttgaagtgctattagaaaggccaggcagacatgggtcccagacagtgagaaacttagcactggtgttggagatggcgatttgagagctttctgggaaagtgactagttgtaatagtgagagaggatgagatctcttagggggaagagagaagagaggagagtgggaaggatccacggccgaacagcaggagatggcatttcctaggtagtgggaagccttgggaattttttgagctgtaatgcagttgatctatcgctgttgaacctagagtctagtcagcttgtctgtctgcttgaacatttccagtgactgggagacattattcgttggacacttggttgggtattttcccttgnattaaaagctagaaatctgtctggtaattncattccttgggcttaagccantggantncttggcataanttcc

SEQ ID NO: 16224 - DNA, 447 bp, Homo sapiens
  misc_feature (1)...(447): n = a,t,c or g
gtagccctatgaatcccnnnnnnnnnnnnnnnnnnnnnnnnnnnnnnnnnnnnnnnnnnnnnnnnnnnnnnnnnnnnnnnnnnnggcacgaggagcctccatctcaaaaaaaaggagacattagaaaactaagttgagtnnnnnnnnnnnnnnnnnnnnnnnnnnnnnnnnnnnnnnnnnnnnnnnnnnnnnnnnnnnnnnnnnnnnnnnnnnnnnnnnnnnnnnnnnnnnnnnnnnnnnnnnnnnnnnnnnnnnnnnnnnnnnngaaggaaaactaagttgaaagtgttatttttgcttcaatttttatttctttacataaaaggtttcttgtcataccttggtaaaaatttgatgagctggtttcattttgaaagcctttattttaaaaataagtatgtatctttgtatgatttataagtgtaccagtaggtagaaatacatgtg

SEQ ID NO: 16225 - DNA, 968 bp, Homo sapiens
ttttttttttttttttttcagtggaaaataacttttattgagaccccaccaactgcaaaatctgttcctggcattaagctccttcttcctttgcaattcggtctttcttcagtggtcccatgaatgctttcttctcctccatggtctggaagcggccatggccaaacttggaggtggtgtcaatgaacttaaggtcaatcttctccagagcccgccgcttcgtctgcaccagcaaggacttgcggagggtgagcacccgcttcttggttcccaccacacagcctttcagcatgacaaagtcattggtcacttcaccatagtggacaaagccacccagagggttgatgctcttgtcagataggtcatagtcagtggaggcattgttcttgatcagcttgccgtccttgataaggtagccctggccaatcttataaatcttcttgttgatctcagtgcggtgatggtagcctttctgcccagcgcgtgccacagagaaggctacacgagcaggatgccatgccccaatacaggccaccttgcgcaggcctcggtgggtcttgcggggcagcttcttggtgtgccaacgactggtgacccctttgtagcctttgcccttggtcaccccgatgacgtcgatcatctcatcctgcccaaacacttggttcacaggtacctgctgctcaagcctctcgcgggcccagtccagcttcttcggccacagtgcctccgttcacctggatctccatcaggtgggccttcttctggcgcagaggaagcaggcgcatctgggtgtgggcaatgacacggatgacttggcagtacttcttcatgctgctgaagtccttctccagctgcttcttgccatcctcatcctgccatttcttgcagtacttggtaaaggccttcttcttagatttatgccaattcttatagaaacgcctcttgcattcatcactgatgtgctcagc

SEQ ID NO: 16226 - DNA, 4611 bp, Homo sapiens
  misc_feature (1)...(4611): n = a,t,c or g
gtacaatacagtctggtctcctccagctccttctttctgcaacatggggaagaacaaactccttcatccaagtctggttcttctcctcttggtcctcctgcccacagacgcctcagtctctggaaaaccgcagtatatggttctggtcccctccctgctccacactgagaccactgagaagggctgtgtccttctgagctacctgaatgagacagtgactgtaagtgcttccttggagtctgtcaggggaaacaggagcctcttcactgacctggaggcggagaatgacgtactccactgtgtcgccttcgctgtcccaaagtcttcatccaatgaggaggtaatgttcctcactgtccaagtgaaaggaccaacccaagaatttaagaagcggaccacagtgatggttaagaacgaggacagtctggtctttgtccagacagacaaatcaatctacaaaccagggcagacagtgaaatttcgtgttgtctccatggatgaaaactttcaccccctgaatgagttgattccactagtatacattcaggatcccaaaggaaatcgcatcgcacaatggcagagtttccagttagagggtggcctccaagcaattttcttttcccctctcatcagagcccttccagggctcctacaaggtggtggtacagaagaaatcaggtggaaggacagagcaccctttcaccgtggaggaatttgttcttcccaagtttgaagtacaagtaacagtgccaaagataatcaccatcttggaagaagagatgaatgtatcagtgtgtggcctatacacatatgggaagcctgtccctggacatgtgactgtgagcatttgcagaaagtatagtgacgcttccgactgccacggtgaagattcacaggctttctgtgagaaattcagtggacagctaaacagccatggctgcttctatcagcaagtaaaaaccaaggtcttccagctgaagaggaaggagtatgaaatgaaacttcacactgaggcccagatccaagaagaaggaacagtggtggaattgactggaaggcagtccagtgaaatcacaagaaccataaccaaactctcatttgtgaaagtggactcacactttcgacagggaattcccttctttgggcaggtgcgcctagtagatgggaaaggcgtccctataccaaataaagtcatattcatcagaggaaatgaagcaaactattactccaatgctaccacggatgagcatggccttgtacagttctctatcaacaccaccaatgttatgggtacctctcttactgttagggtcaattacaaggatcgtagtccctgttacggctaccagtgggtgtcagaagaacacgaagaggcacatcacactgcttatcttgtgttctccccaaggcaagagctttgtccaccttgagcccatgtctcatggaactaccctgtggccatactcagacagtccaggcacattatattctgaatggaggcaccctgctggggctgaagaagctctccttctattatctgataatggcaaagggaggcattgtccgaactgggacacatggactgcttgtgaagcaggaagacatgaagggccatttttccatctcaatccctgtgaagtcagacattgctcctgtcgctcggttgctcatctatgctgttttacctaccggggacgtgattggggattctgcaaaatatgatgttgaaaattgtctggccaacaaggtggatttaagcttcagccccatcacaaagtctcccagcctcacacggccacctgcgagtcacagcggctcctcagtccgtctgcgccctccgtgctgtggncccaaagcgtgctgctcatgaagcctgatgctgagctctcggcgtcctcggtttacaacctgctaccagaaaaggacctcactggcttccctgggcctttgaatgaccaggacgatgaagactgcatcaatcgtcataatgtctatattaatggaatcacatatactccagtatcaagtacaaatgaaaaggatatgtacagcttcctagaggacatgggcttaaaggcattcaccaactcaaagattcgtaaacccaaaatgtgtccacagcttcaacagtatgaaatgcatgggncctgaaggtctacgtgtaggtttttatgagtcagatgtaatgggaagaggcccatgcacgcctggtgcatgttgaagagcctcacacggagaccgtacgaaagtacttccctgagacatggatctgggatttggtggtggtaaactcagcaggggtggctgaggtaggagtaacagtccctgacaccatcaccgagtggaaggcaggggccttctgcctgtctgaagatgctggacttggtatctcttccactgcctctctccgagccttccagcccttctttgtggagcttacaatgccttactctgtgattcgtggagaggccttcacactcaaggccacggtcctaaactaccttcccaaatgcatccgggtcagtgtgcagctggaagcctctcccgccttcctagctgtcccagtggagaaggaacaagcgcctcactgcatctgtgcaaacgggcggcaaactgtgtcctgggcagtaaccccaaagtcattaggaaatgtgaatttcactgtgagcgcagaggcactagagtctcaagagctgtgtgggactgaggtgccttcagttcctgaacacggaaggaaagacacagtcatcaagcctctgttggttgaacctgaaggactagagaaggaaacaacattcaactccctactttgtccatcaggtggtgaggtttctgaagaattatccctgaaactgccaccaaatgtggtagaagaatctgcccgagcttctgtctcagttttgggagacatattaggctctgccatgcaaaacacacaaaatcttctccagatgccctatggctgtggagagcagaatatggtcctctttgctcctaacatctatgtactggattatctaaatgaaacacagcagcttactccagagatcaagtccaaggccattggctatctcaacactggttaccagagacagttgaactacaaacactatgatggctcctacagcacctttggggagcgatatggcaggaaccagggcaacacctggctcacagcctttgttctgaagacttttgcccaagctcgagcctacatcttcatcgatgaagcacacattacccaagccctcatatggctctcccagaggcagaaggacaatggcctgtttcaggagctctgggtcactgctcaacaatgccataaagggaggagtagaagatgaagtgaccctctccgcctatatcaccatcgcccttctggagattcctctcacagtcactcaccctgttgtccgcaatgccctgttttgcctggagtcagcctggaaggacagcacaagaaggggaccatggcagccatgtatataccaaagcactgctggcctatgctttttgccctggcaggtaaccaggacaagaggaaggaagtactcaagtcacttaatgaggaagctgtgaagaaagacaactctgtccattgggagcgccctcagaaacccaagggcaccagtggggcatttttacgaaccccaggctccctctgctgaggtggagatgacatcctatgtgctcctcgcttatctcacggcccagccagccccaacctcggaggacctgacctctgcaaccaacatcgtgaagtggatcacgaagcagcagaatgcccagggcggtttctcctccacccaggacacagtggtggctctccatgctctgtccaaatatggagcagccacatttaccaggactgggaaggctgcacaggtgactatccagtcttcagggacattttccagcaaattccaagtggacaacaacaaccgcctgttactgcagcaggtctcattgccagagctgcctggggaatacagcatgaaagtgacaggagaaggatgtgtctacctccagacatccttgaaatacaatattctcccagaaaagggaagagttcccctttgctttaggagtgcagactctgcctcaaacttgtgatgaacccaaagcccacaccagcttccaaatctccctaagtgtcagttacacagggagccgctctgccctccaacatggcgatcgttgatgtgaagatggtctctggcttcattccccctgaagccaacagtgaaaatgcttgaaagatctaaccatgtgagccggacagaagtcagcagcaaccatgtcttgatttacccttgataagggtgtcaaatcagacactgagcttgttcttcacggttctgcaagatgtccccagtaagagatctgaaaccagccatagtgaaagtctatgattactacgagacggatgagtttgcaattgctgagtacaatgctccttgcagcaaagatcttggaaatgcttgaagaccacaaggctgaaaagtgctttgctggagtcctgttctcagagctccacagaagacacgtgtttttgtatctttaaagacttgatgaataaacactttttctggtcaaaaaaaaaaaaacaaa

SEQ ID NO: 16227 - DNA, 1065 bp, Homo sapiens
tttttttttttttcatttttaaggtgtgcacttttattcaactggtctcaagtcagtgtacaggtaagccctggctgcctccacccactcccagggagaccaaaagccttcatacatctcaagttgggggacaaaaaagggggaagggggggcacgaaggctcatcattcaaaataaaacaaaataaaaaagtattaaggcgaagattaaaaaaattttgcattacataatttacacgaaagcaatgctatcacctcccctgtgtggacttgggagaggactgggccattctccttagagagaagtggggtggcttttaggatggcaagggacttcctgtaacaatgcatctcatatttggaatgactattaaaaaaaacaacaatgtgcaatccaaagtcctcggcccacattgtgaactttgggggatgctcgctccaaccgactgctgtcaccttcaccgttccagtttttaaatcctgagtcaagccaaaaaaaaaaaaaaaaccagagcgaaacaaaaaaaacaaataaagccatgccaatctcatcttgttttctgcgcaagttaggttttgtcaagaaagggtgtaacgcaactaagtcatagtccgcctagaagcatttgcggtggacgatggaggggccggactcgtcatactcctgcttgctgatccacatctgctggaaggtggacagcgaggccaggatggagccgccgatccacacggagtacttgcgctcaggaggagcaatgatcttgatcttcattgtgctgggtgccagggcagtgatctccttctgaatcctgtcggcaatgcccagggtacatggtggtgccgccagacagcactgtgttggcgaaaggtcttgcggatgttccacgtcacacttcatgatggagttgaaggtagtttcgtggatgtccacaggactccatgcccaggaaggaaggctggaagagtgcctcagggcagcggaaccgctcattgccaatggtgatgacctggccgtcaggcaagctcgtagctcatctccagggagatcaagaagcaacggaaaaaa

SEQ ID NO: 16228 - DNA, 1605 bp, Homo sapiens
ctactactactaaattcgcggcaggtcgacctggacctcctgtgcaagaacatgaaacacctgtggttcttcctcctgctggtggcggctcccagatgggtcctgtcccagctgcagctgcaggagtcgggcccaggactggtgaagccttcggagaccctgtccctcacctgcactgtctctggtggctccatcagcagtggtggttactactggaattggatccggcagcccccagggaagggactggagtggattggctatatctattacagtgggagcacctactacaacccgtccctcaggagtcgagtcaccatatcagtagacacgtccaagaaccagttctccctgaacctgacatctgtgaccgctgcggacacggccgtctatttttgtgccagagaaagcgacctacgtgagaattatgggggggcttttgactcctggggccagggaaccctggtcaccgtctcctcagcatccccgaccagccccaaggtcttcccgctgagcctctgcagcacccagccagatgggaacgtggtcatcgcctgcctggtccagggcttcttcccccaggagccactcagtgtgacctggagcgaaagcggacagggcgtgaccgccagaaacttcccacccagccaggatgcctccggggacctgtacaccacgagcagccagctgaccctgccggccacacagtgcctagccggcaagtccgtgacatgccacgtgaagcactacacgaatcccagccaggatgtgactgtgccctgcccagttccctcaactccacctaccccatctccctcaactccacctaccccatctccctcatgctgccacccccgactgtcactgcaccgaccggccctcgagggacctgcttttaggttcagaagcgaacctcacgtgcacactgaccggcctgagagatgcctcaggtgtcaccttcacctggacgccctcaagtgggaagagcgctgttcaaggaccacctgagcgtgacctctgtggctgctacagcgtgtccagtgtcctgccgggctgtgccgagccatggaaccatgggaagaccttcacttgcactgctgcccaccccgagttgaagaccccactaaccgccaacatcacaaaatccggaaacacattccggcccgaggtccacctgctgccgccgccgtcggaggagctggccctgaacgagctggtgacgctgacgtgcctggcacgtggcttcagccccaaggatgtgctggtttcgctggctgcaggggtcacaggagctgccccgcgagaagtacctgacttgggcatcccggcaggagcccagccagggcaccaccaccttcgctgtgaccagcatactgcgcgtggcagccgaggactggaagaagggggacaccttctcctgcatggtgggccacgaggccctgccgctggccttcacacagaagaccatcgaccgcttggcgggtaaacccacccatgtcaatgtgtctgttgtcatggcggaggtggacggcacctgctactgagccgcccgcctgtccccacccctgaataaactccatgctcccccaagcagcaaaaaaaaaa

SEQ ID NO: 16229 - DNA, 203 bp, Homo sapiens
  misc_feature (1)...(203): n = a,t,c or g
ttgganaccnnnnnnnnnnnnnnnnnnnnnnnnnnnnnnnnnnnnnnnnnnnnnnnnnnnnnnnnnnnnnnnnnnnnggcacgaggaaaaagaagcattctctaggtttgcatgtagctatagtcactatattttgcctttcatatagaaagttttaaagtattatgtttaaaaacatttattggctgggtgtggtggctcac

SEQ ID NO: 16230 - DNA, 2943 bp, Homo sapiens
  misc_feature (1)...(2943): n = a,t,c or g
tggatatgggactcctgtttgtggcctgcctctcttccgagtcttccagtgcagtccagataacgatctctgagagtctcttgagaccactgaagcaagaggcttcaaggtttgttctaggcttctctagttggcaggtcttccccgatcccaccccctcccccagggctgccaggcgtattcctgcctgggcctcctggcacaagagataaaatgaacagggttactcccagtaactggtccaggagataccagcagagagggagtaggagagaagaaacatgtcagggtgctcacaggagtagtggggggaggttttgctatttccagattcttaagccaacaaaagtgccttcatattttctgtctggaagacagaaagcccagaaggagcccagaagcaacagtttgagagaggcgcttctgcggccaagtggataagaggagcggcctgcaaccatgggacagggtgagccaagccagcgctcgacagggcttgctggactgtatgcagcccccgcagcatcacctgttttcattaaaggaagtgggatggatgccctgggtatcaagagctgtgactttcaggcagcaagaaacaatgaggagcaccacaccaaggccctcagctcccggcgcctctttgtgaggagggggcagcccttcaccatcatcctgtacttccgcgctccagtccgtgcatttctgcctgccctgaagaaggtggccctcactgcacaaactggagagcagccttccaagatcaacaggacccaagccacattcccaatttccagtctgggggaccgaaagtggtggagtgcagtggtggaggagagagatgcccagtcctggaccatctctgtgaccacacctgcggacgctgtcattggccactactcgcttctgctgcaggtctcaggcaggaagcaactcctcttgggtcagttcacactgctttttaacccctggaatagagaggatgctgttttcctgaagaatgaggctcagcgcatggagtacttgttgaaccagaatggtctcatctacctgggtacagctgactgcatccaggcagagtcctgggactttggccagttcgagggggatgtcattgacctcagcctgcgcttgctgagcaaggacaagcaggtagagaagtggagccagccggtgcacgtggcccgtgtgttgggtgccttgctgcattttctcaaggagcagagggtcctgcccaccccgcagacccaggccacccaggaaggggccttgctgaacaagcgccggggcagcgtgcccatcctgcggcagtggctcaccggccgaggccgacctgtgtatgatggccaggcctgggtgttggctgctgttgcttgcacagtgctgcgatgcctgggaatccctgcccgcgtggtgaccacgtttgcctcagcacagggcaccggtgggcgtcttctcatagatgaatactataatgaggagggacttcagaacggagaaggccagagaggcagaatctggatcttccagacttccacagagtgctggatgacgcggcctgccttgccccagggttatgatggatggcagattctcgacccaagtgctcctaatggaggtggagtcctggggtcctgtgatctggtgccggtcagagcagtcaaggaggggaccgtggggctgaccccacacgtcgtcagacctttttgctgccataaatgcctcatgtgtggtctggaagtgctgtgaggatgggacactggagttgactgactccaacacaaagtatgttggcaacaacatcagcaccaagggtgtgggcagtgaccgctgcgaggacatcactcagaactacaagtatcctgaagggtctcttcaggaaaaagaggtgctggagagagtcgagaaagagaaaatggaacgtgagaaagacaacggcatccgtcctcccagtctcgagactgccagtcctctgtacctgctcttgaaagcacccagctccctacccctgagaggggatgcccagatctcagtgacgctggttaatcacagtgagcaggagaaggcagtgcagctggcaattggggtccaggctgtacactacaacggtgtccttgctgccaagctctggaggaagaagctgcacctcacgctcagtgccaacctggaaaagataataaccatcggcctgttcttctccaattttgagcgaaacccacccgagaacaccttccttagactcaccgccatggcaacacactctgaatccaaccttagctgctttgctcaggaagacattgccatttgtagaccacaccttgccatcaagatgccagagaaagcagagcagtatcaacccctcacagcctcagtcagcctccagaactccctagatgcccccatggaggactgtgtgatctccatcctgggaagggggctcattcacagagagagggagctacagattccgttcagtgtggcctgaaaacaccatgtgtgccaagttccagttcacgccaacacatgtggggctccagagactcactgtggaagtggactgcaacatgttccagaacctaaccaactataaaagcgtcaccgtggtagcccctgaactatcagcttaaacttccagctctatcaccactctcctgccaacccttgttctacaatctaaaccaaacatgtgctaggaagagaaactttgcgtctcagtgtttgtgttgctataaaggaataactgaggctgggtagtttannnnnnnnnnnnnnnnnnnnnnnnnnnnnnnnnnnnnnnnnnnnnnnnacagtgagggcttcaggctgcttccacttatgcaggaagatgaagggaggcaacgtgagcagagatcacagggcaagaatgggttgaggggtaggggtaagtgccaggtgccagcctcgttttaacagccagctctg

SEQ ID NO: 16231 - DNA, 1106 bp, Homo sapiens
gaactttatccaccacaggttaattttcccatgtgcaccattgcatctatgcccaggctaccagaacactgtattgagtatgtaaggatgttgcagggccctaaggagcagccttttggagaaggggttccattagatggagatgatcctgaacatatacaatggattttccaaaaatccctagagagagcatcacaatataatattaggggtgttacgtataggctcactcaaggggtagtaaaaagaatcattcctgcagtagcttccacaaatgcagtcattgcagctgtgtgtgccactgaggtttttaaaatagccacaagtgcatacattcccttgaataattacttggtgtttaatgatgtagatgggctgtatacatacacatttgaagcagaaagaaaggaaaactgcccagcttgtagccagcttcctcaaaatattcagttttctccatcagctaaactacaggaggttttggattatctaaccaatagtgcttctctgcaaatgaaatctccagccatcacagccaccctagagggaaaaaatagaacactttacttacagtcggtaacctctattgaagaacgaacaaggccaaatctctccaaaacattgaaagaattggggcttgttgatggacaagaactggcggttgctgatgtcaccaccccacagactgtactattcaaacttcattttacttcttaaggaaaatctccacataatagaaaactcatggaaataatatactttgtggatgctaagaagttgaatcgatgtcatttttagcaatagtgttgccacgatttgtctttttttatataatgaaccactcttttttaactttgtaaccttcccttgaagacagaattttggtgttggtgcttgtaagcattttcattaataatatgagaaatgatacctggagagagagattatgagcaaatgtattgcttcttttagaggaggaagcatacaacctcttttgtgtgaattttgttattatggtcaaagaatgcattcctaagttttcatttgagtacccaaatacacaaaaggtgtccctttaaggaaaataaagaattaagttttaaata

SEQ ID NO: 16232 - DNA, 511 bp, Homo sapiens
  misc_feature (1)...(511): n = a,t,c or g
gtgnnnntnatttganaccattganacngntnnnnnnnnnnnnnnnnnnnnnnnnnnnnnnnnnnnnnnnnnnnnnnnnnnnnnnnnnnnnnnnggcacgagaacactgcccatggcgcaaggccgggagcgcgacgaaggcccccactccgccggcggcgcgtccttgtccgtgaggtgcggtgttcacggccccgcgaccgatctgggtctcgcggaacctcctgccccacgtcccctcctccctcctctccctccggttccttagggcggctttccccgcagcttcgacctcttcccctctgcccccagtgccttccctcagcctccctccccgtgtgacctcccctgtccgctccccatccccttgttccttgaccccgtccccagttgtctttcccactccttattctgcgaccctgacccttcgtcttttacccagcaacgtcccctgcacccttcatctcttccttctagctcangattcccgctagtgatccgggtcttctga

SEQ ID NO: 16233 - DNA, 3714 bp, Homo sapiens
gggcggggcgatcggcggagctcccacctccgcttacagctcgctgccgccgtcctgccccgcgcccccaggagacctggaccagaccacgatgtggaaacgctggctcgcgctcgcgctcgcgctggtggcggtcgcctgggtccgcgccgaggaagagctaaggagcaaatccaagatctgtgccaatgtgttttgtggagccggccgggaatgtgcagtcacagagaaaggggaacccacctgtctctgcattgagcaatgcaaacctcacaagaggcctgtgtgtggcagtaatggcaagacctacctcaaccactgtgaactgcatcgagatgcctgcctcactggatccaaaatccaggttgattacgatggacactgcaaagagaagaaatccgtaagtccatctgccagcccagttgtttgctatcagtccaaccgtgatgagctccgacgtcgcatcatccagtggctggaagctgagatcattccagatggctggttctctaaaggcagcaactacagtgaaatcctagacaagtattttaagaactttgataatggtgattctcgcctggactccagtgaattcctgaagtttgtggaacagaatgaaactgccatcaatattacaacgtatccagaccaggagaacaacaagttgcttaggggactctgtgttgatgctctcattgaactgtctgatgaaaatgctgattggaaactcagcttccaagagtttctcaagtgcctcaacccatctttcaaccctcctgagaagaagtgtgccctggaggatgaaacgtatgcagatggagctgagaccgaggtggactgtaaccgctgtgtctgtgcctgtggaaattgggtctgtacagccatgacctgtgacggaaagaatcagaagggggcccagacccagacagaggaggagatgaccagatatgtccaggagctccaaaagcatcaggaaacagctgaaaagaccaagagagtgagcaccaaagagatctaatgaggaggcacagaccagtgtctggatcccagcatcttctccacttcagcgctgagttcagtatacacaagtgtctgctacagtcgccaaatcaccagtatttgcttatatagcaatgagttttattttgtttatttgttttgcaataaaggatatgaaggtggctggctaggaagggaagggccacagccttcatttctaggagtgctttaagagaaactgtaaatggtgctctggggctggaggctagtaaggaaactgcatcacgattgaaagaggaacagacccaaatctgaacctcttttgagtttactgcatctgtcagcaggctgcagggagtgcacacgatgccagagagaacttagcagggtgtccccggaggagaggtttgggaagctccacggagaggaacgctctctgcttccagcctctttccattgccgtcagcatgacagacctccagcatccacgcatctcttggtcccaataactgcctctagatacatagccatcctgctagttaacccagtgtccctcagacttggatggagtttctgggagggtacacccaaatgatgcagatacttgtatactttgagccccttagcgacctaaccaaattttaaaaatactttttaccaaaggtgctatttctctgtaaaacacttttttttggcaagttgactttattcttcaattattatcattatattattgttttttaatattttattttcttgactaggtattaagcttttgtaattatttttcagtagtcccaccacttcataggtggaaggagtttggggttcttcctggtgcaggggctgaaataacccagatgctcccaccctgccacatactagatgcagcccatagttggctcccctagcttccagcagtccactatctgccagaggagcaagggtgccttagacctaagccaggggaagaagcatcttcataaaaaactttcaagatccaaacattaatttgtttttatttattctgagaagttgaggcaaatcagtattcccaagggatgggcgacaagggcagcccaagcagggcttagggatatcccagcctaccaatatgctcattcgactaactaggagggtgagttggccctgtctcttcttttttctggacctcagtttcctcagtgagctggtaagaatgcactaaccttttgatttgataagttataaattctgtggttctgatcattggtccagaggggagataggttcctgtgatttttccttcttctctatagaataaatgaaatcttgttactagaacaagaaatgtcagatggccaaaaacaagatgaccagatttgatctcagcctgatgaccctacaggtcgtgctatgatatggagtcctcatgggtaaagcaggaagagagtgggaaagagaaccaccccactctgtcttcatatttgcatttcatgtttaacctccggctggaaatagaaagcattcccttagagatgaggataaaagaaagtttcagattcaacagggggaagaaaatggagatttaatcctaaaactgtgacttggggaggtcagtcatttacagttagtcctgtgtctttcgacttctgtgattattaaccccactcactaccctgtttcagatgcatttggaataccaaagattaaagccttgacataagatctcatttgcagaaagcagattaaagaccatcagaaggaaattatttaggttgtaatggcacaggcaactgtgaggaaactgttgtgccaaaaatagaattccttctagtttttcttgttctcatttgaaaggagaaaattccactttgtttagaatttcaagcttttatgtatccatcccatctaaaaactcttcaaactccacttgttcagtctgaaatgcagctccctgtccaagtgccttgggagaactcacaggcaggcacggccttaatcaaaggttttaccaggcccttgggacactatggggaggagggcaagagtacaccaatttgttaaaagcaagaaaccacagtgtctcttcactagtcatttaggaacatgggttattcatccaagactactctaccctgcaacattgaactcccaagagcaaatccacattcctcttgagttctgcagcttctgtgtaaatagggcagctgtcgtctatgccgtagaatcacatgatctgaggaccattcatggaagctgctaaatagcctagtctgggggagtcttccataaagttttgcatggagcaaacaaacaggattaaactaggtttggttccttcagccctctaaaagcataggggcttagcctgcaggcttccttgggctttctctgtgtgtgtagttttgtaaacactatagcatctgttaagatccagtgtccatggaaacattcccacatgccgtgactctggactatatcagtttttggaaagcagggttcctctgcctgctaacaagcccacgtggaccagtctgaatgtctttccctttacacctatgtttttaaatagtcaaacttcaagaaacaatctaaacaagtttctgttgcatatgtgtttgtgaacttgtatttgtatttagtaggcttctatattgcatttaacttgtttttgtaactcctgattcttccttttcggatactattgatgaataaagaaattaaagtgataaa

SEQ ID NO: 16234 - DNA, 935 bp, Homo sapiens
  misc_feature (1)...(935): n = a,t,c or g
accagctatgacnnnnnnnnnnnnnnnnnnnnnnnnnnnnnnnnnnnnnnnnnnnnnnnnnnnnnnnnnnggcacgagaactgggctcccagaacccacaacatgaaagaaatggtgctacccagctcaagcctgggcctttgaatccggacacaaaaccctctagcttggaaatgaatatgctgcactttacaaccactgcactacctgactcaggaatcggctctggaaggtgaagctagaggaaccagacctcatcagcccaacatcaaagacaccatcggaacagcagcgcccgcagcacccaccccgcaccggcgactccatcttcatggccaccccctgcggcggacggttgaccaccagccaccacatcatcccagtcttctttttcatccttctgtctctttgtttctgagctttcctgtctttccttttttctgagagattcaaagcctccacgactctgtttcccccgtcccttctgaatttaatttgcactaagtcatttgcactggttggagttgtggagacggccttgagtctcagtacgagtgtgcgtgagtgtgagccaccttggcaagtgcctgtgcagggcccggccgccctccatctgggccgggtgactgggcgccggctgtgtgcccgaggcctcaccctgccctcgcctagtctggaagctccgaccgacatcacggagcagccttcaagcattccattacgccccatctcgctctgtgcccctccccaccagggcttcagcaggagccctggactcatcatcaataaacactgttacagcaaaaaaaaannnnnnaaaaaaaaaangnttttnattaangggggccaaannttttccccctttnnggggggggntntttttnnnngngaaaanggggnnnttttttaaaaannnnnnnnnggggnnannaaaa

SEQ ID NO: 16235 - DNA, 1240 bp, Homo sapiens
  misc_feature (1)...(1240): n = a,t,c or g
gggaaacatctgccccacgtgccggaagccaagtggtggcgacaactgcgcgccactccgcggcctaccgcgcagatcctctacgtgtgtcctcgcgagacaagctcaccgaaatggccgcgtccagtcaaggaaactttgagggaaattttgagtcactggaccttgcggaatttgctaagaagcagccatggtggcgtaagctgttcgggcaggaatctggaccttcagcagaaaagtatagcgtggcaacccagctgttcattggaggtgtcactggatggtgcacaggtttcatattccagaaggttggaaagttggctgcaacagctgtgggaggtggattttttctccttcagcttgcaaaccatactgggtacatcaaagttgactggcaacgagtggagaaggacatgaagaaagccaaagagcagctgaagatccgtaagagcaatcagatacctactgaggtcaggagcaaagctgaggaggtggtgtcatttgtgaagaagaatgttctagtaactgggggatttttcggaggctttctgcttggcatggcatcctaaggaagatgacctcatgttcattgttcctggttttttcccagccagccagcctcttacactcccatcattaggacctccgagtccctcctcctcttctcccatgccttcttccctgccatggcaaatctgagtggcttctctaagcatctgctggtacaagtcaatgtggcaccatgagcttcatggtggcaagaagagacaatagtccttagctctcctcccagtacaccccctacttggccagtctgtaggccaacaagaaggttcctttacccccatgcaagacacttatgagaacacattacaagatggctgaccgtgagaaataagcacatagataaccttattgtgtgctgcatggaaaggaactgaatacatttgcctttaagcatgaaagaaaaaaaaaaagggcggccgttttaaaggatccctcgaggggcccaagcttacgcgtgcatgcgacgtcatagctctcnnnnnnnnnnnnnnnnnnnnnnnnnnnnnnnnnnnnnnnnnnnnnnnnnnnnnnnnnnnnnnnngatctgctagcttnnnnnnnnnnnnnnnnnnnnnnnnnnnnnnnnnnnnnnnnnnnnnnnnnnnnnnnnnnnnnnnnnnnnnnnnnnnnnnnnnnnnnnnnnnnnnnnnnnnnnnnnnnnnnnnnnnnnngc

SEQ ID NO: 16236 - DNA, 8686 bp, Homo sapiens
acggggcctgaagcggcggtaccggtgctggcggcggcagctgaggccttggccgaagccgcgcgaacctcagggcaagatgcttggaaccggacctgccgccgccaccaccgctgccaccacatctagcaatgtgagcgtcctgcagcagtttgccagtggcctaaagagccggaatgaggaaaccagggccaaagccgccaaggagctccagcactatgtcaccatggaactccgagagatgagtcaagaggagtctactcgcttctatgaccaactgaaccatcacatttttgaattggtttccagctcagatgccaatgagaggaaaggtggcatcttggccatagctagcctcataggagtggaaggtgggaatgccacccgaattggcagatttgccaactatcttcggaacctcctcccctccaatgacccagttgtcatggaaatggcatccaaggccattggccgtcttgccatggcaggggacacttttaccgctgagtacgtggaatttgaggtgaagcgagccctggaatggctgggtgctgaccgcaatgagggccggagacatgcagctgtcctggttctccgtgagctggccatcagcgtccctaccttcttcttccagcaagtgcaacccttctttgacaacatttttgtggccgtgtgggaccccaaacaggccatccgtgagggagctgtagccgcccttcgtgcctgtctgattctcacaacccagcgtgagccgaaggagatgcagaagcctcagtggtacaggcacacatttgaagaagcagagaagggatttgatgagaccttggccaaagagaagggcatgaatcgggatgatcggatccatggagccttgttgatccttaacgagctggtccgaatcagcagcatggagggagagcgtctgagagaagaaatggaagaaatcacacagcagcagctggtacacgacaagtactgcaaagatctcatgggcttcggaacaaaacctcgtcacattacccccttcaccagtttccaggctgtacagccccagcagtcaaatgccttggtggggctgctggggtacagctctcaccaaggcctcatgggatttgggacctcccccagtccagctaagtccaccctggtggagagccggtgttgcagagacttgatggaggagaaatttgatcaggtgtgccagtgggtgctgaaatgcaggaatagcaagaactcgctgatccaaatgacaatccttaatttgttgccccgcttggctgcattccgaccttctgccttcacagatacccagtatctccaagataccatgaaccatgtcctaagctgtgtcaagaaggagaaggaacgtacagcggccttccaagccctggggctactttctgtggctgtgaggtctgagtttaaggtctatttgcctcgcgtgctggacatcatccgagcggccctgcccccaaaggacttcgcccataagaggcagaaggcaatgcaggtggacgccacagtcttcacttgcatcagcatgctggctcgagcaatggggccaggcatccagcaggatatcaaggagctgctggagcccatgctggcagtgggactaagccctgccctcactgcagtgctctacgacctgagccgtcagattccacagctaaagaaggacattcaagatgggctactgaaaatgctgtccctggtccttatgcacaaaccccttcgccacccaggcatgcccaagggcctggcccatcagctggcctctcctggcctcacgaccctccctgaggccagcgatgtgggcagcatcactcttgccctccgaacgcttggcagctttgaatttgaaggccactctctgacccaatttgttcgccactgtgcggatcatttcctgaacagtgagcacaaggagatccgcatggaggctgcccgcacctgctcccgcctgctcacaccctccatccacctcatcagtggccatgctcatgtggttagccagaccgcagtgcaagtggtggcagatgtgcttagcaaactgctcgtagttgggataacagatcctgaccctgacattcgctactgtgtcttggcgtccctggacgagcgctttgatgcacacctggcccaggcggagaacttgcaggccttgtttgtggctctgaatgaccaggtgtttgagatccgggagctggccatctgcactgtgggccgactcagtagcatgaaccctgcctttgtcatgcctttcctgcgcaagatgctcatccagattttgacagagttggagcacagtgggattggaagaatcaaagagcagagtgcccgcatgctggggcacctggtctccaatgccccccgactcatccgcccctacatggagcctattctgaaggcattaattttgaaactgaaagatccagaccctgatccaaacccaggtgtgatcaataatgtcctggcaacaataggagaattggcacaggttagtggcctggaaatgaggaaatgggttgatgaactttttattatcatcatggacatgctccaggattcctctttgttggccaaaaggcaggtggctctgtggaccctgggacagttggtggccagcactggctatgtagtagagccctacaggaagtaccctactttgcttgaggtgctactgaattttctgaagactgagcagaaccagggtacacgcagagaggccatccgtgtgttagggcttttaggggctttggatccttacaagcacaaagtgaacattggcatgatagaccagtcccgggatgcctctgctgtcagcctgtcagaatccaagtcaagtcaggattcctctgactatagcactagtgaaatgctggtcaacatgggaaacttgcctctggatgagttctacccagctgtgtccatggtggccctgatgcggatcttccgagaccagtcactctctcatcatcacaccatggttgtccaggccatcaccttcatcttcaagtccctgggactcaaatgtgtgcagttcctgccccaggtcatgcccacgttccttaatgtcattcgagtctgtgatggggccatccgggaatttttgttccagcagctgggaatgttggtgtcctttgtgaagagccacatcagaccttatatggatgaaatagtcaccctcatgagagaattctgggtcatgaacacctcaattcagagcacgatcattcttctcattgagcaaattgtggtagctcttgggggtgaatttaagctctacctgccccagctgatcccacacatgctgcgtgtcttcatgcatgacaacagcccaggccgcattgtctctatcaagttactggctgcaatccagctgtttggcgccaacctggatgactacctgcatttactgctgcctcctattgttaagttgtttgatgcccctgaagctccactgccatctcgaaaggcagcgctagagactgtggaccgcctgacggagtccctggatttcactgactatgcctcccggatcattcaccctattgttcgaacactggaccagagcccagaactgcgctccacagccatggacacgctgtcttcacttgtttttcagctggggaagaagtaccaaattttcattccaatggtgaataaagttctggtgcgacaccgaatcaatcatcagcgctatgatgtgctcatctgcagaattgtcaagggatacacacttgctgatgaagaggaggatcctttgatttaccagcatcggatgcttaggagtggccaaggggatgcattggctagtggaccagtggaaacaggacccatgaagaaactgcacgtcagcaccatcaacctccaaaaggcctggggcgctgccaggagggtctccaaagatgactggctggaatggctgagacggctgagcctggagctgctgaaggactcatcatcgccctccctgcgctcctgctgggccctggcacaggcctacaacccgatggccagggatctcttcaatgctgcatttgtgtcctgctggtctgaactgaatgaagatcaacaggatgagctcatcagaagcatcgagttggccctcacctcacaagacatcgctgaagtcacacagaccctcttaaacttggctgaattcatggaacacagtgacaagggccccctgccactgagagatgacaatggcattgttctgctgggtgagagagctgccaagtgccgagcatatgccaaagcactacactacaaagaactggagttccagaaaggccccacccctgccattctagaatctctcatcagcattaataataagctacagcagccggaggcagcggccggagtgttagaatatgccatgaaacactttggagagctggagatccaggctacctggtatgagaaactgcacgagtgggaggatgcccttgtggcctatgacaagaaaatggacaccaacaaggacgacccagagctgatgctgggccgcatgcgctgcctcgaggccttgggggaatggggtcaactccaccagcagtgctgtgaaaagtggaccctggttaatgatgagacccaagccaagatggcccggatggctgctgcagctgcatggggtttaggtcagtgggacagcatggaagaatacacctgtatgatccctcgggacacccatgatggggcattttatagagctgtgctggcactgcatcaggacctcttctccttggcacaacagtgcattgacaaggccagggacctgctggatgctgaattaactgcaatggcaggagagagttacagtcgggcatatggggccatggtttcttgccacatgctgtccgagctggaggaggttatccagtacaaacttgtccccgagcgacgagagatcatccgccagatctggtgggagagactgcagggctgccagcgtatcgtagaggactggcagaaaatccttatggtgcggtcccttgtggtcagccctcatgaagacatgagaacctggctcaagtatgcaagcctgtgcggcaagagtggcaggctggctcttgctcataaaactttagtgttgctcctgggagttgatccgtctcggcaacttgaccatcctctgccaacagttcaccctcaggtgacctatgcctacatgaaaaacatgtggaagagtgcccgcaagatcgatgccttccagcacatgcagcattttgtccagaccatgcagcaacaggcccagcatgccatcgctactgaggaccagcagcataagcaggaactgcacaagctcatggcccgatgcttcctgaaacttggagagtggcagctgaatctacagggcatcaatgagagcacaatccccaaagtgctgcagtactacagcgccgccacagagcacgaccgcagctggtacaaggcctggcatgcgtgggcagtgatgaacttcgaagctgtgctacactacaaacatcagaaccaagcccgcgatgagaagaagaaactgcgtcatgccagcggggccaacatcaccaacgccaccactgccgccaccacggccgccactgccaccaccactgccagcaccgagggcagcaacagtgagagcgaggccgagagcaccgagaacagccccaccccatcgccgctgcagaagaaggtcactgaggatctgtccaaaaccctcctgatgtacacggtgcctgccgtccagggcttcttccgttccatctccttgtcacgaggcaacaacctccaggatacactcagagttctcaccttatggtttgattatggtcactggccagatgtcaatgaggccttagtggagggggtgaaagccatccagattgatacctggctacaggttatacctcagctcattgcaagaattgatacgcccagacccttggtgggacgtctcattcaccagcttctcacagacattggtcggtaccacccccaggccctcatctacccactgacagtggcttctaagtctaccacgacagcccggcacaatgcagccaacaagattctgaagaacatgtgtgagcacagcaacaccctggtccagcaggccatgatggtgagcgaggagctgatccgagtggccatcctctggcatgagatgtggcatgaaggcctggaagaggcatctcgtttgtactttggggaaaggaacgtgaaaggcatgtttgaggtgctggagcccttgcatgctatgatggaacggggcccccagactctgaaggaaacatcctttaatcaggcctatggtcgagatttaatggaggcccaagagtggtgcaggaagtacatgaaatcagggaatgtcaaggacctcacccaagcctgggacctctattatcatgtgttccgacgaatctcaaagcagctgcctcagctcacatccttagagctgcaatatgtttccccaaaacttctgatgtgccgggaccttgaattggctgtgccaggaacatatgaccccaaccagccaatcattcgcattcagtccatagcaccgtctttgcaagtcatcacatccaagcagaggccccggaaattgacacttatgggcagcaacggacatgagtttgttttccttctaaaaggccatgaagatctgcgccaggcatgagcgtgtgatgcagctcttcggcctggttaacacccttctggccaatgacccaacatctcttcggaaaaacctcagcatccagagatacgctgtcatccctttatcgaccaactcgggcctcattggctgggttccccactgtgacacactgcacgccctcatccgggactacagggagaagaagaagatccttctcaacatcgagcatcgcatcatgttgcggatggctccggactatgaccacttgactctgatgcagaaggtggaggtgtttgagcatgccgtcaataatacagctggggacgacctgggccaagctggctgtggctgaaaagccccagctccgaggtgtggtttgaccgaagaaccaattatacccgttctttagcggtcatgtcaatggttgggtatattttaggcctgggagatagacacccatccaacctgatgctggaccgtctgagtgggaagatcctgcacattgactttggggactgctttgaggttgctatgacccgagagaagtttccagagaagattccatttagactaacaagaatgttgaccaatgctatggaggttacaggcctggatggcaactacagaatcacatgccacacagtgatggaggtgctgcgagagcacaaggacagtgtcatggccgtgctggaagcctttgtctatgaccccttgctgaactggaggctgatggacacaaataccaaaggcaacaagcgatcccgaacgaggacggattcctactctgctggccagtcagtcgaaattttggacggtgtggaacttggagagccagcccataagaaaacggggaccacagtgccagaatctattcattctttcattggagacggtttggtgaaaccagaggccctaaataagaaagctatccagattattaacagggttcgagataagctcactggtcgggacttctctcatgatgacactttggatgttccaacgcaagttgagctgctcatcaaacaagcgacatcccatgaaaacctctgccagtgctatattggctggtgccctttctggtaactggaggcccagatgtgcccatcacgttttttctgaggcttttgtactttagtaaatgcttccactaaactgaaaccatggtgagaaagtttgactttgttaaatattttgaaatgtaaatgaaaagaactactgtatattaaaagttggtttgaaccaactttctagctgctgttgaagaatatattgtcagaaacacaaggcttgatttggttcccaggacagtgaaacatagtaataccacgtaaatcaagccattcattttggggaacagaagatccataactttagaaatacgggttttgacttaactcacaagagaactcatcataagtacttgctgatggaagaatgacctagttgctcctctcaacatgggtacagcaaactcagcacagccaagaagcctcaggtcgtggagaacatggattaggatcctagactgtaaagacacagaagatgctgaccttcacccctgccacctatcccaagacctcactggtctgtggacagcagcagaaatgtttgcaagataggccaaaatgagtacaaaaggtctgtcttccatcagacccagtgatgctgcgacctcacacgcttcaattcaagacctgaccgctagtagggaggtttattcagatcgctgggcagcctcggctgagcagatgcacagaggggatcactgtgcagtgggaccaccctcactggccttctgcagcagggttctgggatgttttcagtggtcaaaatactctgtttagagcaagggctcagaaaacagaaatactgtcatggaggtgctgaacacagggaaggtctggtacatattggaaattatgagcagaacaaatactcaactaaatgcacaaagtataaagtgtagccatgtctagacaccatgttgtatcagaataatttttgtgccaataaatgacatcagaattttaaacataa

SEQ ID NO: 16237 - DNA, 1585 bp, Homo sapiens
  misc_feature (1)...(1585): n = a,t,c or g
ttttttttttttttttccataataacaaaagtcagtttattaaatgctcaattctcaaaattatatgtatatatttttaattatttaaaaaaacttccatgcccttccattcccctccctccaaactaggtattgtccaagttgtatcaaatgccacaaagtctaccatgcacccagaagcagagaagacaggaggtccagaggacaaggtatgctggggtcactactcgcactgcagagtccacgcgagttaactcatgctgggggcaaagaatggaaagagctaatacacagacaaagcaaaagaacgaaatgcgcagcctgaccagagacgtttacaatttataccaacttacaaatatttagggtgcccaccaactccgagagaacagaccaaactaaccacatgaaggaagacctctgccggggcctcctctccctacaacctcctctcaagaatcattaggaagcccaaacagcttcacagttccggcttcccggctgctgtcatatttgccgtctttgtcatcacaggcaaatgccagcagaggccttttggggtgcccacgccactgtgaaggtcggagactcacactgtacctcccatagtttgtcccctgtctccacttcagcaatgtcaataaaatgatcttccgaatgtgacgccagcattttcccatcatggctgaaactgagggttcttacaggccaatccagcctggaaaagcaccgaacacacactaactcatccacatcccagaggctgaccaaagcatctgcacttcctgtggcaaagtactttccccatggggtcaaacttgatacagatgcagttggaaggatgggcgttgatggactgcacaggccttcagttctgggtagctgaggatgttgatacaaccattgccatttgtcaggaagaacatattattgtcattgttccaggagatttcgttgacctcgaacttgaactgctcttctgctttggaacggtgtgtcttggcatcaataaaggtcaccacatcatccttgttgcctacagcaatggtctgcccatcaggactccagcagatattaatgttctcccctttagtgttcacagtggcaatgcattttgtagtcctcacatcccagatgcgaatggttttatctccagacgccgtaacaaataggtcaggattacttggatgccaacaaagctggtccacactatccccatgtccccggataattgttttctttgaccaaccggtccttctccagcaagaagacgctggccgtcttgtcgaaggaccccgaggctaggcgacgcccgtcgcaacttccaggccaccgagtgcacccttntgcgctgtgcgccaggaactcgcgcgtcttgctgtggccccggaacagctcctgcatcccaagcacgtagcgcgacgggccgctgctcactgagcaccacggggccatcgagccggggccgctctggcccaacgccgagggccccatggctgcacggggaccgccatgccgagctccccagcttccaactcacaacactgcagcagctccacggcgcagtcagtcctggcgccgctgc

SEQ ID NO: 16238 - DNA, 834 bp, Homo sapiens
aatttgaaaccgttatgacatgattacgaatttaataccgactcactatagggaatttggccctcgaggccaagaattcggcacgagcggcacgagctgtcaaccccacacgcctttggcacaatgaagtgggtaacctttatttcccttctttttctctttagctcggcttattccaggggtgtgtttcgtcgagatgcacacaagagtgaggttgctcatcggtttaaagatttgggagaagaaaatttcaaagccttggtgttgattgcctttgctcagtatcttcagcagtgtccatttgaagatcatgtaaaattaagtgaatgaagtaactgaatttgcaaaaacatgtgttgctgatgagtcagctgaaaattgtgacaaatcacttcataccctttttggagacaaattatgcacagttgcaactcttcgtgaaacctatggtgaaatggctgactgctgtgcaaaacaagaacctgagagaaatgaatgcttcttgcaacacaaagatgacaacccaaacctcccccgattggtgagaccagaggttgatgtgatgtgcactgcttttcatgacaatgaagagacatttttgaaaaaatacttatatgaaattgccagaagacatccttacttttatgccccggaactccttttctttgctaaaaggtataaagctgcttttacagaatgttgccgatgaacttcgggatgaagggaaggcttcgtctgccaaacagagactcaagtgtgccagtctccaaaaatttggagaaagagctttcaaagcatgggcagtagctcgctgaccagagatttcccaaagcg

SEQ ID NO: 16239 - DNA, 508 bp, Homo sapiens
  misc_feature (1)...(508): n = a,t,c or g
tnnnnnttnnnattgaantctgactccctgcnatgactgattacgaatttaatacgactcactatagggaatttggccctcgaggccaagaattcggcacgagcttggtaggcaccactgtgttccttggaatcagtttggtcatgacacctcccacagtttcaataccaagtgtaaggggacatacatcaagcagtaccaggtcacctgtatcttgatcaccagagagcacaccagcctggacagcagcaccatacgctacagcttcatctgggtttatgccacgggatggttccttgccattgaagaactctttaaccagttgctgaatctttggaattcgagtcgagccaccaacaagaacaatttcatcaatatcagacttcttcaaatcagaatcttccaacactttctggacgggcttcatagtagaccggaacagatccatgttgagctcttcaaatttggcccgagtcagggtctcaagaaaagcttctccttcatagaa

SEQ ID NO: 16240 - DNA, 878 bp, Homo sapiens
gaggaggtggaagctgagggcgcaaacaaaatgatgaaggacttggaggccctgatgtttgatcgctcctttgtggggaagcagttctcagcaaatgacaaagtttacactgtggagaaggccgataactttgaatacagcgacccagtggatggaagcatttcaagaaatcagggcttgcgcctcattttcacagatggttctcgaatcgtcttccgactgagcggcactgggagtgccggggccaccattcggctgtacatcgatagctatgagaaggacgttgccaagattaaccaggacccccaggtcatgttggccccccttatttccattgctctgaaagtgtcccagctgcaggagaggacgggacgcactgcacccactgtcatcacctaagaagacaggcctgatgtggtacgtccctccacccccggacccatccaagtcatctgattgaagagcatgacagaaacaaaatgtattcaccaagcattttaggatttgactttttcactaaccagttgacgagcagtgcatttacaaggcactgccaaacaagatgcccttgggagctgtgagggaaagaggacctgcgggcttagatcaatctcaattccttttcatgccctcctgcattgctgctgcgtgggtatttgtctccttagccatcaggtacagtttacactacaatgtaagctataggtggagcatcagcagtgagtgaggccattcttcatccttaggatgtggcaatgaaatgatggtgcaagttcctttctcttttgtgaatctttccccccatttcctgtttacatgtaacccaacaaaatgcaatttctaagtgccttctgtccaatcagttctttcctctgagt

SEQ ID NO: 16241 - DNA, 322 bp, Homo sapiens
ccaacaacaaagacaaacaaatcctactgaattggtgatccattgctcctaggtggggcaaagtccatactacctgtgtttgcgtactgctgttgcgcagctcacaacacagcttctctcttccagctaaagacagctgctttagtgcttccagctcctctaaaagcaccctctctctctctgaaaccaggttttcattatctatggaggatctctaaataagaaaaaaggtcatgaaagaatactgtttgtgatagagaaaaagggtagaaatattaagcagatttcttttaacccccgggaccaacaggccctggttcta

SEQ ID NO: 16242 - DNA, 447 bp, Homo sapiens
  misc_feature (1)...(447): n = a,t,c or g
gacttgatgggttctactataagatgctaaaaaggtgggttgtgtgtggttcagattggttgatttgtaaccctagttgtgcataagaattgcccagatattttttttaaatgccacctgtccaagcatttttttttcaatccctatgattccagcgtgcagacaaggttgaaaatccctatttataatgctccctgttacaattgcttttcaactaagagatgtctgtacttttggccctagatgatgtaacagcctggctgcttgnntntnancnngngcnccnttttactaatntgncactcttgnangnagctcactnagcgnntgtcntntggtgacccnngcctccnaanttnactgcccaccctatgcccatttnncgagaacacccatgggannttatgcctgannccacttctnaaaccctntgnngagggnaatttt

SEQ ID NO: 16243 - DNA, 347 bp, Homo sapiens
gaagccggtgctcaccaagatcagttcaggatcaatcattatccttgtagtcatgccttgatcagttctgagatgaagcagggaatgcaggcctgggttagcatcctgaggacacagggcccctggccttgatggcactgggccgtgctcaggtgaagcccacccgtgtctgggagagccttggcttttcagtgggcagcatgctcaactttacttgaagctcccaggtgccaaaccatttaatgccttggctgtttatcccactgccttggaagatggactcctctcatctctgagcctttacctagctgcttcctcatctacctgtggtgttgggaccaagcctc

SEQ ID NO: 16244 - DNA, 521 bp, Homo sapiens
  misc_feature (1)...(521): n = a,t,c or g
gccactcagcttgtgttgacggtattttcattggcgaggtttctcatccccttatattgctttcttcatcaagcctgatgattcacatcatcctgtgttgaaagccagttgcagaggatttgtggtccacctcccctggcctgctgtcctccaactcagtttgttctaaagccagcgtagcacccagcaccctgaggttgggctgctttttggctgtagggattctgctcccagtagcaagatgtgtttgatgagatacatccgtccttttttaccataaagtttgtacagtctcctacctatctgggttggtttgaaacaatgtgatcaattccctgtgagttagaagtatagcaccacttagaatagacagtttgttaccacattgttaaaatctaatgataggctgggtggttcaggcctgtaaccccagcactttgggaggccaangcangaggattgcttnaattgaggantcaagccaacctgggcaacatacaagattccacnccataaaaaat

SEQ ID NO: 16245 - DNA, 287 bp, Homo sapiens
gttaatatcactattaataagacaattttatattttgtgaatcctgataaaatgtgctgaagacacaacattaattatgtgatattcctgccaaaaatgcataacatgaacatagtagagagaaatatcagaaaaagataaaatgaggaatatcctacaaagttaccagcctatacttctcaaaaatttcaagttaaaggagactaaagtgacgtgacaagtacctgcagcacgtgtttctggactggatcttggtcaagaaagcattttttaaacttttgttcttt

SEQ ID NO: 16246 - DNA, 453 bp, Homo sapiens
accctctatgacatgattacgaatttaatacgactcactatagggaatttggccctcgaggccaagaattcggcacgagcagaatatcttggtgtagggactctcggttgtttgaaaaatctatatcaacagaactcttttgctcccgcaaaacaaactatagaaattcctacaagtagagaagactttgtagtctaagcagaattgtatgtgtgtgtgtggtgggggtggcaggggagcctgggatatgaacattttaaaggcacttaattggatcagagaaagattcctggaaggcatttagtataggatgtacaaggaaagataggattatgacaggaaaagaaaagtcttagattaaagaaatgtgtagcagagttgtgactcaactgtcagatcggttttctgagctttggtagcaaggtggggccacccccagcctttgagtatgga

SEQ ID NO: 16247 - DNA, 702 bp, Homo sapiens
ggactacgccatgttggggtttgtgggtcgggtggccgctgctccggcctccggggccttgcggagactcaccccttcagcgtcgctgcccccagctcagctcttactgcgggccgctccgacggcggtccatcctgtcagggactatgcggcgcaaacatctccttcgccaaaagcaggcgccgccaccgggcgcatcgtggcggtcattggcgcagtggtggacgtccagtttgatgagggactaccaccaattctaaatgccctggaagtgcaaggcagggagaccagactggttttggaggtggcccagcatttgggtgagagcacagtaaggactattgctatggatggtacagaaggcttggttagaggccagaaagtactggattctggtgcaccaatcaaaattcctgttggtcctgagactttgggcagaatcatgaatgtcattggagaacctattgatgaaagaggtcccatcaaaaccaaacaatttgctcccattcatgctgaggctccagagttcatggaaatgagtgttgagcaggaaattctggtgactggtatcaaggttgtcgatctgctagctccctatgccaagggtggcaaaattgggctttttggtggtgctggagttggcaagactgtactgatcatggagttaatcaacaatgtcgccaaagcccatggtggttactg

SEQ ID NO: 16248 - DNA, 334 bp, Homo sapiens
gcttggctcactgaggaagctgaggtgagaggatcccaggttcaagcgattctccttcctcagtctcccaagcagctgggattacgggcgcctgccaccatgcctagctaatttttgtatttttggtagggacgggtttcactgggttggtcaggccaactcctgacctcaggtgatccacctgtctgggcctcccaaagtgctgggattacaggcgtgagccactgtgcctggccagtcttgcaagtcttctatatcatttccttgtttcatcaggtgctgagagaggaatgtggaaatcttcaactaataattgtggagttgctttttcacc

SEQ ID NO: 16249 - DNA, 358 bp, Homo sapiens
gtgttgtttgagacggagtctcgctctgtcgccaggctggagtgcgttggcgcgatctcagctcagatcttggctcacagcaacctccgactccctggttcatgccgttctcctgcctcagcctcccgagtagctgggattacaggcacgtgccaccacgcccagctaatttttgtatttttagtagagatggggtttcaccatgttgttcaggatggtctcgatctcctgacctcatgatccgcccacctcagcctcccaaagtgctgggattataggcgtgagccactaggattataggccaccgcgcccagcccactattgaagatacaaatatatcactctgtacaaatgctgc

SEQ ID NO: 16250 - DNA, 420 bp, Homo sapiens
taccgtttgacatgattacgaatttaatacgactcactatagggaatttggccctcggaggccaagaattcggcacgaggggagcggggccaggaagacaaaagccacacgcagtacccgcactctatggggcagccaggcgcacgggaaacaggataatttatgggagatccgtcatgtggcaggcatccaagtgctgcagagaaggagcctcggggtgggaccccatgtgactccagccaacacctgctggcttagggcctccgcagcccaggcagggagcgtcagtgccagtgcaggggcttcggcgcgttctccctccctggacagacacgtgtccccatcttgcagcatcgctcttctacagacgccggctcccgacagctgtctcctcctgtccctgctgcagtgagtcccacg

SEQ ID NO: 16251 - DNA, 326 bp, Homo sapiens
cggtgcttggttgatactgtaacagttaccctttcattcaagcaccgtcaatcacattccttctgatagcgcaagagctctcagaatcaaagttatcatccattccttaacctatctagtttctcccctcaatatagacacaaggactcttcaataaataaatgtctaaggaatgccagcaagacagattagggcctgtgtgggcacaagtatgttcctgtcattttcttctacgacctcaagatcaggaaacatacttccaaatggagtgataccatagcctgttgaatgttgttgttctctacaaaaatgacttaccataaaca

SEQ ID NO: 16252 - DNA, 668 bp, Homo sapiens
gggcggttgtctgtggccggaggctgatcagtgttctagaacagatcagacattttgtaatgatgcctgaaataaacactaaccacctcgacaagcaacaggttcaactcctggcagagatgtgtatccttattgatgaaaatgacaataaaattggagctgagaccaagaagaattgtcacctgaacgagaacattgagaaaggattattgcatcgagcttttagtgtcttcttattcaacaccgaaaataagcttctgctacagcaaagatcagatgctaagattacctttccaggttgttttacgaatacgtgttgtagtcatccattaagcaatccagccgagcttgaggaaagtgacgcccttggagtgaggcgagcagcacagagacggctgaaagctgagctaggaattcccttggaagaggttcctccagaagaaattaattatttaacacgaattcactacaaagctcagtctgatggtatctggggtgaacatgaaattgattacattttgttggtgaggaagaatgtaactttgaatccagatcccaatgagattaaaagctattgttatgtgtcaaaggaagaactaaaagaacttctgaaaaaagcagccagtggtgaaattaagataacgccatggtttaaaattattgcagcg

SEQ ID NO: 16253 - DNA, 351 bp, Homo sapiens
ggaattttggagggacactattcaacccgatatagatggtcgctttatgtcaggagctatttgtgctcaacttaccaccggtgatggaatccttattgccagcgaggtggcaagtgacccagttcccaagcctcgtattacattttcacctacccaactttatcagttggtctctccaggaagcagaccctgagactgttgagcctgcagattgtttattaggaaatgctccctggtcaacgcctgtggaaggccagggggagatgccaaattgggcagtgggagaagtgaagctgcagccaccccaggcaaccgcagagggagttttggagctaaaatcgctggtcagaa

SEQ ID NO: 16254 - DNA, 309 bp, Homo sapiens
ctttttcaattgaaagttaattttgttttatcatttttaggatatgctctctgctcaaagaaatcatgctattaggattaaaaaacttcccaagggcacggtttcatttcattcccattcagatcaccgttttctgggcacggtagaaaaagaagccactttttccaatcctaaaaccactagcccaaataaaggcaaagagaaggaggctgaggatggcattattgcttatgatgactgtggggtgaaactgactattgcttttcaagccaaggatgtggaaggatctacttctcctcaaataggaga

SEQ ID NO: 16255 - DNA, 249 bp, Homo sapiens
gggtaattcagtgtcattggattttcagaattccttagtgtccaaaccagacccacctccatctcagaataagccagcaactttcagaccaccaaaccgagaagatactgctcaggcagctttctatccccagaaaagttttccagataaagccccagttaatggaactgaacagactcagaaaacagtcactccagcatacaatcgattcacaccaaaaccatatacaagttctgcccgaccatttga

SEQ ID NO: 16256 - DNA, 337 bp, Homo sapiens
gagcacttgctatattttgtgtgggctaacaccccaggaatagctcatcccaacaactggttttaaacatgctcaggcatacaactaggtatgttaaaaatgttttctatctacccaaaaactcagcgaaaatagtaacaatcttgataaaccagatttttgcctctcctttagtggagaaaaacggccgagctgggttttagacaaacgccttggagtccgaatgttcagtccaactacctgcattcaacttgagcatgcaccgtggaatggccattcatggccagagggatgacctcttttgctctatagttgaaaactagctatcagaaggggg

SEQ ID NO: 16257 - DNA, 393 bp, Homo sapiens
ggtttttacatccttatctcatttaattctgcaaaatagttgatatctccacatggagatgagaaatctaaaggcattagaatttcctaggtatcatgtaaaaatcattacccttaattttaaaaatgtagatttcaaaactttcagagaaatgattggcttttttgtttttatttttattttttttgagatggagtttcactcttgttgcctagactggaatgcaatggcgtgatcttggctcactgcaacctctgcctcctgggtcaagcgattcttctgcctcagcctcctgagtagctgggattacaggtgggcgccaccatgcccagctaatttttttgtatttttagtagagacggggtttcaccacgttggccaggctggtcgcga

SEQ ID NO: 16258 - DNA, 384 bp, Homo sapiens
cttgacaaaaatctaggaagtttagtggtataagggaaaaacactgaattctggaaagggaggatctgaaatgtaaccctcttctctcaccttctagttctattaccttgagcaagtaagttaacatctctatccctcatttttcccatctgtagaatgggaagaatctattaatggtcatctccaacaaaatgccccaaatataaaatgccaataatataaaggaaaatgctttgtaaatgacacaaggttatatagaaaagagatgaaatgaatcactattttccaaattggggtggagtgaggggaggaaaatctgctagagtacccccacaggggttatttaaatttatacgaggtcaggagatcgagaccgcctgccaa

SEQ ID NO: 16259 - DNA, 582 bp, Homo sapiens
  misc_feature (1)...(582): n = a,t,c or g
gnnnnngnnnnttnnnntttgaanntntgaananccctntgacatgatnacgaatttaatacgactcactatagggaatttggccctcgaggccaagaaattcggcacgaggaattgtggacccggctactccacccctctggaggccatgaaaggacctagggaagagatcgtctacctgccctgcatttaccgaaacacaggcactgaggccccagattatctggccactgtggatgttgaccccaagtctccccagtattgccaggtcatccaccggctgcccatgcccaacctgaaggacgagctgcatcactcaggatggaacacctgcagcagctgcttcggtgatagcaccaagtcgcgcaccaagctggtgctgcccagtctcatctcctctcgcatctatgtggtggacgtgggctctgagccccgggccccaaagctgcacaaggtcattgagcccaaggacatccatgccaagtgcgaactggctttctccacaccagccactgctggcagcggggaagtgatgatcagctcctgggaacgtcaagggcaatggcaaaggggttttgtgct

SEQ ID NO: 16260 - DNA, 241 bp, Homo sapiens
tataaacatattttaaaagtgctcaatgtaactttaaaggaatgaaaatagaaacagaaaacagtgaaatgcctgctacttagtgtttgtaaggcaaaatggggccatcatacaatgttaccaggactgtgaatatacataacatttccatggggccaatatgtatcaaagtttaaaatgtgcaccacttctggcccaataattcctctttcggaaatataaatgagatcatttctcaaag

SEQ ID NO: 16261 - DNA, 286 bp, Homo sapiens
ggagagagctagcaccatgagcttcaataccctgtggatatttaaacttcagttgtccaagacgtcttgtaggttcacagttggtctatcaaaaataaaagctattcctatcgtggcaaacaaaacttggtatctggttcaaataccatttttcaccagctcatgaactccattctcatcgatgattagaggtgcatggaattctttatctgccacataactttctaatccttctccagcataggagataagaggagagatttcacattggattggtacatcattg

SEQ ID NO: 16262 - DNA, 385 bp, Homo sapiens
  misc_feature (1)...(385): n = a,t,c or g
ctatgacatgattacgaatttaatacgactcactatagggaatttggccctcgaggccaagaattcggcacgaggatcttcagggcaccaacaagaaagtttctaagctaactttaggttaaaaagacttaattttgaatttggatattggggaagcctatgaaagatgcactttcaagcactattaagtgcttaaaacacttgatcaaaacaagatcataagtcgcggtgaaacaatagttactcatttaatcagggttaattaagcggccgcaagcttattccctttagtgagggttaattttagcttggcactggccgtcgttttacaacgtcgtgactgggaagcaccntnnttanttnggacccccccnnnnnnnntggg

SEQ ID NO: 16263 - DNA, 322 bp, Homo sapiens
gattcacacagcgtatcagataaacctagggtcctgtcttgattcttccactgaccagctgtgtgaccttggacaagtcacttgacctctccaaggatccatatcttaatctgtttcatgggggcacaacatgggctaggtgtgaggactcacaagttaacccgtgtgaagtgcccgtatcatcagtacgatggccgttatgattggtgcatcggacacccagagttctgtggtagagcaggaccaagttttgttcctttggtgcttaacaggatgttttcatctggcccaagaagaacttgttcttaatgttaaaagacct

SEQ ID NO: 16264 - DNA, 393 bp, Homo sapiens
gtggcttggatgccagcaatacagagagaagccgggcagggagccccaccgcccctgtgcatgatgagtccctcgtgggacctgtggacccatcctccggccagcagtcccgagacacggaagtcctgcttgtcgggttagagcctggcacccgatacaatgccaccgtttattcccaagcagcgaatggcacagaaggacagccccaggccatagagttcaggacaaatgctattcaggtttttgacgtcaccgctgtgaacatcagtgccacaagcctgaccctgatctggaaagtcagcgataacgagtcgtcatctaactatacctacaagatacatgtggcgggggagacagattcttccaatctcaacgtcagtgagcctcgcgctg

SEQ ID NO: 16265 - DNA, 539 bp, Homo sapiens
tacgaatttaatacgactcactatagggaatttggccctcgaggccaagaaattcggcacgagagcacagcaaacccgccgggcatcaaagtgtaccagtcggcagcatggctacgaaatgtgggaattgtggacccggctactccacccctctggaggccatgaaaggacccagggaagagatcgtctacctgccctgcatttaccgaaacacaggcactgaggccccagattatctggccactgtggatgttgaccccaagtctccccagtattgccaggtcatccaccggctgcccatgcccaacctgaaggacgagctgcatcactcaggatggaacacctgcagcagctgcttcggtgatagcaccaagtcgcgcaccaagctggtgctgcccagtctcatctcctctcgcatctatgtggtggacgtgggctctgagccccgggccccaaagctgcacaaggtcattgagcccaaggacatccatgccaagtgcgaactggcctttctccacaccagccactgcaatggcaaa

SEQ ID NO: 16266 - DNA, 397 bp, Homo sapiens
gccctctgcctgtctttctcaggacctctgagtctctctgtctctccctctcttctccctctctcccccgacctctgtgtccctggctgggtcctggggcagactctggtcagcctgtgatgggaacagtgtggggattaaagagctgacatcttaatccccatgtgggcactgcctataagcttcactccagtcagccccatgctcagcagagcatgtcccagtttctgcatcactttggggagaccccgttcagggtagagcctcccaggccacctccactgatggctgaggggccagttccactctgcctgaatctggctcgatgtgctttgggacgcctgccagcgagaacagccactgtcagcaagatggtagggtataaggcggtccaagt

SEQ ID NO: 16267 - DNA, 324 bp, Homo sapiens
ggaaaaatcagtgaagaaatgttgcttaatttgtacacttccctgcagtgctggaaatggacttttcctttgcatttccatgagtcagggagaaaacagaccagcctggtttcacgttccagacagcatgaagtacctcaacagcaaagaaggaaataggggccttagtttttaaatcctctgtaagatagtcaaggcttctccagtagaaagttaggttttgtaataagggaccattttgtcctttctgttcaggattcaacaattgcttgttgatttggggtgaagatgccatgaactcaggagcgggtgaggagggccttt

SEQ ID NO: 16268 - DNA, 332 bp, Homo sapiens
ggaagagctagcaccatgagcttcaatcctgaattttctccaacttttctttaatatgtactttttagcattttagagtcctatagagtgcctatgtttgaggaattaattcctctctgataacatatatattttgaataacaccccagttacagattgaatcagggtgacaacaggaaatggcagaaaaataatggtctaaaatattcccaaacccaaacctcttctatcagaaagaggtgtagagctgtgatgagtaagctaccacatcgctcacttctgcccacaatatccagtaatactcaaaggctgtggtgttgaactaatattct

SEQ ID NO: 16269 - DNA, 388 bp, Homo sapiens
cgtaaaggtgcagctgccgccaccgccgcttctgcaaggtctcagggacgggctgcagccatgtcctattgccggcaggaagggaaggatcgaatcatatttgtaaccaaagaagatcatgaaactccaagcagtgcagaattggtggctgatgaccccaacgatccatacgaggagcatggattgatactgccaaatggaaacattaactggaactgcccatgccttgggggaatggccagcggtccctgtggagaacagtttaagtcagccttttcctgcttccactatagcacggaggagatcaaggggtcagactgtgtagaccagttccgggccatgcaggaatgcatgcagaaatacccagacctctatccccaagaggatg

SEQ ID NO: 16270 - DNA, 352 bp, Homo sapiens
gcagcaaaagaaattatgttaaaaatgctctgggattacaagcgtgagccactgtacctggcccaataatttttatattgtttatgtcttaaaaaaaatttcgatatattgggttaaataataaattacaaaatcaattttactttttaaaaataaatgactactagaaaacataaaattatgtatgtgtctcacatacttatgaatagcactgatctagaagaaaaagatatctttactgaaaaccataatacaagttttaaagtaataagtgtcataagagaagaataaattaaatgctgtaggcgtacagtacaggaaatggttgggagaatcagaaaaaaaagccctt

SEQ ID NO: 16271 - DNA, 325 bp, Homo sapiens
gggaaatcactgcagcacaggaaaagtaattcagatgttaatgccacttgaagaagttggtaggctagcaaagaggatgagacatgaactgtcataaaggactcagcaaccagccagggacagataaagcgctatggaaaggggcttccaagttcttttgaacatgacccttagtaacaaacacaatttatataatgacccagcaaaacacatcacatcttactgtcgaaattaaatgtgtgatccatcctagtattttctgttccattccttttcattctatttcatttataaaacatgctagttgagacttttcaaatggatt

SEQ ID NO: 16272 - DNA, 221 bp, Homo sapiens
gcgagatcaaaggtgttgctgggtgcatggttctgctttatttccaagcactgctgttaattagaaaacaagatcagaggcaggattaaaatccaattaaattgatatgaacagattgccaagtgatgttcactaatgtataattgagcaccatgcaaatttcggtggctggcttttgtttttttcccccacactctggaatgaatgatgaggctatgaag

SEQ ID NO: 16273 - DNA, 342 bp, Homo sapiens
  misc_feature (1)...(342): n = a,t,c or g
ggagnttggnantggntgactgattacgaatttaatacgactcactatagggaatttggccctcgaggccaagaattcggcacgagatctgacccaggtgatcattgggagccttacagataggacttattttctcttgggtgagagccccctaacttcctcctgagatcagcactggtgctggagggaaagcctggaatggatgctgagcacaatgttcgggtactggcccttgcgcattcaccatttgttgagttaaatagtggacataatacaagtagacctcaagtgttgagacaaaaagaactacagagtctgagaagtagcctttttttttttttt

SEQ ID NO: 16274 - DNA, 394 bp, Homo sapiens
ctcactatagggaatttggccctcgaggccaagaattcggcacgaggctcaaccaaacttgggaaccatccttgatccacgaccaggtgtcattactaaaggctttacccagttgcccggggatgctatttatcacatctcagatttagaagaggatgaagaggagggtattacttttcaggttcagcaacctcttgaagtggaagagaaactttcaacatccaagccagtaacagggatcttcctgccacccattacttcagcaggtggaccagttacagttgcaaccgccaacccaggaaagtgcctgtcgtgcacaaactcaacattcactttcaccacctgtagaatattacatccctctgacatcactcaggttacccccagctctggg

SEQ ID NO: 16275 - DNA, 430 bp, Homo sapiens
  misc_feature (1)...(430): n = a,t,c or g
gaaagtcttactggatgagggccaacttatatgacctcatttaaattatctcctgaagaccccatctttaaatacagtcacactggggatgaggccttcaacacatgaattttacgggggacacagttcaggataacgccttcccctagctctcagggtcctgtaggcaggggcctgcctccacctctcagggtcttctgccagtggggctgaggatggcaggtagctggatggggtgagggtgggacatcttttggttgccctcctttccctcattcctgctggcagaggtagttgatgtgccacgcctctagatttacggatttggggtataaactgagcatcagtcatctccccacggccagcctccgcctctcagtctgcaccttgctgctctctgcgtntgcgcgcaccctcctgctcctngctt

SEQ ID NO: 16276 - DNA, 463 bp, Homo sapiens
  misc_feature (1)...(463): n = a,t,c or g
gagatttttgtatttttagtagagacggggtttcaccatgtnggtcaggatgggctccatctcttgacattgtgatccacctgcctcggcctcccaaagtgctgggattacaggcatgagccactgcacccagccttgaatttttaattttatctctgatatacttcattaagtgtctggagacctaattatcctaaaagatcatacattttctacctatgaattttgctgcatacagaaagtgccctttcctcaggaagttgctgtgtttcatttctttggatggactcttatctagaatacatagcagctctgcaaagaaacagtttttaaaaatgggaacttctacattgaaaagccccatttnggggccactattnttggggngaggaaaaatttttttttggncatttttnggngggggggnaaaanattttttgaaaggntttttcccnttggaaaa

SEQ ID NO: 16277 - DNA, 362 bp, Homo sapiens
gaaaacagaatgctcccaaagtgctagggttacagacatgagccactgtgcctgtctagacttgtactttcaacatggtgaaaccctgtctctactaaaaatacaaaaagtagccagtcgtgatgacaggcacctgtaatcccagctactcgggaggctgaggcatgagaattgcttgaacccgggaggcggaggttgcagtgagcctagatcatgccactgcactccaacctgggcagcagagcaagactctgtctcaaaaggggaaaaaaaaaattgctgatgtgacccatgaagggaactcattttcctcgtaattttggactgccacacattggtacctttagttctctgaaggccca

SEQ ID NO: 16278 - DNA, 558 bp, Homo sapiens
  misc_feature (1)...(558): n = a,t,c or g
gagatcttttgtactttggttccttatgttataactatctatcctacttgttttaagtctccccttgaacccagacccactatggtctctgcagatccctaccagcagagtagtgcccaaccctgccccctcaacacaatgcacttgtacaaagtgggtgtgggatggaacttaaatagcaaagaaccaaatcaagatgcacattgagagcaatgtgcatctatgactggtgtacaaagtcatccttctgcactatcagtgtggcattgtgcccacgagtaaagggaatcacaaagagataaaaccataagcagctaaatagccacaccataagtgggaagaacagcatatttttgcttgaaaatccattaataaaaanataggaagaaatcagtattcagccaancaattaaattatttaggtttttttgtttgcttgttttcacaaatgcattggttcagccaanaaatcaccaccagatgacttgaacaagaatgtgagcccagcaaatgtgggtaantaaacgggcgcaagnntttccccttannnggggtaat

SEQ ID NO: 16279 - DNA, 507 bp, Homo sapiens
  misc_feature (1)...(507): n = a,t,c or g
ctttgaanctntgaancccctnctatgacntgattacgaatttaatacgactcactatagggaatttggccctcgaggccaagaattcggcacgaggacatgctgtctgccctcatgaaattggctccaaatgaatgaactactttcatgagcagttgtagcaggcctgaccacagattcccagagggccaggtgtggatccacaggacttgaaggtcaaagttcacaaagatgaagaatcagggtagctgaccatgtttggcagatactataatggagacacagaagtgtgcatggcccaaggacaaggacctccagccaggcttcatttatgcacttgtgctgcaaaagaaaagtctaggttttaaggctgtgccagaacccatcccaataaagagaccgagtctgaagtcacattgtaaatctagtgtaggagacttggagtcaggcagtgagactggtggggcacggggggcagtgggtacttgtaaacctttaaagatggtt

SEQ ID NO: 16280 - DNA, 380 bp, Homo sapiens
gaaactgcttgatgctggtctctatactggagaagtgactgaaattgtaggaggcccaggtagcggcaaaactcaggtatgtctctgtatggcagcaaatgtggcccatggcctgcagcaaaacgtcctatatgtagattccaatggagggctgacagcttcccgcctcctccagctgcttcaggctaaaacccaggatgaggaggaacaggcagaagctctccggaggatccaggtggtgcatgcatttgacatcttccagatgctggatgtgctgcaggagctccgaggcactgtggcccagcaggtgactggttcttcaggaactgtgaaggtggtggttgtggactcggtcactgcggtggtttccccacttctgg

SEQ ID NO: 16281 - DNA, 912 bp, Homo sapiens
acgaatttaatacgactcactatagggaatttggccctcgaggccaagaattcggcacgagatcatgtcaaaattttcattccccagatctggtccacagcatacagttacggatgtgtttgttgcctgttactttatatttaccaaggataactactataatttctttaaatgccagcttggagcttgctttttattcttaaacactgtctcccacttttttcttttttttaagctctgggttcccttcattatcctgtggaagtagcggtagcagttcatccaacacggctgtgaattctcctgccttgtcctatagactcagcattggtgagtccatcaccaaccgacgagattccactacaaccttcagtagcaccatgagcttggccaaacttctacaagagcgaggcatctctgccaaagtgtaccacagcccaatttcagagaaccccctccagcctctccctaaatccctggctatcccttccacaccaccaaattcaccatctcactcaccttgcccttctcctttaccctttgagcctcgagtgcatctctctgaaaattttttggcctctcgaccagctgagacattcctccaggagatgtatggcttgagaccctcccggaaccctcctgatgttggccagttgaagatgaacttagtggacaggctgaagagactggggatagccagagtggtcaagaaccctggtgcccaagagaatggaagatgccaggaggcagaaaatggtcctcaaaaaccagattctgctgtttatttaaattcaggtagcagtttattaggtggactaaggaggaatcagagtcttccagtcataatgggtagctttgctgccccagtttgcacatcctcacccaaaatgggtgtcctgaaggaggactgag

SEQ ID NO: 16282 - DNA, 323 bp, Homo sapiens
ctgagactcctcatacctcagtggttagaagcatgtctctcttgagctacagtagaggggaagggattgttgtgtagtcaagtcaccatgctgaatgtacactgattcctttatgatgactgcttaactccccactgcctgtcccagagaggctttccaatgtagctcagtaattcctgttactttacagacaggaaagttccagaaactttaagaacaaactctgaaagacctatgagcaaatggtgctgaatactttttttttaaagccacatttcattgcttagtcaaagcaggattattaagtgattatttaaaattcg

SEQ ID NO: 16283 - DNA, 440 bp, Homo sapiens
  misc_feature (1)...(440): n = a,t,c or g
ggcacaatttaaagtgttcatttttagatttagcaagtctactttcacacatgtatcctataaaaatatttgcacatatgcataacggcacatacaaggacataactgcagcaatggcaaggagtgatgaaaaagtaggaacagtggccaaatcgagtgataacagaaaaggaggcagcactgtgaggaaggttgcgcagagtgcaccgcagtgagcacggcctgcgcctagacccctgtgctgtctgagaccacctctggagtatgcagccatgtgtggatcacaggtgtcaaatagcgaagttactctggaagagttttttttgtttgtttttttggggggtttntttgncgnntgggaacaangtcnnntnatnnacnaannntggnnntgnccnnnatcnnntggngnannnnctttntttnnannanggnaaacc

SEQ ID NO: 16284 - DNA, 331 bp, Homo sapiens
gatgagaagtgtgaccaggcatggtgactcatgcctgtaatccagcactttgggatgctgaggcaggaggatcacttgagcccaggagtttgaggttacagtaagctatgattgtgccactgggctccagcctgggtgacagaactagaccctgtctctaaaaaaagaagaagaggtgtgtatccttctaaatgataaaacagatcactcccctgcttacataaaactttccggtggctggccaggcacggtggctcacgcctgtaatcccagcactttgggaggccatggtgggcagatcacgaggtcaggaaatcgagaccatcctggc

SEQ ID NO: 16285 - DNA, 310 bp, Homo sapiens
attactaggtgttaaagtagcaaaatctattttaaaaacactctaagtagtgttccccaatgtggttgtgtatatggatcacctggggattttggtaagttgcatgattctgtttaaggaggtctagggtgaggcccaagcttttgtgtttctaaagtttctaggtgaagatgccactggtttggaaaccacattgggagtacctagggtgtagctccctgctgtccagtagctacacatggcaagtgggcacttgaaatgtggctagtggaattgaggaaccgaactttaattgttttttttttaaaac

SEQ ID NO: 16286 - DNA, 779 bp, Homo sapiens
gtcttccctaggctatttctgccgggcgctccgcgaagatgcagctcaagccgatggagatcaaccccgagatgctgaacaaagtgctgtcccggctgggggtcgccggccagtggcgcttcgtggacgtgctggggctggaagaggagtctctgggctcggtgccagcgcctgcctgcgcgctgctgctgctgtttcccctcacggcccagcatgagaacttcaggaaaaagcagattgaagagctgaagggacaagaagttagtcctaaagtgtacttcatgaagcagaccattgggaattcctgtggcacaatcggacttattcacgcagtggccaataatcaagacaaactgggatttgaggatggatcaagttctgaaacagtttctttctgaaacagagaaaatgtcccctgaagacagagcaaaatgctttgaaaagaatgaggccatacaggcagcccatgatgccgtggcacaggaaggccaatgtcgggtagatgacaaggtgaatttccattttattctgtttaacaacgtggatggccacctctatgaacttgatggacgaatgccttttccggtgaaccatggcgccagttcagaggacaccctgctgaaggacgctgccaaggtctgcagagaattcaccgagcgtgagcaaggagaagtccgcttctctgccgtggctctctgcaaggcagcctaatgctctgtgggagggactttgctgatttcccctcttcccttcaacatgaaaatatatacccccccatg

SEQ ID NO: 16287 - DNA, 518 bp, Homo sapiens
  misc_feature (1)...(518): n = a,t,c or g
ggannccatttgannacccngctatgacatgattacgaatttaatacgactcactatagggaatttggccctcgaggccaagaattcggcacgagaagtatcaaacacatttgtgcgactggcagacacacactttgtacaacgctgcccttcggtacctaccactgagaattcagaccctgggccaccaccacctgcccccacacttgtcattaatgaaaaggacatgtacctggttcctaaactcagcttgatagggaaaggtaaaaggaggagatcatctgatgaagatgctgctggggagcccaaggccaagagaccaaaatatactacagataacaaggagcccattccagatgatgggatttattggcaggccaaccttgacagattccaccaacacttccgtgaccaagccattgtgagcgcagttgctaacaggatggaccagacaagcagcgagattgtgcgaaccatgctccgaatgagtgagattccactttcttctagggttcctt

SEQ ID NO: 16288 - DNA, 461 bp, Homo sapiens
  misc_feature (1)...(461): n = a,t,c or g
tgntnnnnnatntgaaanccttattacangatnacgaatttaatacgactcactatagggaatttggccctcgaggccaagaattcggcacgagggagcttctgttgaacggcaaactgacaatgtcagctgttgtgaagaaagtggcagaccggctcacagagaccatggaggatggcaagaccatggactatgctgaagtatcaaacacatttgtgcgactggcagacacacactttgtacaacgctgcccttcggtacctaccactgagaattcagaccctgggccaccaccacctgcccccacacttgtcattaatgaaaaggacatgtacctggttcctaaactcagcttgatagggaaaggtaaaaggaggagatcatctgatgaagatgctgctggggagcccaaggccaagagaccaaaatatactacagataacaaggaggtaatggggctt

SEQ ID NO: 16289 - DNA, 329 bp, Homo sapiens
taaagagcaaaattgtgctgtactttccttttctggttctaatgctggataccactctgaagttgaataacaaacaggcaagaatttaaaaaggggaaggagagagaggaaagtaatccattaaaactgttacctgtatttctaacagtgactcccacagaaactccactgcggggatggaggggaggttgattaaagaatgtcttggtttctggtggcccatgtgtgtagataaggctgttggcttctgtatttaacgtcgacgcggccgcgaattccagatctatgaatcgtaagatactgaaaaaccccgcaagttcacttcaact

SEQ ID NO: 16290 - DNA, 478 bp, Homo sapiens
  misc_feature (1)...(478): n = a,t,c or g
ttgccccccattggctccnaacngctatgacatgattacgaatttaatacgactcactatagggaatttggccctcgaggccaagaattcggcacgagggaaggacttgtctctgggcttggatgacagcagaaccaacacaccccagggtgtgctgccatcttcacagctgaaatctcagggcagctcaaatgtggcacctggtcagtaatgcttccatgggttggttttcttcacattgttttgcagttaattctgatcatattgctctaatgttaaagcatcttgtggctaacaatgaaaattaacatttattcactgaactagacatttctttgtgccagtacagaagtttcattgctattggcaccacaattttaagtaatcttaaggtaacttataaagaagcatcaaattacctgactggcaagtcctcggatttctgtatttcctttttactcttagtgcaggagtgagt

SEQ ID NO: 16291 - DNA, 409 bp, Homo sapiens
gtcaatgtactggctgaggattctatctcagctgtcttttctaactgtgtaggttgagttttgaacacgtgcttgtggacatcaggcctcctgccagcagttcttgaagcttctttttcattcctgctactctacctgtatttctcagttgcagcactgagtggtcaaaatacatttctgggccacctcagggaacccatgcatctgcctggcatttaggcagcagagcccctgaccgtcccccacagggctctgcctcacgtcctcatctcatttggctgtgtaaagaaatgggaaaagggaaaaggagagagcaattgaggcagttgaccatattcagttttatttatttatttttaatttgttttttttctccaagtccaccagtctctgaaattagaacagtagg

SEQ ID NO: 16292 - DNA, 444 bp, Homo sapiens
  misc_feature (1)...(444): n = a,t,c or g
ttgnannnccnntttgnanaacngntatgacatgattacgaatttaataccgactcactatagggaatttggccctcgaggccaagaattcggcacgagctccatctcaaaaaaaaagcagtatttatttcaaaagtgaaaataattaaaggcaatggtaataatggaatagattcaattcagtgtcatacatttgctttaagaaatttaatttatgattttaattacattgttaacattatgggtttttttttttnnnnnntttngctttaaanattcngttngaaaaaaatncnggttncctaagtaaatnatttnntnggccnttcnctggggctnanatnngggancccagntttttggnaggcaggggnggnaggancactnganccagganttcaanaccacccngggtancccatntttncaaaaanttaaaaaatt

SEQ ID NO: 16293 - DNA, 1067 bp, Homo sapiens
gagaatcctcagttctcatctactgtcctcagtgaacttctctggcaggttgcatattcctatacctatgaactgcggccctatttggatctgcttttgcaaatcttactgattgaggactcctggcaaactcacagaattcataatgcactgaaaggaattccagatgaccgagatgggctgtttgacacaatccagcgctctaagaatcactatcaaaaaagagcataccagtgtataaaatgtatggtagctctatttagtaactgtcctgttgcttaccaaatcctgcagggcaatggagatcttaaaagaaagtggacctgggcagtggaatggcttggagatgaacttgaaagaagaccatatactggcaatcctcagtacacttacaacaattggtctcccccagtgcaaagcaatgaaacgtccaatggttatttcttggagagatcacatagtgctaggatgacacttgcaaaagcttgtgaactctgtccagaggaggagccagatgaccaagatgctccagatgaacatgagtcgcctccacctgaagatgccccattgtacccccattcacctggatctcagtatcaacagaataaccatgtgcatggacagccatatacaggcccagcagcacatcacatgaacaaccctcagagaactggccaacgagcacaagaaaattatgaaggcagtgaagaagtatccccacctcaaaccaaggatcaatgaaatgcacataattaactggttccatcaagactgtgcacccaggccttacagtccaacctttttctgtgtctggctaatatttaaaactagaaaaactattcctaatcaacatggagtggagagtttattcactgtcttatctgcagaaatttgctgtcaatatataacccgcctgcagtggaaagtgtatagtgttttgtaataaatggcctgatgctaatgtgtaaatggcaaaggtgtatatagtatattaatgttgactgttaattcttaagcaagaaacttttttcttgatgagactcacagatctacacaaactacaaaag

SEQ ID NO: 16294 - DNA, 554 bp, Homo sapiens
  misc_feature (1)...(554): n = a,t,c or g
ggtngnnnntnanttgaaanctctganaccttatgactgattacgaatttaatacgactcactatagggaatttggccctcgaggccaagaattcggcacgagacttgctgatgagtggagaatggttatggggccctgttaagaaacttgctagtctaggcaagaaataagaaaggtctagccgagcatggtagcacatgcctgtaatcccagctgctcgggaggtggaggcaggaggatcgcttgagccaaggaagcagaggttgtagtgaattgagatcgtgccactgcactgcagcctgagtaacagagtgagactgtctcaacaacaacaaaaaaggtctatagtagagtaatattgcaaacatagagaagtcaatgaattcaagaacttttgtcaggcacagtggctcatgcctgtaataatcctagcgctttgggagaccgaggtgggcggatcacctgaggtcaggagtttgagaccagcctggccatcatggtgaaaccccatctctactaaaaatacnaaaattaacttggcatggnggtgccg

SEQ ID NO: 16295 - DNA, 439 bp, Homo sapiens
gcacttgaggtcaggagttcgagaacagcctggccaatatggtgaaacccctgtctctactaaaaatacaaaaattggctgggcatggtggcggacgcctgtaatcccagccgctcgggaggctgaggcaggagaatcgcttggacccaggaggcggaggttgcaatgagctgagattgtgccattgcactgcttcttgggtgtcacagcgacactccatctcaaaacaaacaaacaaaaaatccctgtacaaagaaaaataaataatgcttgtaaatggacacgtgcaggcccatattttcccctgaagtgttggtagttggtaagtgtaagatcagaggaacttttcaccctccatggcacattgccagatcaaacctttctcaccagaagtggctttggaagctctacagaagtttcctgctgcaagtgaggaccc

SEQ ID NO: 16296 - DNA, 510 bp, Homo sapiens
  misc_feature (1)...(510): n = a,t,c or g
tttganatntgaanaccgttatgacatgattacgaatttaatacnacngcactatagggaatttggccctcgaggccaagaattcggcacgaggtggtgggtgtctgtaatcccagctactcaggggagtgaggcaggaaaatcatttgaacctgggaggcagaggttgcagtgagccgagatcacatcactgcactccagcctgggcaacagagcaaaactccatctcaaaaataataatatttttaaagttactttgggccaggcacaggctcacacctataatcccaacacgttggggggccaaagcaggtgaatcactgtaacccaggagttcaagaccaacctggacaacatagcaagacccccctgtctctacaaaacatttttttaaaaatctgtttgtggtggcctatacctgtggttccagctacttgggagtttaaggtcagaggattgcttgagcctgggaggtctaaggcttcantnacttngaatcattgnccctgc

SEQ ID NO: 16297 - DNA, 510 bp, Homo sapiens
  misc_feature (1)...(510): n = a,t,c or g
ggtggaatcttcgacaggaggagatagatgataggcgatgatgatctggatgacaaagtgagtgtaaattatgtcctcgaattctcaacaactaccccagcttttctagtctgtgtagacaagatccatttttggtgagatcgattgattgcggttgtatgatccaaggtatcacgtccatttatgttgatcagaccttattgggcgccattnnggccncncnnagaatcanagccaaccngatacgnagagagacagagaaattttttttanngannngantaacaggattgaaggagctgcnggttcaggttgcacngngcntgccacntgngctggaaatcccaccaggagttaatggtgcatatcctntgntncagacctatgnaggncaattcttacccttngggggacctcctacnnttaaggcctttctnggctgctnnnggnnggcaccnaggttangtccgatgatncnttnntnggaagccctnttaacggggcacttgg

SEQ ID NO: 16298 - DNA, 628 bp, Homo sapiens
  misc_feature (1)...(628): n = a,t,c or g
aggccctacgaatttaatacgactcactatagggaatttggccctcnaggccaanaattcngcacgagggatggnatctttgaggtcaantctacagctggggacacccacttgggtggngaagattttgacaaccgaatggtcaaccattttattgctgagtttaagcgcaagcataagaaggacatcantgagaacaananagctgtgagacgcctcggtactgcttgtgaacgtgctaagcgtaccctctcttccagcacccaggccagtattganatcgnttctcnctatgaaggaatcgacttcnatacctccattacccgtgcccgatttgaagaactgaatgctgacctgnttccgtggnaccctggacccagtaggagaaagcccttcgagatgccaaactagacaagtcacaagattcatgatattgtcctggttgggggttcnactcgtatccccaagattcaagaagcttctccaagacttctcantggggaagatntgaatanggcaancancctggatnnacccgttgcctanggggggaannnncaaggaacccanctggngnggngaaagtctgaaacntncaaaatttnnggcnctgggtgccacncccctt

SEQ ID NO: 16299 - DNA, 377 bp, Homo sapiens
gtaactgttgctgctattaattgttttgactactgaaatagacaagagttggtgatggtttggatggagaagaggagggaagtttcaaagacaactgacaggtatccggcttgtgtacaagacacttggtggtgccagtgcctgagatggaggaaactggggagaataagggtttgagaggaaggtcaagaatcttattttggagttgtttgtttggatggatgtgagatatctgagtggagatgtcgggcttcaagtagcatcctgggccagagatagagctggtattcaaattcgaactgaaatatactggagaaatttgcaaaacagcacttaaaaataatttaaccttgtcctggaccagccaacaggatgcc

SEQ ID NO: 16300 - DNA, 310 bp, Homo sapiens
ctcgttgtgaaattaaagtgttaacagaggctgaaagaacatgtaggcttattgaggtcatgtacactcacctgatttggcatgtttccctttacatgtgtccaagccccagctttatataaatactgagctgggctcagaaattttgctctatattcggaattcaccttcctaatagaaatgaaatgaaagtaaatatttcaccatgttaatcattgaaataccatattttcctattaaaatacatacccaagcctttgatgtttccaaggagtaagcttccttttaggctggtgtaagtcttttaatt

SEQ ID NO: 16301 - DNA, 58 bp, Homo sapiens
gggttctccaaagggacagaagtaataggacatgtatagttagatctatgacagggtt

SEQ ID NO: 16302 - DNA, 432 bp, Homo sapiens
  misc_feature (1)...(432): n = a,t,c or g
gggnnggnnnnnnngntgntttgncnatcnnaccgctatgacatgattacgaatttaatacgactcactatagggaatttggccctcgaggccaagaattcggcacgagatggcctgaagcgtgccttttgggttctcagctcgggctcacaagtgttttctgtgctaaatacaaaaagccctgtgatgttttgctttgcgtgtccacctatctgactcgtaagaaccgaggctgaatccagacccacactctgtcacgtcgggagagcctgccgcggcgagcctctgcgagcgggcatttcttgggtggggaccaaaagcccagtgctgccatagtttcggatcattcttttaagaagctggggccgggcgcggtggctggcacctgtaatcccagcactctgggaggctgaggcgggcggatcccttgag

SEQ ID NO: 16303 - DNA, 312 bp, Homo sapiens
ctagaaccttgattgtctgatcacccctgtttcttatttttcttatttttaggcattaattccaaaaacatccatcagacagacatttaggaagtgttctttctatacaacagagacttggacaggtgaatcagaccacagtccttgtttcattaagttttcaattttggagggggaaggaaaggagaatgagacagccaaaaacttgtgctaactggtaactgaagtgatgggtgaggacaggagacagagccattaattctgtctggactagtcagatggggccttccagaggaggcaaccctgagttga

SEQ ID NO: 16304 - DNA, 306 bp, Homo sapiens
ttcgaaacagttagggaatcctgtacatctttatgactaaccaactgaacattgccatcttcataatagtgaacctgaatcttaagcacgccaaccacctgggctgtaggtggtgtgatggtgaacttccactctgatctccaacgaccattccagaagtttttaggctgaaactggtggctttcaatacatgcaataatagtctgttgcccatcgatagttttagcataaacagtacagaagccgttggaataatggtctttcacataggctcttaaagcactgtcacaggattctctccaagac

SEQ ID NO: 16305 - DNA, 308 bp, Homo sapiens
  misc_feature (1)...(308): n = a,t,c or g
ggggcaagataacgcacttctaactagaaatctgccaattttttaaaaaagtaagtaccactcaggccaacaagccaacgacaaagccaaactctgccagccacatccaaccccccacctgccatttgcaccctccgccttcactccggtgtgcctgcagccccgctncctccttccttgctgtcctaggccacaccatctcctttcagggaatttcaggaactagagatgactgagtcctcgtagccatctctctactcctacctcagcctagaccctcctcctcccccagaacgggctgcctgcac

SEQ ID NO: 16306 - DNA, 509 bp, Homo sapiens
  misc_feature (1)...(509): n = a,t,c or g
acctttgaaaaccgttatgactgattacgaatttaatacgactcactatagggaatttggccctcgaggccaagaattcggcacgagactggaagaaaacactgaactggaagagagagagagatgtgactaatggaaatctcacacaaaacacgatgttgcatcaaggttgatcatctctacacacactggaccaaaagagattttcctggggctagcattagggaactgcttttgaagctcctcaaacacaggtggatgtctcactttaacatgacttagctaccaaagagtcaagtaacaccacacagtgttgaaaacctcaaggcacccaacacccaataaattctcaaacagaaatctgccagaggatcagaaacctctgatctcttacaactaagagctttctgcaccaaacacataaattctcttaaagttctacaaaagcccacaagtaacatttccctcctgactggtcaactgtcntttttataagaaggggtccggaa

SEQ ID NO: 16307 - DNA, 398 bp, Homo sapiens
gggaatgttctttatagaacagcgatgtgattgatctctgatgggcagcacggcctctgggtgagtgatggccgacagggctgggacagagagcttcgtaacatttctaggcagccagttctggctggtatcctggccactgctcacactctactgtactgggacatgccaaccattcctttctctgaagagcttcagcaaagcccaggcctcccaaatgatgtttatcaaccctagagagacaagtgaggtctagtggttcgagtcagcaagggtggggagccatgagggttcaggtgctcccctgacactcgggttttttcttctttcagggtcactgtgcaaatcatttaaggaaatctctccttctttctctctgcctgctctccctcctcctc

SEQ ID NO: 16308 - DNA, 359 bp, Homo sapiens
gcggcacgagagcaattcttataaaatgcagatctggtcacgctctttgatgaaaaatcttcaatgactccgcattgatctggggtgaaattgccagactccttacctgttcgaaaagacccagtgtcatttggaccgtgctcaacttttcaattatgctgaccccctcatcaattttgttattgcccaagttccttgttttccttgttatggcattgctgtctcactcatgggccttcacatgcttctctgtgcccagaatccttatcatcttcctctgtacttagctgaggcatccttctggtctcagctagataccactttctaatgaaagcattccttggccaggcatggtggct

SEQ ID NO: 16309 - DNA, 374 bp, Homo sapiens
gggagagtcaatcatgaaatgagagtgagacattaaggattttttgttattattatgtgtgataatgataaagaggctcgttaaaaaatcttatctgttaaggatcaataaaataatacagcatctaggatttgctttaaaatacatcagttaaaaaaagggacaggactatatgaagcaggaatggcaaagttctgatcattgaaactaggtattgggtacaagggagtacattatacacttctctgtttttgtgtcttgattcatttcataagaggttaaaaaacataacctctgatacctcattttttttcgatacacaaaaaatgaactggaagggtaacttgtatgtgaaagttgtctggtatccaaaa

SEQ ID NO: 16310 - DNA, 319 bp, Homo sapiens
gcggcacgagaagaattctagtttctattgttggcctcgggaaaatgagaggccagagacaggaaggcaggagaaggtcagaaaatttgcttctgaggctgctactgaggttttcattttggggtatcatcttaaccccaagaacaagaagcttcattccctacagaggtgttcacagccaggaggggcagcctacaggtgactagggcacagtgcatttggagaagaactagcaggacaatcagcaggtccacattagctctggacttccctgccctgtcatcagccaggggtggctccaagggggcatcttttaggt

SEQ ID NO: 16311 - DNA, 336 bp, Homo sapiens
gaccatgagcttcaataccctgggtttaagtaaaagcattaagaactcaaatgtagaataatagccaaagacttcagactttcaaaaaatattctctcaaatgactttttctatcgttgagagctaccctttcacacagcagtcaataataggaaaatattaatgtcacttagggcagggttcgataataaccttcaggggctgctaacaccttgtggtattatgatatatactggttttcgtccacagttcctagctcataactgctgtatccctagttactgtctttcgttataatgttgggtgcattaggcctcacaggaaacagaactctcc

SEQ ID NO: 16312 - DNA, 323 bp, Homo sapiens
  misc_feature (1)...(323): n = a,t,c or g
tgggcatggcttgcgggctggagtcggggagctgctctgccgaagaccttaaaatggccagaagtctggtccccaaggctctggagccatacgtgacagtgacctgaccaacggtgcagatgggatgctggccacaagctccaatgggtctcagtacagcggctccagggtggagactccggtgtcctacgtcggggaggacgacgaggaggacgatgacttcaacgagaatgacgaggacgactgacgtcctccccacttcagattcggcttcaggaaaacgtttagcgaaaagaaacttttttttttaatgngggttttct

SEQ ID NO: 16313 - DNA, 454 bp, Homo sapiens
  misc_feature (1)...(454): n = a,t,c or g
gaggnnttgaatctgataccgtttgactgattacgaatttaatacgactcactatagggaatttggccctcgaggccaagaattcggcacgaggtttttttaaccactatcatttcttttcagaattgctaataattagcaaaatggaccaatgtaagttccatttccataaataaaagtatgattagggcaacagcttcttattaagggcagaagaaaagagctcctgcttgccatgtgtcaccctctgctcggagttccatattctcacctgacttggtttttcatggcagcatgcagtgctagtaagtagatgatttcatagacgagatgagctgagctggcacaggcacataacgtgcccagacattttgaagctgggattgggatcctggcctgactgcagagcaaaatacaccatttggtgcatcctggcaccggcccacatgtgtgg

SEQ ID NO: 16314 - DNA, 324 bp, Homo sapiens
aaaagaaccagcaataacattgtattggcaagaacctaaggaaagaattagtttttatattttgctggtagaaatgtgagttactagagcctttgtagacagtgatctgataatatctattaaaattaaaaaaatatatttataccagttgaccgtgcagtcttactctttgaaatctagctcatagaaacacacttccatatataagcatttctgtatgagcatttgtttctagtggcaaaaactggaaatgcaatttatgtctatcagtaggggaattgtgaatgtatttattatgtatctacataatatatctacataata

SEQ ID NO: 16315 - DNA, 92 bp, Homo sapiens
gatttcagccctgtgctgcccgtgctgtctggctttccatttaggaaagaagcctaggaaaagctcatgcatttctctttgggcctccacgg

SEQ ID NO: 16316 - DNA, 305 bp, Homo sapiens
gccagggaggattgtctaatcaaaaactagtgaccaatttgtcataatggagagtagttcaatggattgagaaaaatatgttttatttgttggcttgtaattatgtctctggattattattattatttttttagatgtagttttgctcttgttgcccaggctggagtgcaatggtgcagttttgactcactgcaacctccgcctcctgggttcaagtgattctcctgcctcagcctcccgagtagctggaattacaggcacctgccaccacgcctggctaattttgtatttttagtagagatggg

SEQ ID NO: 16317 - DNA, 513 bp, Homo sapiens
  misc_feature (1)...(513): n = a,t,c or g
attggagncctnacntgattacgaatttaatacgactcactatagggaatttggccctcgaggccaagaattcggcacgagggcgtggtaaaagcagtgaagaagaaattggtagattagcgatataagttaaactgtgggctgcctggtttaccagagagaacaggaaacagaaatagctaagaagagccctcctggggtcagaatgaagcgcaaacactgatctcaaaaaactctacctgctaggtgtacactaggtctataactatacccgtaaaagagcccaaactgaattgattctctgaatagacaattgatgccccacgacattttgaaaatgagagcaatcaatcagcaatcagcagagcttaaacctgggtgtgatcagtgaaagagacagtgaaggagagccctgcaccatcgtcatctcagggtgactgtatgcatgcccaaggctgaatccttgagaagcaacatcatggacaaaacttacatgctaaaaactagaagatg

SEQ ID NO: 16318 - DNA, 397 bp, Homo sapiens
ctcttgatattttaggattgaggaataagtcattaatctaaggactgattacagtggctggagcttgggcacttgtcttatcactggtcactgagtctgaaagtcccagctgaattcttgcccttaagtgcttttgctgctatttttttgcccccagttccacaagatccaaccaagaattctgtatcctgggacagtcagattcttctaaatcaggccaggaaggaggggaaaagagtgagagaatggtattcccagatacttcttcctcctgccccttttcccagcagctctgagaccagatgttggctgctgtacttactccctgaggtagggaatgtgtggtgatcgagtggtctgtgttcctattgctggtggggtgatagggtgggctaaa

SEQ ID NO: 16319 - DNA, 399 bp, Homo sapiens
  misc_feature (1)...(399): n = a,t,c or g
ttgccccacagctatgacatgattacgaatttaatacgactcactatagggaatttggccctcgaggccaagaattcggcacgagaagagttagagacatgtcagcagtttgattgtattttttctataataatgtaactaataatttatggaaaagtccaaaaaacatttatttagtcagcccaaaaataataacatcaccatctgtgcctagtcctttggctggtcctggcttatagaaaacacttgataaatatttgttgaacaaaagaacatttgaacccttatgtgtcttgcatcctatcattaaacattcaagaatcataggcttttcttttcttgcctgaaagaggaggcttgttttccatattacattttttcattttngtnaatntctta

SEQ ID NO: 16320 - DNA, 916 bp, Homo sapiens
gcgatgacatagaagtgctgaagcggatgggcatggcttgcgggctggagtcggggagctgctctgccgaagaccttaaaatggccagaagtctggtccccaaggctctggagccatacgtgacagaaatggctcagggaactgttggaggcgtgttcatcacgacggcaggttccacgtctaacggcacaaggttctctgccagtgacctgaccaacggtgcagatgggatgctggccacaagctccaatgggtctcagtacagcggctccagggtggagactccggtgtcctacgtcggggaggacgacgaggaggacgatgacttcaacgagaatgacgaggacgactgacgtcctccccacttcagattcggcttcaggaaaacgtttagcgaaaagaaactttttttttaatgtgggttttctgtttccttttggcctactcccaagaagatattggtaagctattgaatttagatatgcacctctgataagcaaggattgtttcccgtaggattaggacgtgctgtggatgtgtgttttgataccagtgtgctgatgcagagcgtttatttacttgttaggattttgtgttttcatttgctatttttctttaagtgcagagttcatttttgcccctgaaaagtttttgctgagtttgctgaagaaattgtatttcaaccacatccatgaaaataaaacacctcctgttgtggatggtgagcccctgatgccgcttatttgccgtgagtttggacggcacccctgctggcggatagcaagactctgtggagtttgttcagtggtacggtgtccaagcaaacagcagaatgcaactttctaaacagccccaagcaaacagcagaattcaactttttaaacaataaacaccatcaaccttattgactttattg

SEQ ID NO: 16321 - DNA, 472 bp, Homo sapiens
  misc_feature (1)...(472): n = a,t,c or g
tttgnannttggaaaaccgttatgacatgattacgaatttaatacgactcactatagggaatttggccctcgaggccaagaattcggcacgaggacaaggtgttgctctgtcacccaggctggagtgcagtggcaagaacatggctcactgcagccttgacctcctgggctcaagcaattctctggcctcagtctcctgagtagctgagactacaggtatatactattatgcccagctaattttttgtagagctgaggtctcactttgttgcccaggctggtctcaaactcctggactcaagtgatcctcccgtcttgggcttccaaagttgctggggttacaggcgtgagccactgcgcccagccagtactttatatttattgtgcctgcatttatatgggaacttcctgtcatatttcctttttaaaaatttctaaattcctaaaaccttaattaagcggccgcaagctt

SEQ ID NO: 16322 - DNA, 388 bp, Homo sapiens
cgcaggaggcgcaggtgctgaagcagctggcggagcggcgcgagcacgagcgcgaggtgctgcacaaggcgctggaggagaataacaacttcagccgccaggcggaggagaagctcaactacaagatggagctcagcaaggagatccgcgaggcacacctggccgcactgcgcgagcggctgcgcgagaaggagctgcacgcggccgaggtgcgcaggaacaaggagcagcgagaagagatgtcgggctaagggcccgggacgggcggcgcccatcctgcgacggaacacgttcgggttttggttttgtttcgttcacctctgtctagatgcaacttttgttcctcctcccccacccccgcccccagcttcatgcttctcttccgcag

SEQ ID NO: 16323 - DNA, 386 bp, Homo sapiens
catgaatgtaaaaggtgtcatgaaggcacctcaataggtcagtcaacaagtagatgatacatgtcaggcaagaagtatttcacatgggacagccactgggccaccatcatgcattgtcattgtcactccactgagttctattttttggattttgtgtttaaagtataaagtcattttccagaacagcgtctatttaaagtaggccactggaagttgtaaccccagacttgcttttgcttctgagagagtgctagaggacactagccattctctggacatctgtcccattttaaagaattctgttctggctactggcctagttgtttaaaaaacctacattctaaccagggcttatgcaagaccaggttgctgcatctgatttggtg

SEQ ID NO: 16324 - DNA, 357 bp, Homo sapiens
tcagccatgacttaagaggctaaatttcagacatatattaatatatagtatcttaggagtttgctttgtgtacccagttctatctgaattctttcttctctagattgctaatatatttttttccaaatttgctgcactgaagcttagactaaatagaatattgttgctttctacagatgtcttctaagttacatttcatttactagtattaatttaataaatatttaaggtgtatcctgctaggtgctggcaatttgaggatgaagaagtcatggactgcctttagtgagctctctcataggagagactgatatatgagctagtaattgtaatgaagtgtgaaaagtgctgtaacta

SEQ ID NO: 16325 - DNA, 355 bp, Homo sapiens
gggcatgcgtctgtaatccccgctactcaggaggctgaggcaggagaattgcttgaacctgggaggtagaggttgcagtgagccaagattgcaccactgcactccagcctgggagacagagtgagactttgtcacaaaaacaaaacaaaacagaaaaacacatgtatacttacaggtgtgagccatgtgcttggttcagagataagactgttttcttacacacaggcttatctctgaaaaagcaaacacagtcataaaatggaatatgaaaaccgaaaaaattaaactttccaaaatagtcaatttgctgccacaggaaagcttaaaatgtcaaacacattcttatagaatacag

SEQ ID NO: 16326 - DNA, 418 bp, Homo sapiens
ctgtgagtcagacatccccacagtctgcttcttcaccaaggatggaaagtacagcaggaattacaactactacctcaccgagaactcctccaccactgactgttcaggatcccttatgtcctgcagtttgtcccttagaagaattatctccagatagtattgatgcacatacgtttgattttgaaactattccccatccaaacatagaacagactattcaccaagtttctttagacttggattcattagcagaaagtcctgaatcagattttatgtctgctgtgaatgagtttgtaatagaagaaaatttgtcgtctcctaatcctataagtgatccacaaagcccagaaatgatggtggaatcactttattcatcagttatcaatgcgatagacagtagacgaatgcaggatacaaa

SEQ ID NO: 16327 - DNA, 408 bp, Homo sapiens
gaattgaggccccaagaggtaaagttgatttctaaaggtcatacaattactaagtggtgagccaggatttgaacctgtatattctggctccagagcctatgagcttacctttatgctatactgcctcatagtttattatcactctgtctaccatggtagccactagccacatgtggctatttagatttaagttgattaaaatagatgggcatggtggctcacgcctataatcccacctctttgggaggctgaggcgggcggatggcttgaggtcaggagttcgagaccagcctgggcaacataatgaagccccatctctacaaaaaagaaaagaaaagaaaaattcgctgggtgtagtcacaagtgcctgtgatctcagctactcgggaggctgagatgggagaatca

SEQ ID NO: 16328 - DNA, 452 bp, Homo sapiens
  misc_feature (1)...(452): n = a,t,c or g
gnnnnnnnnnnnntnnnnnnnnnnnttggannaccagntntgacatgattacgaatttaatacgactcactatagggaatttggccctcgaggccaagaattcggcacgagcaatcttctggtgctgcctctccaggtctcttccaggccggtcatagacgtactccctctgaggccgaccgatggttagaagaggtgtctaagagcgtccgggctcagcagccccaggcctcagctgctcctctgcagccagttctccagcctcctccacccactgccatctcccagccagcatcacctttccaagggaatgcattcctcacctctcagcctgtgccagtgggtgtggtcccagccctgcaaccagcctttgtcctgccagtcctatcctgtggccaatggaatgccctatccagcccctaatgggcctgnngngggcatnacttcctcca

SEQ ID NO: 16329 - DNA, 545 bp, Homo sapiens
  misc_feature (1)...(545): n = a,t,c or g
gngtatntnaacctntgaaacctttgactgatnacgaatttaatacgactcactatagggaatttggccctcgaggccaagaattcggcacgaggtggtggcaccacaatctcctaccttccaagggaccgagtggggtcaatcttctggtgctgcctctccaggtctcttccaggccggtcatagacgtactccctctgaggccgaccgatggttagaagaggtgtctaagagcgtccgggctcagcagccccaggcctcagctgctcctctgcagccagttctccagcctcctccacccactgccatctcccagccagcatcacctttccaagggaatgcattcctcacctctcagcctgtgccagtgggtgtggtcccagccctgcaaccagcctttgtccctgcccagtcctatcctgnggccaatggaatgccctatccagcccctaatgtgcctgtggtgggcatcactccctcccagatggtggccaacgtatttggcactgcangccaccctcagctgccatcccatcagtcaccca

SEQ ID NO: 16330 - DNA, 399 bp, Homo sapiens
gagttcttcctctaacctgagtaagattctgcagaacccggccaaagcccactctctaggttggcccctaaagccctcttggcttgagtagggttcggggatctccgttcccagctcccaacactggacactgccacctgtgcctgcctccctcggagccctgggaccagaccctgggagtggtcaacttccccagaaaggccagccgcaagccccccagggaggagagctctgccacctgtgttctggaacagcctggggcccttggggcccaaattctgctggtgcagaggcccaactcaggtctgctggcaggactgtgggagttcccgtccgtgacctgggagccctcagagcagcttcagcgcaaggccctgctgcaggaactacagcgttggg

SEQ ID NO: 16331 - DNA, 484 bp, Homo sapiens
gtgctctagacccaaggagtgacatcttataaagacagatattataagataccatgtctgttattgttatgttggtaaggacgtggagagatttgaaccgtcatacattgctggtgttaaatggtgcaggcacttggaaaacagtttggcatttcttcagaaagttaaatatagagttatttgacctagttctatgacccagcagttccactcctagttatatatccaaaagaattgaaaatatgttcacataaaaatgtgtacttgtgtgttcttagtagtattatggataatagccaaaaagtagaaataatcgggccaggcgcagtggctcacgcctgtaatcccagcactttgggaggccgaggcaagtggatcatgaggtcaggagatcgagaccatcctggctaacacggtgaaaacccgtctctactaaaaaaatacaaaaaatttagctgggcgcggtgacgggtgcctgtatcca

SEQ ID NO: 16332 - DNA, 344 bp, Homo sapiens
atatttccttgtcaaaactaccaggaccattcactaaatgtaaacgagcatttcccaaggaaggaagtgaaagatttttttttcacgtgaaactcactggaagctgatgttatatttgctatttatacaaagtgctgcgaacatggtcggaaacaaaaagaatcagagtcattcacctgcgtaaggaaaagcacaagactgaaatagaaataagagcagacaacaatgaagcactggcacatggagaacgaaactaacatgccgttttcttactatcttggtaagagaccccagctaagtagcaacattctccatcacctcagaatacaagggcgaacactaca

SEQ ID NO: 16333 - DNA, 326 bp, Homo sapiens
gcaaatttgtaaaaaaattatcctaccaccccttttggtccacttaagatatgccacgctgaagcaaggtatttcctactggattttgctttcactggtgtttagaaaataaacttgatttctctaggagcactcctttggttagagggatgcaagaaggagaggtgaaggtggccgttggtgggctcatgcctgtaatcccagcactttggggaggccgaggcaggcggatcacttgaggccagcagtttgagaccagcctggccaacatgatgaaaccccatctctactaaaaatacaaaaaattagctgggcatggtggcagg

SEQ ID NO: 16334 - DNA, 331 bp, Homo sapiens
ggaaagcacttgtgtatggattcaactgaaaagtacgatgtgtaaggcacaaatgtctcatttttggtgattgctcatagaacaagtttactctactgtatctttaccttgctgtggtctcccttggaaataacagaagcgccactgaaacctcacccctttggtggggggccaaaaagggaggacatagtctccccactgggggagtggacgtgagatgatacaggggcaagaccattgtgggagcatgaaataaggggtgaggataagccctgggcttctggacacagagtttcaaagtcagagctgaacagaggagactgggaagtgc

SEQ ID NO: 16335 - DNA, 428 bp, Homo sapiens
  misc_feature (1)...(428): n = a,t,c or g
ttgnaccccccntctatgacntgattacgaatttaatacgactcactatagggaatttggccctcgaggccaagaattcggcacgaggttcgacttaggatttttgactttacactgggtttattgggaggtaaccccattgcaagtcaaggaacattttatctccttaaaagtaaaatcattaatttagtgttgtctgcttttaaatttttacatattcagaggtcctatatatttgtgcttaggattcagttgtctatactggaaaacagcattttccaaaaaagttttcagtttactgaaaacagtgggacttccttgaaccttcagtgctgcgggtaggaaagaagactctgggactgtgcatgcatgtggatttgaacaacgtgccacacagagggagtttcccattgtgatgtttatcttct

SEQ ID NO: 16336 - DNA, 1058 bp, Homo sapiens
gctcttgttcactacaaagtaagttctgtgaagatgaaggtttttgtgtattaagtgctgtgtcactagcccctaataccatgtctgatatattagcatatgataggtgcttaatacttgttggatattgaatgcctgccttttctaagaagattatgtgtcagtaatgtgtgagtttatatccagcgttacatctgttgtgccagcaaaatggaattatcttgtatttctaatttttttttcctttttgtgaactttaaaaaatttcaggcctcccgaggagcccagacagctgcagccacagctccccgtatcaagaaatttgccatctatcgatgggacccagacaaggctggagacaaacctcatatgcagacttatgaagttgaccttaataaatgtggccccatggtattggatgctttaatcaagattaagaatgaagttgactctactttgaccttccgaagatcatgcagagaaggcatctgtggctcttgtgcaatgaacatcaatggaggcaacactctagcttgcacccgaaggattgacaccaacctcaataaggtctcaaaaatctaccctcttccacacatgtatgtgataaaggatcttgttcccgatttgagcaacttctatgcacagtacaaatccattgagccttatttgaagaagaaggatgaatctcaggaaggcaagcagcagtatctgcagtccatagaagagcgtgagaaactggacgggctctacgagtgcattctctgtgcctgctgtagcaccagctgccccagctactggtggaacggagacaaatatctggggcctgcagttcttatgcaggcctatcgctggatgattgactccagagatgacttcacagaggagcgcctggccaagctgcaggacccattctctctataccgctgccacaccatcatgaactgcacaaggacctgtcctaagggtctgaatccagggaaagctattgcagagatcaagaaaatgatggcaacctataaggagaagaaagcttcagtttaactgtttccatgctaaac

SEQ ID NO: 16337 - DNA, 481 bp, Homo sapiens
  misc_feature (1)...(481): n = a,t,c or g
ggtggnntntgccnntgnaacntgatgaccttcncgaattcaatacgactcactatagggaatttggccctcgaggccaagaattcggcacgaggagagctagcaccatgagctccctgctaactgctgctgttttgtgatcttgtgttctcttaaccattattctaaatacatatatccataaatttgccagacttaaaagtgactaatctgctaaaattaagacgtaactttttcaaattttcactgatatagaaacagaagtgccatctcatgttttcaagagcaaatcttttgagtttggtcaggtaggaagccatttcctctaagaggcctttattctgttatgcaagtgcttattacagcagacataaagggagaatggagttctccttccttctaacatcagctgattcctaggagaagcagggtttgatgcaaactgaaaatacgacaagctgaattttcaaataaatgactt

SEQ ID NO: 16338 - DNA, 358 bp, Homo sapiens
gggaatggcagaggctgcagtcaaacccccacctgaaagaggggtccgtgacctccgtgaacctgactaagctagagggtggcgtggcctataacgtgatacctgccaccatgagcgccagctttgacttccgtgtggcaccggatgtggacttcaaggcttttgaggagcagctgcagagctggtgccaggcagctggcgagggggtcaccctagagtttgctcagaagtggatgcacccccaagtgacacctactgatgactcaaacccttggtgggcagcttttaaccgggtctgcaaggatatgaacctcactctggagcctgagatcatgcctgctgccactgacaaccgcta

SEQ ID NO: 16339 - DNA, 329 bp, Homo sapiens
caaaaattcagtagagacatggaagatataaagattgaaattcaatatctagagatgaacatcataatgtgtgtagtgaaaatacacaagagagaaatagtgacaggttagacattaaagaagaaaagattagtgaacttgacataggaatagaaactatcccaaatcaaagagtgaggaaaatactttaatgaacagagcatcagtaagctgagatgtcctcaagtttcctaatatatgggtaatagcaattcttgaagaaaaaagtgagggaggtatagaaaaaattttgaagagatagtggccaaaaaatcccccaaatttaatga

SEQ ID NO: 16340 - DNA, 387 bp, Homo sapiens
gcacaagttctgcctcaagtgcgagcgctgcagcaagacgctgacgcccgggggccacgccgagcatgacgggaagccgttctgccacaagccgtgctacgccaccctgttcggacccaaaggcgtgaacatcgggggcgcgggctcctacatctacgagaagcccctggcggaggggccgcaggtcaccggccccatcgaggtccccgcggcccgagcagaggagcggaaggcgagcggccccccgaaggggcccagcagagcctccagtgtcaccactttcacgggggagcccaacacgtgcccgcgctgcagcaagaaggtacttcgctgagaaggtgacgtctctgggcaaggattggcaccggccctgctgcgctgcgagcg

SEQ ID NO: 16341 - DNA, 358 bp, Homo sapiens
gatttgtttacttttctgtatgttttacttcaataaaacattaaaaattttttttagttgttgcccaccaaaatgatttcatcatttattaatggtcctgaatttcagtttaaaacactgtcctagacagacaaatgcccaatgtgattcatagtctaatgtttggagagcaaatgtaacaggcctgagacgggagttagttgacggaaaaaagagacaggctagagctgtaaagggtggaacttccggaaatagctgatttgctggaaggggaactccatgggagctgctctggagtccctttgaaaactcccagacaaatctaccaataaagagtctacagtttaactaattcatt

SEQ ID NO: 16342 - DNA, 428 bp, Homo sapiens
  misc_feature (1)...(428): n = a,t,c or g
ttggattaccagctatgacatgattacgaatttaatacgactcactatagggaatttggccctcgaggccaagaattcggcacgagccaatctatggcttcccttccgttttcgcgtggttcttttgcaagctctggattctctggagtttgaatgtttccagtattggaaccccaccaagtaggactgatcaggtcttacaattctaaaaccatgacctgtgtaagttgattaattctgtttccttgcaatatcatgatcataggttatgtggatgttttcattaacctaaggcttcctatttaagaaggcctccttcagttatctgtccccactttcttctaatattgtgaatagtgatagcaaataactcagttttctccctatgagtattttctgtccacttttatatttattgncaaatgtat

SEQ ID NO: 16343 - DNA, 334 bp, Homo sapiens
gtggcatcggaaatggaaccactaagaatgatgtaaattggagtcaaccaggtgaaaagaagttaactgggggatctaactggcaaccaaaggttgcaccaacaaccgcttggaatgcggcaacaatgcctccacaaatgggaagtgttcctgtaatgacgcaaccaaccttaatatacagccagcctgtcatgagacctccaaacccctttggccctgtatcaggagcacagatacagtttatgtaacttgatggaagaaaatggaattactccaaaaagacaagtgctcaagcagcaaaatccttacttccagcaaaatccaaactgctgct

SEQ ID NO: 16344 - DNA, 386 bp, Homo sapiens
  misc_feature (1)...(386): n = a,t,c or g
ggaaagaagctctcaactgctttacccatagtctgctggttcttaattaccacaagctaagagagtgatgtgttgctgggttagaaaataataagcccccagcttggggcttgtccttacctgatttctgtgccaggacagggttgagggttttcacagcattgctggcacacactggcagttgctgtacaaaatttgggagctgtcggccaagggctgctgttggatgtaaagtgctgctaacatctgtgatcagtgagagttctgtacaggtggcttgaaagtggtttccctttcccagtttgaattttgatgatgtcctgccagggagacagatgattatgggatttttctggtggggtcaganggaattcacagggaagctg

SEQ ID NO: 16345 - DNA, 332 bp, Homo sapiens
gaaaacatttagcaaagtacataatgttggttctcaagtagagtataattgtctttttgtttctttttttagcatgtggaatcatctatgtgtgcaggtacttgttttctgcattgtgtttttgctatactttctactttgtccatatcagagttttccttttaagcatgaggcttgctgatactgcaaaaaaaacttagaagtcttccagagattcaaggtaatttgaagtacagttttgctgatcagcttgagaaaatgccagctggaggtattctgtaagaggacacttgtattactaagagctgtagtactgcttagagtttataggg

SEQ ID NO: 16346 - DNA, 566 bp, Homo sapiens
  misc_feature (1)...(566): n = a,t,c or g
cgcccagtctacgcttgcgcggcgcaacagggccgactgcagctggaagatggcggcgtccgtggtctgtcgggccgctaccgccggggcacaagtgctattgcgcgcccgccgctcgccggccctgctgcggacgccagccttgcggagtacggcaaccttcgctcaggcgctccagttcgtgccggagacgcaggttagcctgctggacaacggcctgcgtgtggcctccgagcagtcctctcagcccacttgcacggtgggagtgtggattgatgttggcagccgttttgagactgagaagaataatggggcaggctactttttggagcatctggctttcaagggaacaaagaatcggcctggcagtgccctggagaaggaggtggagagcatgggggcccatcttaatgcctacagcacccgggagcacacagcttactacatcaaggcgctgtccaaggatctgccgaaagctgtggagctcctgggtgacattgtgcaaaactgtatctggaagactcacagattgaaaagaacttattnatcctgcggaaatcaggaaa

SEQ ID NO: 16347 - DNA, 317 bp, Homo sapiens
  misc_feature (1)...(317): n = a,t,c or g
gggacccagggctgagaagtagcatattaagtgaggttttaaattcatgcagcaacctgttgtagagcagtactatccaatgtactctagtttgttacaagagaagcctgtgttagaatgcaaatggacaacttttctttttttttttttnggggcaatttngnttnngggggnnnaacngtngnntnaaanggttggttggggnanncantttnntgttngggnntntncccnttnttttntcnnaancaantacntngggttntcccantntaaanagtttttnaggnaangtgggtggggttnaanattnccgg

SEQ ID NO: 16348 - DNA, 366 bp, Homo sapiens
ggtaaaaggagttatctataccaaagtataattcatttgtgaagttagttttttaaatgatgttcgttgtcttctttaaggcagcgtttttttatttcatttttctctattggcagaatagatgggtgacctttgaatgggaaaagtgtacttttaacttatttcttctcatatccatgttctgctgtgtgaatagtaaaattttaggcacagtgctgaaagcttttacgtttttttatcctagcttaattcttcgggtagtctctaataaggagacctggtttaatttacttatccaaggttgagggtgttaagggactacaccggagtcctctatgaacacctgtacttacctttctcaaagag

SEQ ID NO: 16349 - DNA, 323 bp, Homo sapiens
aaaagttacaagaacgtacagagaattcccgcatctcccgtgtctgcattatctacgcccgttcttctacacttcctgtccctgttcatctgtctataatgtaggacatgtgacctgattcggcacatccccagacagtccagtgtacaccatccaaaagtaaggacactttcccacgtatccatcccacgtgcctgccaatctggaaatcaacactgatgcaacacaaccatccaatccacagactccattaggattttgctaactgtccctcctctgacaatttctccctctctctgtgcctccttccttcacatctcccc

SEQ ID NO: 16350 - DNA, 336 bp, Homo sapiens
tttgtggggcaattatgctcatattgttttatttattacatgtggggtaatgttagacaaatagctataatacagagattgtacaatttaaaaactgtaataaatatggtccattaatagcagactccaaaattcttgtccttcttgaaaaaaaggttcagtgatttacgataatccactaagaaacatcttcagaatttcacagggagcagtgtctggaggcacaggtttcccgcagtgctttgaatattcagttatcaagactgaagcttcatctaaactacaaaatcaaaaagaaaaagaagtgttaggccaagcacagtgccttgtgcctac

SEQ ID NO: 16351 - DNA, 547 bp, Homo sapiens
  misc_feature (1)...(547): n = a,t,c or g
tttgaaatccctatgacatgattacgaatttaatacgactcactatagggaatttggccctcgaggccaagaattcggcacgagcacctactgaccacctccaggcctcatttggatttcagacctttcaacccagtggcatattattagatcatcagacatggacaaggaacctgcaggtcactctggaagatggttacattgaattgagcaccagcgatagcggcggcccaatttttaaatctccacagacgtatatggatggtttactgcattatgtatctgtaataagcgacaactctggactacggcttctcatcgatgaccagcttctgagaaatagcaaaaggctaaaacacatttcaagttcccggcagtctctgcgtctgggcgggagcaattttgagggttgtattagcaatgtttttgtccagaggttatcactgagtcctgaagtcctagatttgaccagtaactctctnaagagagatgtgtccctggnaggctgcatgtttaaacaaccaccttttctaatggtgcttaaagg

SEQ ID NO: 16352 - DNA, 358 bp, Homo sapiens
gggatcctaggtctcctaactataccgcccacactaggcttcttgaattatatttttatgagataggaccttctataaatcataggatggatgcgtgtaatctcttggaatgtcatgatcagattcgtgcttttgaaaactcaccagctttgagtaataggatggatttgatggggaaaaggctgttaggaagcggggaggttggataggaagttgctgcagaccaagtaagagaagtccttggggaaaaggtcagcttttgctgaccatagaataagaattttgcaagacatataggaaaagaggctgacagagtgggagaagtgaaatgagcctaggaagagagttttgaagtggg

SEQ ID NO: 16353 - DNA, 355 bp, Homo sapiens
  misc_feature (1)...(355): n = a,t,c or g
tatttaatgtccatattccaattctgtcagttgatctaataatgtactttctcttccaatactggatgcagttgggggcagaaggttaacttcgttttcatgtctcttgggcctcatgtaatctggaaagttagcacagcctttcttttataatattaacatttttgaagaatacaatctttcaacattaaaaaaagtaaaacattcctcattttgattagacttacatcatgtatttttggctggaatgctgcagagatgtcgtgcctttagagtatccacctagagagataatataagcctatctgtccctcattggngatgttgattttgattatctggcaaggcattgccg

SEQ ID NO: 16354 - DNA, 818 bp, Homo sapiens
ttggagggctgatgtatataactatctattcgatgatgaagataccccaccaaacccaaaaaaagagatctctcgaggatccgaattcgcggccgcgaagacctttagctctgcatcctggacctccatctcagacttgtataggtcaggctcgaagggaccactggttatccgcatggggccattgggcatgagcagaactgtaaatttaaactgggcaacaaattcaccctccttctcatagagaacattaaatggttgcagcagttcatgtttggcgcactccaccacacccatccgagccttcttctcatcttcaaatgctcttaaagtaaacggcatggcatcaaaacgcctttccacctcactgaagaaggcacgtgaagttttcattttcagtccatactgtttagaggggtctcgtttgtaaatagtggttctctgtcctgcatccttggccttgccctctcctgagctgacgagaacatccacagcatatacttcatgtacctcaaattcagctttttcatggtccttcttctgctggtctgtgggattctggataatggttttttctccatcgatgacatgctgcttcaactggtgtgacagcataccttctattggcgtgcagttaaatgagtgggcaactttgttccaggcttctgtcacttgtgtgttctgatttccaggtttgaccaggcgtagggcagcttcagcacaaaggtgagctgccttaataacatctgctttcctccctgttacttgggtcccctgagctacatcaaccacaaaagtgtgagctctcgtgccgaatt

SEQ ID NO: 16355 - DNA, 451 bp, Homo sapiens
  misc_feature (1)...(451): n = a,t,c or g
gattcacacactccaacaaggtgtactgtggggacagctgtgcattgtctatgctggacagcaagtccccgccccaggtgaccagaccccgtttgaactgtcactcgaccgtctgaaaaccttcctacccacctggggctcacagtgcccatactctgtagtccccatactctgagcccaattctgtatttttctcaaagaggccccaactatagaagcttcaggctcacacaactggttcccttggccccatgtccttcctctggcccccccaggcagtcaccccttggctgtgccaacaccgtnctctgtagagatgtcctttgcgcaggctcctgagtccttgnggaggtntgctctccttctgccatggtttcaccntctccccctacaggtcaacagcanncagccccctcttcagtggcccgcaccaggtactcagaccacccaa

SEQ ID NO: 16356 - DNA, 331 bp, Homo sapiens
  misc_feature (1)...(331): n = a,t,c or g
ggggggagggggagggggagggggagtcatttgataaattttaatactgattcagattaaacaaaacaaactcatggcaaacagtatataattattaggtgacactgtaagtatatgaaaggattaaaaaaaaactctacaccagtgattataatatggattttcattttcaagtgaaaaattaagagaagcaagatggcctgcttacctacctattaaaagttagtttttatagttccaccaatttttaccaatggaccctatttatgaatatggatttaggaaatttaagtgagatgtatttaatggctactgctaggtaancaatagt

SEQ ID NO: 16357 - DNA, 527 bp, Homo sapiens
  misc_feature (1)...(527): n = a,t,c or g
ccttttgacatgattacgaatttaatacgactcctatagggaatttggccctcgaggccaagaattcggcacgagaagcaaacaccatactttgctttcctcatgcaatctatcacagagctcttcaggtgagttcacaaatatgtttgtcattccagtgtgggggaacttgatctgagtctgctaagaggcatgatattgaatgactcctgtgaccttctgataatacctaagaatatagaaaaccttctatctcaaaaactttgaactcaaggcatatcagagagatatttgcttctttcttctagatgtttgtgttcttattaggagaaacaatgagaaatgatttttcacaatgtctcctgagccctgaggctcagccagcccttactgctatgtctcaacatttaaaggccattgaagtcccactccattccatatactttggacaacgtttctcatttatgcctggggacagctctgtaacaattgnataatcagttccatttcacagatgactaagctca

SEQ ID NO: 16358 - DNA, 455 bp, Homo sapiens
  misc_feature (1)...(455): n = a,t,c or g
ggagtnnnttgaaatnngaatcngaatccntgattacgaatttaatacgactcactatagggaatttggccctcgaggccaagaattcggcacgagagcgcaagcataagaaggacatcagtgagaacaagagagctgtaagacgcctccgtactgcttgtgaacgtgctaagcgtaccctctcttccagcacccaggccagtattgagatcgattctctctatgaaggaatcgacttctatacctccattacccgtgcccgatttgaagaactgaatgctgacctgttccgtggcaccctggacccagtagagaaagcccttcgagatgccaaactagacaagtcacagattcatgatattgtcctggttggtggttctactcgtatccccaagattcagaagcttctccaagacttcttcaatggaaaagaactgaataagagcatcaaccct

SEQ ID NO: 16359 - DNA, 425 bp, Homo sapiens
ggcagtgtatgaaagggtggtccccagaatattgatagtgtttgacgtggaatttgggctaggaaaaataattaccaatgaggagatacaagatagcagcagttagggagaggccgtccatgcagctgcctatttaaatcactgtccatgttaacagataagaactggaaatgtcaaagaacaattgcccagctcagttaccatctgctactaaagatagccccagctgggtgcgatggctcacacctgtaatcccaacactttgggaggctgaggcaggtggatcacctgaggtcaggaattcaagaccagcctggccaacatggtgaaaccccatctctactaaaaatacaaaaaattagctaggtgtggtggtgcatgcctgtaatcccagccactagggaggctaaggcaggagaattgct

SEQ ID NO: 16360 - DNA, 336 bp, Homo sapiens
gctactgtccctaattgaatagggaagccaaataagtagtaacttccttcccttatatcagagatgtaacccttacttttgatgcatcaacatattttagtattacccctgatgaaagtagctgagattgtgttttcatttgtgtgtactgcagtgtgtgttacaggattgtacttagtatttatcttttcagagcagtgccagatgtgcatatttgcagacagaaagcttcatctcttttgaatttgcccttgaaaggacatctgcctagaatcggttttctgctttaaaaatttacatagttgtgccatcaatagcagctgctacttctctaac

SEQ ID NO: 16361 - DNA, 376 bp, Homo sapiens
gggttgcttaatgatctcttccctattaaaaaaatcaattatttgtttcttaaattttctctatgtggtcattaattctctgtcttgatttatgagacttctctgagttaattatattttgaagacttgtgggctaaaattttgtattagagtaaatgtaaacctttcagtttcctaaaataattcttatgaacttcatttttaaaatgcatttaaatatattttatatcatttaataagatactttagccttatacatttacagcaattgcctctttggggctgacactttcagaggctgcctagagagacagaaccacgactttggcttcagcttccaggtggccccacactgccatctggtggcattcaaatg

SEQ ID NO: 16362 - DNA, 425 bp, Homo sapiens
  misc_feature (1)...(425): n = a,t,c or g
gcaacctttgtgttttcggacctaagtgctgccgaaggccgccatttgccagacagcctgttaatctggcagtcgacccctctccagcaaaaactaggaatccagaagtgccgcctgggtccgatcctagccagcatcctgggaatctgtcaccaactgtggtcctgtggcaaatgtcaggaaaccaaataaaattcagggaatgccctttgggggcatcaacgcacagccctttctctggacatcacttttactcacagcccacagggagcttctatagagggtggccatgagtgaccctaagacacttaccacaggtggatggnctaaagcnanctaaatnatnaaagaaganggaaaaaggctgagcngaaaagngaaaagagccagncccgaannttgnagcanttntcaatgggcacaaa

SEQ ID NO: 16363 - DNA, 500 bp, Homo sapiens
gctatgacatgattacgaatttaatacgactcactatagggaatttggccctcgaggccaagaattcggcacgagacctggttttatactttgaaacataacttgaactagcttgagctgtcaatgaaaaaagaaacataattaggtaatctaattttttaatggattaagggagggaaaatttttcttagggataggcaacgaatatgagggactattgttttgtcgagttatactttcattgttgccaaggccctctgagataatggcatgatattttcccacataaacctgaaatttctagcacttgatggatttctattttgtctcagatactagatggtggtgggcaaaggatggagaactcttgaaattcaaacccactgcctcgccactatcttaaaaactatttttttcctgagtctaaccaaggctctggtctttaaaacagagtttgcaagtgtaaggcatgtaacaatattcaaaacgcggagacacgc

SEQ ID NO: 16364 - DNA, 339 bp, Homo sapiens
  misc_feature (1)...(339): n = a,t,c or g
cgcggccgcgtcgacaacgacttcttcctcgacatcttcctcctctactgattgccttggttaccagtagaggaggaagatgtcgaggaagaagtcgttgaggaagacagggatgtcatggagtggtgactgtggccaacctccatagaatcttgggtagaggagctattcgttggagaattgtagacccttggcctggtccggttacccaaggcttgttgtccatggtggtggtgatggtggtggtggtggtgattagntcttncctgnnnttcancncttgttngncntgnnntnnctngcttntnnnatagngnntnntntngtntnngcnnttat

SEQ ID NO: 16365 - DNA, 373 bp, Homo sapiens
ggtgaaatgttggaaccatttctctcttggtctctgtttaatgttgaaagggtgagctaataggaggcactttcaacttcactccctcacgctaccccgtccccctccagactggcagtttcaaggatgcaaattgcattgcaaaatcaaactgactcatgaagcatttgggccagtgcactgtttacttccatctgtttgcagacacatttgtgcccggcgtttgggagccctttgtatcaatgttctgacaagggtccctataaccttaacctactcgaaaccggtttgggatggatatgatggggcttctgtgctattgctgggattgggagaaataaaacatgcaatttaagtggaaaaaaaaaaaaaa

SEQ ID NO: 16366 - DNA, 143 bp, Homo sapiens
gacggatcagagagcccagagccaagctgcccgctcacaccagaccctgctcagggtggcattgtctccccatggaaaaccagagaggagcactcagcctggtgtggtcactcttctcttatccactaaacggttgtcactgg

SEQ ID NO: 16367 - DNA, 444 bp, Homo sapiens
  misc_feature (1)...(444): n = a,t,c or g
gcggcacgaggaacatcctagcatcaatcaaagaattcagaattcatctggcacagattatcctgatattcatgcagcagctaaagaaatagccgaagtcaatgaaattaatttggaaaaagtctgggacatgttgttggaaaaatggctatgcccttcaacaaaacctggtgaaaaaccatcagaattatttgaacttcaagaagatgaagccctacgaagagtgcagtatctcctcctgtctcgtccaattgattatagttcaagaatgctgtttgtatttgcaacatcaactacaaccacattaggtatgcatcagttaacttttgcccatagaactcgagctcttcagtgtctcttctatttggctgacaaggaaactatagaatctctctttaaaaaacccattgaagaagtgaaatcttatttgagangnataacttt

SEQ ID NO: 16368 - DNA, 185 bp, Homo sapiens
gcggcacgaggaagagaatgctcaccaccagctctctgtttccctttctgctttggtaatcaacacgtgtttgcctgcagtggccgggaccgggactgtttctgcccttgtgcctagttaagagccttcaaaagcataatgaacacttttgatatgatattgtaactttagtaaatgctttactt

SEQ ID NO: 16369 - DNA, 427 bp, Homo sapiens
gaactggaccagccccagtaaaagctctgaccgccgaaacagccttgagggctacagtcgctcagtgcgcagccggagtggtgagcgttggggggcagatggagaccgtggtttgcccaagccctgggaagagaggcggaaacggagaagcctttccagtgaccgtgggaggacaacccattcaccatatgaggaacggagtaggaccaagggcagtgggcagcagtcagagcggggctccgaccgcacccctgagcgcagccgcaaggagaaccactccagtgaagggaccaaggagtccagcagcaactccctcagcaacagcagacatggggctgaggaacggggccaccaccaccaccaccacgaggctgcagactcttcccacgggaagaaggcaagagacagcgaaccgcaatcaccggat

SEQ ID NO: 16370 - DNA, 383 bp, Homo sapiens
atgatgatgacattaaaatattcaaaattctcaccaattcttggtggagtcaatttcattttgattttataacaagaagaaaataatttcttgcactacattcatacctactttttaatatagttgtgtgagctattgataaaacaggtgaaaaaaaaaacaagaaatggaagattaacaaacttgacttaatggggttagagtactgctcccaacaactaaaaaatacaaattcttacacatgaatcatttttacaaatttaccatgaataggtttataaagaaaatcacaacacatttaaatgactaaaataatataatacctactcagacctaaagtaattatgctagatgtcaattaaaagttaagtagaaaaatttac

SEQ ID NO: 16371 - DNA, 437 bp, Homo sapiens
gtcctactctgtctcttccccactaaatctaattatccccctttccctcacccagattttctactccaatcacctattctgtttcccagatatcctctgtactttcctccctctcatagtcgacctgtcctttctacctggtgaaatcctactcacccttcaatatacgactcatatgaccacattctctggcagacttggtcattctcttatgttttccagagcatttcatggatcacatatatcacatgattcaagaaattacggccagttgcaatggctcacgcctagtaatcccagcactttgggaggccaaggcaggcagatcacctgaggtcaggagttgaagaccagcgtggccaacatggcgaaaccccgctcttctaaaaatacaaaatagctgggcatgggggcatgcgtcagtaatcccagctacg

SEQ ID NO: 16372 - DNA, 346 bp, Homo sapiens
  misc_feature (1)...(346): n = a,t,c or g
ggcagctaaacatcctacaatacacagagcaagtgccctaaaacaaggaattatcctgggcactgtgttagtgtcacgggttgaggaacccagccctagggtgttcaaagtctggagtcacagcacattagaaccaataacacacacacacacacacacacaagtcgggagccactgcacccagcagtcgtcgggattttgagtctagccctcctacttaatcaagacccccccgatggttgggaaaactgtggctgaaagtgggaaaatgaccagggcagcagcagccagtgttcttacccagacagcaagagtagactcttttgagcctgagcttaaggncaag

SEQ ID NO: 16373 - DNA, 329 bp, Homo sapiens
gagtgagtctacttctactctggcatctgagaacaagtgactctgctttagacaagcccctggagagcctggccatggagtgaggtagaaaagaagcactttttggtggtatatgctgtttctgaatttgaatctaagcattcttggtgttctgattctgcgcctgactgtggaatgtattttctgacattaggtgcagactctttttctcttgggttttatttcccatccctccctccctctccctgcatatctttctttatgacctcctggcactagatggggaaagaacagagcagcagcagcagaaaatgctgctgtttttggac

SEQ ID NO: 16374 - DNA, 341 bp, Homo sapiens
gcaatgtgaaaaaatttaatcataagtaaatacattttatctacatttatgacaagaaaaatctcaacagaccatagaaatagaaaaaaaagtcttggtgatgagtggatgttgatgcttacagtaagtcctcacttaatgttgccagtagattcttggaaactatgactttaaaggaaatgatgtataatgaaaccacttttaccgtaggctaatggacagaaacaagaattaagcccttatggcatatttctggttataaaaacatcaccagacttctagataaagaccaaaaaacttgtaatattaaacactgaaacaactgtgagctggacgtaaat

SEQ ID NO: 16375 - DNA, 428 bp, Homo sapiens
gcctgttccatatgtacgaccagccattttggagaaaggacaaggaagaattatattaaaagcatccaggcatgcttgtgttgaagttcaagatgaaattgcatttattcctaatgacgtatactttgaaaaagataaacagatgttccacatcattactggccccaatatgggaggtaaatcaacatatattcgacaaactggggtgatagtactcatggcccaaattgggtgttttgtgccatgtgagtcagcagaagtgtccattgtggactgcatcttatcccgagtaggggctggtgacagtcaattgaaaggagtctccacgttcatggctgaaatgttggaaactgcttctatcctcaggtctgcaaccaaagattcattaataatcatagatgaattgggaaagaggaacttctacctac

SEQ ID NO: 16376 - DNA, 353 bp, Homo sapiens
ggtgaattctttttttggttatctgttgctgtgtcacaaatcactccaaaacttagtggcttaaaaaataataagcatttattttgcatatgaatctgtaatttgactagggctcagcgggatggcttgtgtctgtttcaggaaaagtaggtggggtggttcaacgggatctagccagtccacttctaacatggccaactcattttgctgcaaagctgtgctggttgttggctgggagcctccttttttctccttgtgggtctctccagctttctccgagtgaggcagttatgttctaagagctgctgtgccaaaggaccaaagcagaagctgcaagtattcttctcacctag

SEQ ID NO: 16377 - DNA, 550 bp, Homo sapiens
gaaaactctagcctgggagacagcgaaactccatctaacaacaacaacaacaaaaacttgaaaggctgagagagtagaacattgcaaaggggcagtttcttgaacaagaaacagagagagagtttatgtgtgtattgccaggcacagtggcacacaccgtacccccagctactcgggaggctgaggctggaggatcgcttgagtccaggagttctgggctgtagtgcgctatgccgatcgggtgtccgcactaagttcggcatcaatatggtgacctcccgggagcgggggaccaccaggttgcctaaggaggggtgaaccggcccaggtcggaaacggagcactgggattacaggcatgagccactgcacctggccttatcctttttttttgaacagtgcaaatgtcaccttctctataaagccttcccttacatctcctcccaggtttgtttatagcatatctcactgtacatgttattttacttcttatgtgtctgtctcccttgctaatttcaaactcctcagaggaagactgtaatttattcatc

SEQ ID NO: 16378 - DNA, 295 bp, Homo sapiens
  misc_feature (1)...(295): n = a,t,c or g
gataatttcaaatgacctgttttcaagtttgctgatttacccttttgtctattcgagtctgctgttgaacccttctagtgaacttttcaattcagttattgtatttttaaactccagatttctgtttagctctttttttggaatttctatctccttgttgatactctcattttctttttttttttctngaaanggaccctcnatntgtcncccaggntgnagngcaggggngggatctnggntnantgcaagctccgcctccngggttnannccnttntccngcctaagcctccc

SEQ ID NO: 16379 - DNA, 388 bp, Homo sapiens
  misc_feature (1)...(388): n = a,t,c or g
ctgagtgccaactgtccaggccatttgacacaccatctgttaacctctgagtttgcccactcaaggccactcataggggcatccatccccaagcacctcctcatgctgtgcatgcagtcttaaattcaatggacaaaaataaaatgctggctacctctggatcatctggctgagcaactgaattacaaaagagaattacttccatctcaacttcaacccattgattacgtccatcctagcaagctaaatggcatcccagctgctcctttctgtgcaaccaattaaagaacaatgagtgtgatgctccatgtctgaatttcgtccagcctctctctgaactgtgatctttgtcctcatgaactttcccttttgntcattgaactatatg

SEQ ID NO: 16380 - DNA, 385 bp, Homo sapiens
ggtgctcatgttttctcttgtgggtatcaaaattctacaaggttactcatttttgtttgccccaacttcttccattgctgaaacataccacatcataccttcatgaagtctttgaattttatgaagaaattcttacatgtcgttacccatactcctgttttaagactgtcttcattgatgaggcttatgttgaagtggctgcttatgcttccatgagcatttttagcacaaatcttttacacagtgccatgattatagatgagacacctttgactagaaggtgtttagcccaatccttggcccagcagttttttggttgtttcatatctagaatgtcttggtctgatgaatgggtgctgaagggaatttcaggctatatctatgg

SEQ ID NO: 16381 - DNA, 455 bp, Homo sapiens
  misc_feature (1)...(455): n = a,t,c or g
gggctccccagccctgaaacagatcgaaatcaacaccatctctgccagctttgggggcctggcctcccggaccccagctgtgcaccgacatgttctcagtgtcctgagtaagaccaaagaagctggcaagatcctctctaataatcccagcaagggactggccctgggaattgccaaagcctgggagctctacggctcacccaatgctctggtgctactgattgctcaagagaaggaaagaaacatatttgaccagcgtgccatagagaatgagctactggccaggaacatccatgtgatccgacgaacatttgaagatatctctgaaaaggggtctctggaccaagaccgaaggctgtttgtggatggccaggaaattgctgggggntacnttccggatggctacatgccttggtaagacnagctacanaattgggaacccgtttactggttgg

SEQ ID NO: 16382 - DNA, 333 bp, Homo sapiens
ggcacgccctacccgggaagcctcaccctcactccaggacggtagtcctgccagtggagtggcccaggggcctgctggaggctcccaggacagccccaagggcacccactcggggctcgaggtcttctcagggatgatcttgaaggtggaggaggagatatagggctggtcgggggtgctggcagagccaaagggcaggagcagggcctccagtctttcccctgctgagtccaggcaggggagaggtggcagtgactgggtctccagggcaccgggacaactccagtccaggagaccggaaggatgagaggatgtgggctgtctacctgtgat

SEQ ID NO: 16383 - DNA, 412 bp, Homo sapiens
ggcctaggaacagtaggctataccattatagcctaagtgcttaatttctttttgtttgtttgtttgagacagagtctcactctgtcactcaggctggagtgcagttgcacaatgtcggctcactgcagtctacacctttcaggttcaagcaattctcctggctcagcctcctgagtagctgggattacaggtgtccaccaccacacctggctgatttcttttatttttagtagagatagggtttcaccatgttggccaggctggtcttgaactcctggcctcagatgaagtgcctccttgggctcctaaagtgcagggattacagatgtgagccaacacgaacagccttctcaaaacgtatcctggccttaagtgataatgactgtatgttctgcatgtccaattaagggac

SEQ ID NO: 16384 - DNA, 483 bp, Homo sapiens
  misc_feature (1)...(483): n = a,t,c or g
tgatttccatnccgacatgattacnaatttaatacgactcactatagggaatttggccctcgaggccaagaattcggcacgagaagacaagctgcaggcacgcctctcacctcccttccatgtggcttctttcggttacagagcggcctgtgagcatgagcttcccgctgtcttcaccccgcttctcgggcagtgccttttcatccgtcttccagagcattaacccctcgaccttcaagaagcagaagaaagtcccttcagccctgacagaggtaaagcaggcagggctacccaagtgggaagtagggcatttggaaggttcatggtcatcctgggtagacggagtcagaccctgccctgtcccagcctgaccagtctcttccagacagagcattcctaatggaagcatcccagctacgaggaccgacttgacagtgatggtgctaggcgacatctttcccatncttctctctaactnttccc

SEQ ID NO: 16385 - DNA, 331 bp, Homo sapiens
ggttttgctcttgttgcacaggctggagtgcaatggcacgatctcggcccactgcaacctccgcctcctgggttcgagcaattctcctgcctcagcctcccgagtagctgggattacaggcgtccaccaccacacccagctaatttttgtatttttagtagagaccagcctaagcaacctattgagttggactttcttcaggaatttgatcatcctacatgtatcaggaatgaggcgtgatgttaagctctgggattttgcatttcattacatggtatatgccgtagttttcctgagcagaagcaaagcctcaaaatacatgcacaccagg

SEQ ID NO: 16386 - DNA, 96 bp, Homo sapiens
aaaatttccttgtatttttaggttatgcaactaataaaaactaccttacattaattaattacagttttctacacatggtaatacaggatatgctac

SEQ ID NO: 16387 - DNA, 396 bp, Homo sapiens
agaccacatccacccagggattagggttcaagtagcagctgctaacccttgcaccagcccttgtgggactcccaacacaagacaaagctcaggatgctggtgatgctaggaagatgtccctcccctcactgccccacattctcccagtggctctaccagcctcacccatcaaaccagtgaatttctcaatcttgcctcacagtgactgcagcgccaagcggcatccaccaagcatcaagttggagaaaagggaacccaagcagtagagagcgatattggagtcttttgttcattcaaatcttggatttttttttttccctaagagattctctttttagggggaatgggaaacggacacctcataaagggttcaaagatcatcaatttttctgactt

SEQ ID NO: 16388 - DNA, 363 bp, Homo sapiens
gagcgattctcctgcctcagcctcccgagtggctgggattatggggacgtgccaccatgcacagctaagctctgtatttttagtagagacagggtttcaccatgttggccaggctggtcttggactcctgacctcatggtttgcccgcctcggcctcccgaagtgctgggattacaggtgtgagcgaatgggcccggccaatgcaatcttttagcaggaaatccatccaggattttggaatcaacagaaaagaaaaaccttgggttttggagtctcagattctggcggtcctgctagatgtgttgacgagtgtgttgggccagttaattaccctcataattgttctaattgcttttatcctgc

SEQ ID NO: 16389 - DNA, 306 bp, Homo sapiens
tgtgattcgatcgtcaagacatcacttggatttcttaatcttaaatgcttatggaagatgtgaagttgaggtgctgcattctagaacttcaatatgtagcttactctttttttccccccttcttaaaccaccagtggttcatttttaaggttttttcatcaagagaagaataactttactaaattttatttctttatttgcaaaagaatctttattaaaacaaacaatcttaactatgcacatgatgtgaccagatcatcttgaaaatattcctctttagtaggaactctttgtttttaactcttg

SEQ ID NO: 16390 - DNA, 396 bp, Homo sapiens
caatatgagagaaaattgagatgtgtaaaaatctagttactgcctgtaaatggtgtcattgaggcagatattctttcgtcatatttgacagtatgttgtctgtcaagttttaaatacttatcttgcctccatatcaatccattctcatgaacctctgtattgctttccttaaactattgttttctaattgaaattgtctataaagaaaatacttgcaatatatttttcctttatttttatgactaatataaatcaagaaaatttgttgttagatatattttggcctaggtatcagggtaatgtatatacatattttttatttccaaaaaaaattcattaattgcttcttaactcttattataaccaagcaatttaattacaattgttaaaactgaa

SEQ ID NO: 16391 - DNA, 1093 bp, Homo sapiens
  misc_feature (1)...(1093): n = a,t,c or g
actcagccaagaacgaatacaccagtcaaagaagattggaatgtcagaattaccaagctacagaagcaagtggaagagatttttaatttgaaatttgctcaagctcttggactcaccgaggcagtaaaagtaccatatcctgtgtttgaatcaaacccggagttcttgtatgtggaaggcttgccagaggggattcccttccgaagccctacctggtttggaattccacgacttgaaaggatcgtccgcgggagtaataaaatcaagttcgttgttaaaaaacctgaactagttatttcctacttgcctcctgggatggctagtaaaataaacactaaagctttgcagtcccccaaaagaccacgaagtcctgggagtaattcaaaggttcctgaaattgaggtcaccgtggaaggccctaataacaacaatcctcaaacctcagctgttcgaaccccgacccagactaacggttctaacgttcccttcaagccacgagggagagagttttcctttgaggcctggaatgccaaaatcacggacctaaaacagaaagttgaaaatctcttcaatgagaaatgtggggaagctcttggccttaaacaagctgtgaaggtgccgttcgcgttatttgagtctttcccggaagacttttatgtggaaggcttacctgagggtgtgccattccgaagaccatcgacttttggcattccgaggctggagaagatactcagatacatagccaaaattaagttcatcattaaaaagcccgaaatgtttganacggcgattaaggagagcacctcctctaagagccctcccagaaaaataaattcatcacccaatgttaatactactgcatcaggtgttgaagaccttaacatcattcaggtgacaattccagatgatgataatgaaagactctcgaaagttgaaaaagctagacagctaagagaacaagtgaatgacctctttagtcggaaatttggtgaagctattggtatgggttttcctgtgaaagttccctacaggaaaatcacaattaaccctggctgtgtggtggttgatggatgcccccgggggttcnttcaaa

SEQ ID NO: 16392 - DNA, 455 bp, Homo sapiens
  misc_feature (1)...(455): n = a,t,c or g
ggtgntnnnnnnttgaaatcgntatgccatgattacnaatttaatacgactcactatagggaatttggccctcgaggccaagaattcggcacgaggacaattgatatattccagtataatgttttaaacaacacaatatgattgttaattttattttgattgaaaatgaaagtatctttaatagaaaatgtatcaaaagggaaattagaaaatactgttagatgaataaaactggcccaagaagaaacagtaaatctgaatagatttgtaacacagcgaatagattaaattagtaataaaaaaaaaancctnacctgcaaagaaantcccaggccgaaatggcntcactggtaaattntaccaaacntttaaagaggaattantnctaattagttaacnccaattaatatctnttacaaancagaanagganacntttcccaactaattttgtga

SEQ ID NO: 16393 - DNA, 360 bp, Homo sapiens
gactattgttgctttaagcatacattttctgtgcgtgtttcagatgtagtttccttaggaaagattctctatgctgtgcaacaattccccatgtgtctcttacatttctgcacatcttgtgtcagcgtttgttctagaccgtcttcataaggatgtttgtatagctaatagcattggaagatagggctaatatagtagaagacagatttatttgctgattaggattataacgataatatctccagaccaggcacagtggctcatgcctgtaatcccaccaatttgtgaggctgaggcaggcagatgacctgaggttgggagtttgagaccagcctggccaatatggtgaaaccgccgtct

SEQ ID NO: 16394 - DNA, 227 bp, Homo sapiens
  misc_feature (1)...(227): n = a,t,c or g
gagagatctgtgggacagaggtttccagggaaaagatggaattaatcagttacagattgaacatttggaaaaataatcactacatatttgggacatttggaatgaaatagcccttggtacttcaaaccaaacaataggaaaaaaatgacaattattaactccaggnaaaaccaaactgtaagaaaaaaatgtnntaatanctngctacttgacnagnnatncncttg

SEQ ID NO: 16395 - DNA, 425 bp, Homo sapiens
  misc_feature (1)...(425): n = a,t,c or g
tttnnnnatttnnnacngcttgacatgattacgaatttaatacgactcactatagggaatttggccctcgaggccaagaattcggcacgagagacggtggagctttaatgtgtggttttactcagggggtcacaagaaaataacccaatggtccttttgaaagtagtacatacacctttaaatggaacttggtctgaagggtgtggaaatgctggtccagggcagatgcacttcagctaccgttccttgcctggtgtgtgcttgtcttgaagcacccttcttatgtgcctttctggaatgggaatgtgttttgccctattggtgaagtccgttagagaacttctctctgcagctagagaaactgaactgattaataaaaagtatgatatctaagatatactgccactctacaggtagtaaatgat

SEQ ID NO: 16396 - DNA, 431 bp, Homo sapiens
agctatgacatgattacgaatttaatacgactcactatagggaatttggccctcgaggccaagaattcggcacgagttcttttctaagtagccatttttattggtttttggttattcttgaatgttgcttgtttgttttgttttgtttgtgtgtgttttttgagacagagtgtcactctgttgcccaggctggagtgcagtggcacggtcttggctcacagcaacctccgcctcctgagtagctgggattacaggcgcccacaaccacacccagctaatttttgtatttttagtagagacaggatttcgccatgttggccaggctggtctcgaactcctgacctcaggtgatccgcccacttcagcctcccaaagtgctagaattacaggcgtgagctaccgtgctggccggacttcttgctttttagcaa

SEQ ID NO: 16397 - DNA, 404 bp, Homo sapiens
gggtgcttattggtacctgttgcaggaactcttggcacctgcatacccactgacattccaggaagtcagggcagggtgcagggagaaatgaaggggacattaaataaatgagtgctgtgggcattcagtggtgcctgccattgtatttgcaggagactgagacatttgtgtaggagtcaggtccaacagccagactgtgtgtctaaatcagaaggtggactcttgaagcacaagaactcccccaggcctccactgggcatgatgcacccacaccctcccctgccaaccagtgtttcttgatgttgtatggttattctaagtaccagagtattctcatttctgttgaacatcagccatttgaataaagatcggaaggcagtgtggagtagtggaaaaaattctgg

SEQ ID NO: 16398 - DNA, 554 bp, Homo sapiens
  misc_feature (1)...(554): n = a,t,c or g
gccttcncccctcccntngactcaagtnatactcgttatgacatgnttacgaatttaatacgactcactatagggaatttggccctcgaggccaagaattcggcacgagggggagggctggctgggtcaggcaggatcacagaagattccactaataattgacagatagcttcacaagagaccagctgtcggccccgtatgagatgaaaagcaaatacagctgtctttggactttggctcaaaccctgcttggcatgcaaatgcacatgtacctcttccagctctaaaattctatggcagctcacttacacttacattaaaccgtgtaataaacagaaaacctggctcagagcatcatcaaaaccagagtcccctggcctttctcactccttcttgaattcctaccccatcactctgaaggcttgagaagtttcttgctcaacagctacatctttgggactacnnaaatggctactggaataattcctcttgatggatactctttattataaactagaatcttgggggntggggaaaaaagcctcagtgcctcc

SEQ ID NO: 16399 - DNA, 395 bp, Homo sapiens
gtagaaagtcagcattttccttgagctaaatacctaataaccaaaactgtgaggaaggttatcgggacagaggttccggataacctgtttcattttgggttttcttcctcttccccagactccagtcctcgttctagaggaaggagtaggacttccccgatccccgtagggcttcagctttttctgcctcaaaaccagccctaactggactactctggatgcattttgtggtgggccccctagaggggaagatgggcctttatctgctccgtggggtgcactggagtgaggggggtggccgggctgcctctcgcatctctgtcttcccctgcaggcgctgtgtgagctggccctgcccctcctcattacagtatgaagggagccgtgacacgcac

SEQ ID NO: 16400 - DNA, 423 bp, Homo sapiens
  misc_feature (1)...(423): n = a,t,c or g
accagctttgacatgnttacnaatttaatacnactcactatagggaatttggccctcgaggccaagaattcggcacgagcataaagctacaataattaagatattatttattgtaataattaagtatggcattggcaaaagaataggccaataggttgatggactagaatagagagcccagaaatatacccacataaatatagtcaaccgatctttgataaaggagcanaggttatacaatgtagcagagatagtctttacaacaaatggtgcaggaacaaatggatatatccacatacaaaacaaaataatgaaatagacacagatcttacacccctcacaaaaatgttctctgaatggattatagacctaaaggtaaaacatnaaactattacacttgnaggcattaacctaagagaaaac

SEQ ID NO: 16401 - DNA, 418 bp, Homo sapiens
  misc_feature (1)...(418): n = a,t,c or g
aattcggcacgagcagttactgcctctgcttagtgggaaactctgggcattagcccttttcggattctcttggggacagtgttggtgagtggaatctgtttatgggttccagaagtgcttcctttgtagaggaagagagttctggtgctctttggactttgttagctgaagactagagaatatggtcttagccaggtctgctgcagaagctcttgcctgaggttctcctggctgccctctccattgtgtgctgagcagctgacaacaacttagatgcttccttgggccctcccaaaaagcccaggtttgcctttctttttttttttgacggattctcgctctntcaccngggntgattncggcncancctcnnctcnttgnnncctntgcctccaaaattcanctgatcccctccctc

SEQ ID NO: 16402 - DNA, 478 bp, Homo sapiens
  misc_feature (1)...(478): n = a,t,c or g
ttganncncnganncccntcagctatgacatgattacgaatttaatacgactcactatagggaatttggccctcgaggccaagaattcggcacgaggtcatcatctcgcgagggaagcccggggacgcacactacctggggctactgcactttgtgaaggatttctccaaactcctggccttctccagcagctttgtgacaccacttctctaccgctacatgaaccagagcttccccagcaagctccaacggctgatgaaaaagctgccctgcggggaccggcactgctccccggaccacatgggggtgcagcaggtgctggcgtaggcggcccagccctcctggggagacgtgactctggtggacgcagagcacttagttaccctggacgctccccacatccttccagaaggagacgagctgctggaagagaagcaggaggggtgtttttcttgaagtttcctttttcccacaaatg

SEQ ID NO: 16403 - DNA, 557 bp, Homo sapiens
  misc_feature (1)...(557): n = a,t,c or g
tggnnntntnccccttgaannctttgaannccccanntatgacatgattacgaatttaatacgactcactatagggaatttggccctcgaggccaagaattcggcacgaggcaccctccactgactgtgtgacaatcccagcttgagaatcacttctttaaatgcctggaagtaatgtgggggtgggggagggggcgcgaatatctgatgactctaagtgtataagttgtcaatctttgagaacattctattgcagatccctgcctttaaatgtatcacaaacctagagtcttacaagtcatgttgctcttgacatattttcaagaagatagatacctcttcagttgagccaagatgacaccctagcagcttgaagtattttgctcatctgctgtttacctctgttatgagcagtgccaattaggtggccatatttcctgaaccaaaaggcgagactcatagtctaaaggtagcagcaatttttaaataagggcactaatagatcattgatcatatgcttattatcaccatgacctttctctttagagcaatctgtg

SEQ ID NO: 16404 - DNA, 340 bp, Homo sapiens
ggtgtctggaggatagaaggggtgggggagttcttaggaaagagttgtccttgggacagacatccccaaatgggcaagttacactgaaagggatcaggtttatcaggaagaatgtgctctaaaaagaagcatctgtttccaagtttccataatagttaatgaaggtaggaatgttctaggcacctctggaagcctgtatgaccagaggcacaaacggcaagccacgcctttccccagtcaccttccattagaagccgctgggccccgtagaccagcattcaccagtacaagttttgtggtaaaaggagaaggctctgggtcttctctgttccatgaggta

SEQ ID NO: 16405 - DNA, 358 bp, Homo sapiens
gcagcatagaaatggaaataattaaatttgaccatgaagattgaaatgggcttcctttaaaacatagtaaagtttcagcttatgagaatatctgttccttgttgcagttcaacattaaatgctgattacgagaataaatagtgacatgtgtagaaatgctactgaaatttgagtggtcatgtatgaatgaactatttgaagctgagcatgaatgtaccagacagagaagcacagctaaagcaggacattttggcaatacgaagtatagagacattttagttagacagagaaggatatatgatatatccagtgaatgccaagcccatagtgcctggcacagggagttaatggtgatggc

SEQ ID NO: 16406 - DNA, 958 bp, Homo sapiens
gcagtagactatccctactctaagcagagacaactgccacccagcctgggccttcccagaccagcatttgcacaatatcaccaggcttcttctgcctcccttggtaacccaaggaatgatggaatcaacacaacatagtatgtttgctttccttacccaattgtaccttctagaaaatcagtgttcacagagactgcctccaccacaggcatcctgcaaatgcagactccagaatccccagcatcagcgggaaccaccatcacatctttattcctcagcccagacactcgaggcactcaacagaatcagccatccacgtctaggtatcagagaggaccacaaatacaacattctccatctgctttcagagttattattttaataaaggaagatctgggatgggctggtgggccattccagcttgccgaaatcaaagccatctgaagcctgtctctggtgaacaaacttcctctctggcctctcaggaatcagggtgggcatggctcacaacagcagggccttcttctttttgacgtgcagaatctcagtggcatctgggttcacctccccactctgatgatctccagcctccactgcttctgccccccgctgctgaaatcaaacataccccaagttaaaatgaagctcccccacccccactcccggccccggttcccacaggacacgctaagaagcacagggagcatttaacaggctcaccctccctttccttttcccctcttctaccctccccaagaaaaagggccttcaaggcaggaatgagaaagcaaagccaatctctcatttagacctggcttctttcttctgaacaaagtagggttcaaaatgcagactgtcatatccaagcgaagtccctgaccctttctgcgaatgtaacgagcaagcagtcagcacagcctgggctgcctggcccgggattgatgtagccccggtaggt

SEQ ID NO: 16407 - DNA, 460 bp, Homo sapiens
gaatgttcccagcaactctcccaagcttgatacattaccaggctcactagacggatgaggaaactgaggcacgaagcagcagccttctcactccactctgggcggccacctttcttcttggaaagtccactgaggtgggcgggagggggtcttccagcctgggtgcctcatgcagtcttctgcctccaccttgcatggctttttggccctgacttcatcctcttcccctcccttcaaagccaattctacctgagtccttgtgctcaaatgcacagcatcttccctggtctttacatgaatcccaggagagacccattttcttaaggtgtttgtccaggaatcacccctcatggtgaaaactgcgtctcgaatatgcacagcacttcatagtttatagaggcttttacacccgttatctcttcgctgatgccagctgacagtgatgatggtgggggggact

SEQ ID NO: 16408 - DNA, 402 bp, Homo sapiens
cccaggacgttgcctacccagaggaaagccccactgagccatcaaccaagcttccggggtttgactcctgtggaaagactgagatagcagagaggaagatcaagagaatctatggaggctttaaaagcacggcgggcaagcacccatggcaggcgtccctccagtcctcgctgcctctgaccatctccatgccccagggccacttctgtggtggggcactgatccacccctgctgggtgctcactgctgcccactgcaccgacataaaaaccagacatctaaaggtggtgctaggggaccaggacctgaagaaagaagaatttcatgagcagagctttagggtggagaagatattcaagtacagccactacaatgaaagagatgagattccccacaatgata

SEQ ID NO: 16409 - DNA, 232 bp, Homo sapiens
  misc_feature (1)...(232): n = a,t,c or g
gtacattccaaatgagagggagaaacttctatattctttaggccactactgttgtgggaagtctgccactcacaacagaaccagatcctagctgatacaggctaggtaatgcctctctttcataaaagctagagtctnanctcgtctganaggtagggagttatctcaattgnttggcncagtcagttacgnactgaacnntgatctactntntgacccttntcactattac

SEQ ID NO: 16410 - DNA, 629 bp, Homo sapiens
  misc_feature (1)...(629): n = a,t,c or g
gaactggatgtgccctcctgagctgaccgtccaatcccttgccctctctgtgcctacgttttattagttacagccagatggttactgtcaaatcaaatgatagatttcattttcagtatgtaataggaagcccctccctcaccctaaagtctcagctgccctctaagactagtactctctaaggtactagtatcccttcctcagagaccctttccctgaccccaaaactagggaaggtcccttagttatttgctctcacagaccacgcatttacctcagagcatattcactcattcagctgttacttaccaagcacctactgggagctatacactgttctatgtgctagggatacctctgtcagtgaacaacacagacacaaagatccctgcccttgtggagctgaaatctgaataaanggaggggnnatntacanagtttttannnntaggttaactanggcaantnggggtngccangncgggnngcccnannattttgggaaccagggnaggngnttcnccggggnccgggngtnaaangcaacctgggcaanatggaaaaaccggctttacnaanntgggaaattggtcangcgggatgganangcctgtgnccannnantgggg

SEQ ID NO: 16411 - DNA, 419 bp, Homo sapiens
  misc_feature (1)...(419): n = a,t,c or g
ttgannctttgaancccngcttgactgattacgaatttaatacgactcactatagggaatttggccctcgaggccaagaattcggcacgagctctcacagcttgaaaagcctgagacagctgtcttgtgagggactgagatgcaggatttcttcactcctcccctttgtgacttcaagagcctctggcatctctttctgcaaaggcacctgaatgtgtctgcgtccctgttagcataatgtgaggaggtggagagacagcccacccccgtgtccactgtgacccctgttcccatgctgacctgtgtttcctccccagtcatctttcctgttccagaggggtggggctggatgtctccatctctgtctcaactttatgtgcactgagctgcaacttcttacttccctactgaaaataaaa

SEQ ID NO: 16412 - DNA, 82 bp, Homo sapiens
cgacattgagactattgaggaaaaggaggaagatcttaagagagaagaggaaattgccaagctaaataactccagtccaaat

SEQ ID NO: 16413 - DNA, 516 bp, Homo sapiens
  misc_feature (1)...(516): n = a,t,c or g
gtannccntaaaaatntgaatccctaacagctatgacatgattacgaatttaatacgactcactatagggaatttggccctcgaggccaagaattcggcacgaggtgtgtatgtgtgtgtgtgtgtgtgtgtgtgtgtgtgcgtgtgtgtgtatgagacagcaggaagcatagggcctttacaaatgttttttaaagcgtctaaaacactttacacatgacgggtactcaataaatactttgtgagtgagtgagcagtggcagggaaagccctttgtttcataataaacccagtggcatgggagcaggaagtacaattccaagttgggtcttgaaattcatggactaaagaagaagtcatgtcctgcctcaccaagaaattacccgtggacatctggcaaaccggggggcatgctgtagggacaagacacagttctccatctcaggaaggaggattagacaataaaaatgaccgtggcggcccctggcaatttaatctgctcacgaatgtgagctg

SEQ ID NO: 16414 - DNA, 404 bp, Homo sapiens
  misc_feature (1)...(404): n = a,t,c or g
ggtttatagaaaatttcaatatacaggccaggtgcggtggctcacgcctgtaatcccagccctttgggaggccaaggtgggtggatcgcttgagccaggagttgtggtcccacctacgcagaaggctgagttaggaggattgcttgagccccaggaggttgaggctacgatgagccatgacactgcacttcatcctaagcgactgggcaacagagtgggaccctgtctccaaaaaaaaaagaaaaagtttcaacatacaaagtaaaataaaactctcacatacatacctgttaccttaacatgatacctagtgaaaattaattatacccaaatgcaaggcttttgatacaccctttatagacctggccatacgtcttgnantcatcaaattttacagctgtgaa

SEQ ID NO: 16415 - DNA, 531 bp, Homo sapiens
acccctttgacatgattacgaatttaatacgactcactatagggaatttggccctcgaggccaagaattcggcacgagggactataaagaggcaagggcaggagaagtgagactggttaggaggcagttgcagtaatcctggcaggagatgacagcggcttggatcgggggtagcagtggaggaggtgagaagtgctgagatgtagggctatttatgatacacatactgacaggcgttgttgagggacgagatgtggcatgtgaaaggagtcgaggtttctggcctgagtcactggaagaacggaactgccacttatggagatggagaggactattaaaaaacctaagtggaggtgtcaagagaaggtgtcaagaaggtagttggacaaatgagtctggagttagaagagggaaccagcctggagatatgtagatggtatttgaaagccacaagttggtaaatcaaagaccaagagagtatataggaaagaagtctgttggctgagctttatgcccaggtgggtcaagata

SEQ ID NO: 16416 - DNA, 332 bp, Homo sapiens
ggaacagaatcaaattgcccagtctgccatcttgatttagttttctatttaaacttttattgtatatgttatatttttaatttctaagaactttattttttggtatcttttttttgagatggagtcttgctctgtcacccaggctagagtgcagtggcgcgatctcggctcactgcaacctccacctcccaagtagaagtgattctcctgcctcagcctccccagtagctgggattacaggcgggtgccaccacgcctggctaatttttgtagttctaggagagacagggttttaccatgttagccaggctggcatgaactcctgacctagg

SEQ ID NO: 16417 - DNA, 407 bp, Homo sapiens
ggaagaataatctggttcagaaaatagttcaaatgtgcatgttttgacatggcttcataacaaaagatcctttcaatcaaaatgctagggaaaccagcattaaaggagagattgtggggcaggcgaggtgttggcagcagggacatgggttgtcaggagacaatggaacagaaacaagacatgagaaaaagtgtgagcttaatccataaagctgtttccctccaaaggtgtcagctgcatggcgtgggaggtcaggcaagtgggtctgtgttccccagggtgggagaagcattagtagaaacaggtgatgaattccttaattaggatagggaaacactgcagaagagctgtggtctagggattttatgaaatgcaaagcttggaaaattaaagaagcccaatgtgaa

SEQ ID NO: 16418 - DNA, 911 bp, Homo sapiens
gtgtctcattactgggaagcaccgtccacaatcatgggcctacccagtctgggccctgtgtgccagcacttactcttttgtaaagcacctgttaaaatgaaggacagatttatcaccttgattacggcggtgatgggacctgatcccagcagtcacaagtcacaggggaaggtccctgaggacagacctcaggagggctattggtccaggacccacacctgctttcttcatgtttcctgatcccgccctgggtctgcagtcacacatttctggaaacttctctggggtccaagactaggaggttcctctaggaccttaaggccctggctcctttctggtatctcacaggacattttcttcccacaggtggaaaaggagggagctactctaaggctgagtggagcgacagtgcccagggctctgatgagtctctcatcgcttgtaaagcctgagacagctgtcttgtgagggactgagatgcacagctgccttgtgtgcgactgagatgcaggatttcctcacgcctcccctatgtgtcttaggggactctggcttctctttttgcaagggcctctgaatctgtctgtgtccctgttagcacaatgtgaggaggtagagaaacagtccacctctgtgtctaccatgacccccttcctcacactgacctgtgttccttccctgttctcttttctattaaaaataagaacctgggcagagtgcggcagctcatgcctgtaatcccagcacttagggaggccgaggagggcagatcacgaggtcaggagatcgaaaccatcctggctaacacggtgaaaccccgtctctactaaaaaatacaaaaaattagctgggcgcagaggcacgggcctgtagtcccagctactcaggaggcggaggcaggagaatggccg

SEQ ID NO: 16419 - DNA, 360 bp, Homo sapiens
agaatttgcaataacttcacaattaccttttctagtgcagttatattagaatgcatatgtttttaaaatgctagtataactagatagtatataatgtacagtataaagaggaatattgtgcttttgaaaagagtatactttttacttttatttatgtactagtagatgtaaaatttcacattgaaggtttatatatattggccaactcatatagaaattttatttataggaagctactactaaaaaaagtcactaactttgtgtacctataatccctaaattaaaattaaattttaattggctggctgtaatttgcattgagagaccttttactagtagctagtgttaggaagtgaacct

SEQ ID NO: 16420 - DNA, 470 bp, Homo sapiens
  misc_feature (1)...(470): n = a,t,c or g
gcggcccctggaggaggtcatgcagaaatacatcagatacgcggtgcagtatgacaaccactacaccaacaccaagtactgcttgtgccagatgctacgagaacagctggagtcgccccagggaaggttgctccatgctgcccagtcttcccgggaaatttgtgaggcctttggccttggtgccttctatgaggagaccacacaggagctggatgcccagcaggccaggctctcagccaagacttcagagcagacaggggagccagctgaagatacctctggtgtcattaagatggctgtcaagtttgaccggagagcatacccagcccagatcacccctaagatgtgcctactagagtggtgccggagggagaagttggcacagcctgtgtatgaaacggttcaacgccctctagatcgcctgtctcctctatgncaccggtgctgacaaaagtatcagtctacctttg

SEQ ID NO: 16421 - DNA, 332 bp, Homo sapiens
gcggcacgagcggcacgagctggccttttcctatggctataaatgtgtcattttgcaaatgtgatgtaaatggaatgcgtgggaccctttcagatgagctcttcactcaggaacatgcccttgagaccatctaagctgcttcctgtgtcaacagttagttcctttttactgataagtagcctcccctggaaggaaaggacctctttgtttaccattcacctactgaagcttttgactattacaaatagcgctgccatgagcaatcacgtataggtgtttgtgtgaacataaatctttctttctctgggacaaatgcccaggagtgtgactga

SEQ ID NO: 16422 - DNA, 383 bp, Homo sapiens
ctacatgcttattcttctggacttggagtgtataccatttaaaggtgtgcggcgggtctctgttcacatggctcaactggaaacctgtttcatgaacaagcttactcaggaaccatctggtggtattccagcacattgttcttcagggggacgactctaagtcgctttgtggtggcagcagcttagaatcagtatttgtggttgggaaagatggacttacgggagcttggtaatgcaggtggtgaaggagcaggttatgagagcacttacaaccaagcctagctccctggaccagttcaagagcaaactgcagaacctgagctacactgagatcctgaaaatccgccagtccgagaggatgaaccaggaagatttccagtccc

SEQ ID NO: 16423 - DNA, 350 bp, Homo sapiens
  misc_feature (1)...(350): n = a,t,c or g
catttgcaggatttcatgcacatcagttctggaatggcactgccttttaatagtttgagtacattgttcaaaagagctgcagcatgtcttttggtgactcattagattttggctcacatctttttgctttcatcacctaaattagggtatgatcaaatacatgaaaactgctgtgtattttggcactcattttcattgtgaaagttaaatatataggttacttagggataaaaatttaacttgaatattctttctgtaaatgtcctctaaaatccaccagcaacacactttttgtcaaggtagaggttnttttttttttcnttttttatnnnnnttgngcnannngggaa

SEQ ID NO: 16424 - DNA, 507 bp, Homo sapiens
  misc_feature (1)...(507): n = a,t,c or g
tttgannnctntgaanccctnctatgacctgattacgaatttaatacgactcactatagggaatttggccctcgaggccaagaattcggcacgagaaagaggagataaaggtgaaataaacagtattgtaaaatgtcttactagccctgatggctttatactgtcatcggctgatatctcaagacatagagatatttagagtcacttagagtgacatttattattaatgattttgagtataaatccatatttccagttattttatccatcatttcacatttgtttgctgaattgtcattgcttttcaactttatggtagggctgacaaaagcttttactaggggaatgagaggccctgccattttttggtgttgtgtttgtattattatcttcaactcacacttttttttgcagtaatctttttttaagtgaaattttttcttaagtagatcatacatagagagaagcacataagtgcttcatctcagatcataagtgacaacatga

SEQ ID NO: 16425 - DNA, 535 bp, Homo sapiens
  misc_feature (1)...(535): n = a,t,c or g
ttttgaancccctatganntantacntnannacttcgatnccctaacagctatgacatgattacgaatttaatacgactcactatagggaatttggccctcgaggccaagaattcggcacgagatggaaaagaactgaataagagcatcaaccctgatgaagctgttgcttatggtgcagctgtccaggcagccatcttgtctggagacaagtctgagaatgttcaagatttgctgctcttggatgtcactcctctttcccttggtattgaaactgctggtggagtcatgactgtcctcatcaagcgtaataccaccattcctaccaagcagacacagaccttcactacctattctgacaaccagcctggtgtgcttattcaggtttatgaaggcgagcgtgccatgacaaaggataacaacctgcttggcaagtttgaactcacaggcatacctcctgcaccccgaggtgttcctcagattgaagtcacttttgacattgatgccaatggtatcctcaatgctctgctgtggac

SEQ ID NO: 16426 - DNA, 456 bp, Homo sapiens
  misc_feature (1)...(456): n = a,t,c or g
tnntnnnnnntttganttcgatnacngntatgacatgattacgaatttaatacgactcactatagggaatttggccctcgaggccaagaattcggcacgaggttttcaaggaaaagtggcattcattactgggggaggtactggccttggtaaaggaatgacaactcttctgtccagcctaggtgctcagtgcgtgatagccagccggaagatggatgttttgaaagctaccgcagaacaaatttcttctcaaactggaaataaggttcatgcaattcagtgtgatgtgagggatcctgatatggttcaaaacactgtgtcagaactgatcaaagttgcaggacatcctaatattgtgataaacaatgcagcagggaattttatttctcctactgaaagactttctcctaatgcttggaaaaccataactgacatagttctaaatggcacagcctt

SEQ ID NO: 16427 - DNA, 749 bp, Homo sapiens
  misc_feature (1)...(749): n = a,t,c or g
gctgggagtagccaacccggagatccactccttatctatgaggaacatctgagctcttggcccatcctatggaacttgcgggccaaacagaggattgagatgaggaaactgaggctccgagaagacacgcagggagcagctgcatgctggaacccaggttaactggattaccaagtcttcccactcccctcatctctccaggcaggaaggtcctggggggaggaagcagcctcggaaggaatgagctccttgtcctggggatgtgcaagtattgtcttgggacactgtgggaggtaggctgcagagggcagccaggtggctctcaaactgaaatcaccaggggagcttcatcaactactgatgcctgggtcatgccccagagattgtggggcctgcaggacttttaaaagtttcccagatgattctaatgtgaaacaaagtttgaaagccatgggcttggatgcccactgctgcccttcccacctctgaaactctcctgccacacgcctttctaaggaaagaagggatttattaccctgaccccattttacaaaatgggcagaagccaagcaaaatataagggtgtcctcaaggccccacagccagcaacaaatcgaggcagcatgaggggtcccctgatttcagactgcccctggggtgaacttctttaagacacttgggggttccagctcccttgtcagtggganagaagnnnntntttgancctctggntgananannnanacatt

SEQ ID NO: 16428 - DNA, 507 bp, Homo sapiens
tatgaaacagctatgacatgattacgaatttaatacgactcactatagggaatttggccctcgaggccaagaattcggcacgaggcttgttgggtgcacaaacatttcactgaagatattcaaacaaggcaatatcgttccttggaagttctaatcggatctggctataatacccctgctgacatttggagcacggcatgcatggcctttgaactggccacaggtgactatttgtttgaacctcattcaggggaagagtacactcgagatgaagatcacattgcattgatcatagaacttctggggaaggtgcctcgcaagctcattgtggcaggaaaatattccaaggaatttttcaccaaaaaaggtgacctgaaacatatcacgaagctgaaaccttggggcctttttgaggttctagtggagaagtatgagtggtctcaggaagaggcagctggcttcacagatttcttactgccatgttggagctgatcctgagaaagagcc

SEQ ID NO: 16429 - DNA, 484 bp, Homo sapiens
  misc_feature (1)...(484): n = a,t,c or g
ggtattcttttacatttttggtgaggaaatgttttagaggacaatttggcaatatttatcaaattaaagattcaaatgacccaggattctattcctagaaatctattctctagaaataacatatatttaaagattgtagacagctaggtgtttattgcagtattgtttgtaatagcaaaacattggaaacaacctaaatgttctgcagaggtgtggtgagataattatgatatttccagacagtggtagaatatacaaccttaaaaaatatggaagctgtttatgttgttatatgagctaataaatattagattatttaacatatataaaatgtttagaatgcgcctggcacatagttaatgngatatcagtgtttggtattggtattaatggtggtaattaatgatatgggaataaatattcgnatgggaaaaaactccngatatggttagnaaaattaaaaaccccanctgccgnggttttt

SEQ ID NO: 16430 - DNA, 553 bp, Homo sapiens
  misc_feature (1)...(553): n = a,t,c or g
gtgggaggagccagagctgaaaaagttattatcttttcatctattacattatatgtgtccaatgaaacagatcacttttaggtccctaaaaacacactggcttgttcacatttctggaagagaaagagcaggctcccaagccacaactaagatatggagatgccactgtgtcacaggaggttcaaggcattgcaccagaataactctaaggctggcactggagtttcttactctcccaccagggaaaggtcagctaaccaaccagtccagagaacagcagagcttacagagacctcaaaaacgaccccctcttgccacctcttttaacagaggcctaaggcnggcttgataatngaatggnnactggttgctgcaaacntgacactgggaatgagttactgctggttgcngntaagatgaagctaccgcttctttccnncanacctttnncancagtatnntncnctgaantcaaaanaannnggaagtngncnnnncccnnnnnnntnggnnagncnaaatnncccntngtcnnnctgnnttccnnnggaaa

SEQ ID NO: 16431 - DNA, 541 bp, Homo sapiens
  misc_feature (1)...(541): n = a,t,c or g
tttttttgcaggttctcatgttttattgtaaagcaacaagaaactcttatgtacactgtccgtcttggggcgcctccatcctgttccatcttctctaccaggccaggcaggcatgggtggggcgctcagagtcctctgccctgtccctgcccggccaggaccccgcagacctcatgctagacgatgaccgtctgcacctccagctggccctccgatnaccagctcgactgnatgctacaggatctctangnnnnntgacaanngnanngctccttatgannngnntanacctgnccgnnacnangnanttacctcnanctgacnaccctatttgtatntatntnncctnnagtnaccntgaacacnngaacncagntnntacnctnnntnagtnnnnntatctcnacnngtacactnngancagnnncaccttgagancnagnttnaccnggnccctccttnnancaanngtagagattcnnnccnnntnaanccaantnnnatncnannncntaccnnnnaacntaaatncgancncaag

SEQ ID NO: 16432 - DNA, 281 bp, Homo sapiens
gcagatcatggccgaacggccgtaatgcccgctgcttggtaaatggactctccctggaccactctaaacttgtggatgtccctttccaagtggaattcccagcgcctaagaatgagttggtccagaagttccaagtctattacctggggaatgtacctgttgctaaacctgttggggtagatgtgattaatggggccctatgtcagtgtggcccctgctacccttaccatcttgcaccagcagacagaggcagtgctgggaaaagtgtccggtgcctttcc

SEQ ID NO: 16433 - DNA, 422 bp, Homo sapiens
  misc_feature (1)...(422): n = a,t,c or g
ttnnnaacagctatgacatgattacgaatttaatacgactcactatagggaatttggccctcgaggccaagaattcggcacgaggctttgcaatctaaattcttttcacctcttcaaaaagcgatgctaccacctaatagttttcaaggaaaagtggcattcattactgggggaggtactggccttggtaaaggaatgacaactcttctgtccagcctaggtgctcagtgcgtgatagccagccggaagatggatgttttgaaagctaccgcagaacaaatttcttctcaaactggaaataaggttcatgcaattcagtgtgatgtgagggatcctgatatggttcaaaacactgtgtcagaactgatcaaagttgcaggacatcctaatattgtgataaacaatgcagcagggaattttat

SEQ ID NO: 16434 - DNA, 469 bp, Homo sapiens
gaagcaggataggggtggctagtatgcaattgccaactttggatttttccaagcaggagtatatcaaaaagctacaatttattaccagtatttcgtaaaagacagtttgacaccagaagagtgaaaaagaacatgggaatagtggacaaaaatagccatcagtttgaataagcgtatgaaaagtgttaattttatgaaaaattcactattttgttcatatttttcttattttggaggctaattgttaaaagcttttatcagttatccatgggctggagttggtagccactgtttgataccacacaaatgtttctttgccctaaaatatcaacatctgtctgtgtaaaggtcagggctgcctttttagtaagagctaccctttgttaaacacattgtacctgcactgttcatgggtgtttcacacacacaaacctacctggctgcataaacctgaaatacagtcaagaaa

SEQ ID NO: 16435 - DNA, 352 bp, Homo sapiens
gggagcggggtggaacccaccatctggaggtgcttttttcagagctcagcctgggtgatattttaaggaaggaagccatttcctttacaagctcaacttcagacatcgtcttgccttgaggatttgtgtcaggtctgtagttggtcccttcgcatagtccagtttagtgttatctcagtatgttcatgagctcctgtgcctaagaacgctgaggtttgggccaaggcagggtgaagtttttgtaaaaatggctcacagggccgggcgcggtggctcgcgcctgtaatccagcactttgggagaccgaggtgggcggatcacgaggtcaggagatcaacaccatcctggctaa

SEQ ID NO: 16436 - DNA, 395 bp, Homo sapiens
gcttccagcactctcctaaaccaccagcttagcccgttgagttttactaatgctgtttgatgcagtgataaagcggaaacattgctctgctacctgcccaggatagcattgccatgtaaagggcaagtgatgtggactgagaccaccataatgcaggtcttcttggaaaagtatctaatgcaaggcagagttgcataaggggctgaataaccctgggttattcttactgtgaaaaattcccctacttttttcccatagttacctgggctatataagaggtatgcatgctacgcaggggcctctgagagctataaatgacatagggtcaaattgaaccattttcccaccgactggggtgtcagaatcccaaccagcatgtgaagaacacaccctgc

SEQ ID NO: 16437 - DNA, 351 bp, Homo sapiens
  misc_feature (1)...(351): n = a,t,c or g
ggtttttacgtttggattttgtttacaaaagaaccaaagtaagtcatcttcttggtattcaaaagttccaaagatggaattttcccatcagagtgcgatggtttaaatagaagttaggttcctaggaagaataaatgaaccataatataattgcataggatgtagaatatccattgctttccccaagaccagaatgatacctctcacaggcaatgcgaggagtcctccacccctgccacccacactgggtgtgtgacccagcaagggggcatggntggggtgggaggntcntngtnntnacttttncncntcannngagntnttatnnatgcacnnnnttnattangtcat

SEQ ID NO: 16438 - DNA, 401 bp, Homo sapiens
cccacgcgtccgcccgcccccggataaggtggtcgtgaaaactaagaccgagtatgaacctgaccgcaagaaagggaaagcacgtcctccccaaattgctgagttcaccgtcagcatcacggagggtgtcaccgagaggtttaaggtctccgtgttggtcctcttcgccctggccttcctcacctgcgtcgtcttcctggttgtctacaaggtgtacaagtatgaccgcgcctgccccgatgggttcgtcctcaagaacacccagtgcatcccagaaggcttggagagctactacgcggagcaagactccagtgcccgggagaaattttacacagtcataaaccactacaacctggccaagcagagcatacgcgctccgtatcgcctggatgtagttctgt

SEQ ID NO: 16439 - DNA, 340 bp, Homo sapiens
gcgccggaggagttctgcgtctcggggtggtgactgggtccagaatggcttcggattcggggaaccaggggaccctctgcacgttggagttcgcggtgcagatgacctgtcagagctgtgtggacgcggtgcgcaaatccctgcaaggggtggcaggtgtccaggatgtggaggtgcacttggaggaccagatggtcttggtacacaccactctacccagccaggaggtgcaggctctcctggaaggcacggggcggcaggcggtactcaagggcatgggcagcggccagttgcagaatctgggggcagcagtggccatcctgggggggcctggcacccg

SEQ ID NO: 16440 - DNA, 918 bp, Homo sapiens
cccacgcgtccgcaacatgaagctaccggccagggttttctttactctggggtcccggctgccctgtggcctcgctcctcggaggtttttcagttatgggacaaaaatattatatcaaaacactgaagctttgcaatctaaattcttttcacctcttcaaaaagcgatgctaccacctaatagttttcaaggaaaagtggcattcattactgggggaggtactggccttggtaaaggaatgacaactcttctgtccagcctaggtgctcagtgcgtgatagccagccggaagatggatgttttgaaagctaccgcagaacaaatttcttctcaaactggaaataaggttcatgcaattcagtgtgatgtgagggatcctgatatggttcaaaacactgtgtcagaactgatcaaagttgcaggacatcctaatattgtgataaacaatgcagcagggaattttatttctcctactgaaagactttctcctaatgcttggaaaaccataactgacatagttctaaatggcacagccttcgtgacactagaaattggaaaacaactaattaaagcacagaaaggagcagcatttctttctattactactatctatgctgagactggttcaggttttgtagtaccaagtgcttctgccaaagcaggtgtggaagccatgagcaagtctcttgcagctgaatggggtaaatatggaatgcgattcaatgtgattcaaccagggcctataaaaaccaaaggtgcctttagccgtctggacccaactggaacatttgagaaagaaatgattggcagaattccctgtggtcgcctggggactgtagaagaactcgcaaatcttgctgctttcctttgtagtgattatgcttcttggattaatgggagcagcattaaatttgacgg

SEQ ID NO: 16441 - DNA, 444 bp, Homo sapiens
  misc_feature (1)...(444): n = a,t,c or g
ggaattgagaagttttccatctatttctaggcccttgagcattaaaataacagaggagcaacctattccttgaatgatctctgcttgcacacatgaggaaggtagtcctttccaagctccttggattctgagcagcaccatctccctcccctttcactcccaagggcacatgcacatcttgggtagctgcacccaccctcagtggtccttgaggagggtagcagaagccggggcagggggagccttctttgctgctggttcctggctcctgttctcagaagtacccgtcaggctccagtgacaatttatgtggttgtattggagaaagtaccagaagggcaaggtgacaggatggtggatttgggctgcatcttttctcttgctgntatggacttcactgtttggaaagtatatgttccactcttctggtagagttggggcaag

SEQ ID NO: 16442 - DNA, 339 bp, Homo sapiens
  misc_feature (1)...(339): n = a,t,c or g
gggaggcctgattggccattccttctgggacagacagagagagggcccatggcctgctctgagctcccttcaatttcaaggaacccttagttctgagaggagagaggaaggctgcacctaccgtggcctcacagctgggacccctcatgggggccaacccctggcctgctgctgtgcttcagtgacacagtaaagcttaagagggtggctgcctcctaggaactcctgggacttctaggtacaaactcaggtgcccttataaagagacccactgcttgccttgagtccagaaagcactgcttctgcagtgaaaaacacacacttactatgtcanttttg

SEQ ID NO: 16443 - DNA, 434 bp, Homo sapiens
  misc_feature (1)...(434): n = a,t,c or g
ggtgntnnnctttgaganctgatgacctgattacgaatttaatacgactcactatagggaatttggccctcgaggccaagaattcggcacgagtaaatgctttcctgcagccacctggacgtcaaatgattgccatcagaaagagacaacctgaagaaaccaacaatgactatgaaacagctgacggcggctacatgactctgaaccccagggcacctactgacgatgataaaaacatctacctgactcttcctcccaacgaccatgtcaacagtaataactaaagagtaacgttatgccatgtggtcacactctcagcttgctgagtggatgacaaaaagaggggaattgttaaaggaaaatttaaatggagactggaaaaattcctgagcaaacaaaaccacctggcccttagaaatagctttaactttgct

SEQ ID NO: 16444 - DNA, 389 bp, Homo sapiens
  misc_feature (1)...(389): n = a,t,c or g
gacctcctgggctcaagcagtcctcccacttcaacctcccgagtagctgggactataggcacacatcacaactcctggccaatttttgtattttttgtagagatggggtttcgccatgttttccaggctggtctcactcctgggctcaagcgatcctctttgcttggcctcccaaagtgctgggattacaggtgtgtgccaacacacctggccaagttgtatatactattaatctaggctatttctgacactgttgattttccttttccccttaggtgaggcaggcgactaatcagattgtgatgaattgtgctgatattgatattattacagcttcatatgcaccagaaggagatgaaggtaanagctgttttccattttaatttgct

SEQ ID NO: 16445 - DNA, 314 bp, Homo sapiens
cccagcacggggtcttctcagaggctgacatgcgcttctatgcggccgagatcatcctgggcctggagcacatgcacaaccgcttcgtggtctaccgggacctgaagccagccaacatccttctggacgagcatggccacgtgcggatctcggacctgggcctggcctgtgacttctccaagaagaagccccatgccagcgggcacccacgggtacatggctccggaggtcctgcagaagggcgtggcctacgacagcagtgccgactggttctcgtcgacgcggccgcgaattcagatctatgaatcgtagat

SEQ ID NO: 16446 - DNA, 343 bp, Homo sapiens
gcaaaaggttgagattgggcaaaagagagccagtgaagatacaacttcaggttcaccacccaagaaatcttcagcaggaccaaaaagagatgccaggcagatttataaccctcccagtgggaaatatagcagcaatttgggcaactttaattatgagcagagaggagccttcaggggaagtagaggtggccgaggttgcggcacacgaggaaatcgtagtcggggaagactctactgaataagacatcagcattcttcagcattgtcatgagcttaatatacttaaattctactactcattggattgccggggatgtccctttaaacagactgctgccttcag

SEQ ID NO: 16447 - DNA, 746 bp, Homo sapiens
aattcggcacgaggagacttcctcttcgttaagtcggccttcccaacatggcgcagtctattaacatcacggagctgaatctgccgcagctagaaatgctcaagaaccagctggaccaggaagtggagttcttgtccacgtccattgctcagctcaaagtggtacagaccaagtatgtggaagccaaggactgtctgaacgtgctgaacaagagcaacgaggggaaagaattactcgtcccactgacgagttctatgtatgtccctgggaagctgcatgatgtggaacacgtgctcatcgatgtgggaactgggtactatgtagagaagacagctgaggatgccaaggacttcttcaagaggaagatagattttctaaccaagcagatggagaaaatccaaccagctcttcaggagaagcacgccatgaaacaggccgtcatggaaatgatgagtcagaagattcagcagctcacagccctgggggcagctcaggctactgctaaggcctgagagtttttgcagaaatggggtcgacggcggccgcgaattccagatctatgaatcgtagatactgaaaaaccccgcaagttcacttcaactgtgcatcgtgcaccatctcaatttctttcatttatacatcgttttgccttcttttatgtaactatactcctctaagtttcaatcttggccatgtaacctctgatctatagaattttttaaatgactagaattaatgcccatctt

SEQ ID NO: 16448 - DNA, 439 bp, Homo sapiens
aattcggcacgagcccttggcgtgtgtccacagtagtacagggttgcattctgcagttgttgaggtggccttgggatgtggcagcagagggtgaccctgagatttcctgtaagagagagtgcgtgttgattccctttcctctcctgggtggcgtgttgaccattcatttgactagatggaccataagtgagatgggctattgcacaggcactatctgtacccagttttctggccgtgtgttgtcgagattttcaccacgtggactgcatagtcccttcctctgtgtttctacctgatcttatcccagagcctgtccctattattcccctggctattagttcactctacacacccccagacccaagtacacaaaatgtcccctgtatgccattgctttttgtggaagcctttgtagatggcctccatctctagcctgagc

SEQ ID NO: 16449 - DNA, 382 bp, Homo sapiens
ccgaaatgagcccttcaagattcctgaggatgacgggaatgacctgacccacaccttcttcaacccggaccgggagggctggctcctgaagctgggagggggccgggtgaagacgtggaagcggcgctggtttatcctcacagacaactgcctctactactttgagtacaccacggacaaggagccccgaggaatcatccccctggagaatctgagcatccgagaggtggacgacccccggaaaccgaactgctttgaactttacatccccaacaacaaggggcagctcatcaaagcctgcaaaactgaggcggacggccgagtggtggagggaaaccacatggtgtaccggatctcggcccccacgcaggaggagaaggat

SEQ ID NO: 16450 - DNA, 240 bp, Homo sapiens
ttttaagataacatttctaatatatatgcaccaatatatatgcctttaataattataccatcaagtgacctgaaaatgccccttagatttatgatgcgtatctgttggaaaaaccaattggaagggaagttagacaagctttggggaagagaaaaggaatatagtccatttccaaaggagcaggaactcccaaccttaagttaatttcactgaagagaattttccctttttttttttttt

SEQ ID NO: 16451 - DNA, 377 bp, Homo sapiens
ggtaaagacaggatttcaccatattatccaggctggtcttgaactcctgacctcgtgatctacctgcctcgccctcccacagtgctgggattataggtgtgagccaccatttccgccatcacatttttaatctaaagtttttcttgctttctgacctcttttgtttttggagttaccttttgttttagaacatcagtgtgttaaactctagctttttatagtcatttcattcagtttatttaaagaatgatcatctggcatttttcctggggtttgttttttgtttttggagaatcaatgaatttattaatgagtttgaggaaaattggagtttttaaggtatgaagccaccctatccataaacatggtatctcttt

SEQ ID NO: 16452 - DNA, 385 bp, Homo sapiens
gacttaaatttggcaaacctgggttccatttctctcctgtcttttccccattttccagccactttgggagggagagggtgggcaaactgtaacctctttgtatcaattttcgtgatctgagagggtgaagacggtaatgttcttctactcacttcacaactggttgggtagctcagagggaaataagtaaaatgtcttgaggctgtggcagtgcttgattggttctgctgtgtatatataaatggtttctacacacggaaacagagttgtgagtcccatgccttttttggcggggggctatctacttgcctggtgattgccctttcccttacaagctgtacatcctctttaccatccctccttctctccttccacagctcccctt

SEQ ID NO: 16453 - DNA, 405 bp, Homo sapiens
gcattcattaaagtatatagtttagtggtttctagcatattcacaaagttgtgtaaccatcaccaaaatcaattttagaatacattttgtcatctgaaaaagaaaccttgtgccgaggatagtggctgatacctgtaatcctagcactttgggagtctgaggtggacggatcacctgaggtcaagcgtttgagaccatcctggccaacatggcaaaaccccatctctactaaaaatacaaaaattagccaggagtggtggcacatgcctgtgatcccagctactcgggaggctgaggcaggagaatcgcttgaacccaggaagtggaggttgcagtgagctgagatcatgccactgcacttcagcctgggcaacagagcaaggctccacctcaaaaaaataataa

SEQ ID NO: 16454 - DNA, 1081 bp, Homo sapiens
ggagcgtggacgaggtggagaagctcatcaagcgccacgaggcatttgaaaagtctgcagcaacctgggatgagaggttctctgccctggaaaggctgactacattggagttactggaagtgcgcagacagcaagaggaagaggagaggaagaggcggccgccttctcccgagccgagcacgaaggtttcagaggaagccgagtcccagcagcagtgggatacttcaaaaggagaacaagtttcccaaaacggtttgccagctgaacagggatctccacggatggcagaaacggtggacacaagcgaaatggtcaacggcgctacagaacaaaggacgagctctaaagagtccagccccatcccctccccgacctctgatcgtaaagccaagactgccctcccagcccagagtgccgccaccttaccagccagaacccaggagacaccttcggcccagatggaaggcttcctcaatcggaaacacgagtgggaggcccacaataagaaagcctcaagcaggtcctggcacaatgtttattgtgtcataaataaccaagaaatgggtttctacaaagatgcaaagactgctgcttctggaattccctaccacagcgaggtccctgtgagtttgaaagaagctgtctgcgaagtggcccttgattacaaaaagaagaaacacgtattcaagctaagactaaatgatggcaatgagtacctcttccaagccaaagacgatgaggaaatgaacacatggatccaggctatctcttccgccatctcctctgataaacacgaggtgtctgccagcacccagagcacgccagcatccagccgcgcgcagaccctccccaccagcgtcgtcaccatcaccagcgagtccagtcccggcaagcgggaaaaggacaaagagaaagacaaagagaagcggttcagcctttttggcaaaaagaaatgaactcctttccttcacctcctgcccttctcttaccttttcagtgaaattccagcatgcaagctcagaaccaacacattactctctgtgcctaatgttcctcaatgtggttgatttttttttttttt

SEQ ID NO: 16455 - DNA, 325 bp, Homo sapiens
aagaaaaacaaaacaaaactagaaaagagggcctaaactgatataggacatagtggatcttataaggcaaatatgtttcattatatattaacacatttgcgaaacttagagataattttatgtaaaaatatgaattactgtgttgtcagaaatgctaactgatatgaatgtttgtgtgtatataaaacttatttagaggtttattatcgtcttaggctgttttctgttgtttttaacataatatcagaagctgggtaatttataaaaaacaaaatttatttcttacagttatggggtgcaggaagtccaggtcgacgcggccgcg

SEQ ID NO: 16456 - DNA, 538 bp, Homo sapiens
  misc_feature (1)...(538): n = a,t,c or g
ggannnnnnnnnnnnctgnganttncagagnagnngnatangnantntnanagatnatgctcantgngttcnccctttgaaacccttgaatgcctacgaattaatacgantcactatagggaatttggccctcgaggccaagaattcggcacgagggccgagatgtacacgaagacaggagtcaatggagattctggttacttcctggggccactccagttggtttccagtaataaagtcatgttgtctgaggctgggtgcggtggctcacgcctgtaattccagcactctgggaggctgaggcagtggatcacctgaggtcaggagtttgagaccagcctggccaacatggcgaaaccccatctctactaaaacacaaaaattagccgagtgtggtggcggacacctgtagtcccagctacttgggaggctgaggcaagcagaatcgcttgaacctgagagacggaggttgcagtgagccaggattgcaccactgcgctccaacctgggcaacagaatgagaatccacctcaaaaac

SEQ ID NO: 16457 - DNA, 391 bp, Homo sapiens
ggggaactttctggagatgaaaaataagttcctggcccggaggttcaagctcctggagcaggcgctggtgattgaggagcagctgcggcgggcggcctacctgaacctgtcgcaggagccggcgcaccccgccatggccctccacgcccgcttcgccgaggccgagtgcctggccgagagccaccagcacctctccaaggagtcgctggcggggaacaagccggccaacgccgtcctgcacaaggttctgaaccagctggaggagttgctgagcgacatgaaggcggacgtgacccgcctgccagccacgctgtcccgaataccccccatcgcagcccgccttcagatgtccgagcgcagcatcctcagccggctggccagcaagggcacg

SEQ ID NO: 16458 - DNA, 237 bp, Homo sapiens
gggagttcatcaaatacgtgtgcaaggtgctgtccctggacaccaacatcacaaaccaggtgaataagctgaaccgagacctgcttcgcctggtggatgtcggcgagttctccgaggaggcccagttccgagacccctgccgctcctacgtgcttcctgaggtcatctgccgcagctgtaacttctgccgcgacctggacctgtgtaaagactcttccttctcagaggatggggcgg

SEQ ID NO: 16459 - DNA, 386 bp, Homo sapiens
atgaaatccagctgtatctcagctaccaatccatagtgtttgtggtgggtggagaggagaacaaactggttgctgaagccatggtttccctgggaaggtggacccacctgtgcggcacctggaattcagaggaagggctcacatccttgtgggtaaatggtgaactggcggctaccactgttgagatggccacaggtcacattgttcctgagggaggaatcctgcagattggccaagaaaagaatggctgctgtgtgggtggtggctttgatgaaacattagccttctctgggagactcacaggcttcaatatctgggatagtgttcttagcaatgaagagataagagagaccggaggagcagagtcttgtcacatccgggggaat

SEQ ID NO: 16460 - DNA, 465 bp, Homo sapiens
aacagctatgacatgattacgaatttaatacgactcactatagggaatttggccctcgaggccaagaattcggcacgagctggaatatgtaagagttttaacttgttccacaaatggacttttccaaatggttatccagttgtctcaggaccatttattaaaagttttattggccaggcgcgggggctcatgcctgtaatcccagcactttgggaggccgaggcgggcggatcacctgaggtcggagttagagaccagcctgaccaacatggagaaaccctgtctctactaagaatacaaaattagccaggcgtggtggtgcatgcctgtaatcccaactactcgggaggctaagacaggagaattgcttgaacccaggggtggaggttgcagtgggctgaaatcgtgccattgcactctagcctgggaaagaagagcaaaactctgtctcaaaaaaaaaaaaaa

SEQ ID NO: 16461 - DNA, 427 bp, Homo sapiens
acccccctttgaacaccgttatgacatgattacgaatttaatacgactcactatagggaatttggccctcgaggccaagaattcggcacgagcaaggacttaaaggagcccttcccatttacttctcttacttcttaccctcctgcttccccaggatgtcctgacactgtccagcagcacagaaagtgagggggaaagtgggaccagccgaaagcccactgctggtcagacttcggctacagcggttgacagtgatgatatccagaccatatcctctggctctgaaggggatgactttgaggacaagaagaacatgactggtagcctggaaaaattttgggaatggtgggaagaaatagtaagaaacttgggatagagcattttttaaggaagctaaagaagtagtgggtaaaaattcagatcctaa

SEQ ID NO: 16462 - DNA, 421 bp, Homo sapiens
tgatctaattgcattggttaaaagcagctaaccaggtctttagaatatgctctagccaagtctaactttatttagacgctgtagatggacaagcttgattgttggaaccaaaatgggaacattaaacaaacatcacagccctcactaataacattgctgtcaagtgtagattccccccttcaaaaaaagcttgtgaccattttgtatggcttgtctggaaacttctgtaaatcttatgttttagtaaaatattttttgttattctactttgcctttgtacagtttattttactgtgtttatttcattttcccaatttgacaatcgtattttaaaattgaaactgatggaacattctttcttggtcttcaccatctgacaaattgaatggcaagaggtggattttgcagtttcttttcactg

SEQ ID NO: 16463 - DNA, 511 bp, Homo sapiens
  misc_feature (1)...(511): n = a,t,c or g
tttgannnntccngaatcccctttntatgacctgattacgaatttaatacgactcactatagggaatttggccctcgaggccaagaattcggcacgagcctctcaagcgtttcagggagtaaggaggactttgaccttttccttgacatttttctgagtttttaaactttgccataaaatatatcacttttatagttttttttaaatggcttaagctatacattcaatataaagatatacaccaggaacttaaagtaggaaaggcaggatttctctaaaataggctagaaattgaggaactctctggggccagattggacacctctatcatcaaagcagtacgcacaccctggctgcagcaatcaaggaagttaccagaacagtcttcagctggatcagtaatgccatgagacttaaaataatcttttaagggtagagtccatagcaacccaatccagctccactgaatcttgtaccccaggggtagtatcagntaaagtccacctgccag

SEQ ID NO: 16464 - DNA, 377 bp, Homo sapiens
gcggggagcccccagcacaagcagccacttgcttccgccaagtctcagatgggttttcaggaagaacagtggggctatggaaggtgcgtgccttgccccagatgccttttgcagccggcccacgccatcccgccccataggcacaggcatagtcgttgcccagcccgacatccaggccagtgccccttgtggctgagctgccacagctgcccagcaagagtccctcggtcctgcagaacgatgctgctctaaccattatctgctgcacaaagagggcgcccaaggggctaggggggtgagagtcacgtcgaccgcgccgcgaattccagatctatgaatcgtagatactgaaaaaccccgcaagttcacttcaactg

SEQ ID NO: 16465 - DNA, 455 bp, Homo sapiens
  misc_feature (1)...(455): n = a,t,c or g
ggacggggggatcatttgatcccgggaagtgaaggtgctgtgagctgcgatcctgccattgcatccagcctgggcaacagaaaaagaccctgtctcaaaattaaaagagagagagaaacaaacatggcagctcagaaacctggctgggggtgattgtggggaactgctgctgacgggctcttgggcacacccctcactccagccattctgcctggatgccttaggaacactcctcataccctcctaagagtcccatccaggccgccatggctcacttatccctgccacgtggactccagaaaacattctcagtagaaacccacagaaactgttcccagtcacaaagcacgccaggtgcatcctgnctttctgcatttaaaaaaatgaatgngtctctatccctncttcttataaaacagtaccctctcaccctgcatggcttaaattctgggcta

SEQ ID NO: 16466 - DNA, 382 bp, Homo sapiens
  misc_feature (1)...(382): n = a,t,c or g
gcctgtgtattataatcacaattttatttgaaatggatattttaatttaactcaagttgttgtaagctaaatggctcatgtgctcctcattaggagatgaaatttcatcagttttctcaaaagttttgctttccttacctgatccacttagtaatcagttaggcaattaagacaattaattgagaagtgggtaaaaaaatactaacaatatgacttttgtgtgcgtgtgtgtgtgtgtgtgtggtaaaaaatcctgattattgacaatggaaaactacctagaaaattaggaaaaatctatctaggcatttacataacagaaagtcatgncctttttcaagccagtactttacaaggaataccttaaatntatccaaactcg

SEQ ID NO: 16467 - DNA, 291 bp, Homo sapiens
  misc_feature (1)...(291): n = a,t,c or g
gtggtctctttcttaataaggtctctatctgctggtcttagatatccaatactctgggggaaaaaaaaaaaaatcctaaaanccaaaaangaancagccaangaaaaaanaattatgttcnccnttccntntcaaanaattaggataatagggttttttaananccaaaanctttaanggttcctattaatttaancncnggaaaaaagtcaatcngggctaanaangnancctggnatcccgtataatanaaattacccagcntcntcaaaanaaangtntttcctccag

SEQ ID NO: 16468 - DNA, 487 bp, Homo sapiens
  misc_feature (1)...(487): n = a,t,c or g
gcccaaacccacttctcagaatcaattcagtgaacatgacaaaactctgtacaggatcccagaacctcaaaaacctcaactgaagccacctgaagatattgttcggtccaatcattatgaccctgaagaagatgaagaatattatcgaaaacagctgtcatactttgaccgaagaagttttgagaataagcctcctgcacacattgctgccagccatctctccgagcctgcaaagccagctcattctcagaatcaatcaaatttttctagttattcttcaaagggaaagcctcctgaagctgatggtgtggatagatcatttggcgagaaacgctatgaacccatccaggccactccccctcctcctccattgccctcgcagtatgcccagccatctcagcctgtcaccagcgcgtctnttcacatacattctaagggagcacatggtgaagnaattcagngtctttggatttcanaattccttaag

SEQ ID NO: 16469 - DNA, 415 bp, Homo sapiens
ccctatttgtgattacgaatttaatacgactcactatagggaatttggccctcgaggccaagaattcggcacgagcagacaggcctttttataggcatgtcatctatgctccaagcagccacaacaagtatgcaggggagtcattcccaggaatttatgatgctctgtttgatattgaaagcaaagtggacccttccaaggcctggggagaagtgaagagacagatttatgttgcagccttcacagtgcaggcagctgcagagactttgagtgaagtagcctaagaggattctttagagaatccgtattgaatttgtgtggtatgtcactcagaaagaatcgtaatgggtatattgataaattttaaaattggtatatttgaaataaagttgaatattatatatagttaaaaaaa

SEQ ID NO: 16470 - DNA, 768 bp, Homo sapiens
agctgccccttgtcattgagttcaccgagcagacagccccgaagatttttggaggtgaaatcaagactcacatcctgctgttcttgcccaagagtgtgtctgactatgacggcaaactgagcaacttcaaaacagcagccgagagcttcaagggcaagatcctgttcatcttcatcgacagcgaccacaccgacaaccagcgcatcctcgagttctttggcctgaagaaggaagagtgcccggccgtgcgcctcatcaccctggaggaggagatgaccaagtacaagcccgaatcggaggagctgacggcagagaggatcacagagttctgccaccgcttcctggagggcaaaatcaagccccacctgatgagccaggagctgccggaggactgggacaagcagcctgtcaaggtgcttgttgggaagaactttgaagacgtggcttttgatgagaaaaaaaacgtctttgtggagttctatgccccatggtgtggtcactgcaaacagttggctcccatttgggataaactgggagagacgtacaaggaccatgagaacatcgtcatcgccaagatggactcgactgccaacgaggtggaggccgtcaaagtgcacagcttccccacactcaagttctttcctgccagtgccgacaggacggtcattgattacaacggggaacgcacgctggatggttttaagaaattcctgtagagcggtggccaggatggtcatgggatgatgacgatctcgaggcctggaagaa

SEQ ID NO: 16471 - DNA, 530 bp, Homo sapiens
  misc_feature (1)...(530): n = a,t,c or g
tttgannnccncngaatccctttgctatgacntgattacgaatttaatacgactcactatagggaatttggccctcgaggccaagaattcggcacgaggtttttcttttaacaacaatgggtattgtttttattattattattttagatgatgtgttgcccaggctggagtgcaatggcacaatctcagctcactgcaacttctgcctcccgggttcaaacgattctcctgcctcagcctcccaagtagctgggattacaggcatgcgccaccatggtcagctaattttatatttttagtagagatggagtttctccatgttggtcaggatagcctcgaactcctgacctcaggtgatctgcctgcctcagcctcccaaagtgctgggattacaggcgtgagccactgcacccggctgttttttaatttaaaaaggaaaggaggctgaaattacaaccctgtcgggcacaataaaacttcagtttggtggttgactccagtttcatggagttacacanagcattgtatat

SEQ ID NO: 16472 - DNA, 365 bp, Homo sapiens
gaatgacttataaaggaacacgttttaaaatgttactgatatattaaattgtacaaataaacatgaaagcctgtttcaaatcatttaaagaaagcttactggcaaatggaaaagagtaagttgtatagcacgatacataaaaggttaatatccttaatgaataaacaacacaggagtaaggaaaacacaagaaattcatggaaaaacagacaaaagacaaggaggggacaattctttggagaatcacagagaaccaataaaggaaaaatgaagtcacactcagtaatataaagatccgcaaataacgtagtcgagtgatagcatatttttaatctcttgggttaaagatctagacaaacaaacat

SEQ ID NO: 16473 - DNA, 336 bp, Homo sapiens
gcggcacgaggtacttaatagcactgaactatacactaaaaatggttaaaatggtaaattttatgttgtgtatattttaccataataaagaagaatctcactgttatccttcaaaggaactcgctttgaacgcttgcttatgagaataggacatcaatcaaagaatgccccagtggagctaaaaattagatgtttggatgcaatttcatctcttctgtacttaccacctgagcagcagactgatgaccttctgaggatgacagaatcctggttttcttctttatctcgggatccactggagctcttccgtggcattagtagtcagcccttccctga

SEQ ID NO: 16474 - DNA, 379 bp, Homo sapiens
gctgaagcttccactgagctgacagggttaaaagatgtgattaagaagaacaagcgggagcgggatgaagatagcttgcaccaaactgacctgtttgatagtcacatgctgtggttccttatgcatcacctgagacagagacgccatcaccggcgctggcgagaacctggggttggggccacagacgcggactctgatgagtctcccagctcctcagacacatcggacgaggaggaagggccctgaccgggtgcagtgcatgccatcttgaggcctcatacctaggtggggcaggctggggctgccaacctgatcctgcctgggcaaccctttcctgtcccaggccctacattcagcagaaacgcactttggacttttt

SEQ ID NO: 16475 - DNA, 330 bp, Homo sapiens
ctcggcttactgcaacctccgcctcccaggttcaagtgattctcctgcctcaggctcccgagtagctgggactacaggcgtgcgccaccatgcctggctaatttttgtatttttagtagagatggggtttcaccatattggctaggcaggtctcacactcgtgatccacccaccttggccttccaaagtgctgggattacaggtgtgagccactgcgcctggcctcgtaatgcttctttttaaaaaactttttaaaaaatattttgtagcattacatgatgttcatatttgtctctctctctctgttttttttgttttttgttttttttg

SEQ ID NO: 16476 - DNA, 394 bp, Homo sapiens
gttttcatatccatagtgctgtttggtgagtaccggcagtacagttgaggggagcagggaacagcattgccccgtattgaaggtggagatggttacattcttcactgctttttgcattttgagttgtgtgcctataaaatttggccaaaccattttattattttgttcaaacttgactaagctgagtgatctaaaattatacagaacctaaatcaaagaagagaatgtaaagtcctttagttacttctaagaatttgaagtcaagcacgaatctaagacatagattatttttatatagctaatgaagagtatgttacgaaattgttgggtttttggggtattgagggtggcaaattttgtgaatcatgcatgcttcacagaaacaaccaggttt

SEQ ID NO: 16477 - DNA, 387 bp, Homo sapiens
gagaggctgtgatgaaagcccatccaacaagaaggggggctgggatatctgtgggactgaggcaggggcaggagcagcagctggagcacctgtaaggttgatgtctcccagcaaatcaagaagttctccaccagcagaagatggtttgcttgtaggcgcagttggaataacaggtgttatgtcatttcctcccaacaaatccaataaatcattggcctggctggtgggctgtggcccagagggtggcggtttggtctctagtggagctggttctgtctctccatttgtctgcacaatctcagtagggccatttgtggtcactttttccatgacaggcattctctcaagtagggcagacctcatgtggtcatatttcttgaaaagtgc

SEQ ID NO: 16478 - DNA, 351 bp, Homo sapiens
gaaaatgagggagatatttgggaatatgtcttattttaagatactgtcttttagagagttttcataaatggtgcagctgcttctcttggctaagcctggtggcagaattcctagtcattgaaataaatctctaattttataatacatactgataagaaacttgctatcttttcataaaagttcacagtaccagaataaatttactttatgtaaaaactaccttaaaatgtaataaatgttggatagttgaatggtttctggatagttgatgaatatttctgtatagttgaggcgaatctaaatggtaatgctacttgtgcaactgtcaatgatctagcacattttttaata

SEQ ID NO: 16479 - DNA, 400 bp, Homo sapiens
gcctccacctcccgggttcaagcaattctcctgtctcagcctcacaggtagctgtgattacaggcacacgccaccatgcctggctaatttttgtatttttagtagagatggtctactaaaaatcaggctggtctcaaactcctgacctcaagtgatccacccgccttggcctcccaaagtacagagattacaggcataagccaccgtgcccagtgccagtttcttatataagctgatttggaggaagaaaagggcctgttgtttgatgactctgtggccccaggcccagccctgtggaagcctggagtatacggccggggtttgtggcacaggcgaggggagccacaggtgaagtgtgcaggtgcgcaggtgcgcagggctcctgtgggtgagggcaccg

SEQ ID NO: 16480 - DNA, 470 bp, Homo sapiens
  misc_feature (1)...(470): n = a,t,c or g
ccacggnatactcttatgacntgantacgaatttaatacgactcactatagggaatttggccctcgaggccaagaattcggcacgagggaaagatgatatgtaaaagcaaaaacctgttaatggcatctgttcatatagttccatgtgcctttttacttaactgcactgataggcaatgtaatgaagaagtttccttttaaaacgtaaaatgtaattaaacagagtttatcttaaattggctggacccgcacagcttgactgagacatacacagctgtcttcattttgaagcacctacactagtcaagcttctttctaacccgcccttagggtttgcctgttggtctgtcttccctactgggctgttaatcccttggaggcagattgtcttgtttcccagagtttttccagcatataccatggcagacaattttctccttatctattctaactcgtaagcctcagctagt

SEQ ID NO: 16481 - DNA, 332 bp, Homo sapiens
ggcagagtaagactctgtctcaaaaaaaagaaacaaagaaatagtcagacagattaggttgatttaggtgatgatatgaactccacctagaactgagagaaaaggagagccttcctttcctcatatggaatcacaaataatttctatcaaattcggaaatgtactttggtgtggttgtgacaggttcctaaatactccccgtaagttcaaacaaataaaaagagatgctacagaagagacagaaatctgcccacggcctgtagctctcttaacttccctggctgggaggaatgcatatttcatctcaaattggcccgaaatgccaatccata

SEQ ID NO: 16482 - DNA, 354 bp, Homo sapiens
gtttcttcaagtataccgtgatccagctctgattgaaaagcacctgtgtattccttcctcttacacttcagtcaaagagtgtcttttctccttttgtagctaaatacttcaccggcaggattgatggtttccttctaccaggggagtttgtgctgctggcagccccattgttttgcttctgctgttaatgtaatagctttgggttgtagtgcaggaagatgatgcctaagtccagcgtcaggtggctggagttctttgccactgctgaaatgcaattttaataatggactgtatcagccaaatgtgtttccttgcctctttgtaaaacaaaagaagatctcagcatattaaccc

SEQ ID NO: 16483 - DNA, 519 bp, Homo sapiens
cttggcccctttgacaccaatgctatgacatgattacgaatttaatacgactcactatagggaatttggccctcgaggccaagaattcggcacgagcccagccatcaatattttttaaaactctcagattctaatgtacagccaagtttgagagttggcagtctgtagtataaggctagagaatgttataactggtgcgtgcaccccgacccatagagcttacaagccacacatagacacagtccccaatattgaaactgagtaacacagcccagtcactgtgtgactcaggagactaggatttcttacaaaataagtgggcttcattgtaggtcttcatccaggccttggagtgccaattagtaggaagaggcaagaagaaaggagcaaaggacacctgtggagcagcttgagtggatcatctggggaatgccatccccactgtagaaatgctgcctcaaaaatgttctggggggaacaggaacagggagggaggtgttgatcctggaattctgaaaa

SEQ ID NO: 16484 - DNA, 338 bp, Homo sapiens
gaacagcaataccagggtgaccaattcaaagtgtttattagcagaacttatgtacataggggagctgcagtgtatcctcacattggacaccaagacaagagatgctaaagttagtgggtgaaagtttgaggagaaagaggatttgcatagtgttaaagtattaccctcccaagatgtttattaactacaaatgggaaggtagtaatgtacagaaggaaaacacaggagaaaacactttaaccaagtgatgaaggttaatgtcaccagtaataaaacattgatatcacgcacccttggacatgatgatgcaatgtgaaggacacagcatcattactgtg

SEQ ID NO: 16485 - DNA, 275 bp, Homo sapiens
ggcaaagattcaggctaaaatcccaggcgctaagaggcacgctgagtaaactgatttcccaccggggactggacacaaacaggaatgtctggagtggtaacagctctcttcttactcattactgcaaattgattgtctttcccccctccctccagtaccataatcttagagacaaaccttaaaacagctgtttttaggctgttccttgtactcttaggatatttgagtcacttgtgtcaaccactaaagtatagagaaaagtgtattagatgtgg

SEQ ID NO: 16486 - DNA, 357 bp, Homo sapiens
gcaagattatctgggaggcattatacagcatcactgctctagtggagaagcaaatcatgcagttctcataactgggtttgataaaacaggaagcactccatattggattgtgcggaattcctggggaagttcttggggagtagatggttatgcccatgtcaaaatgggaagtaatgtttgtggtattgcagattccgtttcttctatatttgtgtgacatgttgggcagatcaagagacagctacaaaaatgaaggttttcataatgcaatgtaacatagtacttcaaagtattattcaacttcaagtttcagcaactacctacaaaagattctaaggcctagtagtatttaaacta

SEQ ID NO: 16487 - DNA, 384 bp, Homo sapiens
ggtgcataacagccctataagggagggacggtgcttatcctaatttataaaggaagaaacatttatgaggctggagaggttaagaatcttacacagagtcccacagctagcaaatggcaaagccagaatttgaactcaggtcacctggctctcaggacctaagactttttcagggcaaggacttattaatcaagaggtgtttattgaatacctgttgtgtattagatggggttaggtattgggaaatactctactggactttggagtttaaaagagattcctgtggattgatagaaatgatatttcagtgtagatgaggtttaagttgttaacatgttttctctgggttttaaaattgtcatgaaattaagtggtactcttaaa

SEQ ID NO: 16488 - DNA, 443 bp, Homo sapiens
  misc_feature (1)...(443): n = a,t,c or g
nanngctatgacatgattacgaatttaatacgactcactatagggaatttggccctcgaggccaagaattcggcacgaggtggatgactgtggtggggcctttacgatgggtaccatttgtggtggtatctttcaagcaatcaaaggttttcgcaattctccagtgggagtaaaccacagactacgagggagtttgacagctattaaaaccagggctccacagttaggaggtagctttgcagtttggggagggctgttttccatgattgactgtagtatggttcaagtcagaggaaaggaagatccctggaactccatcacaagtggtgccttaacgggagccatactggcagcaagaaatggaccagtggccatggttgggtcagccgcaatgggtggcattctcctagctttaattgaaggagctggatcttgttgcaaga

SEQ ID NO: 16489 - DNA, 543 bp, Homo sapiens
  misc_feature (1)...(543): n = a,t,c or g
tttgganaaccgctatgacatgattacgaatttaatacgactcactatagggaatttggccctcgaggccaagaattcggcacgagaccaggtgtgctaagagcctacagagagggcagctggccaggtattctgggctgtccccaagggagccaggggccagctatttcctgggtgttttctaccctgacctcataaaattagcttcactcattttatttttttaaaatttataggtgtaaaacaatgcattggatctctgtgggctgttgtggacagatcatcaaggcctattgttgagtgaaaaaaatgcaaaacagcaaacatacgtatttaagtataaatatgtgtataaatgatagaaaaggtctcgggggcatagacatcagattggcagtggtgattagttctcctgggagagacctagggccagagagtagacaaagtgacacatgttttaaataaggagaatatattggcattttgtataattaaaaattgataaaagtaggccagcccagtggntnatgcctgtaattccag

SEQ ID NO: 16490 - DNA, 462 bp, Homo sapiens
  misc_feature (1)...(462): n = a,t,c or g
tttgagacctngatgcctgantacgaatttaatacgactcactatagggaatttggccctcgaggccaagaattcggcacgaggaattactgagtcaatgtatatctatttcaaaaattttatttgatacatattgtcaagttgcccttgagaagggttgttagtttatactaatactcgcatctccactccaatgccaccttctttcattaaatggtaggacctctggtttctttggccgactatgagcctccttgactttactgggtaaaacagccagttcaaaggccactgcacatggttaaggcttctttatcctctggtgtgctttattttcctcaaatcctagatgggagattacctcctcatatgctgtgatatcttaaactgggttcagggcagaaaggcagcattccccagccagttcttttactagcatttagactttttctcagctgggaa

SEQ ID NO: 16491 - DNA, 487 bp, Homo sapiens
  misc_feature (1)...(487): n = a,t,c or g
ttggnacnttnatgacccgattacgaatttnatacgactcactatagggaatttggccctcgaggccaagaattcggcacgagcaacctgcttggcaagtttgaactcacaggcatacctcctgcaccccgaggtgttcctcagattgaagtcacttttgacattgatgccaatggtatcctcaatgtctctgctgtggacaagagtacgggaaaagagaacaagattactatcactaatgacaagggccgtttgagcaaggaagacattgaacgtatggtccaggaagctgagaagtacaaagctgaagatgagaagcagagggacaaggtgtcatccaagaattcacttgagtcctatgccttcaacatgaaagcaactgttgaagatgagaaacttcaaggcaagattaaccgatgaggacaaacagaagattctggacaaagtgtaatgaaattatcaactgcttgataagaatcagactgcg

SEQ ID NO: 16492 - DNA, 453 bp, Homo sapiens
agatggaggagtacgcgcgagagccttgcccatggcgaattgtggatgactgtggtggggcctttacgatgggtaccattggtggtggtatctttcaagcaatcaaaggttttcgcaattctccagtgggagtaaaccacagactacgagggagtttgacagctattaaaaccagggctccacagttaggaggtagctttgcagtttggggagggctgttttccatgattgactgtagtatggttcaagtcagaggaaaggaagatccctggaactccatcacaagtggtgccttaacgggagccatactggcagcaagaaatggaccagtggccatggttgggctcagccgcaatgggtggcattctcctagctttaattgaaggagctggtatcttgttgacaagatttgcctctgcacagtttcccaatggtcctcagtttgcagaagac

SEQ ID NO: 16493 - DNA, 341 bp, Homo sapiens
ggagagagctagcaccatgaaataccctgaatctacaaaaaaattaaaaccacaattatctgggtgtggtggcacatgcttgtagtcgtagctacctactcaggaggcagaggcagtaggattgcttgagtccaagggttcaaggttacagtgagctatgatcacaccactgtactccagcttgggtgacagagtgagagaccctgtctctaaataaatgaataaataaaaattttaaaagtgaaaaagctttctttttgccctattttttgaaccccaactaaaaggtaattatatccagaaagatagaattaaactatttgctttaggtgggttatgga

SEQ ID NO: 16494 - DNA, 390 bp, Homo sapiens
gcggcacgagggagatcaaaggaggttttactgaaaaaaaacttaaccaaataagaaaaaaacaatgtaggaatggttttcagttattaactttgctaaataattagtaacaaaaaattacccagtaaaagaataatttaatgttttaccattatgtttgttaaacaataacccaaaagcatgttcaccagtcctgtatcttctttctcaccccattctgacaagtttctcaaaatgcatcagtctgtatattcatccctatttaccttcacccctattcatccacctgcccctatccttcaacctctactgaagaccaggaggagaattgtttttctcctcaccattaagcggtactgagcacatctgttttatcctgctgtaacctca

SEQ ID NO: 16495 - DNA, 339 bp, Homo sapiens
ggtgcaacaattcttttacagatatggaacttatagaagcctatcaaaaaaaaaatctagttcctttctttccatataagcaaggctagttcaaaacacaggggcccaactaaaagaggttcaatataagttattttttggttttttgttttttgagtagcgtctcactctgttgcccaggctgggtacagtgctgtgattatagctcactgcaacctcagtctcctgggctcaagtgacccttttttttcagcctcctgagtagctgggactacaggcatgtgccaacatgcctggctaatttttgatcgttagtatgagatgaggcctcgctatgtt

SEQ ID NO: 16496 - DNA, 368 bp, Homo sapiens
gcagaagcctagagctgtgaactcttcctttgcaaagcttgtctccagtaaaacctcacgtagacacaactccttgagtgccttgcccactactctggtctcagaatgccctgggtgtgcctgtacacaataggactgttaaggtgcagtgcacctgacttccctgtggctgcattcaggggcagggtagaggtatatagagtatggaggcacgccgggagctatttttcttagcgttaattttcgaccaaatacaaaacagcagagaaggaaacagacaacttgcttgaaatatttattccttgcataatatggttttcatctccctagagaacactaacgggatgggcaaagcctgacggaatggc

SEQ ID NO: 16497 - DNA, 516 bp, Homo sapiens
  misc_feature (1)...(516): n = a,t,c or g
ttgnnacntcttgactgattacgaatttaatacgactcactatagggaatttggccctcgaggccaagaattcggcacgagtgagatggccagcaatagtttaactatacatggaagaaatttcaaagtacacaaatatatcccagtcactccttaacaagagctcagaaatgtctactgccactatatggttacaacaggaagggaaagtacacagaaggtgcagctgaaatggaaacagatggtagtcttaactgactatggtaaaaatatttttgtggccgagcatggtgggctcacgcctgtaatcttagcactttgggaggccgaggtgggcggattgcctgagctcgggagtttgagaccagcctgggcaacatggtgaaatcccgtctctactaaaatacagaagattggccgggcgtggcggcatgtgcctgtagtcccatccatctacttaggaggctgaagcgggagaatcgcttgggcctgggaggtggaggttgcagtgagccg

SEQ ID NO: 16498 - DNA, 554 bp, Homo sapiens
ggacagggttctggatgtggtggagaggagcctcagcaactacccctttgacttccagggtgccaggatcattactggccaagaggaaggtgcctatggctggattactatcaactatctgctgggcaaattcagtcagaaaacaaggtggttcagcatagtcccatatgaaaccaataatcaggaaacctttggagctttggaccttgggggagcctctacacaagtcacttttgtaccccaaaaccagactatcgagtccccagataatgctctgcaatttcgcctctatggcaaggactacaatgtctacacacatagcttcttgtgctatgggaaggatcaggcactctggcagaaactggccaaggacattcaggttgcaagtaatgaaattctcagggacccatgctttcatcctggatataagaaggtagtgaacgtaagtgacctttacaagaccccctgcaccaagagatttgagatgactcttcattccagcagtttgaaatccagggtattggaaactatcacaatgccatcaaagcatctgg

SEQ ID NO: 16499 - DNA, 523 bp, Homo sapiens
  misc_feature (1)...(523): n = a,t,c or g
tttgganatntgaaaaccgttatgacatgattacgaatttaatacgactcactatagggaatttggccctcgaggccaagaattcggcacgaggatggactagaagaggtagccttaaaataagtgagcagctagggaacatgctcaatgggcaagagaaaatgaccactgaccagtcaatacctgtgtcagggggagttaccagtacctatatttatttttaaagtaattaaaaagtagaacacttacaaattttccacctatacatgccatgtcttcctcggggacagtagccacatcttatatatttcccaccatgcataggacccagcacacagtgaagccagtaggcactcagtgttgaatgctcataccaggttttctgcttcctgtagttaccctgctgagcactgcttccatcacaggtgcactgggcctcaacacttctgccatttccccatttgtctcctccatggacactgtcaacaatggctgcaacacctgctctgtgccaaagccaggg

SEQ ID NO: 16500 - DNA, 170 bp, Homo sapiens
gaactcatttccaaggccatcttcctactccaaaacaaacatggtgaatatttttattaatccaaaccacatttgaaaagtgcacattcaataatgaccacttcatcacttcccttctgcctccccttgctgccctaaacaattcagttctaaagccaatggctggagcc

SEQ ID NO: 16501 - DNA, 394 bp, Homo sapiens
ctctggaggaacgctgagctgagcagcaccgaggacagcgcccggcagcgcccgcgcccaggtctccctccgcagccctgactcgcgcacacgctgagcttttgctcactccccttcgcgcggacacagacacacgcatattcacacacccagacacacaccccgctgtacaatggcagaatcccacctgcagtcatccctcatcacagcctcacagtttttcgagatctggctccatttcgacgctgacggaagtggttacctggaaggaaaggagctgcagaacttgatccaggagctccagcaggcgcgaaagaaggctggattggagttatcacctgaaatgaaaacttttgtggatcagtatgggcaaagagatgatggaaaaatagga

SEQ ID NO: 16502 - DNA, 495 bp, Homo sapiens
  misc_feature (1)...(495): n = a,t,c or g
tttgaatacccttttgacatgcctacgaatttaatacgactcactatagggaatttggccctcgaggccaagaattcggcacgagggcaggcacctgtaatcccagctactcgggaggctgaggcaggagaatggcgtgaacccgggaggcgtagcttgcagtgagcggagatcacgccactgcactccagcccgggtgacagagcgagactccgtctcaaaaaaaaaaagaaccaananttttaaaatatanatagttaactgagngnccccatcttgcttnatttcatttttgtaancntaatcagnttntgtcaaacttaggctcaaaacttntagncngaggaangtntntaacncagggagttttgttttntaacncagggattttntaaagtatctgtggngncaaaggaaattntntccagtctagttcanaatagaaatgatcataataatcatttntcaaacctcctcattttatataacaggaaa

SEQ ID NO: 16503 - DNA, 371 bp, Homo sapiens
gtcttatcaatccagatgaactgagggacatctgttggtctatgtataacttttaaaattggtatagtatctacagagtgtataatttaaactaaccacaaagctttacatcttcattttgactgttccatagcagaataaagcacttgaaaggaaacaagactccctttcacacatggattattataagtttcaatcctggtatctgtgcttgatttttatcagttttgtgtagatttttatgtttcatattttaaatttaaatcccacattgtaaagtttgtacaatttgtcctgaagctttgtgtttggctgcacctgcataagctgctacaaatagaataaagaatttcatagcctgaaaaaaaaaa

SEQ ID NO: 16504 - DNA, 438 bp, Homo sapiens
aaccgctatgacatgattacgaatttaatacgactcctatagggaatttggccctcgaggccaagaattcggcacgagggatttatagaaagattcaaaattatggaaatcccaaggcaacaaacttatttttttaaaaaaataattttgtagttgcaggatgtcagtccctccccttttcactaatggttagagacttctctaaagagagagccgtttggaggttcttgtaggccaggcaaccaggagtcctgaactgagaaaacaccagcagcgcaaagaagcagagggatgattagcttctagccccctgaactcctcaggattgcagaaaggcccagagaccatgccttgtaccatggtatgccaaacctatttttgattgaaagtgttggagagaggggagggaagagacaatacatttatttttagagagta

SEQ ID NO: 16505 - DNA, 377 bp, Homo sapiens
gaaggtaatgccttcttcagagaatccagaatatgattaatctttgtttggtgacacaggatcatcaacatgactataaattacttgctctgctggaacatgagaatactaactccaaggaaaaggagtggcagcagttactgggtaggagctgggtttctaccaccacaaagagagctggatggggagttactactaaagcacagggtgcaatgagaatcaaaaggaagagactgctgaagttctcacaacaaggaaagcacagatataaatacactctggagagcccaaggggaaatccaagttacagagccaggtctgaagtcaagagctgtggccgactagagtcaggatctgagttggagataaattgatgg

SEQ ID NO: 16506 - DNA, 273 bp, Homo sapiens
gcagcactcttatctacataaggatgaaggtaatccggagtgagcaatggagtggctgccatggaaggaagaaaagctgccatttcccttctggacactgagagggcaatctttgcctttatctctgaggctatggagggtcctcctccatctttctacagagattactttgctgccttaatgacattcccctcccacctctccttttgaggcttctccttctccttcccatttctctacactaaggggtatgttccctcttgtccctttccc

SEQ ID NO: 16507 - DNA, 355 bp, Homo sapiens
ggtgcaaagggaaaatcagtaagtccccattggctcttttaaaaatgcaaatgttttactcttttctagaaaatgaatgggatcaatggcttttaactctaggctttccccccgtatgctttaaaagcaagataatattttgttccctccttactcaactccctggttagtgctatgtctccttctggaatgaccttccttatgtttgtccacgtgacacagcccttaaccatctatccaggcccgatttcatattcctttttatagctttccaaatattttctcatctgccacctgagagtatttactccatcatttgtattcctgttttacttttaaaaataaagccaggttg

SEQ ID NO: 16508 - DNA, 550 bp, Homo sapiens
  misc_feature (1)...(550): n = a,t,c or g
ttttgannccctttgaaanccgctatgacatgattacgaatttaataccgactcactatagggaatttggccctcgaggccaagaattcggcacgagaattctacaacctgtagattaactggtaaaattaaccatattcaaccaaaattgtataacccagcaagaatggaagaatgggtaaagtctacagtccatttctagaactggtcatgagaactcatgtttatgatgatggacttttgatcaggtggagggacccaaaccttcagttctgaagctcattagtggtcctacctgtgtgacaggcatttactattggactggcagtcccaggacaaactccaggaatccccccatgtccatctctactcctgccctcttttacgtagcagcaatcatattttcccttgatagggttcatcattctagatactccgatgacttctttataatgagcctgaagtggcctggtggctgctcagcttcagttcagttgaatagctactacgtctttgaggatgtgctccttgctgggggactaaactctcg

SEQ ID NO: 16509 - DNA, 363 bp, Homo sapiens
gccacttgagatctactgaatcagatcctctggatgtgaggtccaggaatctgcagtttaataagaagcccagataactcctcagtatcctaaacttgggaagcattatggtaaagcaggaacagcaacctaagagaaatgatacagcaaatattcctgtattctttagtgtgtttatatttaggtagctttgaagtgtggggcagacatccacttactgatcctgtgtatgggacccactgtgatgtgtattgctggaagacaatagaaagaccaagttctttacttcactactactttaaaatggtaatacttgaggaagaagtcacacttaaagtggggtctagggaccacctcaattat

SEQ ID NO: 16510 - DNA, 340 bp, Homo sapiens
ggaattcaagaccagcctgggtaacagtgagacccgtctcttaaaaaaacaaaaaccaaacaaaaacccagccgggcatggtggcatgcgtctgtggttccagctacttgggaggccaaggtgggaggattgcttgagtctgggaggtggaggttgcagtgagctgaggttgtgccactgcactccagcctgggtgacgggagtaaaaccctgtctaaaaaaaagaaaaatatactgcagataattttgatgaggagcgggagtcgacgcggccgcgaattccagatctatgaatcgtagatactgaaaaaccccgcaagttcacttcaactgtgcatcg

SEQ ID NO: 16511 - DNA, 501 bp, Homo sapiens
  misc_feature (1)...(501): n = a,t,c or g
gtataatctaaaagttttcttccctttctgattggtattcattttggcttctaataatttagcatttgcctactctttaattaatcctagaaatatgaattcactgtaggggttcactatttagggtatgctgaggtaaaaatcttttcaagagagaaagcctttagatactacttatcatctgtgaacctatttctgtcagatttaattgataatgaattaagtttactccaaacaaacagtgagagttaagcttcctggttcacgtttttcccctatattaagccaagggaaattatttttacttcttagttataatccagcatcttaggagtagtaaagcatagattaagtttccagttcagttttagntattttctattttttctttgntcatacttaatttagaataaagttaattttatacatgcaccctgccaaaagcatctnagaacaattnnantaaggtattttaaacctcncccgcttctaaaatccaat

SEQ ID NO: 16512 - DNA, 384 bp, Homo sapiens
gcacgcacccccacgcccggctaatttttgtatttttagtagagatggggtttcaccatgttggccaggctggtcttaaactcctgacctcgtgatctgcccactttggcctcccaaagtgctgggattacaggcatgagccaccgcacccagccaagtaatcctatattataagagtctaagggtctagaggacaaaaagtctgtaggtctttacattgtcaagaacaatgagattgtaagtatttttggatgatagtaaatacctctccctgactcttagagtaaactttggttagtaatgtaatggttaatgtaaagtgctagactttgaagaaatgtaagagtgtggaaatatttctagactcatcaactctacttttaa

SEQ ID NO: 16513 - DNA, 434 bp, Homo sapiens
gggctcatttttgtatttttggtggagatggggtttcgccatgttgaccgggctggtctcgagctcctgacctcgagtgatccgccaccttggtctcccatagtgctgggattacaggcgtgagccactgtgccctgccaaaattgacatgcttttctgaatggtgtcttgctatttaggaaattttatttttaatggtaaaagcatatttgcttgaagaaaatgctgtggtgtgcctttttctctactaaactatccccgttcctaaatctgcatagaaccatgaaaaatattatttttaacttcctaggcctttttgcttatgttcattaagtcaactcaaattgtcatgaagcaactcctgggtatactagatacttcgctgtttttaccccacttccattgtacgtttagcttcaaacataagattcatt

SEQ ID NO: 16514 - DNA, 419 bp, Homo sapiens
  misc_feature (1)...(419): n = a,t,c or g
ctatgacatgattacgaatttaattcgactacctatagggaatttggccctcgaggccaanaattnggcacgagaagaaaaatttatttctgaagcaagttaccaatcttctctggaagtctttaaaatttagattacatatttattcaagtaatggaatatggaagccatttcagacaattttaaactcctcaaacttggtgtaacaatacatacatatatttgtattttgaagctgtctgctggaatggtctagaaataataccccagtagcaacataagcacatttatcacccagatactggtttcttttattatttattattttatttatgtatttatttaatagagacgaggtcttgctatgttatttggtcatgtacttatttatttaatagagaccaggtctcactatgttg

SEQ ID NO: 16515 - DNA, 419 bp, Homo sapiens
gaaactccaagagtctctcaccaacagcacttgcccgaggccatattcttggagtgaggttagttgcatcccacatattctccccatagacaagtttctccaccaatgaaaagttgtttctgtttctgagtaccgccaaaatcaagaggttccactttatagtatttcctccaatcttgtccatagctaatcaaatttaagtaccaaggagcagaaaggattacagggaagccagatgctgtgactctactgagttcctcaggatatgcgctgtctttccatacttcaactattgtgcccggcgcaagctttgctttatcatcaaaaacctcctgccagacaatggatcccttgtttatggttgcaataatatccaaaaccttttgaatgtagaaagattctagtttcttaaaatctgc

SEQ ID NO: 16516 - DNA, 236 bp, Homo sapiens
tttgattacccatccgacatgaccacgaactaatacgactcactatagggaatttggccctcgaggccaagaattcggcacgagtaggaaaatgacatagccttgtcaaagagaagtcagctgggtgtggtctacagaagcttgtaggataataagataaaggagataacagattttcttggtttgtttattcaatcattatttcatccattcattcaatgctttttttttttttt

SEQ ID NO: 16517 - DNA, 343 bp, Homo sapiens
gagagtagctagagtgatctttaaaacacaaaacaaagccaggggcatgtcttttccctgcttaaaccttttaatgacttccaattctacatagaaaatatttaaactccttactctgccttaaacaccacatggaatctggcttctgcccacctgtttagctctccaacctcattccccgttcctgtgccccttgtcactattacccagccctccctggctctgtgacagtttctacgacactccacgctctttcccaccccgggagctttgcacctgttgttttctttccctgtctggctctgagcctggctgctcctcatttttcatgcttcagtttaaa

SEQ ID NO: 16518 - DNA, 328 bp, Homo sapiens
gatttttgtctctttaatcaaaagttgtgttaaataagaggaccatggaggtaagagtgatttgattcagttcttgatttaggacaggtaatgtcttagattcatttcttccaaaaattaatttaattttgtggggagaggaagagtggcagtaagaaaaaagaagtgctagatgttatgttgtgtgtaatactaggggtcgacgcggccgcgaattccagatctatgaatcgtagatactgaaaaaccccgcaagttcacttcaactgtgcatcgtgcaccatctcaatttctttcatttatacatcgttttgccttcttttatgta

SEQ ID NO: 16519 - DNA, 403 bp, Homo sapiens
gcagccgggcaccctagagaaactcagagggcagagtggcagccaggcccacatgtctctcaagtacctgtcccctcgctccggtgattatttcttgcagaatcaccacacgagaccatcccggcagtcatggttttgctttagttttccaagtccgtttcagtcccttccttggtctgaagaaattctgcagtggcgagcagtttcccacttgccaaagatcccttttaaccaacactagcccttgtttttaacacacgctccagcccttcatcagcctgggcagtcttaccaaaatgtttaaagtgatctcagaggggcccatggattaacgccctcatcccaaggtccgtcccatgacataacactccacacccgccccagccaacttcatgggtcactt

SEQ ID NO: 16520 - DNA, 541 bp, Homo sapiens
  misc_feature (1)...(541): n = a,t,c or g
tttggnnnntttggananccgntatgacatgattacgaatttaatacgactcactatagggaatttggccctcgaggccaagaattcggcacgaggtggctcacacctatagtcccagaactttgggaagctgaggtgggaggattgcttgcacttaggagactgagaacagcctgggcaacatggcgaaaccccatctctacaaaaaatacaaaaattagctgggcattgtggtatgtgcctttagtctcagctactcgggaggctgaggtgggaggatcgcctgagcccggggaggtcaaggctgtggtgagccatgactgtgccattgtactgcagcctgggtgaaaaagcaagaccctgtatcaaaaatagtaataataataaaataaaaataaagcttgagccaccgcgcccagcctaagaaggaactctttttaaaaacaattacatatatatatctttagttttattgccattctttaattgctgtacacatctcaagactcttgaattgctgcccnttggggnaaaaaaaaaa

SEQ ID NO: 16521 - DNA, 374 bp, Homo sapiens
gggaattgtccaaaatttctgctgcttggattttaaaatacaggtggatgaattttaaaaattttggatacagtcaatctggtgaccttgtttgttgaaaatgtcttcaatcctgaaggaaacagaagggttttggcataatggccttacttttgtaaaaagggaaatgtccacaggttttatgatgtgttatgatcaagcagtaattgcagacatgaacagtcttctgactattgaactcaaaccactagatcagaaatgctcagggttctaggcattttagattaagtcataatttttcattttgtaacttcttaaattatacttgtcagaaatgtgttagcatttgtttagaatttagcattgctcaggcc

SEQ ID NO: 16522 - DNA, 483 bp, Homo sapiens
  misc_feature (1)...(483): n = a,t,c or g
ttgaaacccctntgacatgattacgaatttaatacgactcactatagggaatttggccctcgaggccaagaattcggcacgagcaaaaaattacttaaaaaaaaacaataaacctttttgagataaaaataaatgtaagccaggcatgctggttcacacttgtaatcccaacacttcgggaggctgaagtgggaggactgcttgagtccaggagattgacaccagcctgggcaacatagtgagaacctgtctccagtaaaaaatttaaaaattagccaggcatggtggcacacgtctgtagtcccagctacttgggaggcagaggcgagaggatcacttgagccttgaagttcaaggctgcaatgagctgtgattgtgcaactgcactccagcctgggcaacagagggagatgctgtcttaaaaataaataaaagtaaatgtatttacagaatcctaattaagaaaacgacaattgcggctgg

SEQ ID NO: 16523 - DNA, 427 bp, Homo sapiens
gcatctacataattagagaggacagaagtgatcacgaagacctaggggacagggagaggcctcaggtaatgcaaaatctgtacataatgattgaggtcaggagaacagatgctcttcccgggtcagttttaaggctgaaatgtttcaggaaaactgggaacaaagcatggttggaaatagcaggctaagctgatgcatcaggagactgcagatctcagtgttaccttgcctgggaacaggatgggccccaagtatggctgagaatgcaagtctcatgggtatatgtttaatgaacctagttgggagatgttaggaggaagactggttctgatgtgaaagtttccttccaaagaataggccaacctaactgcagcagtgctgattatgatggaaatttcctattttgattcttcatcaaaagaaagaa

SEQ ID NO: 16524 - DNA, 353 bp, Homo sapiens
gcagagaacatgtattagtcaatggtaagtaagatactctcatctaagaaataacatcacctcttctaatgaagttctaagaagagagggaagaaaaagtcttgggagctagtcagggaatagtgtgtatttgcaattacctaaactgaactctaccattactcctaacccagttcctcctcctgtgttttacatgattaatgccacccctgcctcaatgaaccaagatcagctccatcactgggacctccccattctgcctgtgcaatatttttcttttttatttctccttctaatattactgttattgctccagtaaaggagctgtaatatattttacctggactgatacc

SEQ ID NO: 16525 - DNA, 502 bp, Homo sapiens
  misc_feature (1)...(502): n = a,t,c or g
gaattccatcttcccctctcctcttccatttattcaataaatgtttattgtgtacctcctatgtgctaggcactggggatgaagggataaacaaagcagataaaaaatctcctgctctcgtggtaactgaggtgggggaagtggagggagccagagttaagtcaacagcatgtgagatggcttcagatgctctctagaaaactaagcagaaaggagggtattggcagttccacatagagggccggggaaggtctcaccacgaaggtgacatttaagtggaaagaggagagtgaactattgtgggaagaatctcgcaggcagagggaaagcaagttccaaggccctgcactgggacacagctgaggtgttcaacgcatagcgaggaggccagcgtggctggacaganggaaggaaganaccaaganatnaagttanagacgagattggtgggcctgaantgcananannttttacttngcttggaattttncccttcttcccc

SEQ ID NO: 16526 - DNA, 428 bp, Homo sapiens
gattttgttgtgtgatgttcccagttcctagacagtaatttaacttagtttctggtaacccatagtttagaaggtgcggcagctgtcatgaggccccattgtgaattggaggtgtcttaggtgggtcaccctgcggtcagcccctcactggggacactggggcccgctgggttattctgtggctgctctggtgttgggtctggagctggaatagaacccggtcatgcttctgtcttctctgcagtggcctaggttgctgggtctgtttaatgccaaagcctctctgcctagacagacactgctgagatgcaatgtgctgtgatatttaatcttcaaaggccagttaatcccccagccctccactgccaggtactgggattttaagaacttggcttgacctggggatgattttagtggctagcttgact

SEQ ID NO: 16527 - DNA, 497 bp, Homo sapiens
  misc_feature (1)...(497): n = a,t,c or g
gaagngnagannnnnannnngnngnnncagacnannanannngtcnntcnncngttgaaaccctatgtttggaatccanttaatacgactcactatagggaatttggccctcgaggccaagaattcggcacgagccattttgagccttagaagagtcaagcctcaggacctggaaactttgtgtctggggaagactgtttggcatggaatagggaagggattcctattgacactgctcgggtgcacccagttctcacatgtgcagtcatgccgttctctgatgcatacggccactgcagatgtgaggggccctgccttcctcagtagggagtcaacatgcccaagtcatttgcacctttacctctcacatggatgctcccaagggttagggactgcattgagcaggcccacctgcttcccagaacctcctcactagggctgagcaccttctctgagnagagncttcatccttagcaccacagacttctgaggtcctg

SEQ ID NO: 16528 - DNA, 85 bp, Homo sapiens
ggggatttaagcctagtctggctgtggaatctgtattcttaatgaccatgctatactgcttaagattaaccttttacttcagttc

SEQ ID NO: 16529 - DNA, 511 bp, Homo sapiens
  misc_feature (1)...(511): n = a,t,c or g
gcctggttgtcgcgtttgttttgtttgcatgataggaagacccaaagatttttgtaggcaaatagaaactatctggatgaccagaaataactgagcacataaatccaaattgagacacaatcctggcaggaaaagggaggagtggaattgtaggtaccagtggaagggttagccctggcaaggtggggagacaagagatacaccctccccagagattggaggggaagggaaggtgaacatggaagagaaattttgaggtagaggaagaagatataagagcactcacaccagaggccctcaattctatcgagaaaatatggcacctgcaagggtaaagagggtgtgggggtggcaaatggggttggagaattagaaaaatagagaaggtcagccaggcacggtggctcacgcctgtatcccagcactttggaaggcnaggtggcagatcacctgaggtcaggattcagacaacctggcacatggcnaatccatctcactaaatacaaaatta

SEQ ID NO: 16530 - DNA, 324 bp, Homo sapiens
cttaaacaaacaaacacaaaaaattacttcttgtgtcctaagtgctgtgcacttgttccaaaagaatgtgaaatccctcctcactgcagcagcattgagtttatctgctttacattttagattatgtaagattctgtaggagaaaagatttcatctatgttagaaaagttttcaaacaaccacccaaagtcaccctcttattgtatggaagttatttgctctgttataattaggtcaaaaggtgcttcataatcagtttaactaactttgatcagtgtaaaccaatagtgccaactgaactctgttcaataatccctgaggcgg

SEQ ID NO: 16531 - DNA, 391 bp, Homo sapiens
ctaagtgacagtatcactctaatataatatggatcagagcatttattttggggaggaaaacagtggtgattaccggcattttattaaacttaaaactttgtagaaagcaaacaaaattgttcttgggagaaaatcaacttttagattaaaaaaattttaagtatctaggagtatttaaatccttttcccataaataaaagtacagttttcttggtggcagaatgaaaatcagcaacttctagcatatagactatataatcagattgacagcatatagaatatattatcagacaagatgaggaggtacaaaagttactattgctcataatgacttacaggctaaaattagttttaaaatactatattaaattctgaatgcaatttttttttg

SEQ ID NO: 16532 - DNA, 309 bp, Homo sapiens
gaaagtagaactaaatgtaaatatataccaagagttgccggtagtcaggagtctcgtgcagttgaccttgggctgctcagagtccctgctcaaggtcactctaattttgtcccaaatttgaacaaaccacttttattatttcaccataaatctcatacttttggccaaaggcttcttcggaacttattgacagcgatgacaaagcccctgaaggttttcttctttacgagggagtaactcttccatcagcacagtcttccctgcttgtcagagggaggtctctctttcttgtgcttcctagacttgcct

SEQ ID NO: 16533 - DNA, 399 bp, Homo sapiens
gggtatttaggccatcacatatggtggggcccaagagagccccatatgcacactgcctgcctgataccaggaagaaccatgtgggaataggtgggccaagagccctcccctttctccatccctccagctaggaggaaatggagcaagatgaacaggcagccacgaggtgggtgggagctggcagtcttggtggcggcaggggccgcgggccctgaccacccccctctggtgggatctgaggcactctctcgaatgccgtcacacctggcagcctggaagccacaggcatccggccttgcccaggcatctcgcctgcggtctgaggaagggaacagaaggtcatgagttcagggtcagacgcagccgctcagcacaggaggggtggaggggaaatgagag

SEQ ID NO: 16534 - DNA, 325 bp, Homo sapiens
  misc_feature (1)...(325): n = a,t,c or g
gggtgaccagaggccagggttccagaaagggctggcacctgaccatgttggactagggtgacagggactgggtccatgtgccacaatccacacgagggtgtcccatttgtccctctacctccccccacggaggtgggaacctggggctggtgagggtgatggcacctctctgcagggcccccagattcctgatgcataaggaaacagcgcccactcgtcccacttctcaggtcgttgaacaccancagtcacggancaccgaggcatgatccacgcagcatgacanncaancaggcagggganctgggncnnagccggnagccct

SEQ ID NO: 16535 - DNA, 671 bp, Homo sapiens
gctcgctgcaggggtcggaggtcagggcgagcgtctcgcaggccgtaggaggaagatggcggtggagtcgcgcgttacccaggaggaaattaagaaggagccagagaaaccgatcgaccgcgagaagacatgcccactgttgctacgggtcttcaccaccaataacggccgccaccaccgaatggacgagttctcccggggaaatgtaccgtccagcgagttgcagatctacacttggatggatgcaaccttgaaagaactgacaagcttagtaaaagaagtctacccagaagctagaaagaagggcactcacttcaattttgcaatcgtttttacagatgttaaaagacctggctatcgagttaaggagattggcagcaccatgtctggcagaaaggggactgatgattccatgaccctgcagtcgcagaagttccagataggagattacttggacatagcaattacccctccaaatcgggcaccacctccttcagggcgcatgagaccatattaaattctatttactatttggtgaatttatttttccgtcagttattgtaaaataaacatactcttcttcctcccctgagtattggccttaagcccttaaattctaaacaaattataatgcatcatctatttaggagttagatttggatgtgctattg

SEQ ID NO: 16536 - DNA, 352 bp, Homo sapiens
cgaggtggggggaggtgagagggatagcattaggagatacacctaatgtaaatgaccagttaacgggtgcagcacaccaacatggcacatgtatacatatgtaacaaacctgcacgttgtgcacatgtaccctagaacttaaagtataaaaaaaaaaggaactcctatataattagtaggtacctgctgtccaacatggctgacaatataaatacaaataatgaaggtgaaaatttcatagattcttattagaatatggcttagtattacacagatttgtatatacataggtgacatattttacccaacgtgacagccacactattagaagtcctattcaataccataatta

SEQ ID NO: 16537 - DNA, 338 bp, Homo sapiens
ggctcggcgtggtggcatgtgcctttagtctcagctacccaggggggctaaggctgatgcaggaggatcccttgagcccaggagattgaggctgtggtaagctatgatcccaccactgcattccagcctgggtgacagatactgtctcagaaaaaaagagacaacagaagagaagaagtgggggtggcggcggggcagggagggagaaagagaaaagctacctagtcctatcactcgtctggtgccatgcccctcacagcaatggcaggccatgaggtcagcagacaacacctccagtcattcacactggtgactgcaatactcagttacctattttg

SEQ ID NO: 16538 - DNA, 443 bp, Homo sapiens
tgattacgaatttaatacgactcactatagggaatttggccctcgaggccaagaattcggcacgagagggaagcaggcgggttttacacggccagagcaggagcaagagagagactgggggaggtgctacacacgtttaaacaacgagagcttggctgggtgcggcggctcacgcctgtaatcccagcactttgggaggccgaggtgggcagatcacctgagattgggagttggtgaccaccctggccaacatggagaaaccccgtctctactaaaaatgcaagattagccaggcgtggtggcgcatgcctgcggtcccagctacttgagaggctgaggcaggagaatcgcttgaacccgggaggcggaggttgcaacgagctgagattgcgccattgtacctgggtaacaagagtgaaactgtctcaaaataaataaacaag

SEQ ID NO: 16539 - DNA, 521 bp, Homo sapiens
  misc_feature (1)...(521): n = a,t,c or g
acccctttgacatgacnacgaatttaatacgactcactatagggaatttggccctcgaggccaagaattcggcacgagggaattactaggacctataatgggtagttctatgcttaacttcttgaggaactgccaaactgtgttccacggtaatggcaccattttatgtgcccaacagcagtgtacgagggttccagtttctccacgtcctaaccaatgcttgttattttcaatttttttaaattatagtcaccctagtgcacatgaaggtatctcatcatggttttgatttgcatttctctaatgccaatgatgttgaacagcttattggccatttgtatgtcttctttggaaaaatgtgcataaaagtcctttgcctatttctttaattgggtaaaaaaagaataccaaatgcataagtgccaaaattgagaagtttgattttagtaaagtagttaacaaggagccactctgcaagttttcatgtgggaactgacatgatttgggtgacattttcaaaa

SEQ ID NO: 16540 - DNA, 337 bp, Homo sapiens
gcgaggccttcctccacgtgtgtaaaaaaaggccatgactatatatacaccctgtggcccagtaatctcacaccttaaaacttacctcaaggaaaatgtaagattaaatgtccatgtggagggccaggcgcggtggctcacgcctgtaatcccagcactttgggaggctgagctgggcagatcattgaggtcaggagttcaagaccagcctggcaaacatgacaaaacactgtctctactaaaaatataaaaattagccaggcatggtaacgcacttctgtaattccagctactcaggaggctgaggcatgagaattgcttgaacccaggaggcaga

SEQ ID NO: 16541 - DNA, 477 bp, Homo sapiens
  misc_feature (1)...(477): n = a,t,c or g
ggtgnnnnnctttganacngctatgncatgattacgaatttaatacgactcactatagggaatttggccctcgaggccaagaattcggcacgagcaccatcaccaacgacaagggccgcctgagcaaggaggagatcgagcgcatggtgcaggaggcggagaagtacaaagcggaggacgaggtgcagcgcgagagggtgtcagccaagaacgccctggagtcctacgccttcaacatgaagagcgccgtggaggatgaggggctcaagggcaagatcagcgaggcggacaagaagaaggtgctggacaagtgtcaagaggtcatctcgtggctggacgccaacaccttggccgagaaggacgagtttgagcacaagaggaaggagctggagcaggtgtgtaaccccatcatcagcggactgtaccagggtgccggtggtcccgggcctgggggcttcggggctcagggtcccaagg

SEQ ID NO: 16542 - DNA, 539 bp, Homo sapiens
ggcatcatggcgtggcaagagccttcgggttcagaagatcaggccttctatcctgggctgcaacatccttcgagttgaatattccttactgatctatgttagcgttcctggatccaagaaggtcatccttgacctgcccctggtaattggcagcagatcaggtctaagcagcagaacatccagcatggccagccgaaccagctctgagatgagttgggtagatctgaacatccctgataccccagaagctcctccctgctatatggatgtcattcctgaagatcaccgattggagagcccaaccactcctctgctagatgacatggatggctctcaagacagccctatctttatgtatgcccctgagttcaagttcatgccaccaccgacttatactgaggtggatccctgcatcctcaacaacaatgtgcagtgagcatgtggaagaaaagaagcagctttacctacttgtttctttttgtctctcttcctggacactcactttttcagagactcaacagtctctgcaatggagtgtg

SEQ ID NO: 16543 - DNA, 381 bp, Homo sapiens
tgaggttttggcagctctggaggatgagagagaacatggccaggggcccttgcaacgcgccgagatgggtgtccctgatggtgctcgtcgccataggcaccgccgtgacagcggccgtcaaccctggcgtcgtggtcaggatctcccagaatggcctggactacgccagccagcaggggacggccgctctgcagaaggagctgaagaggatcaagattcctgactactcagacagctttaagatcaagcatcttgggaaggggcattatagcttctacagcatggacatccgtgaattccagcttcccagttcccagataagcatggtgcccaatgtgggccttaagttctccatcagcaacgccaatatcaagatcagcg

SEQ ID NO: 16544 - DNA, 425 bp, Homo sapiens
gcctcattgccaccaatgggaccccagaacttcagaacccagagaagctgtcagctatcttccgggactttctgaaccgctgtctcgagatggatgtggagaagagaggttcagctaaagagctgctacagcatcaattcctgaagattgccaagcccctctccagcctcactccactgattgctgcagctaaggaggcaacaaagaacaatcactaaaaccacactcaccccagcctcattgtgccaagccttctgtgagataaatgcacatttcagaaattccaactcctgatgccctcttctccttgccttgcttctcccatttcctgatctagcactcctcaagactttgatccttggaaaccgtgtgtccagcattgaagagaactgcaactgaatgactaatcagatgatggccatttt

SEQ ID NO: 16545 - DNA, 331 bp, Homo sapiens
gattatttactgtttcccccattggtgggcactcaggttatttcctacttttataattgcacacatcctcaggctgaatattagtgggtattactttggattaatgttcttttatttttccttaataaatccttcactggaatgaattactgttttgaggacacacagtgaggacaaagcaagactcacaatattgaggaaagttccttcaaaaggagttaaataagagatgctcctgattcacataatgtgggatcgggatatgaaagcagcacaattattctgagttttctgacagataattgtatcttcttagaaagaaaaaacaatt

SEQ ID NO: 16546 - DNA, 388 bp, Homo sapiens
gctttatttcagcatctccttgtctctcaactatcatcttctacccttgttttcacaagtatactatagcattatatagttgctatggagacacaacctcagcttgagtcttctgccctcacctcatactctgcgtgtttttccccctcttttttaattgacatataattcatataccataaactcattggtttttagtatattcacagaattctacaaccatcactattttcatcgcacaaaaagaaacttcctacttattaacagttcaactccccaaccaacgcccgacaacgactaattcaccacgtttttaaatgaacttttcccctcaaacttgttaatttctatccataacaccactaccatgctagttttcaggctcctg

SEQ ID NO: 16547 - DNA, 374 bp, Homo sapiens
gccattgtcattgatcccaagaaccctctatgcaaatttcacagagcctcagttttatttgcaaatgaaaaatataagtctgctttacaagaacttgaagaattgaaacaaattgttcccaaagaatccctcgtttacttcttaataggaaaggtttacaagaagttaggtcaaacgcacctcgccctgatgaatttctcttgggctatggatttagatcctaaaggagccaataaccagattaaagaggcaattgataagcgttatcttccagatgatgaggagccaataacccaagaagaacagatcatgggaacagatgaatcccaggagagcagcatgacagatgcggatgacacacaacttcatgcagc

SEQ ID NO: 16548 - DNA, 1171 bp, Homo sapiens
cctatgactgattacgaatttaatacgactcactatagggaatttggccctcgaggccaagaattcggcacgaggaaccgggtgcgcggcatcctgcggatcatcaagccctgcaaccatgtgctgagtctctccttccccatccggcgcgacgacggctcctgggaggtcatcgaaggctaccgggcccagcacagccagcaccgcacgccctgcaagggaggtatccgttacagcactgatgtgagtgtagatgaagtaaaagctttggcttctctgatgacatacaagtgtgcagtggttgatgtgccgtttgggggtgctaaagctggtgttaagatcaatcccaagaactatactgataatgaattggaaaagatcacaaggaggttcaccatggagctagcaaaaaagggctttattggtcctggcattgatgtgcctgctccagacatgagcacaggtgagcgggagatgtcctggatcgctgatacctatgccagcaccatagggcactatgatattaatgcacacgcctgtgttactggtaaacccatcagccaagggggaatccatggacgcatctctgctactggccgtggtgtcttccatgggattgaaaatttcatcaatgaagcttcttacatgagcattttaggaatgacaccagggtttggagataaaacctttgttgttcagggatttggtaatgtgggcctacactctatgagatatttacatcgttttggtgctaaatgtattgctgttggtgagtctgatgggagtatatggaatccagatggtattgacccaaaggaactggaagacttcaaattgcaacatgggtccattctgggcttccccaaggcaaagccctatgaaggaagcatcttggaggccgactgtgacatactgatcccagctgccagtgagaagcagttgaccaaatccaacgcacccagagtcaaagccaagatcattgctgaaggtgccaatgggccaacaactccagaagctgacaagatcttcctggagagaaacattatggttattccagatctctacttgaatgctggaggagtgacagtatcttactttgagtggctgaagaatctaaatcatgtcagctatggccgtttgaccttcaaatatgaaagggattctaactacc

SEQ ID NO: 16549 - DNA, 402 bp, Homo sapiens
acccttgacatgattacgaatttaatacgactcactatagggaatttggccctcgaggccaagaattcggcacgagaagtaataaggtatttttaaaataaatgcaatgcatttattttagtaaaaaatcacaataacaacaaaaatacccagtgctttttcagatgttctttgcctgagagtccagtacaatatatggaactaattcccaattgacagcccttttcccatttgccatttatggaatagccatttttgtaaatgttgaattctgtataacaagggatgaatcaacaacacgatatatgagatctctttgtatatgtaaagtcttcaagccaaaaggcccaaaacatccagtatgtggacttgaaaaacgcaatacctaggctagttgtggtg

SEQ ID NO: 16550 - DNA, 410 bp, Homo sapiens
  misc_feature (1)...(410): n = a,t,c or g
tttganancagctatgacatgattacgaatttaatacgactcactatagggaatttggccctcgaggccaagaattcggcacgagcccaaacccccaaaatccaaaacttctcttgaaaagttcagggaccgtccaggggagatggggaggagatatggagtgagtcacctgctccagaagatgccagcttctctctccagggtgcttagttggctttgcccacccctcactccccagggagctctggggacagcttcctcacacccctgtcccacccacacagctgccctagctgaccccgagaagtgctcttggctgacccctctggtgtgtggtgaggggctttctcttccccttcctgtttcagacccccccatttcccgcacatggtgtgggggcttggggaagg

SEQ ID NO: 16551 - DNA, 338 bp, Homo sapiens
ggggcttgtctatgaaacaccattttaggggagagtactttttcatccagaggctggtccctgaaattctggtttaagctttattcctttagactatggcactgaaaactgccacattgtaaatatcctcaggactgctatttttggcagttatgggagatttaccttttttgtgaatattatattttttgtgaatattacagatcctttatttaggtgatgttttggatgtgagagagaagatgaggatttgaggctaaggtcgaagataattataattgatcattttgtttagggccaggattactgatcaagcgcatatcaaggttaaacattta

SEQ ID NO: 16552 - DNA, 406 bp, Homo sapiens
gcattttctggctgtcaccgttactcattttctcgcttgggtattgtagggataacagagggtgtacgcgtgagggcgtggaaattggtattggaacctcttccttcggataacccccacacactgacatatttagggaatgatagcatagggactgtgtttgaaaggctgagatgtttcataggcctgtcttgttggttcattcatttaaaatcaatgcctactatgtgccgagcgcaaatgttaggtgctgggagttcatgggtgaataagggtgtcactgcttgcagaaagctctcagtccagtaagggaacaggtgcagcaacgggcgactataatttatgttatttattaattagttcaattaattattgaaggtctacttgtgttgcattggtgtgaaca

SEQ ID NO: 16553 - DNA, 397 bp, Homo sapiens
  misc_feature (1)...(397): n = a,t,c or g
gagtatatgttggggggaagtagtattttttacaaggcattgggaaatgagtagatttggggtacatggaaacaggtagattgaaagaggaacaaaataatagttttgtttactgtgttaagtacaatctctattctgtcttattaaagagagctcatattcaaattaatagcttaggataatttagtacaatttaagaagaaaatgtgtttctaaaatcatgggatgatccaagtaaaattgtttctagtgactatgttgggagatgttaaattgtatttattttattttccagggtataagtgatagagaattattttagttatttttcttancattttagtggtgtaggtctggaaggatccttcaangggcatctaatccagtccagcatcgt

SEQ ID NO: 16554 - DNA, 458 bp, Homo sapiens
cgcgagtgggagcaccaggatctcgggctcggaacgagactgcacggattgttttaagaaaatggcagacaaaccagacatgggggaaatcgccagcttcgataaggccaagctgaagaaaacggagacgcaggagaagaacaccctgccgaccaaagagaccattgagcaggagaagcggagtgaaatttcctaagatcctggaggatttcctacccccgtcctcttcgagaccccagtcgtgatgtggaggaagagccacctgcaagatggacacgagccacaagctgcactgtgaacctgggcactccgcgccgatgccaccggcctgtgggtctctgaagggaccccccccccaatcggactgccaaattctccggtttgccccgggatattatagaaaattatttgtatgaataatgaaaataaaacacacctcgtggcaaaaaaaaaaaaaa

SEQ ID NO: 16555 - DNA, 264 bp, Homo sapiens
ggattcacatttctattaaaaggaatatttagtttgatctctggttcacagttcattgtgggttgcttctgacctccatgtcttaagcagaaagtagggaagttgtagttttaccaagcacaggtaccctgtatctaccatttgagtatcttagagatccttacaaacgtgatcccgtcagcgtccatgacactcccaccctgttagactgctgtcagtggctttcacacaaacccatatgtggatggaaaatccaggttatta

SEQ ID NO: 16556 - DNA, 472 bp, Homo sapiens
  misc_feature (1)...(472): n = a,t,c or g
atttganaccgctatgacatgattacgaatttaatacgactcactatagggaatttggccctcgaggccaagaattcggcacgagtggaagaatggatacaatttaaaggagtggatatactgctcatccttcaaactattgtgactgggctttggtaaaagctcagcaagaaatgaagagtagacagagtctcacacctgtaatcccagcagtttgggaggccgaggcaggcagatcacctgaggtcaggagtttgagaccagcctggccaacatggtgaaaccccgtctctactaaaaatacataattaactgggcgtggtggctcatgcctgtaacctcagctacttgggaggctgaggcaggagaaccacttgaacccaggaggcggaggttatggtgagatgagatcgcgccattgcactccggcctgggcaacaagagtgaaactctgctccaaaaaaaaaaaaaa

SEQ ID NO: 16557 - DNA, 364 bp, Homo sapiens
ggggtaatcagggtcaactttggcgtgaccaaataatatcctgaacagtattgattcagagtaatccatgttctgagctttgttgttttctgatgcgtggggacggatcagtaatgtgcaggttgttagaacaccagtgacttctctgtggctgagtgcatcgacaagtgtgtggtgggaggagacggcggctccgtccggagcaggagctgtcatgtggggagctggcccaggctcacgagagcgacttgcgctggctgagggaacggcaggtccaggcaggcagcgctgtccggcgcctacctttctgcggtgccggaatctgctcgtctgcaaccgtccgctttggtagctgccagccaca

SEQ ID NO: 16558 - DNA, 439 bp, Homo sapiens
ggcccctcaggcccagtctttgggtggaatgcatgtcaatggcgcacctcctctgatgcaagcttctatgcagggtggagttccagcaccagggcaaatgccagctgctgtcacaggacctggccctggttccttagctcctggaggaggaatgcaggctcaggttggaatgccaggaagtggaccagtgtccatggaacgggggcaagtgccgatgcaagaccccagagcagctatgcagcggggatccttgcctgcgaatgtcccaacccctcgaggcttgttaggagatgctccgaatgatccacggggaggcactttactttctgtaactggagaggtagagcctagaggttacttgggaccacctcatcagggtccacccatgcaccatgtccctggccatgagagccgaggaccacccccacatgaactgagg

SEQ ID NO: 16559 - DNA, 302 bp, Homo sapiens
ggttaattgggtgtgtacttatgtaaaaagtcatcaacctgcatgcttaagatttatgtcatgagtccaccctcaaaaggttgggaggaaagtaaatggtggagacaatgtaagagcgcccgaacctacctaccaaatagacaaatagatgttttctacccattttgatgtgggtcatttttacataatcacaattcattaccaccatgtacagttgtgtactactaaggaagtgaatggagcttctgttacccagcagtgagcctgaagaggactgtatctgcccagaggacagggccatc

SEQ ID NO: 16560 - DNA, 508 bp, Homo sapiens
  misc_feature (1)...(508): n = a,t,c or g
tttgnnnccaacagctatgacatgattacgaatttaatacgactcactatagggaatttggccctcgaggccaagaattcggcacgaggtcggcgtggctctattaccttttggtctatggttaccgaattcaccaggagcaaggactttaacaggtgttgctgaactttgaatggtcagcacactgggagtggcagtagtagcagagttggcctttggtctttgtcttggtgcaattgaggtttctgttggtccaatggtatctgttattctggcttttatttggcttttcctagcagctgcttcactagcagtcatcggttcaggaagagctgaaggaatagaagaattattgatgttggagactggacaatcctttttggcaaatttaaatgcaaaatatgacacttgaaatatatcaggtctatgttccggatctggttcaagcatgaaccctgcaagaatagatcaaaatgttaagaagttttatgaaacacacattatacta

SEQ ID NO: 16561 - DNA, 509 bp, Homo sapiens
  misc_feature (1)...(509): n = a,t,c or g
taacagctatgacatgattacgaatttaatacgactcactatagggaatttggccctcgaggccaagaattcggcacgaggttgattatatatttatattttcacagaggtaaaattcccataacataaaattcaccattttaacaacttcaaagtgtgcaattgagtgttttttagtatattcaaccatcaccatgatctaaattcagaccatttctctcatccccaaaagaaactccttatctattagcagtccttcccaactctgccctacccccagccactggcagccagtaatctactttcttctgtatagatttgcatattccttcatataagtggaatcacaatttgtggtctttcacgtctggtttccttgtagtataatgtgtctcaaggttcctccatgttgcggcatgtatcagtgcttcgtttctttttatgctgaacaatatttcattgttgggcataccacattttgntaatctgtntatccattgatggatgtg

SEQ ID NO: 16562 - DNA, 328 bp, Homo sapiens
ccttattgtagattatgtatcatctcctctttggctatgagatgcgtagttttgttaaccagagacattaatgagttcagtttctgagaccagtcatttaataaattatttggatccttgggtctctggaagttgataattcctgctaatctgtctactttagcaaagatggtcttgttaactactagatttgagagaaaggcttcggactcctgcaagagagaaagataaattggattaagacaggataaattacagacaataaacaaaacttcagaaaagcattttctgaactcttcatccaagaatatgcaggggaattcattct

SEQ ID NO: 16563 - DNA, 441 bp, Homo sapiens
  misc_feature (1)...(441): n = a,t,c or g
cgntacntnatgantncgaatttaatacgactcactatagggaatttggccctcgaggccaagaattcggcacgagggcttcccccgcggagacaagcttttcggccctgacttaaaacttgtgccccccatggaggaggattacccccagtttggcagccccaagtgaggggccgaggctgtggcatccagagtccctgcctggaccagcctctccactcatgtgactctttccaacctgctttgaggcactggggcaggggccgggggcagtctgagagaggccattctttcccaacacctcttggggagtttagggtgggggggggcgcggctggnaggagggcaggcatcggggagcccgggagcctgaccctcatctttcttccaaacaggctcanagggngtnctgcaccgggcctggcaggaggnaggtgtttt

SEQ ID NO: 16564 - DNA, 481 bp, Homo sapiens
  misc_feature (1)...(481): n = a,t,c or g
ttgaanccctnngccttgacncctaaagctatgacatgattacgaatttaatacgactcactatagggaatttggccctcgaggccaagaattcggcacgaggggcttttgaattttttcccacagctgaaattgctgctgccttgctggtgattctgcaaaaaaactcctctagtccgcctctaagttcaatctcctgcccctgagcccaaggccagtctccctgtgaactgcaaggaccacgtgactgccgggcccattgcagtgagcttgttttctgcaccgtggctgtgtctgcacactggatgcctccttgggatggcctctcccccagcatccacgtgaaggtgcagctcgtcagcacgcctgggctggccctggtggaggacgcagggggacatggctgtgtgcagggagagggaacaccgtgcagtggacatggctgccaaggggtgtccaggccactgcctgttgggaacgc

SEQ ID NO: 16565 - DNA, 502 bp, Homo sapiens
ccacgaatttaatacgactcactatagggaatttggccctcgaggccaagaattcggcacgagcggcacgaggactgcatagggccggcgtgggggtggggaaatgagggatgcatctctcccctaaacaagtctcacaggaaaaaatatccattaatgaaaagacctttgcattagaaaaagatggcagtggggatgtatgctgacaacctcgagaataataccaaaggctagagccaaaacatgtgattccagtgtcaggccagagcccagctggagcagccatgggaaaaaaagataccatacagaggagaagcagggggccagggctgagtgaagtgggtgacaaattggtgctaaggcaccacaagcggcaggcttgttttctcccgcctgatgttgtaagaggcttttacactggaagcctggatgctgtggaggagggccgggtggcatatatgcagctgagctttactctgagacagcaggatgctgtcacacc

SEQ ID NO: 16566 - DNA, 505 bp, Homo sapiens
  misc_feature (1)...(505): n = a,t,c or g
gcactacttcatcctctcctctccatcacctttgccacagctgtggtgcaggcagcataatcattcacctggactgtttcacaggctcctaactggtactccctgtagtccccatgtggccttgccgggtccactgtaagccgggtccactgtaagcatgcacttactgtaagcatgcactagtggccgcctcacccccgctcccagcctctcctaaagactccatcttcctccttggcccctttgtgacctgcctgtccaatcccagagcaggcctcctggtaaattctcccaactcccctaggaagagtgagttgcttctgtcctcgtgctaccccagaactatgcacacgccgcttgtcacgcagccctgcaatttttctttaatgcttgccttcccaccagaaagtccactgcagggctggcactgagctggcagtcagtgcacatcctggggttttattattggngtggatggttaaattaaggaataattgaatgtgtg

SEQ ID NO: 16567 - DNA, 348 bp, Homo sapiens
ggcatttccgatctgtctaagagagaggatttgacacgggactcccacctggagctgtgagctctggaattcaggttttcttttccccagagggcaagccagagtcttcttgtctttccccagtgacttgggagggatacctgatgttatttgttccatattcttatcccccagacatgggttctagagctcaaaatgctgctgctggaggggggcctccctaccagaactcgccccctaaattaatctgccgcctccaagtatgggacaagaattcaggccatgtgctcaggagcacagaaacgctgacacccacactgttccccatgtggggacgcccagcaaggg

SEQ ID NO: 16568 - DNA, 672 bp, Homo sapiens
ctacccatgattacgaatttaatacgactcactatagggaatttggccctcgaggccaagaattcggcacgagcgcgggagctcaaggaacagcaggattccccgggcaacaaggacttcctccagagcctgaaaggcttcccccgcggagacaagcttttcggccctgacttaaaacttgtgccccccatggaggaggattacccccagtttggcagccccaagtgaggggccgtggctgtggcatccagagtccctgcctggaccagcctctccactcatgtgactctttccaacctgctttgtggcactggggcaggggccgggggcagtctgagagaggccattctttcccaacacctcttggggagtttagggtgggggggggcgcggctgggaggagggcaggcatcggggagccgggagcctgaccctcatctttcttccaaacaggctcagagggtgtcctgcaccggggcctgggcaggagggaggtgcttctagttctgccaggagacaggttagctgctccccacgtcagctgggacaccccgacttttgtttaccagagaaaaagggagggggagagggctgcctttggacttgtcccgggacacctaggctagggtggggagagacgggccctggtggtggctcgggaggcgaaacgtt

SEQ ID NO: 16569 - DNA, 327 bp, Homo sapiens
gcacaggcaacattacaaacaaaggatttgaaaacaccaagagtacaggtcttctttaaggaagaataaaaaagaagaggttcatttttctggctttttttttcacctgaaacactttttctcgagtccaaaatcattccccccgtgaagtctgcttaccaaaacataagacgacttatatatttgaaagaagtcaaatgaatgagctctctaatagaagtccatgagttgagtgggtatttcttatttgaaagtgtttttctttaatcaaaagtccttagaatgagggaaacaaaatatttatttgttttggaatcccacttatca

SEQ ID NO: 16570 - DNA, 523 bp, Homo sapiens
tgacatgattacgaatttaatacgactcactatagggaatttggccctcgaggccaagaattcggcacgagccgaatttgagtatttgcgaaaagtgctttttgagtatatgatgggtcgtgagactaagaccatgacaaaagttataaccaccgtactgaagttccctgatgatcagactcagaaaattttggaaagagaagatgctcggctgatgtcatggctccgatcttcatcttgaagaagagtgacattgggtgactgctgcttggaaaactgtccacacttgctactctttgagaatgaagttgtcattcagggcccctcatgtagccaaaagaccaagaaaaatctggcccacagataagttgcagactgcctttaaaatagattttatcagtggagaaatggtgataagtttttcttcagttttctcttgggaagagttttatgttgtttaaaagatattttgataacttaacctgctttatgggcttacataatattcctttcatccattctt

SEQ ID NO: 16571 - DNA, 422 bp, Homo sapiens
cgagcgttaatacgactcactatagggaatttggccctcgaggccaagaattcggcacgaggtggtactcactcactgaagcctgtattggtgattaaggaacaaattgaatttggatagccttagagaaataattggctatgttgacatactcatctcattgaaagtacaggaagtaataccggtaaattactgctccgggacaaattctagccaaccccaagcagctgctacatgaaatgtaagtgagcacaggctggggagaacatgactgggtgacatcagccactgaataccctctgtacatggtgggctgtgcccaccagggaggggcttgagacagtctggtatgttcccaggatattaggaagggaaattttaaattttaaaaggttcttcacccagatgaattacaccccaag

SEQ ID NO: 16572 - DNA, 348 bp, Homo sapiens
gggagaattttgaatgtgatgaatgtttctctttcaccgctaacaggttgtatgtgtgagccacattttattgcaagtgtttgaaaggccattgcaaatatgggatattgccagacagtaaaaagcaaattgagtctattgagaaattaattcaccagctgaaggaagtacatttgccttagagtcatcagatattctacccaccagactcatctccgagatagcatcctaatgagcttcctaaaccaactaaacatgagcaggaagcatcagtcgtcaaaactgactcttttcagccaatcagctgactgcacaaactgtatggcattgaggaaaggaagaacattc

SEQ ID NO: 16573 - DNA, 458 bp, Homo sapiens
cgactccatcttcgcggtagctgggaccgccgttcagtcgccaatatgcagctctttgtccgcgcccaggagctacacaccttcgaggtgaccggccaggaaacggtcgcccagatcaaggctcatgtagcctcactggagggcattgccccggaagatcaagtcgtgctcctggcaggcgcgcccctggaggatgaggccactctgggccagtgcggggtggaggccctgactaccctggaagtagcaggccgcatgcttggaggtaaagtccatggttccctggcccgtgctggaaaagtgagaggtcagactcctaaggtggccaaacaggagaagaagaagaagaagacaggtcgggctaagcggcggatgcagtacaaccggcgctttgtcaacgttgtgcccacctttggcaagaagaagggccccaatgccaactcttaagtcttttgtac

SEQ ID NO: 16574 - DNA, 317 bp, Homo sapiens
agtgaacctgtctcagggtcattcaccacagctctggatggcccatctagcctggtgacagccaacatcactgactcagaagccttggccaggtggcagccagccattgccactgtggacagttatgtcatctcctacacaggcgagaaagtgccagaaattacacgcacggtgtccgggaacacagtggagtatgctctgaccgacctcgagcctgccacggaatacacactgagaatctttgcagagaaagggccccagaagagctcaaccatcactgccaagttcacaacagacctcgattctccaagagactt

SEQ ID NO: 16575 - DNA, 507 bp, Homo sapiens
  misc_feature (1)...(507): n = a,t,c or g
ttggnnnccaacagctatgacatgattacgaatttaatacgactcactatagggaatttggccctcgaggccaagaattcggcacgaggcttaatacgaggaaaagcaatcagtatgctccgaaaggttaactattctggtcattaccatcatccaattctctgctctcaacaatcacattacctttcttcaacagctgccttctgcagctgataaaaactgcactatctgtaatatctttgagagaggaagtaaaaaatacaaatcactgcttaaagtcctcactgctaataccagaaactaagcagaaaagggaaagctaatcttattaaaacccttgcagttctggtctctaattacaagcacacatttattagaaggtagcacattactggcacaacactatgaccttccaggnatttctttacccagaacaatantaaaagtggtacaaggggccttccatattgcctgcagcagtcagaaatcatgtgtgggtgggcacaa

SEQ ID NO: 16576 - DNA, 358 bp, Homo sapiens
gggagaggaaggagaaaaagtgagaaacatgtattattttggtaacattttcaaaatactacttttaaactaattggaagggattttacctagacttaagaagaaaataatagtgtggactcttaaaacttcagtctgcttttaaagaactttcctggtacatttggcagcactggcatgaaaaggatcagctatcaattgacattgaattccagacctacatttaaggaatcttgactctctcattgctttgttgtaatagcactggttcttccagattgtttggtggtgtcttatgttctcaggccaacttttcaagagtctgagaagcagaatttaaaaatacgatttagttagc

SEQ ID NO: 16577 - DNA, 534 bp, Homo sapiens
  misc_feature (1)...(534): n = a,t,c or g
ggatgcatgcttattgaaaattagaacacagataaattatgaaagtagtaaaaccacagaaacaatttttctatatatatagaaacatgttttaatatactgtcttaactttcttacttgataatctggagtcatctttcagggtaatacttgtatcccattaattttagtggctacacagctttttatagagatgtagtgtactttaatctcctaatgatggatctatagattgcttctattattttctcttacaatgtcgctttatacaaaactgtctatttatgtggacttgttagaataatttcatagaagtttcaaaatgtgtatttgctggaccagaactattttttcccttacaccttgaccagcttgcatattgggtaccacatgattatcaggtataaaataaaatttatgaatgtattcaatatgaatattttcaattcataaaataaaatttatgaatgttttgacattgctctgacaatgggatatacncntgtgtgtgtgtgggtcangtgtgtgtgtgtg

SEQ ID NO: 16578 - DNA, 390 bp, Homo sapiens
  misc_feature (1)...(390): n = a,t,c or g
gaagaaaaattcctgttaaattttgttgtgtgggttttccaaaggtggctttcagtaagacttgaaatttactgatactcttcactctgagccaaaacagctgtagaaacatttttaaaatttccttttacaatagattttttaaaagattgtatctttttaaatccacttttatatttattatcctttacattgtttttacttaggaaatgacaagaatattttatatatagtatagtaaggaagaattaacctaaaattcatgttttacnatctggacgtctatccaagagctgnnaaccaaacnancttgttcttactctggtttaaattaaatcagcnangctcctggagtaatttttaantgttnttcatgctctctgacatcat

SEQ ID NO: 16579 - DNA, 390 bp, Homo sapiens
gaacagcctccacgtgtccactcctaggtgctaggtgctggcagtgtggtttgcccttggaaggaaggagccagggaaagggcccacacaagccgggaagaataatcagatcattttgagtgggaaattctgaggtcagatacctaactgtgctccagatggagtgataaaggctccaggtgggcatgttccctgggccccctggattcctcatcctgtaaggtagggcatggctgaaataaggccagagttcagggcccagggaaaagtacctcttgccaatgtctaagcttaatgactatatgtataatatatatttgctaatatgtaataatattatatatccctacaagcaactatagtgactgtatgtatctgaaaacgtatttt

SEQ ID NO: 16580 - DNA, 117 bp, Homo sapiens
gctatgaagttttttctgcttcttttaatttcctttttctaccaaaagatatgtttgaactcttggtagctacaaggtatatatttagaatgagtatgtaattgcctcaagggccag

SEQ ID NO: 16581 - DNA, 1083 bp, Homo sapiens
gagatgttcacgacttccttctgagactcttcttggaccgagacctcatgacacttcctattcagaataagctggcaccattcatcgccaaacgccgaacccccaagattcaagagcagtaccgcaggattggaggcggatcccccatcaagatatggacttccaagcagggagagggcatggtgaagctgctggatgaattgtcccccaacacagcccctcacaaatactatattggatttcggtacgtccatcctttaacagaagaagcaattgaagagatggagagagatggcctagaaagggctattgctttcacacagtatccacagtacagctgctccaccacaggcagcagcttaaatgccatttacagatactataatcaagtgggacggaagcccacgatgaagtggagcactattgacaggtggcccacacatcacctcctcatccagtgctttgcagatcatattctaaaggaactggaccattttccacttgagaagagaagcgaggtggtcattctgttttctgctcactcactgccgatgtctgtggtcaacagaggcgacccatatcctcaggaggtaagcgccactgtccaaaaagtcatggaaaggctggagtactgcaacccctaccgactggtgtggcaatccaaggttggtccgatgccctggttgggtcctcaaacagacgaatctatcaaagggctttgtgagagggggaggaagaatatcctcttggttccgatagcatttaccagtgaccatattgaaacgctgtatgagctggacatcgagtactctcaagttttagccaaggagtgtggagttgaaaacatcagaagagctgagtctcttaatggaaatccattgttctctaaggccctggccgacttggtgcattcacacatccagtcaaacgagctgtgttccaagcagctgaccctgagctgtccgctctgtgtcaatcctgtctgcagggagactaaatccttctttaccagccagcagctgtgaccccgccggtggaccccgtggcgttaggcaaatgccaactcaaatactccgatgtgga

SEQ ID NO: 16582 - DNA, 453 bp, Homo sapiens
  misc_feature (1)...(453): n = a,t,c or g
gagacctaagtctgcagtccaggattcagcttcagaatcccttatagcatttaggaataattctttgaaaccagtaacccttcatcatcccaaagatgatctagataagataccatcagagaccacaacatgtaattgtgaatctccagggagaaaacctgcagtcccaacagagaaaatgccacaagaagaattgcacatgaaggaatgtccacatcttaagcctactcctagtcaatgctgtggtcatagacttgctgcagatcgtgttcatgacagccatcctacaaacatgacccctcaacatcctaagacacatccagaatcatgcagttattgtcggctttcttgggcatctctggtgcatggtggtggggcactgcaacccattgaaactttgaaaaagcagatctcagaagatagaaagcancaactgatgcttcagaaaatgga

SEQ ID NO: 16583 - DNA, 313 bp, Homo sapiens
  misc_feature (1)...(313): n = a,t,c or g
aatttgagcaaatgatgaggcacaattgtccccagctgggcattagatcacattgggccccaccctgaaataatccctcgtctcaaacttcagacatcagtcagtcagctcaggagccatccaacaaaaccaacttcatattttaaaccagcttaatgctacaaacttttctaaaaagtgctgtccagctgagcctctgagaaaacctagctccctgaggggtggatggcaggcctntcagaccaacccctgagcctctctccagaagtnatanncttggttnancccanagcccnacatcccagggtgggtg

SEQ ID NO: 16584 - DNA, 324 bp, Homo sapiens
caggtttccagctgctcatggaaagaaatgaagctctcacaaccttcaacctcagtttgcccccccagtcccctcacccttccttgacttacctccccacctgaggctgactttggggttcccagacaccctacccacacacatgccttgatcatagcacttgcctgcgcttcttcagagtcattaatttgcttctcggcttccccactggactgtgagctgcctgaggtcagggattgcgctttggatggtttccagcctgagcctggtgcttgaacagacgtgtgcaataaatgctcgttaaatgatgaaaaaaaaaaaaaa

SEQ ID NO: 16585 - DNA, 367 bp, Homo sapiens
agctatgcaagaaagatgagttacttcgaatcgtctccattgcttctgaagaaagtgaaactgattccagctgttctacacctcttcggttcaatgagtcctttagcttatctcaagggttgctgcagttggaaatgctgcaagaaaagctcaaggaactggaagaagagaatatggctcttcgatccaaggcttgtcacataaagacagaaactgttacctatgaagaaaaggaacaacagcttgtcagcgactgtgttaaagaacttcgtgaaacaaatgctcagatgtccagaatgactgaagaattgtcagggaagagtgatgagctgattcgataccaagaagagctttcctctcttttgtc

SEQ ID NO: 16586 - DNA, 239 bp, Homo sapiens
agcataatagagatggcttgtgagaaggaagagaatattaaccaagacttaaaagagaatgagacagtaatggagcacaccaaacggcattctgatcctgacaaatctttgcaggatgaggtctcaccaagaagaaatgacatcatttctgtaccaggtattcaacctttggatcccatatcagattcagatagtgaaaactctttccaggaatccaaactagaaagccagaaagactt

SEQ ID NO: 16587 - DNA, 357 bp, Homo sapiens
  misc_feature (1)...(357): n = a,t,c or g
ggtacagaggaaggaccaccttcatgagtgaccacgtggccaggggcaaggccatggtgaggagtcacagggtcaccacctttgacaacaggacatactgctgccgcttcaaggatggtgtaaagttcggcgaggccactgtgcaggtgcaggtggcagggctgggcagagagcccagaatccaggtgacagaccagcaggatggagtcagggcggagtgcacatcatcaggctgtttccccaagtcctgggtggaacgganagacttcnggggccaggctaggcctgctgtgaccaatctatcancctcancnncncangctctggctgtggcatcacttgacctntnnnacaaag

SEQ ID NO: 16588 - DNA, 318 bp, Homo sapiens
gcggcacgagggaggttcttttgtatgtacctgtagaatacatcccagtaagggtcctatggagaaagacctgttgtcatcaataaccttcattattctaactgtgaaacgttcattaatgcgaataatatcctcaaagattttctacaatgagaatcatccagtaaagctttttaactgagaatttaaaagttgtaaaattgttagttaaatgtgtataattatcaaaagaggttgactttggaaaacaaactgaatttgctaagggaaggaaaacttgaaaataatcaccttagatggggcatacaatttgaccta

SEQ ID NO: 16589 - DNA, 352 bp, Homo sapiens
ttttttttttcacaaaatgcaaccacttaaaatttattgcattacaggaacttggaaattcaccttctaaatatctggtaagggtatgtctaactgctgaatttcaccataattcttacatactagccaatttctatttcatgctgtttaatagggcttgctgtgaatccgtgctacctttgaatttttcagcacagtaaatgtaagacttctagacatctgcaagaagcatataagtaaaagagctccactgtaatgcgaatggcattagactcatgcatgcaactttattcagtctttcctttgtgtcacctcaacacatcaatggtttgacaagtgaaaaagttccata

SEQ ID NO: 16590 - DNA, 378 bp, Homo sapiens
gaaaattttaccacttctcttccctttaataaattgtcaaaggataaagtttcctgtttgaaaatatattttactggtattgtgctttcctcatatcacagattggtaaagaatcattttaagtccaagactcttattttacatattctgcaattaaaggtcctatgaggctacctgccgactgctgacatgtagtgtgtggtaaatgtgagccctctgacagcctggagtgaacaggggtcttctctgagaattgaggttgcaaggctggctaactcagctttgccttcacgagccctagaggccagccgaaggatgtctgcaggtcagggagacaggaccaggtaacccagctgtcactgaagattatatagagtc

SEQ ID NO: 16591 - DNA, 350 bp, Homo sapiens
ggaaactacttatatttggttattggggagcagaagtagtatgcatgatgaggctaaggtgatgcctgcctggcttcagctgtgaattttagaaatacactgattaaaggtaaatttttttttctgtccttactgctggatttcttaatctgggaggtacttgatggaatttagcctttttatcccttgaaattataagcagcattttgtgtgcactttttcttatacatgtacctttttctgctgtcaaaagacaacatttcaacacattgagtataaagatctaattggattttattattgattaacaaattaggtagcaccccatctataaaaaaataggtgcccat

SEQ ID NO: 16592 - DNA, 347 bp, Homo sapiens
gccctgttctatccccagtgtctggcatccacagaacttcagtaaatttgtgtaaatttactgaatttctgtcagccctgcctatgagacagtgaaatcctcgaggactggaattgtcagattcatctttgaaaccccagtgtccagtggggaaggcactggaatcgggtccttcactttttctccacaggcacataccatactctctagaagctaaaccagggaggaccaagggaagagggccaactgaaaatctgcctcttctttcttcccctcccatgtgacaataagtttctaagaattagcaaccctgggagatcaggctgtttccacactatctatcctct

SEQ ID NO: 16593 - DNA, 305 bp, Homo sapiens
acatgattacgaatttaatacgactcactatagggaatttggccctcgaggccaagaattcggcacgagagactgcatagggctcggcgtggtggctcacacccgtaatcccagcactttgggaggctgaagcgggtggatcacctaaggtcaggagttcgagaccagcctggcaaacatggtgaaaccccgtctctactaaaaatacaaaaattagctgggtgtggtggcgcacacctgtaatcctatattttttacactctctcctatgtgtatttcataataaagtttaaaaaaaaaaaaaa

SEQ ID NO: 16594 - DNA, 768 bp, Homo sapiens
atccgctttgacatgattacgaatttaatacgactcactatagggaatttggccctcgaggccaagaattcggcacgagcttcagctgtcactcgaagaataccattcacatctatctcaaaggtgacttcaatctgtgggaccccacgaggagcaggaggaattccagtcagatcaaatgtacccagaagatgattgtcttttgtcaggggtctttcaccttcatagaccttgattgtaacagttggttgattatcagaagctgtagaaaagatctgagacttcttggtaggcaccactgtgttccttggaatcagtttggtcatgacacctcccacagtttcaataccaagtgtaaggggacatacatcaagcagtaccaggtcacctgtatcttgatcaccagagagcacaccagcctggacagcagcaccatacgctacagcttcatctgggtttatgccacgggatggttccttgccattgaagaactctttaaccagttgctgaatctttggaattcgagtcgagccaccaacaagaacaatttcatcaatatcagacttcttcaaatcagaatcttccaacactttctggacgggcttcatagtagaccggaacagatccatgttgagctcttcaaatttggcccgagtcagggtctcagaaaagtcttctccttcatagaaggactcaatttcaattcttgcttgatgctgagaagacagggcccgtttggccttttctacctcgcgccggagtttctgc

SEQ ID NO: 16595 - DNA, 537 bp, Homo sapiens
accagctatgacatgattacgaatttaatacgactcactatagggaatttggccctcgaggccaagaattcggcacgagatggtagtgccacacagtcatgtcactgccccaaaaatcctccaagctctacctactcatccccttcctcccctctgcccgctggcatccaccgatgctcttactgtctccatagttttgtttttctccagcgtgttctgtagttggaactgtgcagtgtgcagcctttctagactggctgatttagtcgtatgcttttaaggccccttcatgtctttgcatggtttcctagctcatttcttgttatatcctgttgtctggatgtgacatggtttatttatccattcatctactgaaggacatcttggttgcttctgagtttaggcaatgacaaataaagctgctgtaattagtatttttcatgtggacgcacgtttccagtgcctctgggcaaataccaaggggtgcaattattgcattggatggtgagagtatgttagtttattttttccaggaat

SEQ ID NO: 16596 - DNA, 574 bp, Homo sapiens
  misc_feature (1)...(574): n = a,t,c or g
agggagannaaancngaaannannnggnnanannagagnngnannnnnnnnaannnngnngaatngggnatntaanntaaattgaaanttgagacnnncgaatcaaacgatcatatagggaatttggccctcgaggccaagaattcggcacgagatctgggagaagctggaggtacctgggatcagggattgctcacagtcagccgctgttatttccttttgcaaaacgagacagcaggcagagctaagacgccctggcaaaatccagatcctggagcggacctgaagaaacaagattcatcttcctggtctcacacacggcaaagcccaagatgccacagctgaggaaggtcctgtcagcgccgcctcccccaggctcggctctggtgtcctgggcagcccccacaccctcactcagccaggcccccagcagtctctctccgtttggagtgagatgtgggaggggcatctcattgagaagcgcgagaagggaagaagggccctcaagtccccacgtggccttggcaagtcactctgcttgctaaaacgatgtttgacctcgcctggnaaatgg

SEQ ID NO: 16597 - DNA, 498 bp, Homo sapiens
  misc_feature (1)...(498): n = a,t,c or g
gttnnnnntnanatnttggtnngnnttnannaggnanantatatnannngnnnnntgnnatnttntgnttaantggaagnaccgctatgacntgattacgaatttaatacgactcactatagggaatttggccctcgaggccaagaattcggcacgagacttgactttaataaaagctttttgaaaaagaactctgggtggggtgcattggctcacacacatagtcccaactactggggaggtcagggcaggaggatcactggagcccaagagttcaagatcagcctgggcaggatagcgagaccctgtctatagaaaatattaaaaatcagctaggcatggtggcttgcccttgcattccctgccacttgggaggcttgaggtgggaggttcgcttgagcccaagagctaaaggctgttttgggctgtgatcgaaccactgaattccaacctgggtgacagagtgaggccctgtctcaaaaagagaactttcgattg

SEQ ID NO: 16598 - DNA, 323 bp, Homo sapiens
ggtatttttgtggggaaatatctaatataccttcagtcaactttaccaagaagtcctggatttccaagatccgcgtctgaaagtgcagtacatcgtttgtacctgaaactgccgccacatgcactcctccaccgctgagagttgaatagcttttcttctgcaatgggagttgggagtgatgcgtttgattctgcccacagggcctgtgccaaggcaatcagatctttatgagagcagtattttctgtgttttctttttaatttacagcctttcttattttgatatttttttaatgttgtggatgaatgccagctttcagacag

SEQ ID NO: 16599 - DNA, 377 bp, Homo sapiens
gatagacaatacagttaaatacctgtttttctgtccttggctggctgattctaacactgtaatttctgggtgggtttctattttcttttcctcgttatgggttttccccctattctttgcatttctggtgtttcttaatgagggtgtttttgtattcctatgaatattatattgtgtttgtgaattcactctgaaacattttgctccttttaggacttgcttttaacgttaattagggaggatcagagcagtatttagttcaggcccaaatatttccactgctgagataagatccttctgagtactccacgtcccagaaagttgaaactgctgaggacggttctggaccaggctccgactgagctgcaggcactgtt

SEQ ID NO: 16600 - DNA, 348 bp, Homo sapiens
  misc_feature (1)...(348): n = a,t,c or g
gtactcaacccagaggaaggcaggtaaagagagaacaaagggcagatgaaacaaaaaacaaattgcaagatgacagactcaaaactatatgactaagcacattaaatacgaatgtcaaaaataaatactcttggtaaatgacagattggcaggttggaaaaataaagcaaatccaacaataagttatgtgcaaaaagacattatctactaaaaaaaaaaaatnnannncccntgctnnnantncnttttnnggggnntntgttacccnngtcttnnccngggatnnnancncgntggaatgganagatgttactgattgtaagaccagtaatcatggtnaacaccacc

SEQ ID NO: 16601 - DNA, 333 bp, Homo sapiens
gtttttttccctatttttaataaagaatgaccagacagagtatttgtaacatacaggacattctacaaaagagcttaggaaatgcctttgtccctgaaatgttttcaagtttatctcctcctttcatatctgctagttgcagtggagatggagggcagaaagacaataggagaggtacttatttggtaccttttggatgtaaatgtgaagaacataaagagatcaacttgggtgactgctaggtgtttgtttgttttcttttcatttaacctgaggctagacagtactatattatgataaagtaagatcaggttctgaagaggggaaggacag

SEQ ID NO: 16602 - DNA, 430 bp, Homo sapiens
  misc_feature (1)...(430): n = a,t,c or g
gggctcacagactcaggaaccccttaggacaaaagaggcctatgcagtggacgctgttggtgcccaccccctatcccttcctgggcaccaggaactttctctggctgctgcaaggtaggctgctaatggtgcccggctcccccccttccctagagaattgaccttgactgtataggatctgtattatctgcaccctctcttccaccatcaggggcccactgccaattactccctgccatgggggacaaagactggccccttcgcctcaagcaggaccactgtgtggggcagtttatgctccagggcccggcgagatctggctgaggctgagttcatccttgctcaagctcgctctgcggcttcccactgcgctcactctctgcttctgagagtctncgcagtgaaatnatatgncccananncctttttt

SEQ ID NO: 16603 - DNA, 313 bp, Homo sapiens
  misc_feature (1)...(313): n = a,t,c or g
gccccattctctaaagaaggctaattatgcaagtacacggttctttcctgattcatgaattcatatcacgattttattttcagattcctcaaggtaattgcttgttagactggttcacaggatgagagatatccaagtagtcatatgaaccgtttccgtcccattcatgccattctgtcttctgcagaaaataagtgagtcaatcactgtttatgagaatgtgtaagagactggggagagagaagggactcannggcattttgnatcacggatcctttttactagggatnnagngaccttactggctgctgca

SEQ ID NO: 16604 - DNA, 1025 bp, Homo sapiens
  misc_feature (1)...(1025): n = a,t,c or g
caactagtaaaggtaaaaatatgtggattagatatcatgcagatgtgaatgacttctgactttgatatgaagaggccagctaggaaaatacaccagaaataagtggtgggggtggggttgtaagaaagtctctctggcctcatcttgcacatgtgtagatgtagcttgttgaatgtgcatcagttctgtggatgtatgttgtcagatggagagaaaaatgtttggctttgcctttttttctttgtaggccatgcagttgctgaagaggaagccagaaaagcccaccaactctggctttcagtggaggcattaaagtacagcatgaagacctcatctgcagaaacacctactatcccgctgggtagtgcagttgaggccatcaaagccaactgttctgataatgaattcacccaagctttaaccgcagctatccctccagagtccctgacccgtggggtgtacagtgaagagacccttagagcccgtttctatgctgttcaaaaactggcccgaagggtagcaatgattgatgaaaccagaaatagcttgtaccagtacttcctctcctacctacagtccctgctcctattcccacctcagcaactgaagccgcccccagagctctgccctgaggatataaacacatttaaattactgtcatatgcttcctattgcattgagcatggtgatctggagctagcagcaaagtttgtcaatcagctgaagggggaatccagacgagtggcacaggactggctgaaggaagcccgaatgaccctagaaacgaaacagatagtggaaatcctgacagcatatgccagcgccgtaggaataggaaccactcaggtgcagccagagtgaggtttaggaagattttcataaagtcatatttcatgtcaaaggaaatcagcagtgatagatgaagggttcgcagcgagagtcccggacttgtctagaaatgagcaggtttacaagtactgtctaaatgttaacacctgntgcatttatattcttttcatttgcta

SEQ ID NO: 16605 - DNA, 340 bp, Homo sapiens
  misc_feature (1)...(340): n = a,t,c or g
gatagagtaggtaaattccaacattaacaaaaacaagaaaataatgaactagattttgatatactaacatggaatgttcttcgagctatattgttaagccaataaaatatacataatatacaagtatatgcatgtaagtgcactaaaagaaacgatttgaaagtatatacaccaaataaacagactttacctcttagaagaaaatagtgtggtaggcgaaggcataaagagggaactttagtttttactctccatagttcagtattatttactttttaaaaaannccataggcacacatttatattntattctttaanntaagancctagaggaggctgg

SEQ ID NO: 16606 - DNA, 439 bp, Homo sapiens
  misc_feature (1)...(439): n = a,t,c or g
gggacacccgaagcagcttccggggccacacgcctcttgacctcacttgcagcaccaaggtgaagaccttgctgctaaatgctgctcagaacaccatggagccacccctgaccccgcccagcccagcagggccgggactgtcacttggtgatacagctctgcagaacctggagcagctgctagacgggccagaagcccagggcagctgggcagagctggcagagcgtctggggctgcgcagcctggtagacacgtaccgacagacaacctcacccagtggcagcctcctgcgcagctacgagctggctggcggggacctggcaggtctactggaggccctgtctgacatgggcctagaggagggagtgaggctgctgaggggtccagaaacccgagacaagcttgccagcacagcagaggtnaaaggaagacagttcgt

SEQ ID NO: 16607 - DNA, 390 bp, Homo sapiens
  misc_feature (1)...(390): n = a,t,c or g
cccacgcgtccgacttgtagtccatttttaatctttctctaacataccctaactattcttgaaaatgcttaattttctctgttttgagatgtaaatttgctatcctgtttttcttaaatcttggtaagatcttcagccatgaaggacagacaaactgtaacctttccatttacaaagctgcatttgaattcaactgtccttttaaactaaggagttttactgatctcgtggctaatattttaaagatgtaggccaggtgcagtggctcatgcctgtaatcctatcacttttggagaccaaggcggggatggatcacctgaggtcaggagttcaagaccagcctgncaacatgatgaaactcatctctactaaaaanactgagnttagtca

SEQ ID NO: 16608 - DNA, 335 bp, Homo sapiens
  misc_feature (1)...(335): n = a,t,c or g
gattatattattcaattatatgtataaaaaaagaaagcaagaattcaactatgttgtattaccaaggcctttctgtacccaatctcgcctcatatttttttcttttttttttattttttgagacggantcttgccctgtcgcccaggctggagtgcantggcgtgatctcagctcactgcaagctccgcctcgtgggttcacgccattctcctgcctcagcctcctgagtagctgggactacaggcacccaccaccatgcccagctaattttttgnattttttagtananacagggtttcaccatgttanccaggatggtctcgatctcctgacc

SEQ ID NO: 16609 - DNA, 322 bp, Homo sapiens
cgtcaccctccagagtacctaggattagaggcatggaccacccatgcttggctcagtgtattaattttctaaaagataaatttttctgactggcaaattcatttttattgaacatcatgtgttctactcaaatatgggaaagagaaccctcctattcagttataaagtttggctccaactcaagtgagcaaaaaaacattaaatttatttaactccaaatactataaaaacacaatgataacttctgagctagtcgtttttttaaatttttttggcaccacaataattcttttatgatggtatccagtgagaatccctcacg

SEQ ID NO: 16610 - DNA, 626 bp, Homo sapiens
agatcgtgggtgggatggccgcgggccgcctctttctaagtcggcttcgagcacccttcagttccatggccaagagcccactcgagggcgtttcctcctccagaggcctgcacgcggggcgcgggccccgaaggctctccatcgaaggcaacattgctgtgggaaagtccacgtttgtgaagttactcacgaaaacttacccagaatggcacgtagctacagaacctgtagcaacatggcagaatatccaggctgctggcacccaaaaagcctgcactgcccaaagtcttggaaacttgctggatatgatgtaccgggagccagcacgatggtcctacacattccagacattttcctttttgagccgcctgaaagtacaggctggagcccttccctgagaaactcttacaggccaggaagccagtacagatctttgagaggtctgtgtacagtgacaggtatatctttgcaaagaatctttttgaaaatggttccctcagtgacatcgagtggcatatctatcaggactggcattcttttctcctgtgggagtttgccagccggatcacattacatggcttcatctacctccaggcttctccccaggtttgtttgaagagactgta

SEQ ID NO: 16611 - DNA, 382 bp, Homo sapiens
ggcagctgtccatgcctggcacctgcttggagaccagactttgtccaatgtctgtgtgttctgtcacttgctcgcccgagcagtggctttgctggtcatcccggtcgtcctgtacttactgttcttctacgtccacttgattctagtcttccgctctgggccccacgaccaaatcatgtccagtgccttccaggccagcttagagggaggactagctcggatcacccagggtcagccactggaggtggcctttgggtcccaggtcactctgaggaacgtctttgggaaacctgtgccctgctggcttcattcccaccaggacacctaccccatgatatatgagaacggccgaggcagctcccaccagcaacaggtgacctgt

SEQ ID NO: 16612 - DNA, 365 bp, Homo sapiens
  misc_feature (1)...(365): n = a,t,c or g
attttaagctgtagaaatggatccccaacaagatttttcctaatattcctaaagaaaaagctggtttgtctttgttggttttcagcaaattaagatgagcttttgttttctaatatttgtgtttacttgaatgttgggaatacgtttgtaacatctaagcaccctactttaatttggtcatttccatatgtctggcacatttattctagaggctctgatagagattggtggccagttttgttagaggtggagctttcttaattttggtggtttttcctttgttanattcaanatagggagacttntncntacgtagttactntaccctggcttcctggcaatcntttaaatagttcttttactaa

SEQ ID NO: 16613 - DNA, 455 bp, Homo sapiens
  misc_feature (1)...(455): n = a,t,c or g
ataaccngttatgacatgattacgaatttaataccgactcactatagggaatttggccctcgaggccaagaattcggcacgagggcagccagagttgaatgttattatccagctttgttgctgctctggtattctcaaggcttgcattaccagccccaaagtaacgacacacactactgcaatgatatctgcattccacttaaggaagttttggaaactttaggttcttctgtttcttacaacaaattcagaaacagaaaagccatattcatcttgatcctagggaagaaggcaaaattattacccatacgtctttgaatatatctctcctccccagcagaattttaataataactaatgatctggatgtggtagctcatgcctgtaatgtcagtctttgggaagccaaggtgtaggagatcacatgagtccaggagttcgagaccaacctgggc

SEQ ID NO: 16614 - DNA, 311 bp, Homo sapiens
gggatgcctgggcaatatgaacaattttgagacactggaagaatgcaagaacatttgtgaagatggtccgaatggtttccaggtggataattatggaacccagctcaatgctgtgaataactccctgactccgcaatcaaccaaggttcccagcctttttgaatttcacggtccctcatggtgtctcactccagcagacagaggattgtgtcgtgccaatgagaacagattctactacaattcagtcattgggaaatgccgcccatttaagtacagtggatgtgggggaaatgaaaacaattttacttcca

SEQ ID NO: 16615 - DNA, 958 bp, Homo sapiens
gaaaacaaaagtgatggtcagtatttctttgaaattctacaaggaacttcaggcacatggtgctgatgagttattaaagagggtgtacgggagtttcttggtaaatccagaatcaggatacaatgtctctttgctatatgaccttgaaaatcttccggcatccaaggattccattgtgcatcaagctggcatgttgaagcgaaattgttttgcctctgtctttgaaaaatacttccaattccaagaagagggcaaggaaggagagaacagggcagttatccattatagggatgatgagaccatgtatgttgagtctaaaaaggacagagtcacagtagtcttcagcacagtgtttaaggatgacgacgatgtggtcattggaaaggtgttcatgcaggagttcaaagaaggacgcagagccagccacacagccccacaggtcctctttagccacagggaacctcctctggagctgaaagacacagacgccgctgtgggtgacaacattggctacattacctttgtgctgttccctcgtcacaccaatgccagtgctcgagacaacaccatcaacctgatccacacgttccgggactacctgcactaccacatcaagtgctctaaggcctatattcacacacgtatgcgggcgaaaacgtctgacttcctcaaggtgctgaaccgcgcacgcccagatgccgagaaaaaagaaatgaaaacaatcacggggaagacgttttcatcccgctaatcttgggaataagaggaggaagcggctggcaactgaaggctggaacacttgctactggataatcgtagcttttaatgttgcgcctcttcaggttcttaagggattctccgttttggttccattttgtacacgtttggaaaataatctgcagaaacgagctgtgcttgcaaagacttcatagttcccaagaattaaaaaaaaaaaaaa

SEQ ID NO: 16616 - DNA, 340 bp, Homo sapiens
ggctaaatgttgctcttgaacattttagattagtgttttgtttatgtagttgatttttagtgttttctgtattgtagtttgaaaaatgccagttgtatgagactggattctttggtcagcttgttccagtagttttctattcatggggaaaaaaaggttttggggggcttttgaggacaatttttaaagttaaatttcttatttggaaaattgtcctgaatttgatatttaggagtggccactccaatcttagtgaatttgctcatctattccagttatctgccctgcatgcttacgaagataaattttaaggtgactaaatgccttctacctcttcctt

SEQ ID NO: 16617 - DNA, 322 bp, Homo sapiens
cagaccctctgcccttttaatcagttccatttcaaaagaactcttttggtattaaaaataatttaaaaaggtcagagaggcaatagtagggaagggagggagtatatcacacgtctccctgtttaaaaattctgtcgacgcggccgcgaattccagatctatgaatcgtagatactgaaaaaccccgcaagttcacttcaactgtgcatcgtgcaccatctcaatttctttcatttatacatcgttttgccttcttttatgtaactatactcctctaagtttcaatcttggccatgtaacctctgatctatagaatttttta

SEQ ID NO: 16618 - DNA, 301 bp, Homo sapiens
gctgatgaaggatcccttctgctgtggaggtaaatctccaggaaaggcctgaagtccccagatggcttactggaaatccacacttcccagaaagtccaactggccaagcaggatgtcctgttgtgacaggacatttcacccacagtctcactcaccaagattaacggtgagaaatgtcctgtgcgagaagtcagaagagggagcagaggctggggccaccaaagctcgcaatacaacccgctcttggctctattttcagatgttttgggtgtgagtcctggctccagagctgtgtgatgtg

SEQ ID NO: 16619 - DNA, 315 bp, Homo sapiens
  misc_feature (1)...(315): n = a,t,c or g
gtcaggtcaagaactaaactatttttaaaaaccaaaaatctgagtagcagctccttctcaatgagtgtaaaggttcagctatgcacggtgaataagttctagagatccgnngnnanacatagtgcctgtngttaacaatactgtattgtatacctaancatgtgntnagtgggtagatctcatgctaaatggtcntatcacaatcgnannantncnatncaanccaataanatttnnnnatnnantcannnaaaagaaaatctgactttctaaagccaggcaaagtgcngntgccaacaaccttttgctgagcca

SEQ ID NO: 16620 - DNA, 448 bp, Homo sapiens
  misc_feature (1)...(448): n = a,t,c or g
gcgcccggcaaacccatacattttaagtgtatacacagacaattccactctctgatcaaggtatacaacattactcttacctcaaagttcccttgttgccagtcaactctgcccttccctccagagtcagagcactattttgatttttttgtaatttagttttcctgaatctagaacttaaggaaacatacagtagatgtgtgtgggggcatgatcttaatataaaatactagatggaagactggaaatacagatcagactattataacaaaataacttggacattatattcctttaaaaaaactttgcccccaatccctaaagaatgttggttcttaaggaagcagtgtttgttctatcagaatcctattatcactccttggacttagttggtaaagtaacagaccttatgaaaaggaacagtcgattgctctgnggatgtggcccc

SEQ ID NO: 16621 - DNA, 450 bp, Homo sapiens
  misc_feature (1)...(450): n = a,t,c or g
ttggaancnnttgattgattacgaatttaatacgactcactatagggaatttggccctcgaggccaagaattcggcacgagaaaaggcagagagagggtgaatgaaggatttctaagaaagctgatgcctgagttgaattctgagagaggaattacattgctagaggaacagccctcaggaaagcactgagaagtggaaagagaatgacacattgagaaactggaagtttgagaatagcagagacagaatttggtgaaagacacctcccaggaggtggaggcagcctctttattcatgctcaggagttatgtaggaccccatcccaaaggcaaagaggagcctgggtggtctcaggtagcccagggcaaggttagattagcaagttagcaagttgtaatcgccatgtgaggaagacttgctaggagggacagcagacaggttgaggcctg

SEQ ID NO: 16622 - DNA, 357 bp, Homo sapiens
cctgagcaaggacccctcctcttagcctcgattctctggtctgcacagctgcggcctgacagaggccccaggtgctgcctgtggctcctcccaaccccgagaccttcccaccaaaaacacactcaggagaacgctttgcccagaaggtgcctggtcgacgcggccgcgaattccagatctatgaatcgtagatactgaaaaaccccgcaagttcacttcaactgtgcatcgtgcaccatctcaatttctttcatttatacatcgttatgccttgttttatgtaactatactcctctaagtttcaatcttggccatgtaacctctgatctatagaattttttaaatgactagaattaa

SEQ ID NO: 16623 - DNA, 564 bp, Homo sapiens
  misc_feature (1)...(564): n = a,t,c or g
tttnnnaccagctatgacatgattacgaatttaatacgactcactatagggaatttggccctcgaggccaagaattcggcacgagtcaataccctgaactccatgttactcatgcaagtttagatatccctgaacttcatgctagtagaggaagtctaaaatccccatgccagcctaaatacccctgaccccatgccagtgtagacagcctgcagtacccataccagtgtagaccaccccgttgatctctagggccatgttgatactgctgatgccactgcctgccagattaagaggcccatccagccgctcttctgtccaggagggggcagaggaatcacattttggagaatcagacttctgacttattaatagaatttcccccctccatccccgtagacagcccccattccacttcagccccacacctatactcacacagttgtctacagaggaatctgtctgcccgtctctaacacctaataggtgatgggtcaatccttccttagtgtacagtcccgaagccccctncaacaagcccctcttcacccttnagggaccttg

SEQ ID NO: 16624 - DNA, 446 bp, Homo sapiens
  misc_feature (1)...(446): n = a,t,c or g
gcccgtcacctgttctcccaatgcctcctgtctctcccccagctttccagtcaccatccttggacagagcccccattttccagcttctgccccactctactcacccccacaatatcccctattcccagagctccaggttcccaccattcaggagataaagtcaaaggttcttcttagaagaggctagaaggtgagttcccatctgaccctagttcctggggcctctcccagcctggttttcagcctgttgacagaggaggggtctaggctatcagagcctgtcctcagtactttccaggggcctaacacatgttgatttctggagccctgtcccttctcttggccagtggaaccctccagnggnctctgactctatagttgagggagtggtgaccntanttgggaacctggctcctccaagccccattttcatttgctatgactcc

SEQ ID NO: 16625 - DNA, 366 bp, Homo sapiens
  misc_feature (1)...(366): n = a,t,c or g
ggagctatgcaccatgagcttaaccctgtctctacataaaacttaaaaaatcaactaagcgtggtcacacgtgcctagagtcctagctacttgagaggctggagcaggagaatcacttgagtccaaaagcttcaggttacagtgagctatgactgtgctactacacccgaggcaacagaccaagaccctgtctctaaaataaataaataaaatgttaagtactggaggaaaaaatacacacgtacacatatacgcatatatatatatatatatacacacacacacacagtacatatatagaaccanaagttatgtggaagcaccagaacaaaaatacatacatatatacacacgtacacatgcaca

SEQ ID NO: 16626 - DNA, 340 bp, Homo sapiens
gagttaattttttcagggctttgccctggtgtctctgttgttcttgcttaatactgcccatggacaatcttgtctacactggtgggcttaatttccgtgtatgtgtgcaggttcccttgcctttgggcatgttacgatcctgaaaatatgtctaaaagctgggcgaaaagtacatatggggatgtacttttctgataatcaggaccaaatatctttctaaaggtaactggagaaactagaaaaaataaaacttctctggatgaaggcattgtatatctaagaagatactgaagaactaccaggccagtatctgcatgagaacaaaggcctagggtgatga

SEQ ID NO: 16627 - DNA, 396 bp, Homo sapiens
cccacgcgtccgaccatattgtaaactggttcagaaatctctagctcggatgttgctgaatgacttccttaatgaccagaatagagataaaaatagtatctatagtggcctggaagcctttggggatgttaaattagaagacacctactttgatagagatgtggagaaggcatttatgaaggctagctctgaactcttcagtcagaaaacaaaggcatctttacttgtatcaaatcaaaatggaaatatgtacacatcttcagtatatggttcccttgcatctgttctagcacagtactcacctcagcaattagcagggaagagaattggagtgttttcttatggttctggtttggctgccactctgtactctcttaaagtcacacaagatgctac

SEQ ID NO: 16628 - DNA, 463 bp, Homo sapiens
  misc_feature (1)...(463): n = a,t,c or g
ggagtnnnntttganntntggataaccntatgacatgattacgaatttaatacgactcactatagggaatttggccctcgaggccaagaattcggcacgagcggcacgaggaagaatttatgggttttgggtggaaggaatttctcaaagaaataaaaaatgttctttgcccttgatactgcaaacccactgatacaagtgccttgaatttattattattattattttttatttttttgagatggagtctnctnncnnatgcncctgcatccttctgctccaccantcaagttgaatgctttcctataattgcatttgctcccaaacctgtttatgccagttgaacttggataatatnacnnttacntanatngatgaaatntnancnttnanatgaaganttnnttccataaagactatatncggnagnntcnncanngnannttnctnncctgggcnacac

SEQ ID NO: 16629 - DNA, 337 bp, Homo sapiens
gagcttcaataccctgaccctcaaatccacagcacgggggtgggtcttagggcaccatccacccaacggcaaaggatactacagttcccatcctctaaagatgacaaactttttccttccaaagcacattctccccatgaagaaatgcagtgtgatccctcagatccctggaagccttttctaatgagccacatggtgagaccggcactaccaatccttttctaagacagacaaggtccaccaggacacagcacgctcaggtagttttactttgaggtttgggtgtgctgctctgcaagaccccaaagcacacagagcccacgtggaaagtgtcacc

SEQ ID NO: 16630 - DNA, 356 bp, Homo sapiens
gctttttatttcattatgcttctcatcagtctcagataggaatataaccgaaaaagaaattggagtggaacaatttcaatatctcaaaacacatgcaaatcaacgcccagaatcctacctggaatgtttttattgagacaattctgtacttgtctgagagatgaccttataataaataaattcatatcttgcaaaggtagatgttctccccaccttataaagctaattataccagcacaacataacattttcctaaatgcctgataacctcatcctgttactcaggaaatattatttttaaataggtgtgatagatacaaactgaaacactcagatttcaattccagccccaattc

SEQ ID NO: 16631 - DNA, 1186 bp, Homo sapiens
ggccatggtggtctgtggagacattgccgtctatcccagtggtaatgctcgtcccacaggtggggccggagctgtggctatgctgattgggcccaaggcccctctggccctggagcgagggctgaggggaacccatatggagaatgtgtatgacttctacaaaccaaatttggcctcggagtacccaatagtggatgggaagctttccatccagtgctacttgcgggccttggatcgatgttacacatcataccgtaaaaaaatccagaatcagtggaagcaagctggcagcgatcgacccttcacccttgacgatttacagtacatgatctttcatacacccttttgcaagatggtccagaagtctctggctcgcctgatgttcaatgacttcctgtcagccagcagtgacacacaaaccagcttatataaggggctggaggctttcggggggctaaagctggaagacacctacaccaacaaggacctggataaagcacttctaaaggcctctcaggacatgttcgacaagaaaaccaaggcttccctttacctctccactcacaatgggaacatgtacacctcaaccctgtacgggtgcctggcctcgcttctgtcccaccactctgcccaagaactggctggctccaggattggtgccttctcttatggctctggtttagcagcaagtttcttttcatttcgagtatcccaggatgctgctccaggctctcccctggacaagttggtgtccagcacatcagacctgccaaaacgcctagcctcccgaaagtgtgtgtctcctgaggagttcacagaaataatgaaccaaagagagcaattctaccataaggtgaatttctccccacctggtgacacaaacagccttttcccaggtacttggtacctggagcgagtggacgagcagcatcgccgaaagtatgcccggcgtcccgtctaaaggtgttctgcagatccatgggaaagcttcctgggaaacgtatgctagcagagcttctccccgtgaatcatatttttaagatcccactcttagctggtaaatgaatttgaatcgacatagtagccccataagcatcagccctgtagagtgaggagccatctctagcgggcccttcattcctctccatgctgcaatcactgtcctgggcttatggtgctatggacc

SEQ ID NO: 16632 - DNA, 129 bp, Homo sapiens
tgttcaaacaaggtatggacacatcaacatattcaccttttggaaggactagtgacttggttaaaaactaatgagtgtttgcgtgtggtgtttctatgcgagcacccattctcaatttttttttttttt

SEQ ID NO: 16633 - DNA, 433 bp, Homo sapiens
ggagtcacacaggggacaacaatgaatcagaacagatgctgagccataggtctaaataggatcctggaggctgcctgctgtgctgggaggtataggggtcctgggggcaggccagggcagttgacaggtacttggagggctcagggcagtggcttctttccagtatggaaggatttcaacattttaatagttggttaggctaaactggtgcatactggcattggcccttggtggggagcacagacacaggataggactccatttctttcttccattccttcatgtctaggataacttgctttcttctttcctttactcctggctcaagccctgaatttcttcttttcctgcaggggttgagagctttctgccttagcctaccatgtgaaactctaccctgaagaaagggatggataggaagtagacctctttt

SEQ ID NO: 16634 - DNA, 427 bp, Homo sapiens
gcggcacgagcgtttatttcatctcttgtttacgatttcactaggactcagaaacgagatcgggaagcagaaatatagtgcaatagtgcaacatctctgaatccttttaatctagagaaggcatttcatatttgggggctaaggtttccagtcagatgaggcaaacagcaagagtaagcagtgttacttgcaggtactttggttaatgttgatttaaattttcatgaatgtgctggtgaacactgtgaccaggcttttgtagatggcgatgtgttatagacggtgctcactcccaagggacagcaagtgagcagagatgtactgcaaagtcgccagtcactgctgcaaggtggcctctgcctggggcctccagaagctgctcctttaccctcttggtcccatggctgaagctggagcagcggattgc

SEQ ID NO: 16635 - DNA, 402 bp, Homo sapiens
ggcagtatgaaaatggactaatacagtctcataggcttgttgtgaagggaaatgagacaagtactcaatagatgtcagctgtaattattattctgtactcccttattcacacttttactgatagttttataatgatgatgttaatatctttattatgttctttgcattattgttgaatgtacatgtttctgtcctccacttccattatgagctgttataaacagaggataatacctatttcactactgtaacctcaatacctcacccagggaccatcaaagaggaggcactgtatgcatatttttaacaaatgaatgaaaatatgagtgcattaatttattccactaatgagcacccatcaagtgtttagtaaacctcagattgatgaatgataaggtgata

SEQ ID NO: 16636 - DNA, 439 bp, Homo sapiens
aggctgtaagattagtgtgaacaggagaaatttccaggtaggcctctaacttcattaccgttgggtttcttactgccggtattcagacaggtagacatgacttgctggagtttgattgccttttcttacctcatgttggtagaaacatcaatgagctgaaatgtatagggagataaaatgggcagaggcaggaggaaggaagaggaagcgccagcctgaggtggtcatgaactgcatactcagaccgtggctcatggggaattggttgccattgaccacgtgaagcagctccagcctccacgccagttgcatgttggtaaaagtttgtccttggtgcgataagtgtgtggaacgggagagagaccatctctgcctctgagattggattcgggtttcagttcgttgcggtaaagtagtgaagtgtggcaggggttctcta

SEQ ID NO: 16637 - DNA, 420 bp, Homo sapiens
  misc_feature (1)...(420): n = a,t,c or g
ggaagaatttcaaaactacaaatgagcgcttcctgaaccagataaaagttcaagagaagtatgtctggaataagagagaaagcactgagaaagggagtcctctgggagaagtggttgaacagggcataacacgggtgaggaacgccacagatgcagttggaattgtgctgaaagagctaaagaggcaaaagttctttgggtatgtttcacctcctagtgcccgtggatggaatcaatgctctttggggaagaaccctcttgaaaggagaagataaaaccccgntacacttgttccaacttgngggaaatgatgaaaaatgattgnttggaggcncnatcctttggtttnanccaacccggattnttttttttntttgncccnnnaatttttttggcccncggngttntggaaaaaataaa

SEQ ID NO: 16638 - DNA, 423 bp, Homo sapiens
ggtgaaaaagtcagtgatgctccccctttctactccagatcctgtccttcctggagcaaggttgagggagtaggttttgaagagtcccttaatatgtggtggaacaggccaggagttagagaaagggctggcttctgtttacctgctcactggctctagccagcccagggaccacatcaatgtgagaggaagcctccacctcatgttttcaaacttaatactggagactggctgagaacttacggacaacatcctttctgtctgaaacaaacagtcacaagcacaggaagaggctgggggactagaaagaggccctgccctctagaaagctcagatcttggcttctgttactcatactcgggtgggctccttagtcagatgcctaaaacattttgcctaaagctcgatgggttctggaggaca

SEQ ID NO: 16639 - DNA, 363 bp, Homo sapiens
gagctctcaataatcaagatcagatttatgcaggtgaagaattccttacgctttaagtcattttccatctccaggctagcagttcagttgatttccaggaagaggaatcaataaggtagatttatttttaatatatggatatccatagagtctagcttagtcttttggtaagttaaagtttgctagtcggacctgctataggaattcttttttgttgctgtttcctcctccctcagctagatacaagattaggtaggcaggaggttaggcggccagtctaggtccagaaaagtagatcaagtgggtagcaaggtgagccgcaaatcttagctgggcctgagtttgcactgttctgctctaagg

SEQ ID NO: 16640 - DNA, 449 bp, Homo sapiens
gaaaatgtcagaatggcctgacttctaataggaaaaaacctcatgacatcacatgatggtaaaccatgtatgcatacatggcctatgtttacctgtatgtataacataatatgggtatataattgatttaagtctagaaaattcccgactaaacagctatgtctgttacttcattttaagattccttccagctctaaaattctgtgaattttacttagcatcctttgtctaccttgaatgttgattaccttaggaaacaaatgcaatcacagccagctatcagctcatgccaataactatatacaatttgcaatttgtatgctattcctgaagaagagttcaggtattcagagaaaaggcctttctctctactgcctgcttctactaatttttaaacagggaccttcctgagtaaagcaggtcctatcaagttgctgtcatcttctccc

SEQ ID NO: 16641 - DNA, 351 bp, Homo sapiens
gaccgtgtttctcatcgagatgctgctgcccaagaagtaccatgtgctgaggtttctggataaaggtgaaaggcatcctgtgcgggaagcccgtgccgtcatcttctttggtgaccaggagcatcccaatgtcaccgagtttgctgtggggcccctgccagggccctgctacatgcgagcactgtcccccaggcctgggtaccagtcctcctgggcatcgaggcccatctccacagcagagtatgccctcctctaccacaccctgcaggaagccaccaagcccctgcatcagttcttcctcaataccacaggcttctcattccaagactgccatgacagatgcctggggcc

SEQ ID NO: 16642 - DNA, 552 bp, Homo sapiens
  misc_feature (1)...(552): n = a,t,c or g
cccccttgncnccatcagctatgacatgattacgaatttaatacgactcactatagggaatttggccctcgaggccaagaattcggcacgagagcaagagcacttttatacagaacaagaattattagatgcacctaaattaacgtaaagggatctttcttcactgaaactagattaggtccctaattactccctatatacagttgtaatgttttgaattggtacattcactttttttgttatgcgcgtctactctaggttgaactccagtgtacctaacagagagtttgacatcagctgtgacaacatggagggaccacttgtgtgttgacactgctatatctccatatttagcaccgagccttgtacattataggatctcaaattatttgttgaatagagctatgtgtgtttttcccctctttttggtggtgcccccacctttggnttttcaggccacagagctcatttttggttttttaatctagagccagatgccagaacacttttggntaaaaanctccttanaagnnctnaggaanaaatgnaaga

SEQ ID NO: 16643 - DNA, 469 bp, Homo sapiens
tttgagaccgtttgactgattacgaatttaatacgactcactatagggaatttggccctcgaggccaagaattcggcacgaggtatatagctcctcagccctctcagccatcttatgagggaacactgttgctattctcatattacagatgaggaaactgaggctcagagaggttaagtaatcctccaagcctccgcagccaggaagtggtatcactttgaactcaaactcaggtctgtttgatcctgaggccaagcccttggccagaaaaattaggaagtcatagtcccttcccttaaggagctctatttaatatagcagaacaagtaaagcaagtacatatctctctaaagtatactgtgtcactgaagataagaaaggaagaaatcctgtgatgggtcagatgaagtcaggaaaggcttctgggaagaggtggccttatagatctaactagaaggatgaatgagct

SEQ ID NO: 16644 - DNA, 567 bp, Homo sapiens
  misc_feature (1)...(567): n = a,t,c or g
aacagctatnacatgattacgaatttaatacgactcactatagggaatttggccctcgaggccaagaattcggcacgaggtcctctgggagaagtggttgaacagggcataacacgggtgaggaacgccacagatgcagttggaattgtgctgaaagaattaaagaggcaaagttctttgggtatgtttcacctcctagtggccgtggatggaatcaatgctctctggggaagaaccactctgaaaagagaagataaaagcccgattgcccccgaggaattagcacttgttcacaacttgaggaaaatgatgaaaaatgattggcatggaggcgccattgtgtcggctttgagccagactgggtctctctttaagccccggaaagcctatctgcccccagagttgctgggaaaggaagatttgatgccctggatcctttattcccatcctggttccaactataacccaaaggaatttttnaggtggnatcagtattatttggaaaacaattggcttcaacatgagaaactcctacagaagaanggaaaaagaaactgtgttctaata

SEQ ID NO: 16645 - DNA, 392 bp, Homo sapiens
gtaaaaatcaaattttattggccatatcaccaggtggatgaatggtagagctgatggcaaagagtttatagcatttagcagctacacctttgacacatgaaattcataaattgctgtaaaatacctccaaggcccttctcaaaaggacactgtttgctttcctatgattgaataatgtttattttattaactaatatactttttgctttcttctattaaatgcgattatggagtagggggtgggaggaggtgttcaaaaggtaaatagaacttggctcttgctagttttgagaatttaaaatctaattggggaagacaggattaacacacctgaaaggttaactaatgttacaagaaagtcaatgattaagtatttgatgagtgttgcagaa

SEQ ID NO: 16646 - DNA, 551 bp, Homo sapiens
  misc_feature (1)...(551): n = a,t,c or g
ggttnnnnnnnnnnttttgataccnnatntgaataccngntatgacatgattacgaatttaatacgactcactatagggaatttggccctcgaggccaagaattcggcacgagaatgaatttgacatgaaaaggatgaacgattcactgattctctttgactcatttgagactaaaatgcagaattaccaacatttaaaacatatatatgcacatgtatttggtatgcatgtgtatatatataaaaatatataagagggactttatgggatagtatggactatggaaaaacaaatttgcacaatggcctgggaagttgaggtcactttttacagggaaatagaagaaactgagaacctagtctcgtatattctgagtaaatggaatcagtcctgggaatagagagtgtcctttgtgccagtattacaagaagcccaaactttatttttataaagggagaggatgactttctcaatcaagtgccaccagataaaaacaactgcagaggctggaactgccacaggctgtatgaaaggccactttggaaagggt

SEQ ID NO: 16647 - DNA, 410 bp, Homo sapiens
ggtcctctgtgaaactgaaaatgatcacatgaaaaaaatgtgagcataaaaaagagaagtaaaggtgtaccattagcctacatactgagctgacgatcagatcatagaatactttatttaatcaagacatttaaaaatacttatttcatctacatactttcaaagcaaaataatttctggggctagtttcctttgtataaggcttaagcaaggaatatatttccatgccctttgatccaagtaaaatctaaggaagagggaaagtaaaccttgaaattaagacctagaaatagatccacccttgcagactgataaaagtgggcaatctagtaggccagttcacattacagttatctcagttttgcttaaagcaaaccctaaccctcaacctacgaggccagatagcaaaa

SEQ ID NO: 16648 - DNA, 392 bp, Homo sapiens
  misc_feature (1)...(392): n = a,t,c or g
gggggactgaagatactcccacaggggctcagcaggagcaatgggtaaccaaatgagtgttccccaaagagttgaagaccaagagaatgaaccagaagcagagacttaccaggacaacgcgtctgctctgaacggggttccagtggtggtgtcgacccacacagttcagcacttagaggaagtcgacttgggaataagtgtcaagacggataatgtggccacttcttcccccgagacaacggagataagtgctgttgcggatgccaacggaaagaatcttgggaaagaggccaaacccgaggcaccagctgctaaatctcgntttttcttgatgctctctcggcctgtaccaggacgtaccggagacccaacccnaaaatcattccttgggt

SEQ ID NO: 16649 - DNA, 483 bp, Homo sapiens
  misc_feature (1)...(483): n = a,t,c or g
gcttcactttggtacatgtctttataagtaaattcagatacttaggcggaggttttcaaacattttagtaaagaaattctattcaaacagtcttacactcttaagcgtaaaggttccctccatcctgtaagtngaagcctcaagggaaggtgtaataatgattgatttanacttgnatngtctgctatggtaaccattagtgatatgnggctattaaatttaaagtctttaaaatcaaatttaaaaatcagnggctngagctaggcgcagtagtgngtgcctgtactctcaggtacttgggaggttgaggtaggaggctctcttgagcccaagagttcagggccaacctgggcaacataacaagaccccatctcttaanaaacaaaaaattcagtggcttaatcacactaccaaggccatttnaaaagctttggtaagatntaantggcnctgtngtttnaaaanangggcttgagnnaaaaa

SEQ ID NO: 16650 - DNA, 441 bp, Homo sapiens
  misc_feature (1)...(441): n = a,t,c or g
ggccctcgaggccaagaattcggcacgagggtcattgtggtgactgccatcactgccatcattgcctaccccaatccctacacacgccagagcaccagcgagctcatttctgagctgttcaatgactgtggagcccttgagtcttcccagctctgtgactacatcaatgaccccaacatgactcggcctgtggatgacattccagaccggccggctggtgtcggtgtttacacggccatgtggcagctggccctggcactgatcttcaaaatcgtcggtaccatatttacctttggcatgaagatcccgtcgggcctcttcatccccagcatggctgtgggcgcgatagcaggcaggatggtgggaattggcgtggagcatctggcctacatcaccatgnactggaatnntcttcaggaactggtgcanacccgnncaaat

SEQ ID NO: 16651 - DNA, 1514 bp, Homo sapiens
  misc_feature (1)...(1514): n = a,t,c or g
tacgactcactatagggaatttggccctcgaggccaagaattcggcacgagattgctggnctcaatgtacttagaattattaatgagccaactggngctgctattgcttacggcttagacaaaaaggttggagcagaaagaaacgtgctcatctttgacctgggaggtggcacttttgatgtgtcaatcctcactattgaggatggaatctttgaggtcaagtctacagctggagacacccacttgggtggagaagattttgacaaccgaatggtcaaccattttattgctgagtttaagcgcaagcataagaaggacatcagtgagaacaagagagctgtaagacgcctccgtactgcttgtgaacgtgctaagcgtaccctctcttccagcacccaggccagtattgagatcgattctctctatgaaggaatcgacttctatacctccattacccgtgcccgatttgaagaactgaatgctgacctgttccgtggcaccctggacccagtagagaaagcccttcgagatgccaaactagacaagtcacagattcatgatattgtcctggttggtggttctactcgtatccccaagattcagaagcttctccaagacttcttcaatggaaaagaactgaataagagcatcaaccctgatgaagctgttgcttatggtgcagctgtccaggcagccatcttgtctggagacaagtctgagaatgttcaagatttgctgctcttggatgtcactcctctttcccttggtattgaaactgctggtggagtcatgactgtcctcatcaagcgtaataccaccattcctaccaagcagacacagaccttcactacctattctgacaaccagcctggtgtgcttattcaggtctatgaaggtgaaagacccctgacaaaagacaatcatcttctgggtacatttgatctgactggaattcctcctgctcctcgtggggtcccacagattgaagtcacctttgagatagatgtgaatggtattcttcgagtgacagctgtggacaagagtacgggaaaagagaacaagattactatcactaatgacaagggccgtttgagcaaggaagacattgaacgtatggtccaggaagctgagaagtacaaagcggaggacgaggtgcagcgcgagagggtgtcagccaagaacgccctggagtcctacgccttcaacatgaagagcgccgtggaggatgaggggctcaagaggtcatctcgtggctggacgccaacaccttggcccgagaaggacgagtttgagcacaagaggaaggagctggagcaggtgtgtaaccccatcatcaccaagctgtaccagagtgcaggaggcatgccaggaggaatgcctgggggatttcctggtggtggagctcctcccctctggtggtgcttcctcagggcccaccattgaagaggttgattaagccaaccaagtgtagatgtagcattgttccacacatttaaaacatttgaaggacctaa

SEQ ID NO: 16652 - DNA, 242 bp, Homo sapiens
attcagtattatttggaaaacaattggcttcaacatgagaaagctcctacagaagaagggaaaaaagagctgctgttcctaagtaacgcgaacccctcgctgctggagcggcactgtgcctacctctaagccaagatcacagcatgtgaggaagacagtggacatctgctttatgctggacccagtaagatgaggaagtcgggcagtacacaggaagaggagccaggcccttgtacctatgg

SEQ ID NO: 16653 - DNA, 479 bp, Homo sapiens
  misc_feature (1)...(479): n = a,t,c or g
gcgtgatggtgggtgcctgtaatccctgctactcagtaggctgaggcaggagaatcacttgaacccaggaggcggaggttgcggcgagccgagatcacgccattgcactccagtgtgggcgacagagcgagactccgtctcaaaaaaaagaaaaaaaaaatggcaaaattgattcatgttagagaaaattcaaattacccagatatatttaaaatacaacttaaaatcctttccccttttttactttttcccaccttttcctcatgagtgttaaaaatttggtacatgtaattttcaggccttttcaaaaaatgcacataaaaataaatgaattttttaaataaatgcatctatattaaatacccctaatttaatatagaagggactgaatttttgcctattatgggcccttacattatnctttgtattgcatataattttaggggggaaanncttccttattatttataaaatactta

SEQ ID NO: 16654 - DNA, 387 bp, Homo sapiens
aattcggcacgaggggtcttccagggagaaggccaaggggagtcaccttcccttgccactttgcacgacgccctctccccacccctacccctggctgtactgctcaggctgcagctggacagaggggactctgggctatggacacagggtgacggtgacaaagatggctcagagggggactgctgctgcctggccactgctccctaagccagcctggtccatgcagggggctcctgggggtggggaggtgtcacatggtgcccctagctttatatatggacatggcaggccgatttgggaaccaagctattcctttcccttcctcttcggccctcagatgtcccttgatgcacagagaagctggggaggagctttgttttgggggtc

SEQ ID NO: 16655 - DNA, 363 bp, Homo sapiens
  misc_feature (1)...(363): n = a,t,c or g
gttgaggattaaataagagaattcatgtaaagtacctggtacatagtaagcactgaataaatgttagttatgtttttcatcattttgattttcttcctttcctcttttctctgcctgtttaaactctattctccctttaaagcttaaaggtcatctcctgtgtgaaatatcctttcatcatctagccagaggattattaccttcctctgaatttctgaaccactttgtttctggagtcaacaggcatttattaagaacctgccatgtgtcgagtgctgtgctaagacaaaaattatacattcaaaagagcttttgaaaacnaaaaatgaataagaaatattaaaaaattaaaaaaaaaaatag

SEQ ID NO: 16656 - DNA, 478 bp, Homo sapiens
  misc_feature (1)...(478): n = a,t,c or g
gtgcttctcttccttatttgataagtcactagacccaaacgtcagttgtagccacgtttccaaatgccatcaccagcccctgcaccagctgcacaggccttatgctatcgtggtgactagttggtgccttagtgttacccagtttcgtttgggtagactcatactcatcaccttagcagtttagtttatggatgggtttcacagagttacaacccgatttatccacaggtggttttcctactcttaaaaacagcacctgagcaaacagaatttttatttgtcactaaatctgcaggcaactgttcttcctgctgtgtttctcttttcttttccacatacacattaaggggactggggaatgcccggggaagagttggtaatttgcataataaaagtgnacacatgacatgttggaaggaaggtgtngcacccaaggcaatatttttccaatttgcttccaaggcttttaaaanaaaag

SEQ ID NO: 16657 - DNA, 465 bp, Homo sapiens
  misc_feature (1)...(465): n = a,t,c or g
gcctggagaagtgtaacacctgcggggagcccatcactgaccgcatgctgagggccacgggcaaggcctatcacccgcactgcttcacctgtgtggtctgcgcccgccccctggagggcacctccttcatcgtggaccaggccaaccggccccactgtgtccccgactaccacaagcagtacgccccgaggtgctccgtctgctctgagcccatcatgcctgagcctggccgagatgaaaacttgtgcnanaaanaactttcncatgaaanggtacaaatgngaagnnaaccattcctttggaactccttgggcaaggttntgaccnagaaagnngccggnaaannctggttaattaactnggaagggggnaaagcccncctttttnggaaanaagggnttgnaanttttnaaggggggtttatnggggggnccccantttgncttgccnaaaaggtttnttgcc

SEQ ID NO: 16658 - DNA, 448 bp, Homo sapiens
gcctggagaagtgtaacacctgcggggagcccatcactgaccgcatgctgagggccacgggcaaggcctatcacccgcactgcttcacctgtgtggtctgcgcccgccccctggagggcacctccttcatcgtggaccaggccaaccggccccactgtgtccccgactaccacaagcagtacgccccgaggtgctccgtctgctctgagcccatcatgcctgagcctggccgagatgagactgtgcgagtggtcgccctggacaagaacttccacatgaagtgttacaagtgtgaggtcagccatccctctggactccttgggcaggttctgaccaggaggtggcgggagatgctgcttactaactgggaggtggaaagcaccagcattcaggaaacagggctgtgattttgagggtggctcatggtggcaccccatctgtcctgcaa

SEQ ID NO: 16659 - DNA, 683 bp, Homo sapiens
  misc_feature (1)...(683): n = a,t,c or g
cttatacgatatcttctgtatggagagaagggaacaggaaaaaccctaagtctttgccatgttattcatttctgtgcaaaacaggactggctgatactacatattccagatgctcatctttgggtgaaaaattgtcgggatcttctgcagtccagctacaacaaacagcgctttgatcaacctttagaggcttcaacctggctgaagaatttcaaaactacaaatgagcgcttcctgaaccagataaaagttcaagagaagtatgtctggaataagagagaaagcactgagaaagggagtcctctgggagaagtggttgaacagggcataacacgggtgaggaacgccacagatgcagttggaattgtgctgaaagaattaaagaggcaaagttctttgggtatgtttcacctcctagtggccgtggatggaatcaatgctctctggggaagaaccactctgaaaagagaagataaaagcccgattgcccccgaggaattagcacttgttcacaacttgaggaaaatgatgaaaaatgattggcatggaggcgccattgtgtcggctttgagccagactgggtctctctttaagccccggaaagcctatctgccccaggagttgctgggaaaggaaggatttgatgccctggatccctttattcccatcctggnttccaacta

SEQ ID NO: 16660 - DNA, 203 bp, Homo sapiens
gcaggacagagaattttaagtgaaacatttgccttacttgcagtaataatgtgctggtcttcacagtagctaaggccctctatgtttcccagaggtaaataagaatccaggaatggaggtccatctgtgatgaatggcttttttctaatcaaagtagtataatgctgttttatctgttttgtcatcttgtttttttttttttt

SEQ ID NO: 16661 - DNA, 469 bp, Homo sapiens
gcggcacgagattaaatctccataacaggtcgggcatggtggctcacacctgtaatcccagcactttgggaggctgtggtgagtggatcacttgaggtcaggagtttgagaccaacctggccaacaaggcaaaaccccgtctctactaaaaatacaaaaattagctgggcatggtggcacaaacctgtaatcccagctactctggagactgaggcaagagaatcgcttgagcccaggaggcggaggctgcagtgagctgagttaaggggtagcaccagagctgagaggccaaagaagagaccctgagccagcagacgagatatggggtttatttaggggaacttacgtacagggatggtccagtgattgtaggctggacaggagaactgccaccacttgtaaaaagcatgtagttcatgtagcattttcacttaacatcctttccctacaacccccacctggcaacctt

SEQ ID NO: 16662 - DNA, 367 bp, Homo sapiens
attttacattcatatccgtgaaaatactgaagtgcaactgaacgaggaggagaggtcctcgctctctgcaccatgtgaaaggagaaggacctctacacgaccaccagcacagcctcccgacagcgccgggagaacgcgaggggagtgagcattacagagtctttaggaggacagctagattgtgcttgaggctccccctgccccattttctgtgctgtgagcagcaggcatttttattgagagcttccaactagtgtttaaaagacaaacagggcttcagctacagcatatctaacacacaaacggaccatgagctccatttcatattaatctgtagaaattcccagtctagttaaaaaatgtaaac

SEQ ID NO: 16663 - DNA, 434 bp, Homo sapiens
  misc_feature (1)...(434): n = a,t,c or g
ggcgnnnnnntttggacggctgatgtatataactatctattcgatgatgaagataccccaccaaacccaaaaaaagagatctctcgaggatccgtcttaacctatctcaatgtcattacgatttttttaagaaaaataagtctcaaagaaaaatacagagaaggagcagaataactggttttgtcactggactcatgatcatttctcccattatgatcagtttcaggccttaagttcaagaccagtatttatgttgggagttgatttaggcaaattttcattcaaaggataaactaatttaagagccaaacaaagggtttgctaaattaattgctaactcatttttctaaatttgaagcttcaatgattgcttctgttaatgcaacattgtcctagagtatgggcagcttttgtagcactcttgtcattgccat

SEQ ID NO: 16664 - DNA, 440 bp, Homo sapiens
aattcggcacgagatcaagctcatcgactttggtctggccaggaggctggagaatgcggggtctctgaaggtcctctttggcaccccagaatttgtggctcctgaagtgatcaactatgagcccatcggctacgccacagacatgtggagcatcggggtcatctgctacatcctagtcagtggcctttcccccttcatgggagacaacgataacgaaaccttggccaacgttacctcagccacctgggacttcgacgacgaggcattcgatgagatctccgacgatgccaaggatttcatcagcaatctgctgaagaaagatatgaaaaaccgcctggactgcacgcagtgccttcagcatccatggctaatgaaagataccaagaacatggaggccaagaaactctccaaggaccgggatgaagaagttcatggcaaga

SEQ ID NO: 16665 - DNA, 455 bp, Homo sapiens
  misc_feature (1)...(455): n = a,t,c or g
gctggaacagtggctgtgagcggctgccagctgaacttctccgcggcctcccttcctgtctgaggtgtgtttttgccaagcccactgtctgtttcagggcagccagggtagcctcaaagaggagccagagcacagagagttttcctacacagcttcttttcctccagtggtgctcgcctctcgctttagcagagttcttcttcttgcttggcgtaaacacttcatttcccaagcagcctatccctttggggcggtccctttgcccctcaaaggttgccccagagtgcacctgaatctcaaatgcccagccatgcctcctttcctgctccaacactggggctgtgccagctggctcctgatttcccctgcacccttctgctcccgccctgggggatcgctgcccccgtgcacaaacanctgcttcccctggggctgaccgntgtccttgcgggaat

SEQ ID NO: 16666 - DNA, 407 bp, Homo sapiens
gcccataatggggataaccattctacagatgaggggaactgagaatcaaaaaggttaaaatttttgcataagttcacacagaagtgtgagctgggatttgaatttaggtgtctcatcccaggagcttctcaacatgtctccacagccgtgctgtataccaattgtaagcatgcatctttctcagactttggattcattatctggatataaaattcatatcctaataaaatgaagtatgtagtgacaagtgtgctcaagtcaagcagcccatgaaaggctgtacaacagagggcaaagtgaaagccgcatgcaggtctgtggaattgtatggggatgtttcatacaacactgaatgccatgtctgctggaaaacattgcttgaaaataaatatgtaggccatcgctac

SEQ ID NO: 16667 - DNA, 228 bp, Homo sapiens
cccacgcgtccgctgatgaccatacttgagaaatgtttcaaggtttttaagtcttattgtgaaaaccaccttggcagcacagctaagagaatagaggagttcctggcccagtttcagagcctcgatgcagaaaccaaagaggaagaagatgcttctgggtcacagccaaaggggcttcagaagacagacctctatcatcttcagaagtccttattggaaatgaaggag

SEQ ID NO: 16668 - DNA, 438 bp, Homo sapiens
aaggacctgtatataactatctattcgatgatgaagataccccaccaaacccaaaaaaagagatctctcgaggatccgatttggtaacatgaagaaaaaagttaaattatccaaggaacaccagtcattggaagagaaccagagacaaactagatcaaaaagaaaagctacaagtgatacattagagagtcctcctaaaataattcccaagtatatttctgaaaatgagagtccaagaccctcacaaaagaaatcaagagttaaaataaattggttaaagtctgcaactaagcaacccagcattctttctaaattttgtagtctgggaaaaataacaacaaaccaaggagtcaaaggacaatctaaagaaaatgaatgtgatcctgaagaggactttggggaagtgtgaaagtgataacacaactaatggttgtggac

SEQ ID NO: 16669 - DNA, 454 bp, Homo sapiens
aagacaaggtcttactctgttgcccaggttggagtgcagtgatgcaattacagctcactgcagctttgaattgggctcaagtgatcctcccacctcagcttcctgagcacctgggaccacagatgtgtgccacttcgcctggctaattttgaaaaactcttttttgtagagccggagtctccctatattgcacaagctggtcttgaactcctgggctcaggcaattctcccacctcagcctcccaaagtgctgagattatagctgtgagccaccgtgcccagcctgaagctagaagctgttttcaatatgtcattattctcatttggttaggataagattgaagggaggggtaaaaagtttcaaaggcggagagtttcaaaggcatcatgttaacaggcagcaacacgatcaagccccacacgaaggaaccaccaagactggagtggcattctc

SEQ ID NO: 16670 - DNA, 656 bp, Homo sapiens
ctcggatggataaggtggaacgcctgaaacaggtgttgctccaccaacaggctaaatttgggagaaatggatctgactgcccggacaagttttgcttattccagtctgaaaccaaaaaccttctgttcaatgacaacactgagtgtctggccagactccatggcaaaacaacatatgaaaaatatttgggaccacagtatgtcgcaggcattactaatctgaaaaagtgctcaacctcccccctcctggaagcctgtgaattcctcaggaagtaaaaccgaagaagatggcccagctccccaagaaagcctcagccattcactgcccccagctcttctccccaggtgtgttggggccttggcctcccctgctgaaggtggggattgcccatccatctgcttacaattccctgctgtcgtcttagcaagaagtaaaatgagaaattttgttgatatgtcgacgcggccgcgaattccagatctatgaatcgtagatactgaaaaaccccgcaagttcacttcaactgtgcatcgtgcaccatctcaatttctttcatttatacatcgttttgccttcttttatgtaactatactcctctaagtttcaatcttggccatgtaacctctgatctatagaattttttaaatgactagaat

SEQ ID NO: 16671 - DNA, 325 bp, Homo sapiens
gaaggcgtcctcggggtgctcattcgcttgcacacactcagcaatcaggaactaacacgtgctacctgtcttttagaagatactttagggccgggtgcagtggctcagcctgtaatcctagcactttgggaggccaaggcaggcagatcacaaggtcaggagttcgagaccagcctggccagcatggcgaaaccccatctctactaaaatacaaaaattagctgggtgtggtggtgcacgcctatagccccagctactctggaggccaaggcaggagaatcccttgaacctgggaggcggaggttgcagtgagtcgagattgtgc

SEQ ID NO: 16672 - DNA, 524 bp, Homo sapiens
  misc_feature (1)...(524): n = a,t,c or g
tttggaancctnttgaatcccattagntatgacatgattacgaatttaatacgactcactatagggaatttggccctcgaggccaagaattcggcacgagctggaagaaaaaaattggctgggcgtcgtgtcgcctgcctgtagtcccagctgttcgggaggctgaggcaggagaatcacttgagcctgggaggcagaggttgcagtgagccgagatcgtgccactgcaccccagcctggcgacagagcaagacaacatctcaaaaagttggatatgcaggctttttaaaagatggtcttgctctgtagtccagactggtatacagtggcacgatgacagctcactatcattcctgggctcaagtgattgcaggcattttctttacattgaaggaaagcaaatgtgcctgttgagacctaatcaaggattgctggagaaacaaagttttgattgaggctgcttgaatagnggtaacgtaactgctttcagttctgcaattaattgggtgactatgagctgtgtg

SEQ ID NO: 16673 - DNA, 435 bp, Homo sapiens
  misc_feature (1)...(435): n = a,t,c or g
gcccaaaccgtccccaagatttctgctgatgtttatattggcataatcactgatgacatgtgggaaggaagagagtggattacatcacagcaatggaacttcagattaaactctgagtgtccctgtgcttaaaatattatcactcacccaccatgacttcccgcagtccccaactcagaccagctcactggctcttgtctctctttcctccttagccccactccccatcagtaggaaaaaataagtgacaaatccctcttgttttcccataaagaggcagcataaatattctttttttccttccttaaaggcctctcacttttattacaggtaacttattaaaatattttcctgaaagcagttctttccctaaaggagattgtctactancgccagagtgttgataaaaattgagtanattaggccaggctctgg

SEQ ID NO: 16674 - DNA, 450 bp, Homo sapiens
caacagctatgacatgattacgaatttaatacgactcactatagggaatttggccctcgaggccaagaattcggcacgagacgtgtggtaatgacctgttatgagcctgacttggaataactttcttcctcacagaatggtggatactccatatgtgtagaattactgagagtaattatctttgcaacagtaaggcgtgagggtaagaaatcaataaagcagaagggaaagatattaacatttatcgaccactttctgcatgacagcagaaggcggtcaataaatggcatactttattttaatcgtattaggtgattattgcagtattatcttaatttatgtgtgaagaaattgtggtccagcgaggttaagtcacttgctcagtgtccctcagtattaagtgataaagcagaggtatcaacctaggataccctacaaggtttggcttcc

SEQ ID NO: 16675 - DNA, 829 bp, Homo sapiens
  misc_feature (1)...(829): n = a,t,c or g
atacattttctgcttttggtaacatcctttcatgtaaggtggtttgtgatgaaaatggttccaagggctatggatttgtacactttgagacgcaggaagcagctgaaagagctattgaaaaaatgaatggaatgctcctaaatgatcgcaaagtatttgttggacgatttaagtctcgtaaagaacgagaagctgaacttggagctagggcaaaagaattcaccatttagtactatgagaccagcttcttcacaggttccacgagtcatgtcaacacagcgtgttgctaacacatcaacacagacaatgggtccacgtcctgcagctgcagccgctgcagctactcctgctgtccgcaccgttccacagtataaatatgctgcaggagttcgcaatcctcagcaacatcttaatgcacagccacaagttacaatgcaacagcctgctgttcatgtacaaggtcaggaacctttgactgcttccatgttggcatctgcccctcctcaagagcaaaagcaaatgttgggtgaacggctgtttcctcttattcaagccatgcaccctactcttgctggtaaaatcactggcatgttgttggagattgataattcagaacttcttcatatgctcgagtctccagagtcactccgttctaaggttgatgaagctgtagctgtactacaagcccaccaagctaaagaggctgcccagaaagcagttaacagtgccaccggtgttccaactgtttaaaattgatcagggaccatgaaaagaaantttgggtcaccgagaaaatttctaacctcgaaacttaattttnnggaaaaaa

SEQ ID NO: 16676 - DNA, 354 bp, Homo sapiens
gtagttagtgacaatttgggaaaagatctgtatagagtacaactattattgaagagtagctggcaaggttacttaaagaaatagccaaggtaacaaatatagtagaggcattttcacagacttcttgagagcagagtttcgttattctcaatccttcacatttacttcactccttgccacataataagccttaagtaaatgttttgttgaatttgaaaatgaaaggctgttctctgttttactgaaaaacagtgggtgagtgatagcatgtaaagattattatctctgtccaggttggaggagtggggaagtgaaatttaatgtaatctgtgacttacataaactggttaagtg

SEQ ID NO: 16677 - DNA, 449 bp, Homo sapiens
cttgacatgattcgaatttaatacgactcctatagggaatttggccctcgaggccaagaattcggcacgaggaaagggggaatttgtagaacgaaggcaaattcagaatgtgaccatgggtgaaactgggaggtcagtaaatactatgggggtggggagtggtttgagagctgttgtagagcagtgggacattttgtaaagttgatgtcagcgaatgatgaattgatagaactaactctctggtcatgaggaggtttcaagaagacagttgtttggggaaaaagtagtaattggtctgttgagttttaaatgatgaatagaggtggggcagaaatgtagaactgactcattggagaaggtttagctgatcttgaaaatcagtagtgatgatttgattgagaaataagtgacaggggaaaaatggccgaggactccacaaggtaaagctc

SEQ ID NO: 16678 - DNA, 543 bp, Homo sapiens
  misc_feature (1)...(543): n = a,t,c or g
tctggacttgcccttcacaggccacacccctcacctggagatttgggggttggacttgagcagcagagtgtacgcaggcctctctcctgctccttcagttactccatccagtagtattgcatttctactctcagccactctctcaatccatttttctttctgcttgttgagtggtgacacttcactagctaaggaaggggaaaagccattgagaaacggtgtcggacctttgcagagcggccagtcttcctcccacagtggtggctgctctatagataacctcaggaacctgagtccccctggtgggggcagaagcatgtgaccagtagaagccaaaaaggggaaagaacagaacagcagttttaggagtcttcaccaagtcactggaggcagaaaatgccttaaagtccatggatatgtgccnnatgaggatcttttattgacnacctncttaaccgggaaacttggnnaaaaccctgtccnggctccnccggaagtcngcttnanaggctgggncgaagccaggaacctgngttttaggac

SEQ ID NO: 16679 - DNA, 410 bp, Homo sapiens
gccatgtgccgagaactgccccagtcaatagtctacaaatacatgagcatccgatctgataggtctgtgccatcagacatcttccagatacaggccacaactatttatgccaacaccatcaatacttttcggattaaatctggaaatgaaaatggagagttctacctacgacaaacaagtcctgtaagtgcaatgcttgtgctcgtgaagtcattatcaggaccaagagaacatatcgtggacctggagatgctgacagtcagcagtatagggaccttccgcacaagctctgtgttaagattgacaataatagtggggccattttcattttagtcttttctaagagtcaaccacaggcatttaagtcagccaaagaatattggtaccttaaagcctattttatttataga

SEQ ID NO: 16680 - DNA, 382 bp, Homo sapiens
  misc_feature (1)...(382): n = a,t,c or g
gcggcacaagaactggattactgcaacagtccagccagaatctttacttccatttctgaccactttaacctattctggagcgatcattttaaaacacaaaccaggccaggccgcagtggctcacgcctgtaatcacagcactttgggagcccaaggcaggcggatcacgaggtcaggagatcgagactatcctgtctaacatggtgaaaccccgtctctactaaaaatactcaagattagccgggtgttgtggcacatgccgatagtcccagctactcaggaaggtgaggcaggagaatcgcttgaacctgggaagcggattccttgnatngcnntgagccccnaaangggcccnttggcttttcaaccnnggcccaaaaaa

SEQ ID NO: 16681 - DNA, 331 bp, Homo sapiens
gctggttaatcaaattttgcttcacttatcaaatctttgtaatttttccttggtgggagtagaaacaaaaagcatattcatcaaaaaatagtaaacagaggataaggaacttttatatgaagtatcagcaaaatttttttcatatagcaaaattgttttaagtatttcaaaactatgcaagttgaaattagacataggctaatcaaagttaaacacaggcaaatttgcctagtcgtaagtgtcaatgtccaggaaatgaaatgaacagtcttatttcttactccaatgatttgtcaaagggatcataaaatatggccaaattaagatgtaa

SEQ ID NO: 16682 - DNA, 313 bp, Homo sapiens
ctcagtctctctcttactctcatgtcaagtcatgaattgaaaagctacaccttactcttcaaaaagtttatcctttacaccaattgggattgccagcatacctacaagagctcaaaactacataggttctcataggatcccactgacaaatctaagattttgttcagcatcattgacttcttatgttaagtagcctagttacctaatataaagacaaaagcattatggaagcacatatattagtcaagccttagctgagcagcaggggaaaggttgcacgtttaaatatttgctacttagtgagtggtggaag

SEQ ID NO: 16683 - DNA, 504 bp, Homo sapiens
  misc_feature (1)...(504): n = a,t,c or g
ggctcggcgtggtggtgcatgcctgtaatcccagttctccggaggctgaggcaggagaatcgcttgaacccaagaggaggaggttgtggtgagccgagatcacttcancctgggcaacaagagcaaaactccatctcaaaaaaataaaagccaggtggttgtctaactataggctttgcatattctggtccatgggttgctgaggaacaaggccaatgtgaggaacaacagcaacagtaagcccttagcaacacactgagaatgcagctccccttgataatactgagtccatggatatagaagctgcggccatcncctcctcatttctgttgcagtcatactctgtataattgatctggaatcttgtcaaggggtggggtaactgtgcaggaattttaataaactggacnggtgcactgatagggagaaggncgncttgtgctcacaggtaagcccacactggtactgcagttcactgaggagacctttcctacaccgantatc

SEQ ID NO: 16684 - DNA, 243 bp, Homo sapiens
gggcaaaagagtaaacagacaccatgaaaaaaaggatttccatgccagataagcatatatcattagatgtgctaagatacaacatcattagtccttagggaaatgtaaattaaaacctaaatgaggccggatacagtggctcacacctgtaatcccagcactttgggaggccaaggtggaaggatcacttgaacccacgagtttgagaccagcctgggcgacatgatgaaaccctatctctac

SEQ ID NO: 16685 - DNA, 568 bp, Homo sapiens
  misc_feature (1)...(568): n = a,t,c or g
gtcagcgtggggcgcccacaatttgcgcgctctctttctgctgctccccagctctcggatacagccgacaccatgggtttcggagacctgaaaagccctgccggcctccaggtgctcaacgattacctggcggacaagagctacatcgaggggtatgtgccatcacaagcagatgtggcagtatttgaagccgtgtccagcccaccgcctgccgacttgtgtcatgccctacgttggtataatcacatcaagtcttacgaaaaggaaaaggccagcctgccaggagtgaagaaagctttgggcaaatatggtcctgccgatgtggaagacactacaggaagtggagctacagatagtaaagatgatgatgacattgacctctttggatctgatgatgaggaggaaagtgaagaagcaaagaggctaagggaagaacgtcttgcacaatatgaatcaaagaaagccaaaaaacctgcacttgttgccaagtcntccatcttactagatgtgaaaccttgggatgatgagacagatatggcgaaattanaggagtgctcagaagcatcaa

SEQ ID NO: 16686 - DNA, 427 bp, Homo sapiens
  misc_feature (1)...(427): n = a,t,c or g
gcagtcactgcccctgccacaccatcctccccttgatcagacccagggcccccaacacccgaagaagaactgtctgcagctagagcctctgaggaaggactgcactgacacagccgtgatggtgagcaccagcctggggccttcaagtccctgcccctcacctgagcctggcgacagtcgctcagggtggcagactgatgagagcgtggatgcagaggtattttgcacgctcagaagctgggctagaatcgggcagtgttgtcatttttataaacacgtcacatgagcagtaacgtccaaccgcaaagctggctgacggcccctgcacacatccagctgctgctgccccagcccctcctggtgtgctgaagccctgtttctcttctgnctttatagtttgcaannattgggcccaannanagnttgg

SEQ ID NO: 16687 - DNA, 332 bp, Homo sapiens
cagcaatgtctccagcagggactaataagagagaaagtagaacacctatcaggcacaatgaagggcagcaagtcagacttgagctcagcatcaaaagtggttactactcccctgaaaggcagaattgcttcccctgtggttctggagattatgacaatgtttcacaaagtgtggagcagctcacaagatattaaataacttataaaggcattgaaaagatattatatgttgccatgggagacgacattatttctccttttgctcaaaactcttcaatgggtccccatttcctgcagagtaaaaaggaaaggccttgtccttacaagggcctc

SEQ ID NO: 16688 - DNA, 376 bp, Homo sapiens
  misc_feature (1)...(376): n = a,t,c or g
ggtaggaacagcgttaagaggagagagacacattcagcagccaaaggactcggtggaaagagcagaacaccatagacaatatgtcgctcttgggacccaaggtgctgctgtttcttgctgcattcatcatcacctctgactggatacccctgggggtcaatagtcaacgaggagacgatgtgactcaagcgactccagaaacattcacagaagatcctaatctggtgaatgatcccgctacagatgaaacagttttggctgttttggctgatattgcaccttccacagatgacttggagtgctgggatgagaaatttacctgcncanggctctactctgtgcatngtgacgnttanacnatgcattcatcagttat

SEQ ID NO: 16689 - DNA, 364 bp, Homo sapiens
  misc_feature (1)...(364): n = a,t,c or g
ctcgaggccaagaattcggcacgagcggcacgagaacatcagccctcctgattgcaaaggaatactgagctgatggtgtcatccagcagcctcccctcccaagcaaagcttctaaaactgggggtcggtgctcaagggaaggatttgctatgacctcatagaaccttgtccagtgtggccacttaccctatccttaccctccttatcctcaaagtttgggctgatgtaagactagaggctggccctcccagataacagagaaaagggagccccaaatgcaaccagcctcttgttctattcttgcctgcaaaagaacagaggttctcaaatgcctcangccctgagagccatttcttcccctaca

SEQ ID NO: 16690 - DNA, 376 bp, Homo sapiens
gccttaggaaattgttaaaacccaataactccacatagagtttttgaattagggtcttagaaatgttcaaaccaagtaaatgtagggaagatgtattaagtaccaactggttcttgcctgcatgatatcagcaaaatgaaagagaaataataatagattttgttaataattcaagacagtaaagagagaatggtgtgggaaaaagaggacgtttggcgttcaagctgagtctgaatactgccttgttgcttaacagcagcgtgcccctgggaagaggaaggcaggtaacctttatcaagtacctgtcacgtgctaggtgctttgcatgtcttaatctcatttaattgttataatgagcttcccagataaatatagt

SEQ ID NO: 16691 - DNA, 375 bp, Homo sapiens
aaagtgtctgcagagttgttgatggtatgtcaaattaataaccttaccttggctattactgtattattaagatgcagtagggatgtatttgtcttcataaattaaaaattattttagtaacttgtcaacatgataacgaattatctactccagtaaatcctaggactgatttttcatagggttagaaaggcaagaactttaagaaccactggaagcaatgggtgtgtaacctacttggggctacagatcagaacttaaggagtcccgggtctcttgatgaggggaatgttttcatagtgtcctgagttgggagtcacatcacagggctggaggtctctgcttttcaggataggccattcttgaagtgtgagggcg

SEQ ID NO: 16692 - DNA, 322 bp, Homo sapiens
gctgtattcaaattagaaaaataggctagctggagagttgcagttactgttggaagaaataaagagcagcaaagatcaattgaaggagctcacactagaaaatagtgaattgaagaagagcctagattgcatgcacaaagaccaggtggaaaaggaagggaaagtgagagaggaaatagctgaatatcagctacggcttcatgaagctgaaaagaaacaccaggctttgcttttggacacaaacaaacagtatgaagtagaaatccagacataccgagagaaattgacttctaaagaagaatgtctcagttcacagaagctg

SEQ ID NO: 16693 - DNA, 414 bp, Homo sapiens
gtctgcacaaattgatattgttatctccaacaaagccgcagtagctgggttagataaagcggaaagagctggtattcccactagagtaattaatcataaactgtataaaaatcgtgtagaatttgacagtgcaattgacctagtccttgaagagttctccatagacatagtctgtcttgcaggattcatgagaattctttctggcccctttgtccaaaagtggaatggaaaaatgctcaatatccacccatccttgctcccttcttttaagggttcaaatgcccatgagcaagccctggaaaccggagtcacagttactgggtgcactgtacactttgtagctgaagatgtggatgctggacagattattttgcaagaagctgttcccgtgaagaggggtgatactgtcgcaac

SEQ ID NO: 16694 - DNA, 550 bp, Homo sapiens
  misc_feature (1)...(550): n = a,t,c or g
aaacatgcctgaagtccccgagtctgtgatnctcctcattcttcagcacggcctgtgcccggganggggggatnctccactgnaaatttcanaccatnantgtggtgtccttcaaatannnctgntgctgncatcttcccanggantcttcncccgtgtgattccagtgncttgcctatgtccctgctaatcttctggngtttacgggtncgtgntanccccaccccacctgangcctttcatccangggtggcttcacctccggtccaaagactcngcgggttgcatgccaangcatgngccatgtcagcgtgaggcccagccctgcagggcctgagatgtncagatgcnagccccctgggcaccnaagtgnttcccctcctccctgtctgccntttgctnnatctcnnagacgcctcaggaagcctttcaagcgtcaagcaggaaaantcngggntgctcncctccaggaagtnaccnggnagctctnagggtngcanngaaagnnaaacantggcaggggactgggcagnnnaggnggctnnttttg

SEQ ID NO: 16695 - DNA, 470 bp, Homo sapiens
gaatcctcgtggtttaaatagactttcagtgcattagtttgaaccatataaaactgacaattttcaatagtttttgagttaaaaatggcacttttgatatgagacaatgtagcagaataccaggcagacagaaccttgcaaacaccttaacttctaaccaaagactttaaaactctggctggacagagttttaagcactatgctgcaggaatcctgagaaaaaggggaaattaattctattaggaatggcccaaactgaattgtgacaggcagagggtgttcctgacagagggaagatgaatacacttgaccccaacatttctgccatccctgatgaccaagacctcttcccagacccacagctgcaggggccaagtaataacagctcttaatagtttataatgcactgttttaatgctttacgactaaactcatctgatcctttcatcagccctagagggtagaaagtt

SEQ ID NO: 16696 - DNA, 413 bp, Homo sapiens
ggtttgtgtgtttgttgctttgaaaggaatgagatggggaaggcatgtctgaccttagtgaacggagctggtctcagctctccaatccctggggtctacggacgttctctgctcctttgggaaacaggccaattcagaccactcttttccaggcttctcttaattgctgtgattctggctataaacccttcctgagacttaacatttatcctagagtctttcctaattaactctaatattttctagaaatcacttcccttctagaatgaactgataatggtttgtcacagaactaagttgcgtatcactgagtgagaatgatgtttcatctcctagatcaggcctggagacatatatgtcctaggaaaactctcagatacagaagaagtttcatctgtacctccatgaaattg

SEQ ID NO: 16697 - DNA, 444 bp, Homo sapiens
cgattcttggacaaggacggcctcatcaacaaggacctgaccagcagagtgatgattttttcagtgggcaaaaggcggtgcattggcgaagaactttctaagatgcagctttttctcttcatctccatcctggctcaccagtgcgatttcagggccaacccaaatgagcctgcgaaaatgaatttcagttatggtctaaccattaaacccaagtcatttaaagtcaatgtcactctcagagagtccatggagctccttgatagtgctgtccaaaatttacaagccaaggaaacttgccaataagaagcaagaggcaagctgaaattttagaaatattcacatcttcggagatgaggagtaaaaattcaagttttttccagttcctcttttgggctgcttctcaattagccgtttaaggtgagcataaatcaactgccatcaggg

SEQ ID NO: 16698 - DNA, 325 bp, Homo sapiens
  misc_feature (1)...(325): n = a,t,c or g
gaacttgaatccataagttggagaaattaagttatgggaaagcgtctctctgtctctttgtgtgttttttaaaaatagtactatcacaaagtttctgtgaggactgggaataagagagtggatttcagaggcccatccatcaaagttgaggcatttttccctagaatgtaggaatagaaaacagtatatatggttatatgctactttttncaagactacgcgngccanntnngatgngnnntacanactagncatttccatanaannngncnnntntacnctggagncnnacngnnncnnnnnagtcccnaanctccnncncccc

SEQ ID NO: 16699 - DNA, 357 bp, Homo sapiens
gcacagacaaaaacctgccccacacagccatcattctagtgacaagcaacacatacacaaccataaaaattaacttccaggctgggcgcagtggctcatgcctgtaatcccaacactttgagaggctaaagtgggtggatcacctggggccaggagttcaagaccagcctggccaacaagttgaaaccccatctctactaaaaatacaaaaattagctgggtggggtggtgtgcacctgtaatcccagttacttgggaggctgagacatgagaatcacttgaacctgggaggtggaggatgcagtgagctgagattgagccattgcactccagcctgggcaacagagcgagactctt

SEQ ID NO: 16700 - DNA, 416 bp, Homo sapiens
cccacgcgtccgggctacaaaatggaagtgcttttgcgacctgggctccattttaggaattcttgcccgattttaaccacttgaacgcggaagtggctttcctattctcttccaagccagcctttaattttaaacgctgtaattaacagttcacaggggtcaaattcctttattccggaacattccactttgagagggatctgtcctctttggtcccctgcgttttcaaatatttgaggaaaggtgtcgcctctttttctgtggaaagaggaagctcatgagcgcgaaacagcaggggacggagggcgagaagggctttctcaggttgcgggtcggagggcagaagcacagttcccagtacagagacccggacaggtggctgtttctcacgctcactttggattgctccctacggt

SEQ ID NO: 16701 - DNA, 1339 bp, Homo sapiens
agctatgacatgattacgaatttaatacgactcactatagggaatttggccctcgaggccaagaattcggcacgaggaaagataaaggtttgcagacaagccaggatgcacgcttttatgctctgtcggccagtttcgagcctttcagcaacaaaggccagacgctggtggtgcagttcacggtgaaacatgagcagaacatcgactgtgggggcggctatgtgaagctgtttcctaatagtttggaccagacagacatgcacggagactcagaatacaacatcatgtttggtcccgacatctgtggccctggcaccaagaaggttcatgtcatcttcaactacaagggcacagaacgtgctgatcaacaaggacatccgttgcaaggatgatgagtttacacacctgtacacactgattgtgcggccagacaacacctatgaggtgaagattgacaacagccaggtggagtccggctccttggaagacgattgggacttcctgccacccaagaagataaaggatcctgatgcttcaaaaccggaagactgggatgagcgggccaagatcgatgatcccacagactccaagcctgaggactgggacaagcccgagcatatccctgaccctgatgctaagaagcccgaggactgggatgaagagatggacggagagtgggaacccccagtgattcagaaccctgagtacaagggtgagtggaagccccggcagatcgacaacccagattacaagggcacttggatccacccagaaattgacaaccccgagtattctcccgatcccagtatctatgcctatgataactttggcgtgctgggcctggacctctggcaggtcaagtctggcaccatctttgacaacttcctcatcaccaacgatgaggcatacgctgaggagtttggcaacgagacgtggggcgtaacaaaggcagcagagaaacaaatgaaggacaaacaggacgaggagcagaggcttaaggaggaggaagaagacaagaaacgcaaagaggaggaggaggcagaggacaaggaggatgatgaggacaaagatgaggatgaggaggatgaggaggacaaggaggaagatgaggaggaagatgtccccggccaggccaaggacgagctgtagagaggcctgcctccagggctggactgaggcctgagcgctcctgccgcagagctggccgcgccaaataatgtctctgtgagactcgagaactttcatttttttccaggctggttcggatttggggtggattttggttttgttcccctcctccactctcccccaccccctccccgccctttttttttttttt

SEQ ID NO: 16702 - DNA, 555 bp, Homo sapiens
  misc_feature (1)...(555): n = a,t,c or g
ggtnnntgtgnngtttttgncctcanagatacncttatgactgactacgaatttaatacgactcactatagggaatttggccctcgaggccaagaattcggcacgagctggaagaaagcagatgtttcgttaattttcatatgcaaatatttatttgaagccagaggatatcaccatagtaattgaagaactggaaccggagcgcattgttaaaaagctacataattaactcatcatcataaatggttttaataaatgcatttcaaaatgggagactctaggaagcagttttgactctggcagcaaatgaatgaaagatgatgagcggaaacttatctgatggcctccagccatacagatccaccttgggcggagcatcagaaaccagtcaagttcagccaggcacggtggctcacgcttgtaatcccagcactttgggaggctgaggcgggtgaatcacgaggtcaagagatcgagaccatccttgccaacatggngaaaccctggntttactaaaattacntgggcnngnggccnanccctganncttgccca

SEQ ID NO: 16703 - DNA, 159 bp, Homo sapiens
gaaatgatttctcagaatgtgtacctgcaagtgacacatgactggattctggttcaagagagtcttggagtcaccatccaagctgcccagttgacagactagaagccacatgatttaagttgatgtgaatgaggaactaaatttctttttttttttttt

SEQ ID NO: 16704 - DNA, 547 bp, Homo sapiens
  misc_feature (1)...(547): n = a,t,c or g
tttggatacccttntnanntttgaanaccgttatgacatgattacgaatttaatacgactcactatagggaatttggccctcgaggccaagaattcggcacgaggtatctagaaaccggaggcagctgggcacaagtgctggggaaaccccacgagcgcaaaagagatggcggcatggagcccccaggctgaagcaggacaagagaggaactccaagctggcccttggcctgtgctcattcccaggatgcctccctggttccacagctctctccgaaaaaaagggcaggtaggggcgacccaccatgggttcccctggtcatctccaggtactgctggtcctgggttgccacgtctccagtatcccgaagctcctttgttccccgggaggatcggggcccccttgcaacacgtggctccagccaagggaaccccggaactccccacaaaagacaccagagtaaccggnccccgtttcggcaatggcttcgttatgtccatttaaaatggctgccggccaattccgcctttggctgatggctttgggg

SEQ ID NO: 16705 - DNA, 432 bp, Homo sapiens
  misc_feature (1)...(432): n = a,t,c or g
tttgaatacttggatgacctgattacnaatttaataacgactcactatagggaatttggccctcgaggccaagaattcggcacgagctgacctggagaagtataacaatgtggaagcaggaaggtatacagtgggcttgggccagacccgtatgggcttctgctcagtccaagaggacatcaactccctgtgcctgacggtggtgcaacggctgatggagcgcatacagctcccatgggactctgtgggcaggctggaagtaggcactgagaccatcattgacaagtccaaagctgtcaaaacagtgctcatggaactcttccaggattcaggcaatactgatattgagggcatagataccaccaatgcctgctacggtggtactgcctccctcttcaatgctgccaactggatggantccagttcctggga

SEQ ID NO: 16706 - DNA, 510 bp, Homo sapiens
  misc_feature (1)...(510): n = a,t,c or g
gatctaatgtttgtcataccttatgtaaaagataattctttctagcagaaagtagaaagagttccttaaacccaatcatccacctgcctccagttatcctgatcagtttgcacaactgtgccaggcaataatgactaaaaactcttaaatataaagaaagagactgccatatcatggaatatcaaaagagaaaagatggcataaactggtcatccagaaagaatagcaaactgttcactcacagctccatgaaatagtcaagttcagctacagctgctgcccagggcagctgtgatctcaatgtttccaaaactcccaccatttcacaagacctccaacaccaagctcacctccccttcttcccacagggcagagactccaggagatgttgtggagggatgctctcccttcccacttatgaccttcttctttcgtggctcctcataggcctccatttactcctcttcctgntttccattctgctatgctattaccactggattactcagg

SEQ ID NO: 16707 - DNA, 172 bp, Homo sapiens
gcacctattgctttaactggaagcccctcctccctcccataaaacaacctcgtttctattgaagctgtcttcaacatgagacctcccaatgactttagcttcagaggttaggagctttcccctgcaacaaaacacagcctcatgcctttttttcctcctttttttttttttt

SEQ ID NO: 16708 - DNA, 311 bp, Homo sapiens
gcataaacataaacatgagatgacactgaaatttggtccagcacgtaatgacagtgtcattgtggctgatcagaccccaacaccaacaagattcttgaaaaactgtgaagaagtgggtttgtttaatgagttggcgagtccatttgagaatgaattcaagaaagcttcagaagatgacattaaaaaaatgcctctagatttatcccctcttgcaacacctatcataagaagcaaaattgaggagccttctgttgtagaaacaactcaccaggatagtcctttacctcacccagagtctactaccagtgatg

SEQ ID NO: 16709 - DNA, 389 bp, Homo sapiens
ctttccgggagactggagtcgaaggccgtgagtcagccataatggcaggtgaagaaattaatgaagactatccagtagaaattcacgagtatttgtcagcgtttgagaattccattggtgctgtggatgagatgctgaagaccatgatgtctgtttctagaaatgagttgttgcagaagttggatccacttgaacaagcaaaagtggatttggtttctgcatacacattaaattcaatgttttgggtttatttggcaacccaaggagttaatcctaaggaacatccagtaaaacaggaattggaaagaatcagagtatatatgaacagagtcaaggaaataacagacaagaaaaaggctggcaagctggacagaggtgcagcttcaaga

SEQ ID NO: 16710 - DNA, 497 bp, Homo sapiens
  misc_feature (1)...(497): n = a,t,c or g
attgganaccngntatgacatgattacgaatttaatacgactcactatagggaatttggccctcgaggccaagaattcggcacgaggggaagagtctactagaaaattcatgtgctagtcattcttggggatttaatattttgctggagttaattcactatatccagacctgtatctttcatttattgctgagccatgtgcagtctggcatctcaacaacctcaacaacctcaacaacctccaagacatgtcagtttctgtagtgttcacctcaaatctgacactggaattggaactgatttagaaacaaccatttcattcatttggtatgactagcttcatgactagcttcatgaatagcttcatgaatagcttcatgacttctcgnnnaccatgatagnataantctgnctggtctttnngaatgaaantttgaactcnatttaaanttctggtttccctntatccccaatttaacncggnttccaannttttta

SEQ ID NO: 16711 - DNA, 657 bp, Homo sapiens
tttgaataccatttatgacatgattacgaatttaatacgactcactatagggaatttggccctcgaggccaagaattcggcacgaggctgggtttctgaactgctgggtttctgcttgctcctctggagatgcagcgtctgttgactccagtgaagcgcattctgcaactgacaagagcggtgcaggaaacctccctcacacctgctcgcctgctcccagtagcccaccaaaggttttctacagcctctgctgtccccctggccaaaacagatacttggccaaaggacgtgggcatcctggccctggaggtctacttcccagcccaatatgtggaccaaactgacctggagaagtataacaatgtggaagcaggaaagtatacagtggggcttgggccagacccgtatggggcttctgctcagtccaagaggacatcaactccctgtgcctgacggtggtgcaacggctgatggagcgcatacagctcccatgggactctgtgggcaggctggaagtaggcactgagaccatcattgacaagtccaaagctgtcaaaacagtgctcatggaactcttccaggattcaggaatactgatattgagggcatagatacacaatgcctgctacggtggtactgctcctcttaatgctgcaa

SEQ ID NO: 16712 - DNA, 590 bp, Homo sapiens
  misc_feature (1)...(590): n = a,t,c or g
aaatcaagtgcgaaactcagccactattggctaaagaaactaaataaaaaacgttaatgacctagaaaagcaaaagcccattttaaactacttaaagcctctgcactagtccaatgagtcaaaggcaagggagaagtaaacctctaaaactgaagacgaccctctaaaggagaaaactatagaagttaaagtatgcatgcttattatactatgggaaaccaagaaggaagggagagaaaaagaaaaagcatgcatactttaacttctatagttttctcctttagagggtcttcttcagttttagaggtttacttctcccttgcctttgactcattggactagtgcagaggctttaagtagtttaaaatgggcttttgcttttctaggtcattaacgttttttatttagtttctttagccaatagtggctgagtttcgcacttgattttcaatattttatagtaagaaatgacaaactgctttggttcatttcataaacaaactctgcatttagataactattaaaggttgttaagatgaagatttactgnttctttgttactcgntggtacagctgnttgtgttacttgc

SEQ ID NO: 16713 - DNA, 456 bp, Homo sapiens
gcggcacgagaactggaagaattatttcatgatccagcaatcccactgctgaatatatactaccccaaattgaaatcagattgtcaaagagatgtctgttcactgcagcactatttgccacaacatggacagaagcgatgaacgttatactaagagaaataagccaggcatagaagcacaatataggattccacttatatgtggaatctagaagacaatggaactcattgcagcagagagcagaactatggttacagaagcagggggtggggaacagggagatgatggtcaaagggtacaaagtccgttagagaaaaggaatatattttttcttttttgagttatattgcacagtgtggtaaatatagttaatacagttatttttgggtggctcacacctttaatgctagcattttgggaggccaagatgggaggatcacttgtgcccaggagttt

SEQ ID NO: 16714 - DNA, 397 bp, Homo sapiens
gaaaagttttcagaaaagttttgctttcctgattaaagggacggattgctggagctcttccttcctccttctttccccttggacacagatgtggcatctggagcttcagcaaccattttgcatttattaggtaataagtatgaataggcaaagcaagcctgctaaggatagtagaacagaaagattaaaagacacatagtctttgactgtattacacagcagctgaaccaacaacacacttctaaatgggaggggcagaaagtgggtattgtttaaacctgggttacgtttcatgttattcacaaataaaacattcataattaataatattcatccccaaatagacatatacctaaattacaatataaaatagatttaatagattttaaagcccctc

SEQ ID NO: 16715 - DNA, 331 bp, Homo sapiens
gagcttcaatacctggtatttatcagtagcaaggcttggcccagctagaagttggaagatggggagacctagtcagctggggaaaataacaactataatactatcctatagctagatctcttcaaccacagagaaggaaaatggtccaaaattccatatgtataggccttttttgccctgcagaataaccgcaagctctgtcagcaatgtataatagaccttgcacttatagcagtgatatccagccagacttaatccagacagaagggaaaaaacagtctgcctccttagaagaggagacagaggcccctgcaccagcccaggtcccaac

SEQ ID NO: 16716 - DNA, 356 bp, Homo sapiens
  misc_feature (1)...(356): n = a,t,c or g
attcactctctcaactgcagtggccaactgtatgctgatggccccaaatccattcctacggccagagcactcttctgggatccaggacccagctgagcaaagggtgtcttcatataagcatcccttgggtgcagcaggttcaaatcctataaacatgaatgttcacttctcattcaggtgtctgatgtccctcaagtgccttactctcctgngctacccactcagtcaccagggccttttgctgctgtgttccaagnatctcttaagctcactcttttatgtccctgttacactatccaaggccagaccaccattatntcatagggagattccgacactactttcttatatgttcc

SEQ ID NO: 16717 - DNA, 528 bp, Homo sapiens
  misc_feature (1)...(528): n = a,t,c or g
tnnntcccccctttgacttcnattaccacatgattacgaatttaatacgactcactatagggaatttggccctcgaggccaagaattcggcacgaggcaacgtatgcacagacagagttgggacatgggacatatcttcagggcctggagactgaagccacctatgacgcagccacccaggagtttgtgatacacagccccacgctgactgccaccaaatggtggcctggagacttgggacggtcagccacccatgccctggtccaggcccagctgatctgctcaggagccaggcggggcatgcacgcttttattgtgccaatccggagtcttcaggaccacaccccactgccaggaatcatcattggggacatcggacccaagatggactttgatcaaacagacaatggcttcctgcagctgaaccatgtgcgggtccccagggagaacatgctgagtcgctttgcacaggtcttgccanatggcacctacgtctaanttcgncnannncngagcaacntactttcc

SEQ ID NO: 16718 - DNA, 620 bp, Homo sapiens
  misc_feature (1)...(620): n = a,t,c or g
nnnnnnnnnnnnnnnnnnnnnnnnnnnnnannnncnnnnnnnnnnnnnnnnnnannannnnnnagagncnnggnataannanntcttggaaccctttgaatgcctngaattatccgactcactatagggaatttggccctcgaggccaagaattcggcacgagggctacgcttacagagccctttctggagacgtggccttaaatatacacagagtcttcgtgagagccctcaggagcctgggctcagaggagcagattgccaaatgggacccactctgcaaaaacatccagatcatcgcaacgtatgcacagacagagttgggacatgggacatatcttcagggcctggagactgaagccacctatgacgcagccacccaggagtttgtgatacacagccccacgctgactgccaccaaatggtggcctggagacttgggacggtcagccacccatgccctggtccaggcccagctgatctgctcaggagccaggcggggcatgcacgcttttattgngccaatccggagtcttcaggaccacaccccactgccaggtgtcctcatctccatctccttcaaggaatcatcattgggngacatcggacccaagaatggga

SEQ ID NO: 16719 - DNA, 440 bp, Homo sapiens
gcggcacgaggtctgttattttcttaattgtgcaagagtctttctggggctctcatctaccaacaacagcaaggtctaatcagatggaggcagccagggaaggactcagctgtgacccaagaacgaaaagaaccaggggttccaaagatggctaagacttacagcacttgctatgtcccaggcactgttctaagttcttcctatgtgatttcacttaatcctcataaaaacccagtgacgtgctattacctccattttacagaggggaaaaccagaagagttaagtcatttaagcctcacaggttttgatttgccagaatataaaccgtgtactctggccccagggatctgtgttcttgaccactgctgcccaggagctgagctgctgaaccctggtccttgctgctgactgcgggcaactggtttctggccactggctg

SEQ ID NO: 16720 - DNA, 512 bp, Homo sapiens
cagctatgacatgattacgaatttaatacgactcactatagggaatttggccctcgaggccaagaattcggcacgagcaagaccagcctggccaatatggcaaaaccccatctctactaaatacaaaaaaattagctgggtgtggtggtgcgcacctgtaatcccagctacttgggaggctgaggcaggagaatcactggaacctgggaagcagaggttgcaatgagccaagatcacgccactgcactccagtctgatcaacagagtgcaactccgtctcaaaaaagaaaacgaaggtcaaatcagtggaaggggttggtagaataaaagacaagaatggaatggagtagggctggggagggctaacctgatcgaggacaaaagaagtgagggattttcacgtaggcaataatcccatataacagagatgaggttcagggaagggggtgctgggaagcgggttgggtgagccctttaacattaggtaggtgtggtgttggctaggcagaaca

SEQ ID NO: 16721 - DNA, 439 bp, Homo sapiens
  misc_feature (1)...(439): n = a,t,c or g
gagattttttttatatgaaattctgtaacaggcaaaactaatctagtgatagaaatatgagcatttgtctggggtagcaaggggggaggtagactgactgcaggagggtatggaaagccttttgggagagagggaaatgttctaaatcttgattggggcatatacatttgtcaaaaatcatcaagctgtacacttaaaatctgagcattttatatgtaaattatacctcaatttttaaaaactgtgagccataaagagccaatgtcttcaaaagtagcaaagaaatatcaaatatgttaaattatccacccatgctattatataataaaaactgaaaaccggtcaggcacagtgggtcatgcctgnaattccagcctttgggaggccaaggtggtggatcatntgagggcaggagttcnaaccccctgannantnggga

SEQ ID NO: 16722 - DNA, 316 bp, Homo sapiens
  misc_feature (1)...(316): n = a,t,c or g
cttaaaccatggacctttttgtttgtttctcaccacctcccccggccacaaacaaacaaaaaggtccatggtttaagaatgttgaacaaagggactaaaggtgtcatggagacctgcccaccagggccagaatctggacagtgatggagaaatttctgctgcaaaaatgtccgccgcgtcagggaatacaaaccacatacgagagggtgttgatgttgtttctcacatacataggatggacctgttttctttctgntaatanaangcgattagtcatgcctggncttnanagagnnngannggttcttntgaccac

SEQ ID NO: 16723 - DNA, 508 bp, Homo sapiens
  misc_feature (1)...(508): n = a,t,c or g
ggacccacctatccaattcagataagcttccccagaacatcactgaaatataccaggtggaataaaaatacattttgaaaagtatgagaggaattctgggtagtgtttgatctgtaaccactcactgctgcttccttcccaggtcgtccttgcctttgctatccacacctttctgttcattgttacaggaaagacaattactgctgcaatcctagcttcagatacatttttgagtacctgccacctctctgtcttgggcttttctcgtgctctagcagacaggtggctgcagttctagcacattttaacattagagatatgagtgatgttacagaaccagagacagtactcattttctggtacaaaaggatcctgttaggagcaccaagaatgaatgtttgagacaggcttccacaggggaaaaccaacgtctctatctgacaaggtagttgctaaaaatttagctgccaagttggggatanaagatgnatgtgcttgatattaatga

SEQ ID NO: 16724 - DNA, 132 bp, Homo sapiens
atagcatttctgtttgggatgatagaatgtttggagacagaggtgatgactcatgacaacgggaacgtacttaatgctactgaaccgtacactaaaaaggagaaaatgagaattttatgctatatattttat

SEQ ID NO: 16725 - DNA, 463 bp, Homo sapiens
  misc_feature (1)...(463): n = a,t,c or g
agctatgacatgattacgaatttaatacgactcactatagggaatttggccctcgaggccaagaattcggcacgagccaagatgtggcctttagcaaaactggacaatgtccaaacccactcatgactgcatgacggagccgagccatgtgtctttacacctcgctgttgtcacatctcagggaactgaccctcaggcacaccttgcagaaggcaaggccctgccctgcccaacctctgtggtcacccatgcatcttccactggaacgtttcactgcaaacacaccttggagaagtggcatcagtcaacagagaggggcagggaaggagacaccaagctcacccttcgtcatggaccgaggttcccactctgggcaaagcccctcacactgcaagggattgtanataacactgacttgnttgnnttaaccaataactagctnnttataangannnnntnacta

SEQ ID NO: 16726 - DNA, 453 bp, Homo sapiens
  misc_feature (1)...(453): n = a,t,c or g
ggnnttnnntnnnnnatntgaatcgntatgnctgattacgaatttaatacgactcactatagggaatttggccctcgaggccaagaattcggcacgaggagatcaggagtgacagatcacagggtgagggccacctccacacccaccccctctggagaaggcctggaagagctgagaccttgctttgagactcctcagcacccctccagttttgcctgagaaggggcagatgttcccggagcagaagacgtctccccttctctgcctcacctggtcgccaatccatgctctctttcttttctctgtctactccttatcccttggtttagaggaacccaagatgtggcctttagcaaaactggacaatgtccaaacccactcatgactgcatgacggagccgagccatgtgtctttacacctcgctgttgtcacatctcagggaactgaccctc

SEQ ID NO: 16727 - DNA, 314 bp, Homo sapiens
gctggaagaacagggcgggctagcctggctgcagcagctacgagagtcctcatatgaggaggcccacaaggccctctgcatcctgcctggagtgggcaccaaggtggctgactgcatctgcctgatggccctagacaagccccaggctgtgcccgtggatgtccatatgtggcacattgcccaacgtgactacagctggcaccctaccacgtcccaggcgaagggaccgagcccccagaccaacaaggaactgggaaactttttccggagcctgtggggaccttatgctggctgggcccaagcggtgctgttca

SEQ ID NO: 16728 - DNA, 373 bp, Homo sapiens
  misc_feature (1)...(373): n = a,t,c or g
gctttattcttgagttgtaatatatttcttgtgacatgtgttactcctagtgttactgtccatctctgttctctgtataaacacaattctagtagcagcctgtgtcccacacctagtctgcccttcggttttgcttgtaatgtttttatatgtgtgagacaatctcctactgtatttttgccatgtggatcctgctttggaagcctgcagatgtctcttcctaccatatttctggccagcagcagagatcattgaagaacatggcttaggtttcaatgaggagaatgtgctgtgaaattttgttactattgttaggaatttttctggcaaatctggtaaaagctgnttggcggctgaacataccatccataaa

SEQ ID NO: 16729 - DNA, 292 bp, Homo sapiens
  misc_feature (1)...(292): n = a,t,c or g
aaataaagcagatattttaataagtctgataaatgaaaattaagagttctgatgtatgttttgagctttctcttatttacccatatcaaaataaatgttgcatctaatgaccagaaaaatttgtatgggaacattgcaataagaattatattttcagtttttcttattggcatgtagttaatgtgtctcaaagtaaggatttgctgcagtgggaagcttgaatttttaaatttttgttttaaatgtgatcanaaaggttnatgatntcntgnatcgatatncaaaccntggt

SEQ ID NO: 16730 - DNA, 457 bp, Homo sapiens
agctatgacatgattacgaatttaatacgactcactatagggaatttggccctcgaggccaagaattcggcacgagaggctggcacaggacatgcggtagccagcacacagggcagtgagggagggctgtcatctgtgcactgcccatggacaggctggctccagatgcagggcagtcattggctgtctcctaggaaacccatatccttaccctccttgggactgaaggggaaccccggggtgcccacaggccgccctgcgggtgaacaaagcagccacgaggtgcaacaaggtcctctgtcagtcacagccacccctgagatccggcaacatcaacccgagtcattcgttctgtggagggacaagtggactcagggcagcgccaggctgaccacagcacagccaacacgcacctgcctcaggactgcgacgaaaccggtggggctggttcttgtaa

SEQ ID NO: 16731 - DNA, 361 bp, Homo sapiens
  misc_feature (1)...(361): n = a,t,c or g
ctcccccgccccacccccacatcattttacattttcctcaacaatgcacaaggttccagtttctctacatcctcaccaacacttgctattttcatatcctaatggctgcaaattggtagcttatgggtttttatttgcatttacctaaataaagcctaattaaaacatcagacaagtggccgggtgcggtggctcacgcgggtaatcccagcactttgggaagctgaggcgggcagatcacgaggtcaggagaccgagaccatcctggctaacgcggtgaaaccccgtctctactaaaaatacnaaaattagctgggcctgcttgtggtgggcacctgtagtcccagctactcagaaggct

SEQ ID NO: 16732 - DNA, 462 bp, Homo sapiens
  misc_feature (1)...(462): n = a,t,c or g
gnnngngnnnnnntttgnnacagctatgacatgattacgaatttaatacgactcactatagggaatttggccctcgaggccaagaattcggcacgagaacagacacacgatgttgtcaaggatggttttgggactagaggctcagtggtgggagagatccctgcagaacccaccaaccagaacgtggtttgcctgaggctgtaactgagagaaagattctggggctgtgttatgaaaatatagacattctcacataagcccagttcatcaccatttcctcctttacctttcagtgcagtttcttttcacattaggctgttggttcaaacttttgggagcacggactgtcagttctctgggaagtggtcagcgcatcctgcagggcttctcctcctctgtcttttggagaaccagggctcttctcaggggctctagggactgccaggctgtttcagccaggaa

SEQ ID NO: 16733 - DNA, 493 bp, Homo sapiens
aaattttatagccaaagttttatccttgatgggtttggccagactgcaatttcttgactaaagcctttaatgccaggttaaacaggagaaactttttccactagaagaaaatccttgctatctattttttccaatagaagaaaatccttgctatttattttatttgatgaataaacaaatttattgcagtagcttaaaaaaaatttttttttaaacagtctcactctgtcgcccaggctggagtgaagcaatgtgatctcagctcactgcaacctccacctcccgagtagctgggattacagacatgcaccaccaccctcagctaatttttgtatttttagtagagacggggtttcgccatgttggccaggctggtctttaactcctggccttacgtgatccgccccccttaaccttccaaagtgctgggattacaggtgtgagccactgcacctggcctgtagtagcttaaaattttccttgagaaaattcc

SEQ ID NO: 16734 - DNA, 422 bp, Homo sapiens
ggccatagactgccccacttaaactcttgtcagtctgggctcagggttcccagagctcattccccaggaatctctaagaccagggctggggcagtgtctgtcactggcttgtttgttccctaccaatattctgttgctgtttgaagtagtgccagggtcccctgggaagatgcccccaagacacctgccccaagtgggtggatatctgccttcctgctgcaagtggaggcaggtccagcagcccctcttcagagcccctgtaaatgctatcgcagcctgagtcctgccgccttccagttccttggtgtcccgtgcaccccttctgtctgtcccctttcatggctgtgcagccgtcccgctggagtggccatgtcccttgtgcattgagtgcatccccgctggtgactaagctcgcagcaagc

SEQ ID NO: 16735 - DNA, 461 bp, Homo sapiens
  misc_feature (1)...(461): n = a,t,c or g
tttgatccntatcnaaacccttcggatatgccatgattacgaatttaatacgactcactatagggaatttggccctcgaggccaagaattcggcacgagggaggacagttatatagaccataaggtgccttgcacagattcacaagtgcaggtcaagttggaggaccacaaaatagtaactgcctgcttgcctgtggaacatgttaatcagctgactactgagccagctacagggcccttttctgaaactcannnnnnnntaagggattctgaggaggaagtanatgtggagggagatagcagtgcctcaaaagagcagtgtaaagaaaacaccaataacgaactggacacangtcttganagtatgccagcctccggagaacctgaaccatctcctgntctagactgtgtttcanctcaaangatgtctttatcagaacctcaagcagangtagtcccac

SEQ ID NO: 16736 - DNA, 368 bp, Homo sapiens
gttcgagaccagcctggccaatggggtttcaccgtgttagccaggatggtcttgatctcctgacctcatgatcctcccgcctcggcctcctaaagtgctgggattacaggcatgagccaccgcacccggccttcatcactattttcaatccagatatactttacaaaaatgagaagggcttatttgcatttttatttacatattgaaagggaagcatctgatctcatcaatgattgccatattttttgaaaaagtaatcctatttcaatctttccttgtgtgaaatggccataataccagaagtgcacttccctacctcacaggttaggattcaaagtgtgtattcccccattgtgtaaattgagtga

SEQ ID NO: 16737 - DNA, 371 bp, Homo sapiens
gctcggcgtggtggctcacacctgtaatcccagcactttgggaggccaaggtgggtggatcacctgaggtcagaagttcaagaccaacctggtcaacatggtaaaaccccgtctctactaaatacacaaaaattagccaggtgtggtagcaggcgcctgtaatcccagctactcaggaggctgaggcagaagaatcgcctgaacctgtgaggcagaggttgcagtgagccgagatatctaccaaaatacattttttaaaaaagggtccatataacacttctcacaggaacttgcaactttcaaaaatttttaaatttcattatactaatgcccacagacgtctaaaaaaacttagaaataaagctgtcatc

SEQ ID NO: 16738 - DNA, 566 bp, Homo sapiens
  misc_feature (1)...(566): n = a,t,c or g
cgactgaaccaacatgactacacagggaaccggtttctgaggttaagaacctggtatgagggaagcccgatttcgcgaaggcgaaggtctcggaaggtccnntttgctctgcgggcttcgatcctcccggtcgcgttgagttcgttaatatcccttctcgattacggtccggacgtttctaggggcgtcgattttcgttaggttatgaacactaggtcagagatttacggttactcccgnggtcgcgggtattaggtacgggatcgagtttacgctcttctagggggacggggcggggcataattattacgataatcgttgggagggttatgtaggctgcggctattcgttagtgatcgctctagatcgggtagggaggtcccggtacgatccaagaggaagggtagctccgggtttgtcacgtaggcttcggtaaattcggtcgtttcgtcttactttcgctttctagggcagtattacggtaggatcgggggaatcggancgttccgtcggaatttcnccgngaaggcctncctagggtccgnatccaaataangggggccggg

SEQ ID NO: 16739 - DNA, 520 bp, Homo sapiens
  misc_feature (1)...(520): n = a,t,c or g
ggtggttgctgttgttcatagttgtctggaaaagtcttgtctccaaattacagtggctttctttttcttgccctgaagcagcaaatgatgggagaaatatgtgtttgtttctgttcttcagagtcagagctgcttcaggcataaaattcttagccctctagtttaattcaaatgcaatgagtcacaaagtaaatgtgaactccgggctgtgtattgtggggattgggcaagttaaattaatttttagagccagattgcgttacttaaacctaggatcctaatttgcgctgacaaaaaccgtcaaatcagcctgcagaggtgcctgaaacttactgcccagataatagctgacaatttgaacttggtagttttatggattggtttgtatctaaaaagcaggcagcttttaaaagccctgaataaaggttgctttctgtggacacctacggggtgactaattataaagcacccaatgattttcccctcctaaaaatgcaantggcaaaatgangnttggatt

SEQ ID NO: 16740 - DNA, 418 bp, Homo sapiens
gcgcttggtcaccctttcaagggacatcctgggtgcaaccactcttgatggacctgtctccctggagggccaagttacaggaaatcaagagcagcctagacaaccacactgaggtggtcttcattgcagatttccctggactgcacttggagaattttgtgagtgaagacctgggcaacactagcatccagctgctgcagggggaagtgactgtggagcttgtggcagaacagaagaaccagactcttcgagagggagaaaaaatgcagttgcctgctggtgagtaccataaggtgtatacgacatcacctagcccttcttgctacatgtacgtctatgtcaacactacagagcttgcctggagcaagacctgcatatctgcaagaattaaaggaaaaggtggagaatggaatgaaac

SEQ ID NO: 16741 - DNA, 391 bp, Homo sapiens
gtttacaaagactgaatagattattgcccagttattcttaagtaaggacaaagaaggaaatatcatcgtatttcttttttttaataaggaaaaaataatctccatacagtcaagatacatagtaaatggtatcatttggaaatcagcatcgtgggcactgctgaggaatgatcctagtggtaggtcagaagaagatgctgtgaacaccaggactttaatcttatgcttaaaatgccagatgttgttcgggggacaacttgtatctttctagcagcagatctgtagtttgtatagcctcaacaacaattttaaataagatggagaataaattattgaggggactaggctatatgcatttgccttcatccacccatgtttattaagaatcatt

SEQ ID NO: 16742 - DNA, 413 bp, Homo sapiens
gttaaactatgtgtgtcagatataattttttgtcttttatatgagagtacaaaagtcagagtactctgtgatcagcgaacaaaaacacacctcagtctcagaagcttatcctagcaaaggtgtctttctttctcctgtaaagtcaatggtgtactctttcatccaactactcaggaatccaagcttactctgccttcctctgatgtgtggcttccaaagtgtctgaggctgtgtcagagagagatgggaaaagaacattggtttccaataatctcttctgggaaatcaaaccaccatttacgcttagtgtcttttggctagaataatgtgccaccaacttaatgcaacagaggctgaaaaggttgccttttagagtaagtcaggcagaggaaaatagtgccgtaggaattgac

SEQ ID NO: 16743 - DNA, 393 bp, Homo sapiens
  misc_feature (1)...(393): n = a,t,c or g
gtattctttctccacctcctaccctacccccacttccaaccaataagcttatatcaataaatatttgttggctagtaactatatgcctcagatactgctctcatctttgggggatacaaaaataaaagctggagacataggcattttctcaaaaatactcataatctgcatgggaagacacactgtgcacactgtggtctgcagagtactggtatctgctgtgatagtcatatgatcaatatcctgtgggagtttgaagaagggcctcgagacttagcctaggaatattagggaaggctcagcaaggaggtaaaacttggctgaggtttaaaaaatgagtaanaggtgttcagatagggaacaagtggaacagagagaaggattgaagaggcc

SEQ ID NO: 16744 - DNA, 578 bp, Homo sapiens
tctatgacatgattacgaatttaatacgactcactatagggaatttggccctcgaggccaagaattcggcacgagcttcatccatgaagatatctggaacattcgtagtatctgcagcaccaccaatatccaatgcaagaacggcaagatgaactgccatgagggtgtagtgaaggtcacagattgcagggacacaggaagttccagggcacccaactgcagatatcgggccatagcgagcactagacgtgttgtcattgcctgtgagggtaacccacaggtgcctgtgcactttgacggttagatgccaccatgtagggattatcgcgagtggttgaccttacacttactccttaaatagcagtgagtaatgcatttgagctgtcccaggctctgtctcctcagctcatttcctactctttttctctatataactcattctattaaatacattgcaccaaagagatatggagacataaacctgtaatgaatgaggcttggcttttctgtaataagcttccttttataatactggtcagcttagctctctcagatcctatcctgtggatttagtatta

SEQ ID NO: 16745 - DNA, 362 bp, Homo sapiens
gaaaagagttgttgactttcagggagcccaaacctagggcctccccaagccagggttgtgagacctttgaggctctatggttcctagcatttccaagcttctgggcacaactgcattacccggtacccatagtggaagccacttgcagtatgcctggtccagctgcagcctcacacagagctagcacctatgttagcacttggagttgcccacctcaccacagctggcatgcctggcagtgcacagtggccagacctcacttgcagacctctcattgctgcacatctggcttgcccttggcagacatggaatccaggctggttgcttcaccaagtgagtggaacaagctcacttgggcccag

SEQ ID NO: 16746 - DNA, 500 bp, Homo sapiens
  misc_feature (1)...(500): n = a,t,c or g
acgagctcaatttatgacataagttttatacttagtattttataatttcttaattttgttataaacttgaaaatgtagaatatggggtccaaaatcggttgaacatttgttcagctagttaggtttcaacattaatcatatacattaatagtatctttatgtaaggatatgtgaagggtgtttttctttataagaaaattagtttaatcaggtgagctgatacttaggattatacatatatctatgataaaattgaaagtaattgtggttgttccttagagaacgtgttttgattttgacttantattgggaagctaacaacattataatttttattaaaaaactggancctgggccgggcgcggtggctcacgcctgtaatcccagcactttgggaggccgacgcgggcggatcaccacgcagganatcgagacatcccggctaaaacgtgaaacccgtcccactaaantacaaaaaaataccgggcgtatggcgggcg

SEQ ID NO: 16747 - DNA, 328 bp, Homo sapiens
atttgactttctgtgtttacttgtgtggggagaagcagcacatggaggcatccacggtatttggtttgtttggataacagttgcagatagacaggtgcaccccatatacagttgccaatgctttttgtgcagttcatatttcagtacatcaacactgttttatttgcactctatttatatacattaacatctttttaaattgggattattgtccatatgctttatattttttattccagtgatttcccttttaggaatttatctgaggggagaatactctgtaattactccataatttgcaggcaaatatcatcatagcattttttag

SEQ ID NO: 16748 - DNA, 379 bp, Homo sapiens
taacgatcgcttctctgcttgctacttcaccttgaaactcaaggaagcagctgttagacagcgtgaagccctaaagaagcttaccaagaatatagccactgactcatatatcagtgttaacttgagagatgtctatgcccggagtatcatggagatgctgcgactgattaggcagagaaagagcaagtacttggagcagcgggggagatgattctgggttttgaattaatttttcaatttattaccaaaagctttgaccaattaactaaaatgataaagcagtgatgtggatttctgtattctgatgatgagtctcttcagagtactgctcatcttaattaatttttgctgatatattgcttcatctactagaatattt

SEQ ID NO: 16749 - DNA, 356 bp, Homo sapiens
ggtgaaaagagatcaggtagatcagtttggaaactgctcccacaaaatattatgaggctcttattatgaggctctgagccaaggtagagatgatgtgattaagtgaaatgagatatgcaaaaggataaggttggaaataggtaataaatttggatttcaagcctgttttgtaggacagatggatctgtagctcaaaggagaggtaaaacctgaagataattatagatactttattattaaggctatgagaaggaatgacaatatttatggtgaattcagtgggtttcttaagtgagtttattatagtcaagagtgtcaagtgggtggacgtggtggctcacgcctgtaatcccaga

SEQ ID NO: 16750 - DNA, 443 bp, Homo sapiens
aattcggcacgaggttcttgtgaaatttgatcccagtggctcatgacttatagtcaggcatcaaaccatttcctactttttcaggctgaagaaagtggaaatataactggctggtgaagaaaggagaaaagtcagccccctaccccgccccacactcctagaaaagtttgggggttttttttgtttgtttttggtgtttttttgagatggagtctcgctctatcgccagcttagagtgcagtggctcaatcttagctcactgcaacctccacctcccaggttcaagtgattctcctgcatcagcctcctgagtagctgggaccacaggcatgtgccaccacacccagctaatttttgtatttttagtagagacggggtttcaccacgttggccaggccaatctcgaactcctgacctcaggttatccacccgcctcagcctcc

SEQ ID NO: 16751 - DNA, 504 bp, Homo sapiens
  misc_feature (1)...(504): n = a,t,c or g
ccctaacagctatgacatgattacgaatttaatacgactcactatagggaatttggccctcgaggccaagaattcggcacgaggtaaacagatactttgaggctaaatacatattcacatcttcaggttactttctattttcctttaacttcattttacaggagaaaaagttaatttctaactgctaaaaacatgaaagttttattagatgatttgtaactatgaacagtaggcagtcctaatataacactgaaatccaatacctggagtagcagatattctctctccactatacacgaagtaaaatatagttatgtaaactttctcagcctccaataattatagttattaaaaaaaaaactggggtagtttacagatgtacataataaattctgagcacttcctcttatcctaagtagagatacagatactttttaatggcctcaagggttagctgcaaagaaactttctagggccggngggggggctcatgcctataatccc

SEQ ID NO: 16752 - DNA, 352 bp, Homo sapiens
gaaaaaattaaaattaaaaaatttaaaacattttaaaaggaaataaaaaataaaataaaattaatactgggttaccaaatacattcttaaggaaaattggctttaaaaaaaggtagaacaacttcaaatgcctggtggtaaaaaaatgccacaattactagtatactttggtggcactgcctctcacacggctagaagttttagccaccattgcctttttatcactagtccgtgtcaatgccgtgtaaaagggaaatatgttagtatttttaagaaccgtggagcctctcagcattccagggacctcactttgagaactgctggtctagcggttgatgtccccatgataggg

SEQ ID NO: 16753 - DNA, 354 bp, Homo sapiens
  misc_feature (1)...(354): n = a,t,c or g
gctggaaggtaagctcatgaaggcagggactttgttcactgtcacatttctattggtctcaacactgtctggcactcaattttttttagcgaattgatcattaaagaataaatagtatcaggattaagcagcaaagctcacattgcaaaaatattgccaacagttaactctctataaaagccaattcaaatacagcttgggaagtaggtcaaagctggaatgtacatgaagacatctatgatcccaaaaggttccaggaaatctagtattaaatctctcttcatcaatggggtacataagttttgaaattactgagaaaaaaaaaacaaaccnccngggtatacttcncaaaaa

SEQ ID NO: 16754 - DNA, 480 bp, Homo sapiens
ggcgcgtggggtctggtaaggcctgacctccccaaggctcctgtgggccactccccaactcgcatgcaggtgtctaactgtcccaacaactggaatgagagcaggaaaggcagaccttttctggtatgctctgtgcatctgtttagaaagtctaataccaagtaaaataaactactcaaaactggtgtgttgaacaaacacagcacagcctgaataaatatatctaggtccataaaacaatgatgtttataaatctagagaaaaatatttttacatccttcacaacatgatcaagtgccccgataactgtgccaggttaataaattaaaagcacggaatttaataaaattctattcaatataaagatacttattaaatatttctaattttttattttatcaaactaaaagaaattttctaaatcttattttaagtctttgtaagtactccggcttctgcttttaccctgaattcttccaa

SEQ ID NO: 16755 - DNA, 339 bp, Homo sapiens
gtttttttttttccagatatcttctctgggttgagttggaaacagtttcgcaaaggggtgggaaaagacagtgtgaactttcagggtctctttcatccctcaaattctgcgatgctttctgcataggggcattactttcataaagctagaggaaatggaagcattaaagggaaaggaccctctgctcctctttgtttgaaagaggaggctattcggtttgttctgttccactttaggacgtaaaaagggcatttttaaccaagaatgtaaagaggctgacaaaaactgttaacggggcccaaccaacacttcagtccattgatcaaagcacctacagtt

SEQ ID NO: 16756 - DNA, 389 bp, Homo sapiens
aattttccttcctggataagtttttctttcctatccctctcagttttgataatataataaatgaagatgaggggcccaaatccacacagagctcccatgagtgagtttttaggagtgggtctgaaattaggatagacatttattgttcttgcataggcccaacgaagcaaggcaggattttcgatgagccctcggcggttgggatcgttgtactgaagcaggtactctcgtttcagctgggctcttatggccaaccgctcggcttgcgcccgccgggtttccggagatatgttgtattcggctgggtcgagggtctcaggcagagtgcgcaggctcgacggcttatactttgggaacgacatcttggcgaaccagggcacaattgcgcc

SEQ ID NO: 16757 - DNA, 452 bp, Homo sapiens
  misc_feature (1)...(452): n = a,t,c or g
ccntnnntttgggnaacagntatgacatgattacgaatttaatacgactcactatagggaatttggccctcgaggccaagaattcggcacgagatgagcttcaataccctgtcttaaaaacaaacaaacaaacaaacaaacaaacaaaaacctactacaggattgatgccaaaaaaatgttaaacaaaaccaaaaatggtgggcaggaagcacagctaagacccgtcctggctagtctcaaccctccaatgagatgagactgcaatgctgatctgcctggttacccgctccaggctccacctgcagtgcctggtgcacacccagctggagggcgccaggccagcagccatggggcagagcctggacaccgcccttgcagaggggcctggtgagccaggggtgctgccaagaggagactgcaggcacatgggatggagtctatggctattgag

SEQ ID NO: 16758 - DNA, 479 bp, Homo sapiens
  misc_feature (1)...(479): n = a,t,c or g
ntttgannccaacagctatgacatgattacgaatttaatacgactcactatagggaatttggccctcgaggccaagaattcggcacgagaactggccttatcaacaatgggcaggtgcggtggctcatgcctgtaatcccaccactatggaaggctgaggcaggaggatggctctaggccaggagttcaagaccagcctgggcaacacagcgagatcctgtctctacaaaatatttaaaaactagccaggcatggtggtgtgcatttgaagtcctagcttctcagcatgctgaggcaataggattgcttgaacccagaagttcaaggctgtagtgagccatgatcatgccaacgtaccccagcctgggcaacggagtgagaccctgtcttnnnnnnnnncaaacaaacaaacaaacaaacaaaaacctactacaggattgatgccnaaaaaatggtaaacaaaacccaaaatggngggc

SEQ ID NO: 16759 - DNA, 406 bp, Homo sapiens
gagaaaacccttagactttcgaagaacattttgaaacttattagccagtaatttatagaatctatgtgatgtggtgctagctaaaaatagaaaagcactgagagttcaattaaaacctcaatcatcaatttatgtcttaagataaatattattatctttggaagttatgttataattctcagtgttgggtgaaagaggcagaattctgagtttggattgcccaagtgcttgacttggtatatctcacttctctaacagtgaatgttttataattcaacagttctctagttacttggtgaaggataaataataatttttggcctcgcacagtggctcatgcttataatcccagcactctgggaggccacacccgaggatcacttgagcccgggttcgagaccacttg

SEQ ID NO: 16760 - DNA, 365 bp, Homo sapiens
gctggaagactgcaaaacaaaatggcaaagaatgttcaggtttacacaatctcaattcctcagagcctaatgaaatgctaaacagaaagtaaaaaatgcaaataagcgagcagcactgaaaacagaaccaacctgtaatggacatgcagaactgtcttcatttaaagtcagataattgtggtcacgttgaaaggctccaagaaccaaaacagagctttctgtttcctaatgtccctgcccctaattcaggcaagtagtaggataaaggtgattagccaagattctgaaaaaatcctcaaattccacttcccctcccaaagaaacagaaagttgctctaggagacctttttcccaccatgtgataa

SEQ ID NO: 16761 - DNA, 487 bp, Homo sapiens
  misc_feature (1)...(487): n = a,t,c or g
ggcacaatcttagttcactgcaacctctgcctcctgggttcaaacaattctcttgtctcagctactcagaaggctgaggtgggaggatcgcctgaacccagtcaaggctggagtgaaccctgatcacaccactgcattcccagcctgcgtggcagagtgagaccctgtctcaaaaataataataataagaatactaacaatgtattccttgagtgtagtattcattgggatttttatgtcatgtgaaaaatgactctatgactctcctgtgatacaaatatttgactttcacataataaagtcatttcttcttgaggttttttttttttaaatcanggaaaaagngagttttgtactaataggtctttaaaatctctctgtcacttgctcaaacctctttttatcaagaagagataggactgacctcagtctgctggganagtatcttaaaatttgatctcgggattcattatccctggacccttct

SEQ ID NO: 16762 - DNA, 378 bp, Homo sapiens
cgtggtgtgttcttgactccgctgctcgccatgtcttctcacaagactttcaggattaagcgattcctggccaagaaacaaaagcaaaatcgtcccattccccagtggattcggatgaaaactggaaataaaatcaggtacaactccaaaaggagacattggagaagaaccaagctgggtctataaggaattgcacatgagatggcacacatatttatgctgtctgaaggtcacgatcatgttaccatatcaagctgaaaatgtcaccactatctggagatttcgacgtgttttcctctctgaatctgttatgaacacgttggttggctggattcagtaataaatatgtaaggcctttctttttaaaaaaaaaaaaaa

SEQ ID NO: 16763 - DNA, 525 bp, Homo sapiens
  misc_feature (1)...(525): n = a,t,c or g
tttgnnnnccnnnnnnnnnnnntttgnnnaacagctatgacatgattacgaatttaatacgactcactatagggaatttggccctcgaggccaagaattcggcacgagcgtggtctcggctcactgcaacctccacctcctgggttcaagcgattcccttgcctcagcctcccaagtagctgagattacaggcacctgccaccatgcccggctaatttttatatttttagtagagacagggtttcaccatgttggccaggctggtctcgcactcctgacctcaggtgatctgcccacctcggcctcctaaaatgctgggattacaggcgtgagccactgcgctcagctgagttccagtccttttactgtgctgtgagcatttgcatctaccacagggaagctgagcccagtgtgcagagtgactgttcctgccacgacttacacttcctggggctacaggcttcagtgtgacttgcctatcaagccttcgttgacagacagacagttactgtgttttgtgcctca

SEQ ID NO: 16764 - DNA, 315 bp, Homo sapiens
cattaaaacctgttgtaaggtcatatctgtagtcactggacatggtaccatttcatcggaaaaagcaactacataagaatctttttctgttcgtgtgacaaccatgcacattgctgcagcaactgtactagcgttgagtatactacccaaaactctttggttcatagaagcactgacatcaacagctagtaagaaacgttttccagttggttcaactgtctacagagaaaacaaaacaatcattaaaagcataacagaaattataagtagactaaatttctaaatcatatttacttatcttacattaaaaagact

SEQ ID NO: 16765 - DNA, 379 bp, Homo sapiens
gatcatcatggtacctgagtctgaaaagcagcagtgaattatgtcgcaattttagcaaagtttgctggccttgatggtcttgccttctttggttactcattaatgcctttgccttcaaagtgaaagattacaggcgtgagccaccttgcggcccagccttgttctttatgacagagtctacagagagttcagggaggggcggaccaggaggctcaccagaggctcaccagggattctggagtagctgagggacacctgccttcccctgccatccaccatgccccacccagaagcccagggcctgggcaggggagggaggcaggactcccgggtcacaaagacctggagcataggggtccactgacttctggggcctgtg

SEQ ID NO: 16766 - DNA, 351 bp, Homo sapiens
gtggcgtggtggctcatgcctgtaatcccagcacttcgggaggccaaggcaggtggatcacctgaggtcaggagttcgagaccagcctggccaacatggtgaaaccctgtctctactaaaaatacaaaaattagctgggtgtggtggcctgtgcctgtagttactcgggacactgaggcaggagaatcgcttgaacctgggaggtggaggttgcagtgagccgatatggtgccactgcactactccagcctgggagatagtcagactccatctcaaaagaaaaaaaaagaaaaaagactaatggcaaatatagaatcagaggacattaattctgatccatgcctattttat

SEQ ID NO: 16767 - DNA, 467 bp, Homo sapiens
  misc_feature (1)...(467): n = a,t,c or g
tttganatttggataacnctatgactgattacgaatttaatacgactcactatagggaatttggccctcgaggccaagaattcggcacgaggagaaaaatgagagagagctacagcagggacagcatcgtaaaagttaactgggatttgggcttctattagtggcttcagctcactaagatctttataccaagtcaagtcaggagaggctggagagagagctgagaaggctggctgacaaggctgtctacactccaccttacctgccatggttgtgaccatgctatgcagcgggtctccactgataactttcttccttcagccgtgcttgccttgttactgtgtaatcgggatgtgtttgtatttcttattttggcagaaacactcaagagaaggggcttcattttagtctcaacttacaactgctctctccaataatttttgtgtgtgacatatcctaattaggcc

SEQ ID NO: 16768 - DNA, 340 bp, Homo sapiens
gcagttctgcagttgacccactgtctttgccaatgtctcctaggcagtgacatcagtgtctggcccaggtgagcacctccgaaatgccctgtggcatactggccacacccctgatcaggtacgactgctgtggacagacccacgaaatgtgggctggcgggacaagacctcctatcgctggcagcttctgcaccggcctcaagttggctacattcgggtgaagctctatgagggaccccagcttgtggcggattctggggtgatcattgacacatccatgcgaggggggcgtcttggtgtattctgcttctcccaagaaaacataatttggtccaatctc

SEQ ID NO: 16769 - DNA, 534 bp, Homo sapiens
actgctatgacatgattacgaatttaatacgactcactatagggaatttggccctcgaggccaagaattcggcacgagggtcgccgctgcgaagggagccgccgccatgtctgcgcatctgcaatggatggtcgtgcggaactgctccagtttcctgatcaagaggaataagcagacctacagcactgagcccaataacttgaaggcccgcaattccttccgctacaacggactgattcaccgcaagactgtgggcgtggagccggcagccgacggcaaaggtgtcgtggtggtcattaagcggagatccggccagcggaagcctgccacctcctatgtgcggaccaccatcaacaagaatgctcgcgccacgctcagcagcatcagacacatgatccgcaagaacaagtaccgccccgacctgcgcatggcagccatccgcagggccagcgccatcctgcgcagccagaagcctgtgatggtgaagaagaagcggacccgccccaccaagagctcctgagcccccttgccccc

SEQ ID NO: 16770 - DNA, 401 bp, Homo sapiens
gaaggtttatgtggaaataataatgctggggaacacaaaacaatactcgaaaaatgggaaggtattctcttttcttgtatagtaaagcttggtatcctaaagatgtcagtgtccctaaacttaatgtaatccctgtttaaaataccacagttgttttttctggagacggggtctcgctctgtcgcccaggctagagtgcagtagtgtgagtataactcactgtaacctcaaactcctgggcttaatcagtaggtgtctcactatgttgctcagactggtcttgagctcctgacctcaaacagtcctcctgcctgcccaacccaaagtgctggggttacaggcataggccaccatacctggccaaaaatactccagatttttaataatggttttttagaacc

SEQ ID NO: 16771 - DNA, 429 bp, Homo sapiens
  misc_feature (1)...(429): n = a,t,c or g
ggccactgaggtgcaaagagtttaacttatcccaagtcacacagtttggaagaggctgagctggtatttgaacccaggttttcagaggctgcactcttaaccaccaagcttcccagcactcagcaaacactggaaagacagagatggacctagacagtcagtaggaccaaaagtctgcaggccgatagggaaagaatgtaagaggacggcatgggcagcgccagcccctccagcagtcatatattaagccctggacactgggcagctcgggcaggtcggggggcctcagactctcggaccccatgcctggaagaccacggctgcccaacaagcagcagctgctgtgaatcgcttacacatcttnccccaggtgagcanagagctaacacctgaggatangcccagaaacgggaagcccgtgcacctgag

SEQ ID NO: 16772 - DNA, 533 bp, Homo sapiens
  misc_feature (1)...(533): n = a,t,c or g
ccccctttggaatnccgttatcacatgattacgaatttaatacgactcactatagggaatttggccctcgaggccaagaattcggcacgaggatctttttaatgtctggcatagcagaagacagctggattttcacatctgcttcacatattccaccagccctcagagctgtgatggcgttacaggtcctgtagcaaaatacgcaagaggtttttcccttggtctttctccacttctgtcccctaataactttgctccagccccttagcagaatttgtcttttgttccaccctacttctcttgatctagccagatacaacaaacattatatatatcagccgctgttaaaacaggaagagtcagtcttttttttgggacagggtctcctctgtcacccaggctggagtgtgatggcactatcatggcttactgcagccctgacctcctggcctcaagtgatcctcccacctcagtctcctgagtagctgggactacacttgcaggccaccatgcttggctaatttttgnatttt

SEQ ID NO: 16773 - DNA, 465 bp, Homo sapiens
tgacatgattacgaatttaatacgactcactatagggaatttggccctcgaggccaagaattcggcacgaggcgggttgaattatagccaagtggcatataaaaaaaaatgaagcaaataaatgaagtctgagaaaatgaaaatacaggaatagagaatagcaactacaatttactagtggatctgctaacaaatactaatctaatcaaaattactaatataattagggtgaaagaactgagggattggaagagtatatgatatgcatacgtggtgaaggaaaatgtaaagagctaaatcctcatcctccataatggttaaaaccaaaaaaataagaattagcaacataagcacaccatttactgacatgataccaaaacagtcagctaaaaatgttcgatgtagtagcctcctgggaggaagaaacagaaatagagttggggagcacctctagtctttcatcct

SEQ ID NO: 16774 - DNA, 334 bp, Homo sapiens
gggagaagctcccaggaacaactgatggccttgcagcactcacacaggacccccttcccctaccccctcctctctgccgcaatacaggaacccccaggggaaagatgagcttttctaggctacaattttctcccaggaagctttgatttttaccgtttcttccctgtattttctttctctactttgaggaaaccaaagtaaccttttgcacctgctctcttgtaatgatatagccagaaaaacgtgttgccttgaaccacttccctcatctctcctccaagacactgtggacttggtcaccaagctcctcccttgttctctaagttccactgag

SEQ ID NO: 16775 - DNA, 332 bp, Homo sapiens
atttatttgggatgaggaaaggaaattgagcagaaggtacaggagtaatagcaattccctgtagctctcaaagcaaattttgagctcatttttctttttctgcaagctcagcagcagaatgcccagagtcttccctggtagatgcaggttccatagcgacgttctcctgcaatgcacgctggtattctgcaatagcaggccatgtttttccttgagcctggatgtcgacgcggccgcgaattccagatctatgaatcgtagatactgaaaaaccccgcaagttcacttcaactgtgcatcgtgcaccatctcaatttctttcatttatacat

SEQ ID NO: 16776 - DNA, 459 bp, Homo sapiens
  misc_feature (1)...(459): n = a,t,c or g
aacngctatgacatgattacgaatttaataccgactcactatagggaatttggccctcgaggccaagaattcggcacgagggcataacacaattaaggtgttcccaaaactggaaatccaaagcatccgagtgatgctctgaatcatgcgccgtgtggaaggaatgtgctggcaggcgcagatcgccggctgagtgttccactgaaattaaactcaagtgctgacttctcgttttttacctccccaccccttccctcaaggttggtctccgccagctggacatgtccttgctctgccaactgtacagcctctacgagtcgattcaggagtacaagggggcatgccaggcagcctccagcccagactgcacttacgctctggagaacggcttcttcgatgaagaggaggaatatttccaggagcagaactccctgcacgacaggagggaccgaggccctc

SEQ ID NO: 16777 - DNA, 350 bp, Homo sapiens
ggaaaaatgagaattgtaggaaaagttgagagtatgaggtacattagaagtgactttaacactccaccaaagtaattttaccttatttagagtttggatttgaaatggttcaaaggctgtgaattcaatatttgatgtgattttgggaagtaaaggggaatgtcagcatcctttcgataaaattgatattatcaatctgaagaatgtttcttagatcagttgtgtccataacttgggagcattagctgtgagaccttgaaacagattggccatattcttatttcacattgattatttaaatggacaattttaggttactggtctttattcacttgttattgaaaccacat

SEQ ID NO: 16778 - DNA, 185 bp, Homo sapiens
gaaaatcttgtttgactgtattattcatgttttctattaattatattattaaattttttcatgtgcttacatatttttaatgtactagctgtatggtattttgaaacatgggtatgaatctctttgtcgatgactgttttatttgttaatttctcattacatttttattagtttttttttttttt

SEQ ID NO: 16779 - DNA, 318 bp, Homo sapiens
tatgaaactggatgaagatgtgaagatgatcagtgcagaagcgcctgtactctttgccaaggcagcccagatttttatcacagagttgactcttcgagcctggattcacacagaagataacaagcgccggactctacagagaaatgatatcgccatggcaattacaaaatttgatcagtttgattttctcatcgatattgttccaagagatgaactgaaacctccaaagcgtcaggaggaggtgcgccagtctgtaactcctgccgagccagtccagtactatttcacgctggctcagcaacccaccgctgtccaagg

SEQ ID NO: 16780 - DNA, 431 bp, Homo sapiens
  misc_feature (1)...(431): n = a,t,c or g
ttgnnnntttgannaccagctatgacatgattacgaatttaatacgactcactatagggaatttggccctcgaggccaagaattcggcacgaggttaagggtgtgaccaaagacaaatggaaaaagacaaatgacaaacatactaataaagagcttcggtttctccacaaaaaatacaataataaaataaaatgttatcagaaatctcttgactctcctccacgttagctcactttttccctcaagagggtgaacatgacccttaacagatccagcctcaagtgctggattctcttgggaacttggttaaatggttttttttcttcccgaatgtccaagtcaccttccagacctgcagctcctgagcagccaacttaggacttctaatggagagtgaagttcccctggttcgcggaggggccggccacagc

SEQ ID NO: 16781 - DNA, 327 bp, Homo sapiens
tgatagaaaacataactaaaaaagtagaagacactgttaaatttgaatctggatcctatatagcttcttctctgggatctactgaggagtgaaatctaaatgaagatttagcttagaaagcatgaagatagtatgttccaattttaaataaaaattatattgtctgaaagacaatacaattttagtactgggggaaaaaaaactagattgttatttgaagaagaaaacatcatggttctctccaggtttaaaatgggtgctcccatgtaggctgattttcccggcatttgatcttaacttgaaggccatctgcccagcccagcaatc

SEQ ID NO: 16782 - DNA, 404 bp, Homo sapiens
  misc_feature (1)...(404): n = a,t,c or g
gggacatagattttcacattgtgtagtattgtttatatcaggggtccccaacccgcagaccactgtgtggtactggtccatggcccattaggagccaggctgcacagcaggaggtgagcagcaggggagggagcattactgactgagctccgccgcctgtcaggtcagcatcggtgttagcggaactgtgtgtgagggatctaggttgcacgccccttttgagaatctaactaatgcctgatgatctgaggcggaggccagatggtttcatcctgaaaccatcctcccaagcccccatttgtggaaaaattgtcttacatgaaactggtccttgttgccaaaaaaaagttgggggccactggtttagatcttgcagtattgtgaaagtaattttttggncttct

SEQ ID NO: 16783 - DNA, 532 bp, Homo sapiens
  misc_feature (1)...(532): n = a,t,c or g
tttgnnnccattgnannccaacagctatgacatgattacgaatttaatacgactcactatagggaatttggccctcgaggccaagaattcggcacgaggctcttctcacctggctaaaggagaccagcctaagaggtaactggagtactctttgagatagcaggggctaggtttgctataacctggaccagagaggtgtccatttgttagggaaagtaatgtcatagcattggtagcctttcacaacctttcttgttctttgggtgcgtggctttctatccaggtgggtctgtgttaacccaccactgggtagcaggggctcctactgaaacctggggagaaagaagggaaagctttctcattcattcggttttttattcctccagcctgggcaacctggagagagcagcttggaaagcaataccttgctctaaaatcaaacagacaaaaataatgtatcagcatgggttttatagtcatagatctggntctgatatgaactttgctgcttattanctgngnaacagtgaga

SEQ ID NO: 16784 - DNA, 341 bp, Homo sapiens
ggacatgctggccctgcagatcatcgacctcttcaagaacatcttccagctggtcggcctggacctctttgtttttccctaccgcgtggtggccactgcccctgggtgtggggtgatcgagtgcatccccgactgcacctcccgggaccagctgggccgccagacagacttcggcatgtacgactacttcacacgccagtacggggatgagtccaccctggccttccagcaggcccgctacaacttcatccgaagcatggccgcctacagcctcctgctgttcctgctgcagatcaaggacagacacaacggcaacattatgctggacaagaagggccata

SEQ ID NO: 16785 - DNA, 457 bp, Homo sapiens
  misc_feature (1)...(457): n = a,t,c or g
gagctagcaccatgattcaataccctggcttcagttcaaaaaagtgctaagtactattacatgtgaagtttctagctctctgcacggcacacaaaaatatcccacaaatggtggccactagtagtagtattatcttacagtcacatcttttattggtaattgtttgggtttcagaactacaaaaaaaaattgttatataatgaagagccttttaggactcnctagtgtccagaataaaactaagatgggaagaaaaaagaaaactctgtctacaaagaatgagtctatgattatcagaaggggagcaaccaaagaaagactcaaagattacatctgatattctgaaattgttgttctgtcaataaaaagcgtgatttgactttttgataatgccagggccagaagataggtgcaacaaaaaggtggtggcacnaaaagaaggggagaattggctggg

SEQ ID NO: 16786 - DNA, 488 bp, Homo sapiens
  misc_feature (1)...(488): n = a,t,c or g
ttgaanccaacagctatgacattnttaccaatttaatacgactcactatagggaatttggccctcgaggccaagaattcggcacgagtgtgtgttttaaagacagggtctcttttgttgctcaggctggagtgcagtggcttgatcatagcttactggaaccttgaactcctgggctcaagcgattctcctgcctcagccccccgagtagctgggactgcaggtgcatgccatcacacctggataatttttaatttttttttgtagagatggggtcttaccatgctgcccaggctggacttgaacttttgacctcaagtgatcctcccatttctgcctcccaaagttttgggattataagcatgagccactgcacctggccctcttctgtttttgagtaactcatccacgtattcattgaaacttccatttacaagacagtaaactgcatttacaagactgtaaacttccatttacaagacagtaaat

SEQ ID NO: 16787 - DNA, 401 bp, Homo sapiens
gctaaataaaagcatactatttactgaaagtgggaggaatccttaatagtgcacgtagtagttttcatagttcacgtacgtcgcaacattcattcctccattttaataaaggaagaggaaactgaccctcagagaagttaactaacttttgctttccatgatccacatcagttagaaggaagactgttgcagggagcaggctgagaagggcacttacagaagagagccaacctggattaacacctgggtatgggcaactctctaaccgctggtttggtttggagttgactctatgggtatggaaaggttgcaccaggccgggcgcagtggctcacacctgtaatcctagcactttgggaggctgagactggcggatcacctgaggtcaggagttcgagacc

SEQ ID NO: 16788 - DNA, 342 bp, Homo sapiens
tactatttgattcaattcctctctctgtcctttacggattctcatgaaccataagaacacccacctgttctacaagggaagaaaaagtttccctagcattcaggtctaaaagtaagttattttagtgggtacctcacacaggcgacgtagtcatgcactagacagcttcttttttgcgctagcatgtgtgtgccagggtaggctttattaaatcatcttctgcagcctcttgacagccaaaaagcatgacgggaaaactcaaggaatttgcaaaaagtcagcaattatctggggggccaaggcaacacagtccaagtgtgaacgttcccagtggttttgctt

SEQ ID NO: 16789 - DNA, 372 bp, Homo sapiens
gtgggaccagcggtacaccatcgtccagcagcagatcccgtccttcctgcagaaaatggcggacaagatcctcagcacaggaaaatatctaaatgtggtcagagagtgtggccatgacgtcacctgcccggtggctaaagagatcatctacacgttaaaagagcgggcgtatgtggagcagatcgagaaggcgtttaactacgccagcaaggtgctgctggacttcctgatggaggagaaggagctggtggctcacctcaggtccatcaagcgctacttcctcatggaccagggcgacttcttcgtgcacttcatggacctcgcggaggaggagctccggaagcccggtggaggacatcacgccccctcgcc

SEQ ID NO: 16790 - DNA, 561 bp, Homo sapiens
  misc_feature (1)...(561): n = a,t,c or g
gccaagggtttgtcttcactgcttttggtttgtcttcactgcttttatcattttctatcttttaaaaagtaaatttggaatatttaatggcatgctacttgctaaaagtttaaaaatcagataattttgaaattaaaaggcttttttaccaaaacaatgtagtttcttgtctgttccctccgccccttcccactccttataggcaataacttttaacccttagctaattctttatatctctaaataaaatancactgcatttagattcatcaattttanaatattttttaaaatgttagatgagaatgaatgangagaggaataagggggtaagctttctctataaatatattctctgtaacataatgttagatgaaacanaatgttatanagaaagctttctctataaacatgttanatganaaanaaattcattgcttctctcctcattccttcagtacagttatanaaaacatttnaaacngtttcaattgtgagtatanaaaaattgtttacatangaagaaccacctccaanatggtacacaagttngggggaggg

SEQ ID NO: 16791 - DNA, 375 bp, Homo sapiens
gttttttttttaaggtcaaccagcaaatgatatcctgcctcttgaaaacttaatcattttatctgacaggagttagattaggtgtctccagagcatttgcttatacttaaagtgccagaagaggttctcagtcctaacaaaacaaacaaaaaaacccactttctcaaagtttctctctttagtcactttgtattagattcatccattttaaaaatctttgctttagaagcattgttaatgtttttgtccatttcactagagtccctgaggaacatcatcttgggtttaacagtattaattgaccacccactatgtagccagctatgtgctaaatgctgaaaaaaataagaatacgttgcaaccctgtcattgagg

SEQ ID NO: 16792 - DNA, 405 bp, Homo sapiens
gggacaaggtatttcttgttactgtgtgggctgtgtgctgtgggatgtgggacattctattgtgaggctttgagtgatcttattggatgctatgtaagtgaatatcagaggagtgttgaaacttcgtatattactatggattcagagaaggtaggcacacaagaagatcaggaaggatacaacagttcaccctcccaaacatgcaaaaaaaggtgaaatttctagtagaaatccacagtcaattataattaacgttgatacccaggaaccttgtacgctgaggaactggtgaaattaactacagagtgtggcctacaaagatcatgtggagacatcaattaggcgccctgcaaaacatgccagtctcccatcttaggagaaggagcacagtttaggtattcctct

SEQ ID NO: 16793 - DNA, 461 bp, Homo sapiens
ggcggcctcgacctcctggactcaagcaatcctcccactttagcctctcagtagctgcgactacaaggtgcataccaccacgccttgccagtttttttattttttgtaaaggcagggtttcactcttgccctggctggtctggagctcttgggctcagatgatatgcctgccttctcctccccaaatactgggattactggcatgagccacgcacccttcccattcccttcttttaaaactctctctcttctcagcttgatacccacctttcactttttcactactttgaatgcttttttctttgtaccccttgaaattgaattaaaaattagatttgcaaatgtataggaagattaagaacatctttgaggtgcaggaataaagttgtaagtgcctggactcgagtgatagcactgaaaaggaatcacctgacattttgaatagagcttatacagtagat

SEQ ID NO: 16794 - DNA, 378 bp, Homo sapiens
gcttttcaaagactattttgcaagctaattgaaggctttgtgccatgctggcttgcatgtgcttaggactggcatttattcactgcatccgagctgtcctgagactctgtcgtccacatatctccttctaagggttttagcccagttcatttcaaataacctcgactgcaaacgtagtgcatcaaaaacgttcttccagctgggcgcagtggctcacgcctgtaatcccagcactctgggaggctgaggtgggtggtcaggagttcgagaccaccctggtcaacatggagaaaccccgtctgtactaaaaatacaaaaagtagctaggcatggtggtgggtgcctgtaatcccagctactctggaggctgaggtaagg

SEQ ID NO: 16795 - DNA, 430 bp, Homo sapiens
gtgaccctggatctcttttatggagttcctcacccaggccccttgagcttggccatacttgaggcaatgggatatcttccttctcctggagccccttgaatcttaggcctcgggaacacacagactactgtgtttcttggctgcacccacggaggacagcccccatactccttgcttacaaccagcaaagactccacagccatccctgcacacgactcaggctccttggcttggcactcaaggctctttgctttcctgtcctgctttgcttccagctgcaaagatggtggcttcctgttttcctcttcgtttcctttgcttaagttgattctcagccagacatgctttccccctgcacgcttccctaagccatcctatctgggaccctgacccaatcaatggttccctaatgcacctttgagaccaagtg

SEQ ID NO: 16796 - DNA, 468 bp, Homo sapiens
tttgaatccctcctttgaaccccttgactgattacgaatttaatacgactcctatagggaatttggccctcgaggccaagaattcggcacgagtcaatccttattataattatatggaaaaaaatgttatcattgtgttatttttcatctttattataaaacattcttttttgcaacaaaatttaaatgagttgtctgtgctggagtagtcatcagctgttcagctagttaagatagtaccttatgaaaagaatatattgtattgtttcataaggtactattctaatgtctctataacaaaaactgcaacgtggagcagcaagtgctgatggaaaagctgctgcaagttatccagaagatgtagctaaaatcactgatgaaggtggctgcattacacaacagattttcagtgtaggtgagacagcttttctattggaagaagacgccatctatttcatagctagagag

SEQ ID NO: 16797 - DNA, 371 bp, Homo sapiens
gagttattccaataccatgcagataaaccacccctgccatgagttgatggaagaatctctgagggatattaaaccagaaaatcttctgttggatgaaagggataacctcaaaatctcagactttggcttggcaacagtatttcggtataataatcgtgagcgtttgttgaacaagatgtgtggtactttaccatatgttgctccagaacttctgaagagaagagaatttcatgcagaaccagttgatgtttggtcctgtggaatagtacttactgcaatgctcgctggagaattgccatgggaccaacccagtgacagctgtcaggagtattctgactggaaagaaaaaaaaacatacctcaacccttggg

SEQ ID NO: 16798 - DNA, 391 bp, Homo sapiens
ctccggggcccgtcgtcatggatctcacaggggacctggctgttctgaaggaccaggtgtttgtcctgaaggaaggtgttgattacagagtgaagatctccttcaaggtccacagggagattgtcagcggcctcaagtgtctgcaccacacctaccgccggggcctgcgcgtggacaagaccgtctacatggtgggcagctatggcccgagcgcccaggagtatgagtttgtgactccggtggaggaagcgccgaggggtgcgctggtgcggggcccctatctggtggtgtccctcttcaccgacgatgacaggacgcaccacctgtcctgggagtggggtctctgcatctgccaggactggaaggactgaacccccagtccgtgtctccc

SEQ ID NO: 16799 - DNA, 359 bp, Homo sapiens
gctggccttacatttccctctaattactgcctcatttgtctttaaacaaaacttgtgtaaattgttcatgcttactgtctccagttcttcttctttcatattattttgaaccattagtccgccaagacaccacttctgaaggtctctggtgatcagcaccttgctaatgccatggtcctttctcaggcctcaccttacctgactcctctctcctggaaacactgttttcacttgattttcaggtccctacatcacttgcttttcctcctgcctttctgaccactcttctttagtatctcttcctccttccctccctccatgtctcctcccctccatttctctcttcctctctccctttt

SEQ ID NO: 16800 - DNA, 320 bp, Homo sapiens
gagctcatggccttggcagtttcaggcaaagaagttgggaatgcccttctaaatgttgtcctaaaaaggagccatattggattgttcttcatgatcgaattgtgagtgtcatcagcagccccagcttgacgtctgaaacagagtgggttggctatccattccgcctctttgatttcactgcctgtcatcagtcctactctgagatgagttgtagctatacgttagctcttgcacatgctgtgtggcaccattctagcatcggacaactttctctcattccaaagtttcttactgaagtacttcttcctatagtgaagacc

SEQ ID NO: 16801 - DNA, 362 bp, Homo sapiens
gcaagcccgccagccccagccgctcctccacgcctgtccttagaaaggggtggaaacatagggacttggggcttggaacctaaggttgttcccctagttctacatgaaggtggagggtctctagttccacgcctctcccacctccctccgcacacaccccaccccagcctgctataggctgggcttccccttggggcggaactcactgcgatgggggtcaccaggtgaccagtgggagcccccaccccgagtcacaccagaaagctaggtcgtgggtcagctctgaggatgtatacccctggtgggagagggagacctagagatctggctgtggggcgggcatggggggtgaagggccactg

SEQ ID NO: 16802 - DNA, 630 bp, Homo sapiens
gaagtcagagttgagagacagaggcaccccggacagagacgtgaagcactgaataaatagatcagaatgactgaaaaagccccagagccacatgtggaggaggatgacgatgatgagctggacagcaagctcaattataagcctccaccacagaagtccctgaaagagctgcaggaaatggacaaagatgatgagagtctaattaagtacaagaaaacgctgctgggagatggtcctgtggtgacagatccgaaagcccccaatgtcgttgtcacccggctcaccctggtttgtgagagtgccccgggaccaatcaccatggaccttactggagatctggaagccctcaaaaaggaaaccattgtgttaaaggaaggttctgaatatagagtcaaaattcacttcaaagtgaacagggatattgtgtcaggcctgaaatacgttcagcacacctacaggactggggtgaaagtggataaagcaacatttatggttggcagctatggacctcggcctgaggagtatgagttcctcactccagttgaggaggctcccaagggcatgctggcgcgaggcacgtaccacaacaagtccttcttctccgacgatgacaagcaagaccacctcagc

SEQ ID NO: 16803 - DNA, 446 bp, Homo sapiens
  misc_feature (1)...(446): n = a,t,c or g
gcagtttaaaaagggaacatgttgtgacaaatggaacaaggttgtgcaattaaaattatcctttcaaaatatattcagaacctaatgacgtctcaccagccccagtgcttccatcatcactcctgatgtgcaacagcaatggtctcgaaagttctccctcctcccgccttgctcctctatgtgctattctctcatggtaacccgagggagccttgaaactgtagttagatgatatcactcctctgttcaagactctcctgtggctcccatggggaaaagcaaaagctctatctgatctggattccaccacttcctggacttcatctcccagctctctccctgttgctccctcagctccagtctcgtgccgaattcttggcctcgagggccaaattccctatagtgagtcgtattaaattcgtaatcatggcatancaagtnttcaa

SEQ ID NO: 16804 - DNA, 406 bp, Homo sapiens
aatccaaattctttaatttctcagagcttcatgttattaaaaaaatgggttaccagagacggaaaaaatgccacaactgatgccttaacttcggtcttgacaaaaattaatcgaatagatatagtgacactgctagaaggaccaatatttgattatggaaatatttcaggcaccagaagttttgcagatgagaacaatgttttccatgaccctgttgatggttggcagaatgagacatcaagtggaaacctagagtcctgcgctcaagctcgaagagtaactggtgggttactagatcgactggatgacagccctgaccagtgtagagattccattacctcatatctcaaaggagaagctggcaaatttgaagcaaatggaagccatacagaaatcactccagaag

SEQ ID NO: 16805 - DNA, 632 bp, Homo sapiens
gcagctgtctcttaaatgcctaaaggtaaaccttacttccttaagttaactggctgcttggttcctcatggaggagcctagattgtttttctctttttgagagcacaggacctgaccagaccttgtacaggttcatttctctcctttttcttcaattccattagattggtctttctgttcccccaatcagcctctcctagtttatacaaatccttctttctgtatatccatatccctccttcccaagactcaggtgcattttttttttctggggcacttggccttattttggttagtaatttaaagccttctctttccctcaatacattgtaccccttaaatggctcttgaaaattatcccctgtgccttctgtgttacacctgcatcttagttaaataaagtgtagattcttaacctttttttgtgcgatggatccctttagctgtctggtgaagcctatggatcccttctcagaataacatttttaaacctataaataaaatgcacagaactaagtgcacttacatttgagaatgattatcaagctattaaaaaccaaatttgtgatacagtaatacatagttctttagtaggtcattaaatatcaaaagctactggtggtggtttcatt

SEQ ID NO: 16806 - DNA, 736 bp, Homo sapiens
aattcggcacgagcttctgagacagggtctcactctgtcacccaggctggagtgcactgatgcaatcaaggctcactgcagctcggcctcccaggctcaggtgatcctccctgaggcgattctcccacctcagcctcccaagtagctgggactacaggcacgcagtaccatgcccggctaatttttgtattttttgtagagacagggtttcaccatgttgcccaggctggtctcaaattcctgggctcaagtgatctacttgcctcagcctcccaaagtgctgggattacgggtgggagccactgtacccagctggaaatattttaaagtaaagcaatccatccctcctctcactttaggcaggagaatctggaatcaagtgaaggcctgaatgtgaagtcttttgagacctggctcctaacctagaaaaaagcaaaaggggagggggctctaacacatggggctctgcaaagaccaaatatgatgagtgtttggagctgaatgcagctgcctggctaagaccgtgcctctggaactgtccccactcctgaccccagggatagtagtgactcccatcattcacggctgtcgtgaagacccagcaaagacggctggggagggagcacttggcacaacgttaattgctccatcagcatcagctgctgggaagggatcattccaaatcctgccagggttccagagcctgggaactcgcttggccctcacccactcttgt

SEQ ID NO: 16807 - DNA, 244 bp, Homo sapiens
gaagttgtagattcaaggctgatgcttgtgataaaaagaggtggtgattagtgaggtgcatttcttcagccctgggtgatctcatacatatatataactttttttttgagacaaggtctcactgtgtcactcacactggagtacagtggcacaatcatagcttactgcatccttgaacctggactcaagagatcctcccacgtcagcctcccaagtagctaggactacgggtgcacaccactgc

SEQ ID NO: 16808 - DNA, 415 bp, Homo sapiens
gacctgggcggaggcgtgcggagtcgggtagagagcgaaatcacgcctcttcagtcagccacgccctttattcttgctcggcctcgccacagagagcaaatcagattggctgggcgacaacctcaaagggcggggctgcacacgttcactacgggaatgaggtagcggtggagggggcagttgggcggggataggccgtcctagctaaggtggtaaaggccaataactcttcaggctgcctctcctcgaaaagtcatcttctcgcgaacctttaaaatgccttcctccccaagcacctcaagggactagaactgagtgcttcatttgtcttttttcctccttgcaaaagtcccgtttgccaccatggggatgtaccaagtgagaccgagtagggggaacgagtggtgattgacgc

SEQ ID NO: 16809 - DNA, 470 bp, Homo sapiens
  misc_feature (1)...(470): n = a,t,c or g
gnnnnnntttnnnntccnnntnnnnnnntttgaanaccnnntatgacatgattacgaatttaatacgactcactatagggaatttggccctcgaggccaagaattcggcacgaggatagagatcaacccatacctgctaggcaccatggctgggggcgcagcggattgcagcttctgggaacggctgttggctcggcaatgtcgaatctatgagcttcgaaataaggaacgcatctctgtagcagctgcctccaaactgcttgccaacatggtgtatcagtacaaaggcatggggctgtccatgggcaccatgatctgtggctgggataagagaggccctggcctctactacgtggacagtgaagggaaccggatttcaggggccaccttctctgtaggttctggctctgtgtatgcacatggggtcatggatcggggctattcctatgacctggaagtggagcaggcct

SEQ ID NO: 16810 - DNA, 323 bp, Homo sapiens
gaggaatgaacatgaggttgatatgattcttatgtagctctctgaaataaccacctgtgattgataggtgtgaatgcatcttggtataattactgcagtcttgctgttgcccttttagtatggaagacaagtaaggtctatggccatgttgatgtttatggtgtaatataaacttttactttgagccaagtaaaacaacttttaaataaatctgctcttgaaaggacattatctgtttaaatattgatttgatataatatgtgttactggaatagatgcttgatgttgttcagcctaattgtaaggtcttacctcctatgtcc

SEQ ID NO: 16811 - DNA, 515 bp, Homo sapiens
  misc_feature (1)...(515): n = a,t,c or g
ggtaaatctgggaaaccttacttagtctaaagtgaaaatctgtgttgggtcattttattttcaagggatgtgccttgcagttttttgttttgctcttttctttaactggagctatatgatttcccgtttcgtttcgtactgaagtgtttgaggctttttcctcccccgcccaaacacagaagcaaggagatcaagccacgagtattcttatcttattggcagtgactcacctattttggctcagtcctaaaaggaattctggtggtttatttggggttgatttttccttggcttatgttctctgcacaatagctaggaatttaacttgaagtctagtgcagacctgtctcctcgcccacctggagtttgtgttgtgacgtctctgtgccaccaccacctggagaattgaggcttgggacaagtaagttgtaagggttcctccgcaccccagatcaaatgnnattacagagnanganaatacngntgcacanaatttctgcagccaagnaaacaac

SEQ ID NO: 16812 - DNA, 363 bp, Homo sapiens
gcccacaataagattcttccctgtattgcctaatcttaacttttgactcagttccaattccctagtgcctgtgcatcctaccagccgtgcctgatacaggtctgtacactataaacactttcactttcatgtctctgtccctgctgtttgctttgccttcacagggcaaagccctacttatccttcaagattcagctcaaatatcttattattttccctgaatccagcagataaaattgttcttcatttgtattctaatagtacatcataggtacttttatactgatattaccatgtctttcttgttagtctccctggctaggctctgggctgattgaaggcaaagaactgtacttcacagat

SEQ ID NO: 16813 - DNA, 477 bp, Homo sapiens
  misc_feature (1)...(477): n = a,t,c or g
acttgttacagctatgactgattacgaatttaatacgactcactatagggaatttggccctcgaggccaagaattcggcacgagaactggggattacatttcaacatgagatttagaggggacacataccccaactctttaaaagactatactaaatgttgacaagcatgcagcagaacagaatctatcctacagtaccatgagatcataaaataacagtacctccacttttggcagtttctcagttccttaaatgcatttccatggattgtcccacaaccacaaaaaaaaagaaaggaaaggaagctaaacatacactgacatatgaccaaggcattccactcaggaatttttactcaaaaaaaaaaaaggggtnngnccccaaaaanacctgaccaaaantnttcncngcngntttntttntccngnccaaanggnccntcaccgggtaantanataaccaaagggggcnnatcc

SEQ ID NO: 16814 - DNA, 370 bp, Homo sapiens
gcctgtttgggagagaaatcttatatagctactcttctaagctggcacgattgggcttttacataaacacagcccacaccttacatccattctgaaatcagagagcccaacttctaggatcacagttccgcctgcttctgcagggagcctattgcccttgacagctctgtcctacttgctccagaaggaatggttcaggttgaatagggaaggtggtcgccaaatattggacagtgaatctaagagagtgcactttttctcttctaagagccatttttgggaagactccatagtggagctttcagagtcagaaggggagaagagaaactgcaaagcccccagttttggggcccctgtgatctatatgcat

SEQ ID NO: 16815 - DNA, 812 bp, Homo sapiens
gggcgcttgccagcgtgttggagagaccgctaccggtgaaccagcgcgggtttttcggacttgggggtcgtgcagatctgctggatctaggtccagggagtctcagtgatggtctgagcctggccgcgccaggctggggtgtcccagaagagccaggaatcgaaatgcttcatggaacaaccaccctggccttcaagttccgccatggagtcatagttgcagctgactccagggctacagcgggtgcttacattgcctcccagacggtgaagaaggtgatagagatcaacccatacctgctaggcaccatggctgggggcgcagcggattgcagcttctgggaacggctgttggctcggcaatgtcgaatctatgagcttcgaaataaggaacgcatctctgtagcagctgcctccaaactgcttgccaacatggtgtatcagtacaaaggcatggggctgtccatgggcaccatgatctgtggctgggataagaagggtcctggactctactacgtggatgaacatgggactcggctctcaggaaatatgttctccacgggtagtggtaacacttatgcctacggggtcatggacagtggctatcggcctaatcttagccctgaagaggcctatgaccttggccgcagggctattgcttatgccactcacagagacagctattctggaggcgttgtcaatatgtaccacatgaaggaagatggttgggtgaaagtagaaagtacagatgtcagtgacctgctgcaccagtaccgggaagccaatcaataatggtggtggtggcagctggca

SEQ ID NO: 16816 - DNA, 331 bp, Homo sapiens
gaactgggccagaaggctctgcacatggcctacctgtcttccagcttcctgctccctcccctgcccgcacaatactgcttggcactggccttctgccactcctggaacctgtcggcccttctccctgttgtggctgagcctttagaaaaggcgcttcatcatcgtggagcattcctgccactgtcacaaagctctcactgaccattctttcacttcttggagcaaaactctctttcttagagaagcctccctgactgccgcagacgaggtccgtttaccctgttctgccctctcaaagcactttctaccctttactggactaatttctgct

SEQ ID NO: 16817 - DNA, 315 bp, Homo sapiens
gcgtgcctgtgcgcagttctgtggacgagcttgttggcattgactattccctcatgaaggatcctgtggcttccaccagcaacctggacatggacttccggggggccttcttccccctgactgagaggaactggagcctccccaaccgggcagtggagccccagctgcaggaggaagagcggatggtgtatgtggccttctctgagttcttcttcgactctgccatggagagctacttccgggcgggggccctgcagctgttgctggtgggggacaaggtgccccacgacctggacatgctgctgagggccacct

SEQ ID NO: 16818 - DNA, 443 bp, Homo sapiens
tatgacatgattacgaatttaataccgactcactatagggaatttggccctcgaggccaagaattcggcacgaggagcttcaccttgaggtatgtaaagttcaagacaaagttttattttttaatagttctcagccgggcgtggtggctcacgcctgtaatcccagcacttcgggaggctgaggtgggtggatcacctgaggtcaggagtttgagaccagcctgtctaacatggtgaaatcccatctttactaaaaataaaaaagattagctgggtgtggtggggcacgcctgtagtcccagctactcaggaggctgaggcaggaggattgcttgaacctgggaggtagaggttgcagtgagccaagatcgtgcaattgcactccagcctgggcaacacaagaccctgtctcaaaaaaaattttttttaagttctattttatc

SEQ ID NO: 16819 - DNA, 355 bp, Homo sapiens
gaaaaaaagaaaaagaaaaacaaccagaggtgttgcagctcctgaattgtgcttcacattgctggctcttctccttggggtctcagcttagatgtcatttccaaagaaagacttttctgaccaccctatctcatgtggcccccctctacctctatttacagcaccctacttctcactatttatcacaattactttaaataattacgtgtctatttatttacctgtttattacctatctcctaacaccagaatggaagttcctagttctagcacagcatctagcacagaatgctgtaagtatttcaaaaaatattttctagctgaatcaatgaatttaagggaaggaaaggacagg

SEQ ID NO: 16820 - DNA, 418 bp, Homo sapiens
cgctacgtcatcgttgtgagcccgctatcagcggccagcgcgggcgcggccggagaccgtggggcccccggttgccgccccctcgggagccaccatgttggtgataccccccggactgagcgaggaagaggaggctctgcagaagaaattcaacaagctcaagaaaaagaaaaaggcattgctggctctgaagaagcaaagtagcagcagcacaaccagccaaggtggtgtcaaacgctcactatcagagcagcctgtcatggacacagccacagcaacagagcaggcaaagcagctggtgaagtcaggagccatcagtgccatcaaggctgagaccaagaactcaggcttcaagcgttctcgaacccttgaggggaagttaaaggaccccgagaagggaccagtccccactttccag

SEQ ID NO: 16821 - DNA, 326 bp, Homo sapiens
ctcttccacccctgccaggcccagcagccaccacagcgcctgcttcctcggccctgaaatcatgcccctaggtctcctgtggctgggcctagccctgttgggggctctgcatgcccaggcccaggactccacctcagacctgatcccagccccacctctgagcaaggtccctctgcagcagaacttccaggacaaccaagaaaaagaagtgtgactactggatcaggacttttgttccaggttgccagcccggcgagttcacgctgggcaacattaagagttaccctggattaacgagttacctcgtccgagtggtgagcaccaac

SEQ ID NO: 16822 - DNA, 608 bp, Homo sapiens
  misc_feature (1)...(608): n = a,t,c or g
gcggcgccggcagctgctccgggagaactttgtggagacagagggcgagtttgtcttcgccacctccctggacaccaaggacatcgagcagatcgccgagttcctggagcagtcagtgaaagactcctgcgaggggctgatggtgaagaccctggatgttgatgccacctacgagatcgccaagagatcgcacaactggctcaagctgaagaaggactaccttgatggcgtgggtgacaccctggacctggtggtgatcggcgcctacctgggccgggggaagcgggccggccggtacgggggcttcctgctggcctcctacgacgaggacagtgaggagctgcaggccatatgcaagcttggaactggcttcagtgacgaggagctggaggagcatcaccagagcctcaaggccctggtgctgcccagcccacgcccttacgtgcggatagatggcgctgtgattcccgaccactggctggaccccaacgctgtgtgggaagtgaagttcgctgaactctccctctctccatctacctgctgcgcggggcctgtggataatganaagggatcccccttcgcttcctcggttaatcaantcgttaaaa

SEQ ID NO: 16823 - DNA, 261 bp, Homo sapiens
aaaatagataaagtgaatgaaatagtagaaaccaacagacctgatagcaagaactggcagtaccaagaaactatcaagaaaggagatctgctactaaacagagttcaaaaactttccagagtaattaatatgtaaagccatgtaactaacaaaggatttgctttagagataattatttggaatttttatagcttacttcacaatgtgcccaggtcagctgtataaaataaatactgcattgttgtttaaaaaaaaaaaaaa

SEQ ID NO: 16824 - DNA, 490 bp, Homo sapiens
gcaattctgtccccaacagtgtccccctctccctctcccattcctcccgtggagcccctgatgtctgccgcctcacccgggcctccaacactttcttcttcctcctcttcatcttcctcctcctcttcgttttcttcttcatcttcctcctcttctccttctccacctcctctctccgcaatatcatctgttgtttcctctggtgataatctggaggcttctctccccatgatatctttcaaacaggaggaattagagaatgaaggtctgaaacccagggaagagccccagtctgctgctgaacaggatgttgttgttcaggaaacattcaacaaaaactttgtttgcaacgtctgtgaatcaccttttctttccattaaagatctaaccaaacatttatctattcatgctgaagaatggccttcaaatgtgaattttgtgtgcagctttttaaggataaaacggacttgcagaacatcgctttttgctt

SEQ ID NO: 16825 - DNA, 383 bp, Homo sapiens
gcggcacgaggattttcaacctcagtagaactccagcaaaatcccaatcgagcagtttctaataaattctgttagattggtgcccctgcttggtacaaaagagaaacccttttagccaagatggaaaaataaccaagaaagagaatctgaaaagagctgaaaaatgattgcctctgcaagcacaagctgttagtgtgtgtgcagaatactgatggcctgggcttccccagtttcttatggaagagactccacagggacttgtgggtaattgatctccacacatccagcaagcacgccccagactggccttccagttggtgtgatagaatgacctgcctttctactacagaagattctcatagtcaggatttttcacaacacag

SEQ ID NO: 16826 - DNA, 751 bp, Homo sapiens
cttccacccctgccaggcccagcagccaccacagcgcctgcttcctcggccctgaaatcatgcccctaggtctcctgtggctgggcctagccctgttgggggctctgcatgcccaggcccaggactccacctcagacctgatcccagcccccaggggaagtggtatgtggtaggcctggcagggaatgcaattctcagagaagacaaagacccgcaaaagatgtatgccaccatctatgagctgaaagaagacaagagctacaatgtcacctccgtcctgtttaggaaaaagaagtgtgactactggatcaggacttttgttccaggttgccagcccggcgagttcacgctgggcaacattaagagttaccctggattaacgagttacctcgtccgagtggtgagcaccaactacaaccagcatgctatggtgttcttcaagaaagtttctcaaaacagggagtacttcaagatcaccctctacgggagaaccaaggagctgacttcggaactaaaggagaacttcatccgcttctccaaatctctgggcctccctgaaaaccacatcgtcttccctgtcccaatcgaccagtgtatcgacggctgagtgcacaggtgccgccagctgccgcaccagcccgaacaccattgagggagctgggagaccctccccacagtgccacccatgcagctgctccccaggccaccccgctgatggagccccaccttgtctgctaaataaacatgtgcc

SEQ ID NO: 16827 - DNA, 457 bp, Homo sapiens
  misc_feature (1)...(457): n = a,t,c or g
agagtncctcgnaactnttatgacctnactacgaatttaatacgactcactatagggaatttggccctcgaggccaagaattcggcacgaggaatgcctcacgttaaattgatgctcaggaaggatctatagatttcccttgataaatacatatttgaataaactacctttagttgtcttctttagatgtatccatgatgcattaaatatatttgatcttcaattgatttgtatgaaatgtgagaagaaacaaagaaaacttgattagccataattcatgaaaacgatacactgtttgcagttgtcataaaactgggagctttcccaaaattcttagagtttaatcttttttttngnnnctaatttcatctattttaaagtattgtctgaaattgcttgatattctggaccacagatgatggccagcaccatgggttgcagactggggcactgtgat

SEQ ID NO: 16828 - DNA, 423 bp, Homo sapiens
ggaagccagagccggagccgtggcctgccgggcccggcgacatggatcccctgttccagcaaacgcacaagcaggtccacgagatccagtcttgcatgggacgcctggagacggcagacaagcagtctgtgcacatagtagaaaacgaaatccaagcaagcatagaccagatattcagccgtctagaacgtctggagattttgtccagcaaggagccccctaacaaaaggcaaaatgccagacttcgggttgaccagttaaagtatgatgtccagcacctgcagactgcgctcagaaacttccagcatcggcgccatgcaagggagcagcaggagagacagcgagaagagcttctgtctcgaaccttcaccactaacgactctgacaccaccataccaatggacgaatcactgcagtttaact

SEQ ID NO: 16829 - DNA, 306 bp, Homo sapiens
atgacatctcccagggcaggtgattggaatgactggaattttccagagcagatttgtagccaataggcaaaagtaacagagactgttgcagtttctctgataaataactgatcacagaccagttcagggacttttcagcataatagacattattccgaattccactgttgtatttttattttcatataagcagaaacaaaaacttttttatttttaatttgaaatttaacctgtagcatcaaattatatatatttccccagcagcatgtgttttggtcttgttatttttcagaataatgcaacttg

SEQ ID NO: 16830 - DNA, 473 bp, Homo sapiens
  misc_feature (1)...(473): n = a,t,c or g
ggtctaaaatactatcaaacagcactgcctgctacagagaaatggttttgtggagtcatcaatgcagcaaactccattgtcttatttcaagaaattgccacagccaccttaaccttcagcaactacctccctgatcagtcagctgccatcatcactgaggcaggattctccaacagcaaagattatgacttgctgaaggctcagatgactgttagcattttttagcaaaagtatttttaaattaaggtattctagggtacccgttttccccacttcctttctgtgtcttgaccaaaatcacagtgacccagccagctgtagccataggttttcctcagctggcttgaacccaaaccagcttgaacattcccaggcactgataataatgncttggtttactggaaagaaactgaccccgaccctgagccgaattccttaaattttcatgnaaacttcatnccctcaccccctgg

SEQ ID NO: 16831 - DNA, 526 bp, Homo sapiens
  misc_feature (1)...(526): n = a,t,c or g
tctgataccgttatgacatgattacgaatttaatacgactcactatagggaatttggccctcgaggccaagaattcggcacgagtagggctcggcgtgggtgccagagtatataataaatgaaattaaagatagtatcaacaaaatccaaaatctgaggaacttcacaggttaacaaattataacagataagctccaaaggaaacaggagatagaaatatctataggtaacaagattcttaaaagaaatatgaaccaatctcaacgaatggatgttgcctggatcctaattatgagacaactactggaatactaacataatatttgagaatatcaaggaattagttttctttttatgtataacagcattgcaaaccttctccccaagtctttatcctttaaaatagaacttaaaatatttactgatgaaatatcttggatttgctttagtaatccaaagtggnaggaaaagagcgggcatggngctcatgcctataatccnagcntttggangggttggggggggg

SEQ ID NO: 16832 - DNA, 273 bp, Homo sapiens
gggctgctgcagctccagcagcttccagccatcacgtcgagtctggaagaaggaggtggctgctgctgctttcacataagcaaactctcccatcccctgctgcaccctggctcctgccccagctgggtgacttgggaaagcagggtggtggtattaagcttgtcttacccgggtcatggctgttacctggggctggcacattgctgctgggaccagaatgggattctgcacaccaggcaagagggccgtgaacctcggtgaagccacagcctg

SEQ ID NO: 16833 - DNA, 432 bp, Homo sapiens
  misc_feature (1)...(432): n = a,t,c or g
gtgaaactccgtctcaaaaacaaacaaaaaaaatttaaattggcccggcatggtagcacacacctgtgatcctagctgctcaggaagctgaggttgggaggattgcttgggcccaggaggatgaggctgcagtgaaccataattgtgctactgcgctctagcacaggcaacagagtaagagatcttgtcccccccaaaaaaaaagtttctagttttaatgattattttctaatttttcttgtgctatttttgcttttggtgtcatctaagaaacaatcacctaattcaagttcacgaagatttacacctgtgttttctgagagttttatagttttaactcttacatttagatctttgatccattttgattttttttttttggaaantgcaaggtaggggtccaaatttntnccctgnatttgatttcccttg

SEQ ID NO: 16834 - DNA, 428 bp, Homo sapiens
  misc_feature (1)...(428): n = a,t,c or g
gcactgttcaataaaataatcgttaagcatacgtagctggctatggagaacttgacatgtagctagtccaaattgaaatgtgttgtaagtgtaaaatacccaccagattttgaaaatgtaccatgaaaaagaagtgtaaagtatctcagtaatacttttttatattgattacatgatgaaatactaatattttgtgtatattgttgtatgttttatataactgagtaaatattgtttcgcccattttttattttcttaatgtgactactagaaaatttaaaattacatatatgactcaccttacatttctgttggcactgcaactgatcttgctaagaaaaaaatgggaaataattcattancctcattgaaagtaatataccancctgggcaatgtcgcaaaacctcatctctactaaaaatacaaa

SEQ ID NO: 16835 - DNA, 461 bp, Homo sapiens
cttgacatgattacgaatttaatacgactcactatagggaatttggccctcgaggccaagaattcggcacgagactgtacttttcagaattgagcctggagattaatcagattgttttatgtgctataaaagttggaagttttatgcatctgtctcatatataggtgctttcttttgtattaaataagacactggatttcctttagcatgtgtgtgtgtatatatacttcttaaaagtaatgcatataataaaactgctgttaatctagaaaaggattttgcaattttaaatattttgctattgaaagaatcacttttttgggaatgagtcatccaaatgggtagggcatacactcttctagaccacaacggtatcattaactggtatcctagtaacttaagaattattgggccaggccccggtggctgacgcctgtaatcccacattttgggaggctgag

SEQ ID NO: 16836 - DNA, 396 bp, Homo sapiens
  misc_feature (1)...(396): n = a,t,c or g
ggaagattggagacagaagaaatgatcagtaaacttaaaggcagggaaatacaagctatccaaactgatgcacagaagaaaaaactattgaggaaaagaaaagaatagcacctcagtgaactatggaaccacacaaaacagactactgtaagtgtaattggagatcaagaagaggggaagagggtgggagagtaaaagaaaaattgaaaaagtactaaccaaaattcttcccaaatttgaagaaatgtgtaagagtttcaagaagtttaaccccaaacaaacccacatctgttcatatcctaattaaatggctagaaagcaaaaacaaaaattttttttcagagacnaaagatatttcnagggtaatgataagaatcagtgctgacttatcagtaa

SEQ ID NO: 16837 - DNA, 913 bp, Homo sapiens
  misc_feature (1)...(913): n = a,t,c or g
ctatgacatgattacgaatttaatacgactcactatagggaatttggccctcgaggccaagaattcggcacgaggagaagtgctgtgccgctgcagatcctcatgaatgctatgccaaagtgttcgatgaatttaaacctcttgtggaagagcctcagaatttaatcaaacaaaattgtgagctttttgagcagcttggagagtacaaattccagaatgcgctattagttcgttacaccaagaaagtaccccaagtgtcaactccaactcttgtagaggtctcaagaaacctaggaaaagctgggcagcaaatgttgtaaacatcctgaagcaaaaagaatgccctgtgcagaagactatctatccgtggtcctgaaccagttatgtgtgttgcatgagaaaacgccagtaagtgacagagtcaccaaatgctgcacagaatccttggtgaacaggcgaccatgcttttcagctctgggaagtcgatgaaacatacgttcccaaagagtttaatgctgaaacattcaccttccatgcagatatatgcacactttctgagaaggagagacaaatcaagaaacaaactgcacttgttgagctcgtgaaacacaagcccaaggcaacaaaagagcaactgaaagctgttatggatgatttcgcagcttttgtagagaagtgctgcaaggctgaaaaagcatctcagcctaccatgagaataagagaaagaaaatgtaaagccaacaccctgtctaaaaaacataaatttctttaatcattttgcctcttttctctgtgcttcaattaataaaaaatggaaagaatctctcgtgccgaattcttggcctcgagggccaaattccctatagtgagtcgatattaaattcgtaatcatgtcatancggntntcaaaggt

SEQ ID NO: 16838 - DNA, 615 bp, Homo sapiens
ggtggccctgcaggcccaggctgagccactccaggcaagagctgatgaggttgctgcagccccggagcagattgcagcggacatcccagaagtggttgtttcccttgcatgggacgaaagcttggctccaaagcatccaggctcaaggaaaaacatggcctgctattgcagaataccagcgtgcattgcaggagaacgtcgctatggaacctgcatctaccagggaagactctgggcattctgctgctgagcttgcagaaaaagaaaaatgagctcaaaatttgctttgagagctacagggaattgctattactcctgtaccttctgctcaatttcctttcctcatcccaaataaatgccttgttacaagaaaagtcgacgcggccgcgaattccagatctatgaatcgtagatactgaaaaaccccgcaagttcacttcaactgtgcatcgtgcaccatctcaatttctttcatttatacatcgttttgccttcttttatgtaactatactcctctaagtttcaatcttggccatgtaacctctgatctatagaattttttaaatgactagaattaatgcccatcttttttttggacctaaattcttcatgaaa

SEQ ID NO: 16839 - DNA, 463 bp, Homo sapiens
  misc_feature (1)...(463): n = a,t,c or g
tttganatccctatgacatgattacgaatttaatacgactcactatagggaatttggccctcgaggccaanaattcggcacgagctgacctatacaggcctctgctatgggggtgatggccagtcctggtgtctgagtgattcccagggcccagcaaagggaccaagtttccagagccctgaagacaaggggtaacaccccaaaatatggactcattttccactccaccttcattggccgagcagctgccaagaacaaaggccgcatctcccgatacctggcaaacaaatgcagtattgcctcacgaatcgattgcttctctgaggtgcccacgagtgtattcggggagaagcttcgagaacaagttgaagagcgactgtccttctatgagactggagagataccacgaaagaatctggatgtcatgaaggaagcaatggttcaggtcagttgggctttgctg

SEQ ID NO: 16840 - DNA, 375 bp, Homo sapiens
gttaaggtttaagaaatacaagcaagctgggagccattccaattctttccgcttatccaacggccgcactgaggatgtggagccccagagtgtgccacttctggccagatccccaagcaccaacaggaaatacccacccctgcccgtggacaagctggaagaggaaattaaccggagaatggcagacgacaataagctcttcagggaggaattcaacgctctccctgcatgtcctatccaggccacctgtgaggctgcttccaaggaggaaaacaaggaaaaaaatcgatatgtaaacatcttgccttatgaccactctagagtccacctgacaccggttgaaggggttccagattctgattacatcaatgcttc

SEQ ID NO: 16841 - DNA, 336 bp, Homo sapiens
gtttatttacagtctcccacagagaagttcttttaggttccaaagtcaaaaatcactcttcaaagtaccttaaattgcccacgaaagtattcagctttgatcagaaattcgtatgcatactaaagagttaacaattgccaggctagactaaaggagtgaaaggtgaatccatattcacatttccctgcatccggtgccttgaattcaactactcagtccctagaggcaaattgggatgggtggatgattgtgcagtgtcctgcttgcttgccaggcatgcttctttgtcttaatattaagcttctgcagctgtgctgtccaacacagtcgccacta

SEQ ID NO: 16842 - DNA, 324 bp, Homo sapiens
ggtggcaacgtagttgtgctcgccagaacgtgggaccaaattggcctcaggtgttgagtccagacttctgcttttgagagagggctgcactttttcatggtatttctaggggaggtggtaggctgcatgtgccacttggtcttgttgtgagtatgctgacaccagaaactcagagccagcttgtggcaagcagttggggtggggggtctctgacttgctcaggacaaactaggccagtggttttcaaactgcttggcagagccctgaagtttcctaggggttgcctcaggagtccttggggagatgaagggggtggggagctga

SEQ ID NO: 16843 - DNA, 1007 bp, Homo sapiens
  misc_feature (1)...(1007): n = a,t,c or g
gggccagtcctggtgtctgagtgattcccagggcccagcaaagggaccaagtttccaggtcagcgacattggatgccttccctctgcctctgggagctatgggttggcatgcattggggtagagatccaatctggcctgaggctcactcaggacttcggggtgagaggaggggaggagctgagctgccttggctaatggggttgaaatttctgatcttaaactctccactgaatattctctcagagccctgaagacaaggggtaacaccccaaaatatggactcattttccactccaccttcattggccgagcagctgccaagaacaaaggccgcatctcccgatacctggcaaacaaatgcagtattgcctcacgaatcgattgcttctctgaggtgcccacgagtgtattcggggagaagcttcgagaacaagttgaagagcgactgtccttctatgagactggagagataccacgaaagaatctggatgtcatgaaggaagcaatggttcaggcagaggaagcggctgctgagattactaggaagctggagaaacaggagaagaaacgcttaaagaaggaaaagaaacggctggctgcacttgccctcgcgtcttcagaaaacagcagtagtactccagaggagtgtgaggtcagtaggcagcacggccctggcagagatcctaggttgtaggattttcaacagcagaacaaaggatatgctgcatcaagctgtggtcttgagtccaggcttttggactgaaacaaggacctgaaacatctaaaactacctcttgattctataggaaggagataggtgctgaacttgctcaagagcccagagagctggttgtagctcacacccgttccctgggcatgtgtgttctgtcctcggctgcctcccaggagtcctcaacctggggtagtgtaaattcctgctctgcttattatcagacgtgtgtcccggaggtggcgngtttcacagtggggatgggggcaaggaggt

SEQ ID NO: 16844 - DNA, 336 bp, Homo sapiens
ggggggcgctttccagttactgtttgacccttactttttgatagtagtcataggtgcatgatatcatccaaatgtaaaatttatcctctgattattgcccatttaaaaagtaagaaacatactgttgtcttggaaattaagaatctcaaatttcccttatatcctcattaatctggctttagtttagatgaatatgttctttttcttcttcttcctcttcttcttcttcttcttcttcttcttcttcttcttcttcttcttcttcttttcttttcttttttttggagggggtggggaacagggtctcaatctgtcatccaggttgtagtgcagtgg

SEQ ID NO: 16845 - DNA, 273 bp, Homo sapiens
ggcccgttgaggatgaggccgctagaggcctgaggatgagctggaaggagtgagaggggacaaaacccaccttgttggagcctgcagggtggtgctgggactgagccagtcccaggggcatgtattggcctggaggtggggttgggattgggggctggtgccagccttcctctgcagctgacctctgttgtcctccccttgggcggctgagagccccagctgacatggaaatacagttgttggcctccggcctcccctcaaaaaaaaaaaaaa

SEQ ID NO: 16846 - DNA, 375 bp, Homo sapiens
ataagtgcaactttttaataaaaatttacatctagataaacaatcttcagatttttgaaactttaataagattttaaaaacatcatgactttgaactgaaaaacatacacgtttagcacacaaatattgtaatatgaatgaactccaactccatttgaaaacatgtgaatcaaagtacagttttagaagttagtaattcacatttaagcaagttagcgccttgctgaatacagcctttgtaaaaaagagacttagtgcatattttaatggtacactgtggttttgtaccatttggttgagtttttcgctttattaaacaagttcttgaaagttggtagataaaggctaacttcctatgccgtgaaatttccaatg

SEQ ID NO: 16847 - DNA, 321 bp, Homo sapiens
ggttttaaaagattcagaagaagatgttgttgaaactcctgcagtgtctcatgatgaacatacacaccaagagataaagggccgaaaaacactggcaactcctgcagttcgccgtctggcaatggaaaacaatattaagctgagtgaagttgttggctcaggaaaagatggcagaatacttaaagaagatatcctcaactatttggaaaagcagacaggagctatattgcctccttcacccaaagttgaaattatgccacctccaccaaagccaaaagacatgactgttcctatactagtatcaaaacctccggtattcac

SEQ ID NO: 16848 - DNA, 399 bp, Homo sapiens
tagggaatttggccctcgaggccaagaattcggcacgagcgtttctgtggtattcttgccaacaatgtataatctcaatcatgagaaaatatctgacaaactccatttgtgggacatttgacagagtttctgacaagtttcaggtcaagaaaggcaaggaaagactgaggtgctgtcacagactacaagagactaaggagaaggaaccactaaatggaatatgtgattctagataggattgtagaataaaaaaaggacattagtgaaaaagcaggaaattccaataccatctttgttttagttaatcatgctgtatccaagttaatatcctggagtgatcattgtactatggctgtgtaagaggttaacgttagtggtgtaagctgagaggtatatgca

SEQ ID NO: 16849 - DNA, 393 bp, Homo sapiens
  misc_feature (1)...(393): n = a,t,c or g
cccagctactcaggaggctgaggcaggataattgcttgaacctgggaggcggaggatgcagtgagccgggaccacaccaccgcactccagcctgggcgacagagcgaaactctgtctctaaataaattaataaataactctaagagctctttctgtaaatgtaaaataaaaactctgggctgggcatggtggtttgtgcctatggtcccagcactttgggaggctgaggcaggaggactgcttgaggccaggagtttgagatcagcctgggcaacatagggagacttggtacaaaaaaattgttttaattaattaaaattaaaatttcaaaagaactctgtttcgaaacattgtgcatttcaggaaacacaggaaagcattgngggttaaatg

SEQ ID NO: 16850 - DNA, 475 bp, Homo sapiens
  misc_feature (1)...(475): n = a,t,c or g
gttttcttcagactctaaagtaattgttaataattttgcttctgggaaaacattttgcagcaaacattctagatagtgttgtatttccgcctctgttttgatatgctataattagaggagttgtcagggctctgctgtaaatcctaaatttttccatcaaggcttcaacttggagttatgtatttgtttgaagaaactcagatgtcctgtgaattgcggatctcagtaaaatcaagtgtcgtaagaattacttctaacctgatttatcctaaaccacactcctttactatgaggatctatatctttctaaaacgggctttatttatattcgagttgttttataatgtgcttggggcatttgctctggagctgcctantggcataactacattataattggctccctttgggatattaattaaggggaatgncaggcatctggcctanatggnatgcntctgngaaacaaaccttg

SEQ ID NO: 16851 - DNA, 432 bp, Homo sapiens
gccctttgaaggggtgatgtatataactatctattcgatgatgaagataccccaccaaacccaaaaaaagagatctctcgaggatccgaattcgcggccccgccgccccttcaggctgtctgttcggacaactgcaaaggaatgggtaggggtgaggaaggaagggatctgaggaagggcctctcagcccaagccgtgcacaccactgctgagacgcgccccaccgagtccctaggacccagagtccctgagatccaaggtaccctataggaacctccccctgccaccaccctcacaatccaggcaggtgtaggctgcctccctccaaggtcgacgcggccgcgaattccagatctatgaatcgtagatactgaaaaaccccgcaagttcacttcaactgtgcatcgtgcaccatctcaatttctttcattt

SEQ ID NO: 16852 - DNA, 892 bp, Homo sapiens
gatttgcattaaaggttcactttaatgaaggtgaaacatgagaatgagttgtgtgtgaaattcttatttgatatccagaggatagtttgcaaacctaaacttctgattgtttctgatttcagagatgcccgagtggtaaaagacatggcaacaggaaagtctaagggatatggctttgtctcctttttcaacaaatgggatgctgaaaacgccattcaacagatgggtggccagtggcttggtggaagacaaatccgaactaactgggccactcgtaaaccacctgcacctaaaagtacatatgagtcaaataccaaacagttgagatttgaagatgtagtaaaccagtcaagtccaaaaaattgtactgtgtactgtggaggaattgcgtctgggttaacagatcagcttatgagacagacattctcaccatttggacaaattatggaaataagagttttcccagaaaagggctattcatttgtcagattttcaacccatgaaagtgcagcccatgccattgtttcggtgaacggtactacgattgaaggacatgtggttaaatgctattggggtaaagaatctcctgatatgataaatcccgtgcaacagcagaatcaaattggatatccccaaccttatggccagtggggccagtggtatggaaatgcacaacaaattggccagtatatgcctaatggttggcaagttcctgcatatggaatgtatggccaggcatggaatcaacaaggatttaatcagacacagtcttctgcaccatggatgggaccaaattatggagtgcaaccgcctcaagggcaaaatggcagcatgttgcccaatcagccttctgggtatcgagtggcagggtatgaaacccagtgaataagga

SEQ ID NO: 16853 - DNA, 371 bp, Homo sapiens
gggaagataggcttgcaaggttttaactgtttgattaggtagaaagagccattctattactgatacagacttgtctaagcactggcccaggagtcctgttggagaatgaggggtatgaagaataagcaaaggcttttgcggctacagccatgaggcatgtctctgctgaagcatctgttctacaagttgcaactcagcttctgcctctttgatcaattgctgcggggaaatctaatgaagaatctccttgcagggtttgataaagatgtttgagtcgataagttgcaatacctagcattgcgcacagccaatgaatatcccctaacaactgttgaaaatcatttaaaatctgtaacctgtctttatggaga

SEQ ID NO: 16854 - DNA, 360 bp, Homo sapiens
ggctgcaccagacagccagagcctggcgaacccagagagcctggcatgagactgcctgtgctggcgcctaccaaagcaaggcctgctctgactcgcctcagcctcctctcaggaggaagctgccagcaggcgtgggtaggcgtgagcacattctcaaagcagttatgttttgcatggaagtcagctgggaagtaggagcatatgtagtcatgttcattaatgtggcaccagaagtccctgggtggagcatgcctcagagagcatttccaacccgccaccaccctccactccaccccttcccaaacgcacctgtgcactccgcgagttctgctctgccagtcactcccctgctacaggctg

SEQ ID NO: 16855 - DNA, 323 bp, Homo sapiens
ggagacggcggcggctgtagcggcgtgacaggagccccatggcacctgcccagccccacctcagcccatcttgacaaaatctaaggctccatggagccaccacggggcccccctgccaatggggccgagccatcccgggcagtgggcaccgtcaaagtatacctgcccaacaagcaacgcacggtggtgactgtccgggatggcatgagtgtctacgactctctagacaaggccctgaaggtgcggggtctaaatcaggactgctgtgtggtctaccgactcatcaagggacgaaagacggtcactgcctgggacacagccat

SEQ ID NO: 16856 - DNA, 461 bp, Homo sapiens
  misc_feature (1)...(461): n = a,t,c or g
gatgnntttnnnatttgatanccctatgacatgattacgaatttaatacgactcactatagggaatttggccctcgaggccaagaattcggcacgagcggtcatcctgtagatgtcatgaggcaagctgggattaaggtcaccattgcaggtctggctggaaaagacccagtacagtgtagccttgatgttttcatttgtcctgatgccagtcttgaagatgcaaaaaaagagggaccatatgtcatagtagttctaccaggaggtaatctgggtgcacagaatttacctgagtctgcttctgtgaaggagatactaaaggagcaggaaaaccagaagggccttatagccactatctgtgcaggtcctactgctctgatggctcatgagatcagttttggaagtaaagttacaacactcccgcttgctaaggacaaaatgatgaatggaaccattacacct

SEQ ID NO: 16857 - DNA, 383 bp, Homo sapiens
ggtgaaagcgcccaggaaagaaggccccatgaacactgcaaagacagtttgcttgttgtaaatggaggtttctcctggcgggaaggctgtgaccctgctgagctgtggagaaacagcttgataaccagggctttcctggggcaccctttctggtgcacttcggaagaccccggactgatgatagggctctcttgatttcacctaaagcaagactgtaacctctgggcagcctgatgccaggcttggaggcaaaccctcagaaaacagctcccctcagtgagggaatgggagcctgtttgaattaacgtggagaattctccaagaacccgcagactgggaggcattctcacggcgagtcagtgcagctcctcttatgtttaccg

SEQ ID NO: 16858 - DNA, 324 bp, Homo sapiens
aacatgctaaccagcagactggcttctccgactcatcctctctgcgccccatgcacccccaggctctgcatccagcccctggactccttgcttccccccagctccctgtgcagatgcagccagcaggaaagtcgggctttgcagctaccagccaacctggccctcggctccccttcatccaacacagccagaacccgcgattctaccacaagtgaccatcagattatatcttcaacaccacaccccccaccccatcgtgggtgagggtatcccctgtgtgtcccaggccaataaaatctacctgccactgaaaaaaaaaaaaaa

SEQ ID NO: 16859 - DNA, 425 bp, Homo sapiens
  misc_feature (1)...(425): n = a,t,c or g
gtgcaaatatgcattacacaggcacacacagagagatatttaatatgtggaatatcactctttcatgagctttattccttgattaatttgataaagcctcacagaggattttaagcaatatttaaatgtgttgagggaaagctcctggtgcctgtntgnttcgnganctntggntcantgntcanctatncctnnnnnntatgnntatangatgaatggntccntgntngngtacatnacgcnncgacnttctgganattcctntnacagggantcaccctgttgnctcaatgncctgtttngnctggaggcnancctnnggatatngntcannaatgnngnnttnccntacnttgtntntncnaantnnattantnnnntatnattttgnnctnngaggctccntnccttatnngnggntgttt

SEQ ID NO: 16860 - DNA, 493 bp, Homo sapiens
  misc_feature (1)...(493): n = a,t,c or g
cagctatgacatgattacgaatttaatacgactcactatagggaatttggccctcgaggccaagaattcggcacgagtttctaatgcatcagaggagcttacaataagttagaaggctcaattagtgaaaaaaaaggtgatgttgactaaaggagaccatttttataattctgagtgtattataaccattaatcagtgttaataaataaccatctatagcagagggctttagaaaacttacattgataaatagataagaataatggctgttctctgggagcttttctttttttttttttnnnnnnnnnggtnnnnggnattnntttnnggccngnncanttttgcnaannanntngntccagccanncnngnatnaatggattttnngnaatcccaaagntnantnntnggttaacngccaaaccnttaaaaccggnttnatngtccnanctttaaaaancanttggccgnaccttantagaccccnttgttt

SEQ ID NO: 16861 - DNA, 409 bp, Homo sapiens
gacagcagacatgcagcctattcaactttcatcctagtcttccaggaaaactgttctcactgccatgagaaacactctaattgccaaatttaacgcaaactttttatcggcaactggactctcccctggttttcctgccacactaaaataccttttctgctgtttcatcacctccaccaccttcaagtttgattcttctgccgtccccttatctccaatcataatctaaatactgataactactaaatcatcttcttgacaatctcctccctccccaccacaaccctctccacaccaccttcctggctactctggtctagaaaccgaaactggacttggcactttttttctcattgttgacatttgctttcaaaatccaggtaatcctgctgtctctcaattccttgga

SEQ ID NO: 16862 - DNA, 432 bp, Homo sapiens
gggaactggaagatagatctgaagagttaactagaatgcagccagatagacaaagagatggggaacatgtaagggaggttaggaaacatgaagaatggagagaaatgtctaacatgcaaaaaaattctccggaaatgagacaagcaatatttgaagcaaatgatataaagagacatttcatgaagaggtgacaagaatacttaatatacatgtaaaaagatgttggaactcattagtaatcaggaaaatgcaaattataaccaacgtgagatactcttccacacccaccaaactggaaatagttgagtgtctgatacttctaagcaaaaatggggaccagtggggactctcatcaacagcagacagaagtgtcagtccactattttattacctaaaaatattctgttgagagtaaggactatgaatggtaag

SEQ ID NO: 16863 - DNA, 547 bp, Homo sapiens
ggagtggtacccaacgggccggggcgccgcgtccgcaggaagaggcgcggggtgcaggcttgtaaacatataacataaaaatggcttccaaaagagctctggtcatcctggctaaaggagcagaggaaatggagacggtcatccctgtagatgtcatgaggcgagctgggattaaggtcaccgttgcaggcctggctggaaaagacccagtacagtgtagccgtgatgtggtcatttgtcctgatgccagccttgaagatgcaaaaaaagagggaccatatgatgtggtggttctaccaggatactgaaggagcaggaaaaccggaagggcctgatagccgccatctgtgcaggtcctactgctctgttggctcatgaaataggttttggaagtaaagttacaacacaccctcttgctaaagacaaaatgatgaatggaggtcattacacctactctgagaatcgtgtggaaaaagacggcctgattcttacaagccgggggcctgggaccagcttcgagtttgcgcttgcaattgttgaagccctg

SEQ ID NO: 16864 - DNA, 348 bp, Homo sapiens
  misc_feature (1)...(348): n = a,t,c or g
ggaaggatggaccgaaaacatatttgaagaagggccaggtgtggtgtctccccaaccccaaagtagttccaacacttgagagtccaaagtgggcaaatcgcttgagcccaggagtttgagaccagcctggacaacgtggtgaggccctgtctctacaaaaaatgcaaaaattagacgggcatggtggcgggcgcctgtattcccagctacttgggagggtgaggcaggaggattgattgagccagggagatcgagaattcagtgagccatgattgtgccgctgcactccagcctgggtggcagagtgaaactctgtctcaagaaaaaaaaccntagaaaaaacnaaca

SEQ ID NO: 16865 - DNA, 418 bp, Homo sapiens
gcagggtttcaccatgttagtcagactcttctcgaactcctgacctcaggtgatctgcccgcctgggcctcccagagtgctgggattacaggacaggcatgagccaccgcgcctggccaaagtattgcctgctttcaacagtgttgcctgcttttttctagtctttaagggagacagataataaatgatagccataattctgtgagaaagccataatcacatatgtattgttaaaaacaacagtaaatgtcagaaaacagaagcaccccataatcctagaatggaagagaaggggagagtgaaaggttttattaactttagtcttaggggcccccatttcttgtcagataaaggatttggaaggcctattcttggtttatggaaaaggagagtgttccagcatacgttccttgaactc

SEQ ID NO: 16866 - DNA, 484 bp, Homo sapiens
gcagcggggcgttctcccacctgtagcgactcagagcctccaagctcatggcctccttaggagcgaacccaaggaggacaccgcagggaccgagacctggggcggcctcctccggcttccccagcccggccccagtgccgggccccagggaggccgaggaggaggaagtcgaggaggaggaggagctggccgagatccatctgtgtgtgctgtggaattcaggatacttgggcattgcctactatgatactagtgactccactatccacttcatgccagatgccccagaccacgagagcctcaagcttctccagagagttctggatgagatcaatccccagtctgttgttacgagtgccaaacaggatgagaatatgactcgatttctgggaaagcttgctccaggagcacagagagcctaaaagacctgaaatcatatttttgccaagtgtggattttggtctggagataagcaaacaacgct

SEQ ID NO: 16867 - DNA, 323 bp, Homo sapiens
gcttggagtcccagctactcaggaggctaaggtgggaggatctcttgagccgaggagtttgaggctgcagtgagccatgatcataccactacagtctagcccaggcgacagagcaagaccctgcctctaaaaaaaaaagtccacttgagactggaggagccctaaagggttccccggaggaaatggcactttgagccaggcctgaaggatggatcaggtttcaagcagaggagatggatgagaaaagatgctgccagatgagggaacagcatgggcaaacgcaacgaggagagaaagtaccagatacgtgggagggaaatgca

SEQ ID NO: 16868 - DNA, 734 bp, Homo sapiens
ggagcagacagagcctatggcagggacatcgtggaggcccattaccgggcctgcttgtatgctggagtcaagattgcggggactaatgccgaggtcatgcctgcccagtgggaatttcagattggaccttgtgaaggaatcagcatgggagatcatctctgggtggcccgtttcatcttgcatcgtgtgtgtgaagactttggagtgatagcaacctttgatcctaagcccattcctgggaactggaatggtgcaggctgccataccaacttcagcaccaaggccatgcgggaggagaatggtctgaagtacatcgaggaggccattgagaaactaagcaagcggcaccagtaccacatccgtgcctatgatcccaagggaggcctggacaatgcccgacgtctaactggattccatgaaacctccaacatcaacgacttttctgctggtgtagccaatcgtagcgccagcatacgcattccccggactgttggccaggagaagaagggttactttgaagatcgtcgcccctctgccaactgcgaccccttttcggtgacagaagccctcatccgcacgtgtcttctcaatgaaaccggcgatgagcccttccagtacaaaaattaagtggactagacctccagctgttgagcccctcctagttcttcatcccactccaactcttccccctctcccagttgtcccgattgtaactcaaagggtggaatatcaag

SEQ ID NO: 16869 - DNA, 441 bp, Homo sapiens
acgaatttaatacgactcactataggggaatttggccctcgaggccaagaattcggcacgaggaagatcttgagacctcatcagaggaagttgttgcatttgagacttagcataattctgtggctgtgaaaacagaaaagaaaattgcttaccagctatttaaagttaagtactttgtgacaagctggctgtgggattgactgtttactcatgttgtgggtaaacaagaagacatattgaatcttaactcagattttaaccgctggtacctgtgagtgtgaccttatttggaagtagggtctttgcccccatcattaagatgaggtcctactggatgaggatgggacctaaatcctgtcactggtgttcatataagaagaagaaaatttgaacacagacacccaggagagtgccaagtgatgaccgcgacaagggttgggg

SEQ ID NO: 16870 - DNA, 419 bp, Homo sapiens
gcatgagcttcaataccctgagaccaggcattgcatttcccgttctttatttcctaatcctcttagggaaggacccaggcatgcaatatcccctccatcccatccccatgctccccacccagtgggaggactcacttggcaaaggggatgaggttgactccatcatcctgcacctgcatgactggacggggctgggtagttagtctcctttttggtgctgggaggataatggaaaagaagtcattcattcgggctggatgtggtggctcacgcctgtaatcccagtacttttggaggccaaggcgggcggatcatgaggtcaggagttcaagaccagcctggccaatatagtgaaaccccatctctgctaaaaatacaaacattagtcgggtgtggtggcgcgcgcctataagtcccac

SEQ ID NO: 16871 - DNA, 313 bp, Homo sapiens
  misc_feature (1)...(313): n = a,t,c or g
gaggaaagagagaagtaccgaaagttattggaacgacttaaagaaagtggtcatggaaactctgtctgtcctgtaacttcaaattatcacaggtgacagtgagctaacagataatgctttgctaggcatcttttgtttgtttgtttttggagaaagtattggtgggaagggctttactgaaaggtcgacgcggccgcgaattccagatctatgaatcgtagatactgaaaaaccccgcaagttcacttcaactgtgcatcgtgcaccatctcaatttctttcatttatacatcgntttgccttcttttatgta

SEQ ID NO: 16872 - DNA, 532 bp, Homo sapiens
  misc_feature (1)...(532): n = a,t,c or g
ttttgattgcccttncnacatgattacgaatttaatacgactcactatagggaatttggccctcgaggccaagaattcagtacgaggtctctctaacctaaaatgttttgcttttatcctgattttaagaggagcaagatcattttcatagtttctggaagcacagcagggcctggctgggagcccttgcccttgaaaatctgttgctgctgagccccgtgcagggcccgggcagggggcagcctcgctggacggactcctctccccacaggcatcctggtcctgctcagcgtgaccttcatcatccttggaccccacgttgttttctgctgactagagcaggggccgtgtgggtggtttgtcatcaactgttttacaagaaatgtggacaggatcaggcagctttgggagggctttccagggtgaaaacgttggagctgtgggcgtgcagggagcttgtgtgttcaggaccagttcgtgccaaggccaggcaagcagtaagaaggcagggtgtgtatacacgtgtcnatga

SEQ ID NO: 16873 - DNA, 363 bp, Homo sapiens
gtgaaaatagaagcttctaaacaaaccagagccttaaaaggcaaataaaaggtatatgcatctgttagaaaaaaaatgggagagctatgtggtgtgtttgaggacaaagacaatctgtttcattatttttatttgtaaataatttttaattttattttgtagaccttattgcaatatgcaagcaacaagaatgcatcagaacatattgtgtatcttctggaggtatatcgacttgccatccaaagctttgccagtgcacgtccatacttaactactgaatgtgaagatgtcctcttagtgcttggcagattagtactgtaagtttgagaacttaaatcactcttaaaattgagtaccattggt

SEQ ID NO: 16874 - DNA, 492 bp, Homo sapiens
acccttgactgattacgaatttaatacgactcactatagggaatttggccctcgaggccaagaattcggcacgagccccgaaccactcagggtcctgtggacagctcacctagcggcaatggctgcaggctcccggacgtccctgctcctggcttttggcctgctctgcctgtcctggcttcaagagggcagtgccttcccaaccattcccttatccaggctttttgacaacgctatgctccgcgcccgtcgcctgtaccagctggcatatgacacctatcaggagtttgaagaagcctatatcctgaaggagcagaagtattcattcctgcatgactcccagacctccttctgcttctcagactctattccgacacccttcaacatggaggaaacgcaacagaaatccaatctagagctgctccgcatctccctgctgctcatcgagtcgtggctggagcccgtgcggttcctcaggagtatgttcgccaa

SEQ ID NO: 16875 - DNA, 420 bp, Homo sapiens
gcggcacgaggaaggctgtgtgtctggggcatagatgggagcctgaggtactaaatggaggcacgtgggagaagggaggggccattgaggaacaaaaatgtgttttaaggaagagatgggaaagcagagaccaggtagaggagctaggtaagctgataggtgttgtcattggtagaaaagaagaagataaatggatgtaaggattgaggccttggaaagtagcataggcaggaaaagaggaattagaagaatacgtgaagaagtgggaatcatgggctgggaagggaaattttggaaaaggagcacattaaggcagaaaactcttttagagcagtggttttaaacttcagcaatggtgatccttttatacagtatcccttactttggaatcccaggaagtaaaaggcacattctttgttg

SEQ ID NO: 16876 - DNA, 221 bp, Homo sapiens
atccgaagatggctaccattcagatggtgactatggtgagcacgactataggcatgacatcagtgacgagagggagagcaagaccatcatgctgcgcggccttcccatcaccatcacagagagcgatattcgagaaatgatggagtccttcgaaggccctcagcctgcggatgtgaggctgatgaagaggaaaacaggtgagagcttgcttagttcctgat

SEQ ID NO: 16877 - DNA, 324 bp, Homo sapiens
tacttcccttgaactttgaacctgtgaaatgctttaccttgtttacagtttggcaaagttgcaagtttgttcttgtttttagtttagttttgttttggtgttttgatacctgtactgtgttcttcacagaccctttgtagcgtggtcaggtctgctgtaacatttcccaccaactctcttgctgtccacatcaacagctaaatcatttattcatatggatctctaccatccccatgccttgcccaggtccagttccatttctctcattcacaagatgctttgaaggttctgattttcaactgatcaaactaatgcaaaaaaaac

SEQ ID NO: 16878 - DNA, 452 bp, Homo sapiens
acccttgattgattacgaatttaatacgactcactatagggaatttggccctcgaggccaagaattcggcacgagctgggattatggacatgagccactgcactgggcccatactatgtattttttggccaaataataaacctggatagaacttttcttgagaaaaaaatgagcaagcagacaatacagaagggctattcaataacaacattttgttatctggagaatatgacctgaatgggggaaaaaagagattgaaactgtcatatcaaagttgacatgatagccctaagggagaagtgaggaaaaaagcaaccaactcagaactcaaaggtgcacaacaaatatccagacgtggaatgcacatttcagaaagcaaagtctgaaggagcactgacttgagagaagggaaaagcaatcacccagaagccagagagaagggatcgaacgtt

SEQ ID NO: 16879 - DNA, 355 bp, Homo sapiens
ggagagcaccatgagcttcaataccctgtgcaagttttcagaccttccaaaatactgtagaagcaaaattaccttaaactaactataagcaatattaaacaaatgtgccatgagtgttctgggccttcaagtataattttaaccaaggagaaacaggttgggtaagaggttagaaagagtttcataaggccatctaattcagctcattgtaccaagccctgagcacactagattctttgtatgctttactaaccttacgttaagcacatccactggtttcattaaggattttactacctaactttatttcagggggagttacgtctacgatttaaaacttttgtaatgttctggc

SEQ ID NO: 16880 - DNA, 380 bp, Homo sapiens
cccacgcgtccggctgttttatggctaagaaataacagagacaaatttaaacaaagagtctgtgagcccataatgctcacgatcaatatgaaagataataaaaatgccaaatatattgaaaatcatattccatcaaatgacttaagagcctttgtatttgaaagtcaagaagatatggaggttttcctcaaagaggttcgtgacaataaaaaattaagagtaaatgctgttattgctcccaagagttcatatgcagacaaagcaccttcaagatctttgaatgaacttaaacaatacggatttttctcttatttgagagaattatttgatgcacctgatcctgtaatgagttacctttgctgtcagtatcatattcatga

SEQ ID NO: 16881 - DNA, 672 bp, Homo sapiens
ttaccagttatgacatgattacgaatttaatacgactcactatagggaatttggccctcgaggccaagaattcggcacgaggcgaggcgcccgaagccgtcgcggcggggaccatgttgcttccgaacatcctgctcaccggtacaccaggggttggaaaaaccacactaggcaaagaacttgcgtcaaaatcaggactgaaatacattaatgtgggtgatttagctcgagaagtctgatcatcggatatcatggagtctggcaagacggcttctcccaagagcatgccgaaagatgcacagatgatggcacaaatcctgaaggatatggggattacagaatatgagccaagagttataaatcagatgttggagtttgccttccgatatgtgaccacaattctagatgatgcaaaaatttattcaagccatgctaagaaagctactgttgatgcagatgatgtgcgattggcaatccagtgccgcgctgatcagtcttttacctctcctcccccaagagattttttattaagatattgcaaggcaaagaaatcaaacccctttgccattgatcaagccatatgcaggacctagactgccacctgatagatactgcttaacagctccaaactataggctgaagtccttaattaagcggccgcaagcttattcc

SEQ ID NO: 16882 - DNA, 402 bp, Homo sapiens
ggtctgctcaggaggttttgccttgcagcaaaagctatcttctaaaattttctcattaaagtatgttgtgtagaggaatgaaagaaaaatagaggtaaggttattagtcaagaatagggtgtgtgtttttaaacccaggaaaagaatagacagaaacacaaagacaaagtggtttgggatacatcctaacttttggttccatatgtcaaataaaattgcgaggtggttctttttggatcctacagcactttgccaattgtgacaagctgttgtgaacactcatgtacttcttcctcacagcactcctgcctggcaggtgagcaggacaatcctagtatttctcctccccaaggtcacccagcctagagggtccagtccagggctgttggcagcaccaagtac

SEQ ID NO: 16883 - DNA, 448 bp, Homo sapiens
ccacgaatttaatacgactcactatagggaatttggccctcgaggccaagaattcggcacgagattcttaatctctccaacattatcagcaatactgaaaataccaggtcttgcaataatcatagctacctcatttagctcattatattttaatagaatctcatctgtattattttttaaaatatgtattttttaatctttgaagaatagattgctcatctcaactggcctctattacattttataatgcaaggattttatttacctatttcacatattaatttggttttgttattactatttatggagcacatgaaaggccagagtgcttgaattttcttatatccctaagctgtactaccatctgtactacccatctatgtattttctattaatgactattagaaactttgggtcaaaaaacagtgtaagccaggcatggtggcac

SEQ ID NO: 16884 - DNA, 348 bp, Homo sapiens
gctcagcctgcttttgcaccaaaaataaataaatagaaaggtaaatagctcagatgccaaaaaccgtaccgttgaaactgtggcccgctctgtgctctttgtaaatgaggaggtgacatataagagaaagaaatgcagatctctgttgattgtatcaaatctgacaaatactgaaaatactgattattactggtttaatgtattcagataattagctggaattagcctagaagcacatctaaatggaggagagaggtagatgttagctttattttaagaaattttctcattgctatctataatagtataaaaaaatagattgaacataactggatttttttttttttt

SEQ ID NO: 16885 - DNA, 368 bp, Homo sapiens
caactaacaaactccaaactttttgcaaggaagcttgcaaaatgccctagaatatccaaaaataccctagcatagagcttttccaaaagggaaagtatcagcaacaacataagtagaaatctgtgaactgggcaccctagaggactccaggtctgctgtaggacctttaaggaggactacacaagacctaggctcaagtccctgccacttttatttgtatgaccttgcaatagtcacgtaccctttctgggctcactttctctatctataaaaaggatttagttattacttgcctttcctacctcaaagaactgttggaaagatcaaaagagataatgcaatatattatgaactgcaaagtactatat

SEQ ID NO: 16886 - DNA, 514 bp, Homo sapiens
  misc_feature (1)...(514): n = a,t,c or g
caaaccttgagcaacggaaagggcgagctggccgagtacggcctggattctgctttcacctgtgcagccgagctcgttttgagagacttgaaacccacatgacaccagagatgttccgaacaccattgcatgaaattgctcttagcataaaacttctgcgtctaggaggaattggccaatttctggccaaagcaattgaacctccccctttggatgctgtgattgaagcagaacacactcttagagagcttgatgcattagatgccaatgatgagttgactcctttgggacgaatcctggctaaactccccattgagcctcgttttggcaaaatgatgatgattttctacgtgggagatgctatctgtaccattgctgctgctacctgctttccagagcctttcatcaatgaaggaaagcggctgggctatatccatcgaaattttgctggaaacagaatttctgatccgtaacccttttatcngattnccagccntggatgangctnaaaggg

SEQ ID NO: 16887 - DNA, 458 bp, Homo sapiens
  misc_feature (1)...(458): n = a,t,c or g
gnngnnnnttnnnntntttgnntttgnataccgttatgacatgattacgaatttaatacgactcactatagggaatttggccctcgaggccaagaattcggcacgagggagacagacagggtctcagtctgtcatccaggctggcttgagtgcagtggtgtgatcacggctcactacagcacagcctcagccacctgggctcaaggtatcctcccacctcagccttgtgaatagctgggaccacaagcgtgcaccaccacgcctggctaatatatatatattttttattttttgtagagatgggggtttccctgtgttacgtaggctggtttcaaactcctgggctcaagcaatcctcctgactctgcctcctaagtgctgggtttacaggcatgccccacctaaactgtttccttcatctacttttagctatttattaaataactagaataggctac

SEQ ID NO: 16888 - DNA, 496 bp, Homo sapiens
  misc_feature (1)...(496): n = a,t,c or g
gtngggnnnnnnnttggtgttnttganatgctngaactttcttnggatttgaacacccatttaatacgactcactataggggaatttggccctcgaggccaagaattcggcacgaggcatgttgactgttttttccacactcccagtccacaaaagttttctccacttatgaacaaataatgtgtgtgtgtgtttttttgtttttttgtttttttgtttttcctgagacagggtctcactctgtcatccaggctggggtgcagtggtgtgatcatggctcactgcagcttcaatctcccaggtccaagtgatccttctacctcagcctcccaagtagctgggaccacaggtgtgtgccaccatgcccagttaatttttaaattttttgtagagacagggtctccctatgttgcccaggctggttttgaacttctgaagcgatcctttcacctcagcctccaaaagtcctgggataacaggcatgagccactgtgcc

SEQ ID NO: 16889 - DNA, 367 bp, Homo sapiens
gggtttgtttgcctggcgtagagtgtgctcgtttcacctactcttgcctcccaggacagaacttgtagaaattgtgaaatttcgagatataagttgggtgaccctcagtcagcctcttccattgaaaacgtacctcgggcatattacttaacttcctggtcagtagagcctacttacgttcttggcatggggtaaatgaaaactgcacagctcttggcatatgatagctactcaggttaaaaataagtcaaaggtgagctatttcttggctctatcgattttctactctccctaggaacttaagctccctgtgccatgttttgatctgtattgattgccctaccataatcagcacctcagagctgca

SEQ ID NO: 16890 - DNA, 371 bp, Homo sapiens
  misc_feature (1)...(371): n = a,t,c or g
gaaatgacaccaaagaagatgtatttgtacatcagactgccatcaagaagaataacccacggaaatatctgcgcagtgtaggagatggagaaactgtagagtttgatgtggttgaaggagagaagggtgcanaagctgccaatgtgactggcccggatggagttcctgtggaagggagtcgttatgctgcagatcggcgccgttacagacgtggctactatggaaggcgccgtggccctccccggaatgctggtgagattggagagatgaaggatggagtcccagagggagcacaacttcagggaccggttcatcgaaatccaacttaccgcccaaggtaccgtagcaggggacctcctcgcccacgaccg

SEQ ID NO: 16891 - DNA, 487 bp, Homo sapiens
  misc_feature (1)...(487): n = a,t,c or g
accttntncccgattcnaatnantacgactcactatanggaatttggccctcgaggccannaattcggcacgagccccagtgaccctaacatgtgcagtctggggacatgggaggacatgagcgcagccagagaaaacccatgcagacctgccgagaaggtgtaatctgcacagacagtagccccggcctgggataataagatgacgctgaacgaaagtcgttggaggacctgccattatcagcctgtaggctgaaaacagatgggaatctcagcaatcagactcgctctaacagcccacgctcagaggctccggctgtccatgctctgtcaggctttccctgcctcatcacgcctctccatgaagctcctgagtgaatgaatactgttattcttatccccgttttacagatgagaagccatagcctgtaagcactgatttgctggaggccacagttgaatccgcacagtgtcatgtaattgttttg

SEQ ID NO: 16892 - DNA, 378 bp, Homo sapiens
cccacgcgtccgcccacgcgtccgaccagctcatagaggggaaccaggtgctgcattccttcacagctgtctgccaggatgatggcacgtggcatcgtgccatgcccagatgcaagatcaaggactgtgggcagccccgaaacctgcctaatggtgacttccgttacaccaccacaatgggagtgaacacctacaaggcccgtatccagtactactgccatgagccatattacaagatgcagaccagagctggcagcagggagtctgagcaaggggtgtacacctgcacagcacagggcatttggaagaatgaacagaagggagagaagattcctcggtgcttgccagtgtgtgggaagcccgtgaaccccgtggaat

SEQ ID NO: 16893 - DNA, 372 bp, Homo sapiens
ggtgaaatcaaatgatataactaggctgcagatacttagaggatactcagaggttaactttctatgcctttattccttttcttgatggcattaataacttacattgttactgtccaaaaactggttctcatgtgatgtccctgcttgaaaatgtttggggctgtctgctgcccatggtcaaaatgcttagcttcttaacagaatttttggtccccttgcaatctcaggccaaccttcttctccagcttcattttataacactgttccctatagtccactcacactgaagttcatgagttcatatcattccttggcacacacttttctgctttgtacaagctgctccttttatttgaaatgcttttccatccc

SEQ ID NO: 16894 - DNA, 445 bp, Homo sapiens
  misc_feature (1)...(445): n = a,t,c or g
tgnaanccnattgganaacngttatgacatgattacgaatttaatatcgactcactatagggaatttggccctcgaggccaagaattcggcacgaggcttgatggtcgaggccatctcctgggccgcctggcggccatcgtggctaaacaggtactgctgggccggaaggtggtggtcgtacgctgtgaaggcatcaacatttctggcaatttctacagaaacaagttgaagtacctggctttcctccgcaagcggatgaacaccaacccttcccgaggcccctaccacttccgggcccccagccgcatcttctggcggaccgtgcgaggtatgctgccccacaaaaccaagcgaggccaggccgctctggaccgtctcaaggtgtttgacggcatcccaccgccctacgacaagaaaaagcggatggnggttcctgctgccctc

SEQ ID NO: 16895 - DNA, 522 bp, Homo sapiens
  misc_feature (1)...(522): n = a,t,c or g
tttganaccnnttgactgattcgaatttaatacgactcactatagggaatttggccctcgaggccaagaattcggcacgagagtggggaaaagaacgagggatcggagagtgctcccgaaggccaggcccaacaacgccggccctaccgcaggcgaaggttcccaccttactacatgcggagaccctatgggcgtcgaccacagtattccaaccctcctgtgcagggagaagtgatggagggtgctgacaaccagggtgcaggagaacaaggtagaccagtgaggcagaatatgtatcggggatatagaccacgattccgcaggggccctcctcgccaaagacagcctagagaggacggcaatgaagaagataaagaaaatcaaggagatgagacccaaggtcagcagccacctcaacgtcggtaccgccgcaacttcaattaccgacgcagacgcccagaaaaccctaaaccacaagatggcaaagagaccaaaagcagccgatcaccacntngaaattgt

SEQ ID NO: 16896 - DNA, 345 bp, Homo sapiens
gagtgtccaaagtgaataattactgtcagtactgcatcacagagaaaggaagggatccctcaggagacactgctgtctccttctgggttgtgctaaacaacatagggaggaaagctggacctggagtcaaaggaattgagttagtgtgctggctctgccatacttacggcacccttgggcaggatatacaaaggttcctcacttataaaatgggacagtctaaaactaccttttagtagagaagtcaaatgagaaggtatgtgaaaactctgtcaactaaatataaagactaataatttgggtattaagaggctagtttgagaagccacctgaattacacaaacc

SEQ ID NO: 16897 - DNA, 321 bp, Homo sapiens
gggcaacaagggcgaaactccatctcaaaaaaaaactatcttcatcagaaagcctactacgttacaatgttgataacacacacctgccctcttagatcctttctaacttgaaattcaatttagagttccttttcagctgagtatcctaagtgtattaaaaatccatttacagcacacatatgagcaagataaaaatcaggccatttcccagattacccagagtctttaagggggaatcatgggagaggtgtgaccacacccagcagatgtcagagtcatgtggtactgggaaataattatcccaacaagtgctatccagtc

SEQ ID NO: 16898 - DNA, 446 bp, Homo sapiens
aaccgctatgacatgattacgaatttaatacgactcactatagggaatttggccctcgaggccaagaattcggcacgagaactggatcctaataataaaaaaatttataaataagaccaaggaagcaccaaatggaagactataaaaaatcttacctgaaattaacatgtgatgtgcacttgaggtaataaactggttaaaattattaagatcagagttaaacaaaattttgctaatcttccctctgatcatttttttctgttctaacctttttcttcatatcttttctattttggataggcatatataaaggtacacactttctataattatctaataaactgagtgcaaaattcagttaataaaaagggaccaaaaatgtctagattagccaggtgcaggggcagggaagtgggggcacctacagtcacagatactcaggaggc

SEQ ID NO: 16899 - DNA, 811 bp, Homo sapiens
  misc_feature (1)...(811): n = a,t,c or g
ggcggagaaaaaagttctcgccaccaaagtccttggcactgtcaaatggttcaacgtcagaaatggatatggatttataaatcgaaatgacaccaaagaagatgtatttgtacatcagactgccatcaagaagaataacccacggaaatatctgcgcagtgtaggagatggagaaactgtagagtttgatgtggttgaaggagagaagggtgcagaagctgccaatgtgactggcccggatggagttcctgtggaagggagtaaatatgctgcagatcggncccgttacagacgctatccacgtcgtaggggtcctccccggaattaccagcaaaattaccagaatagtgagagtggggaaaagaacgagggatcggagagtgctcccgaaggccaggcccaacaacgccggccctaccgcaggcgaaggttcccaccttactacatgcggagaccctatgggcgtcgaccacagtattccaaccctcctgtgcagggagaagtgatggagggtgctgacaaccagggtgcaggagaacaaggtagaccagtgaggcagaatatgtatcggggatatagaccacgattccgcaggggccctcctcgccaaagacagcctagagaggacggcaatgaagaagataaagaaaatcaaggagatgagacccaaggtcagcagccacctcaacgtcggtaccgccgcaacttcaattaccgacgcagacgcccagaaaaccctaaaccacaagatggcaaagagacaaaagcagccgatccaccagctgagaattcgtcccgctcccgaggctga

SEQ ID NO: 16900 - DNA, 317 bp, Homo sapiens
gcagcatttaccatgatcagctagaaggatggtgaggcagacgtgcaatgggactgacaagctgtgtgtcccaaacaatagtccaatctcttgggtactgctcagcgtgcattgggaggagagtgttccacactgcattgccatttaaaaggacattccaaaaatgtagcccattccatgaagggcaagaaagcagcctggatacctcggtcagtgagacatggattgaagaatgcgatgttgtttagtttggcaaatacatgcagaagtgaggggagaggtcgacgcggtcgcgaattccagatctatgaatcgta

SEQ ID NO: 16901 - DNA, 331 bp, Homo sapiens
gcatgaagaaaccctgtctctacaaaaaaaaattagccaggtgtggtagcatgcacttgtagtctcagctacttgggaggctaaggtaggaagatcactttatcttaggaatttgaggctgtaatgagctatgattttaccattgcacttcagtccgggcaatgagtgagagtctgtcttaaaacaaacaaacaaacaaaaacgctgactggccagtctagactggtgctcacacctatgatcagcaacatagtgagatctcacctggccaagcatggacatttttaagacagaggttgcagtgaaccaagatggcaccattgcactccag

SEQ ID NO: 16902 - DNA, 350 bp, Homo sapiens
tgaaatattcatattgacttaattgcagcttaagttaggggtatgtagaggtattttccctaaagcaaaattgggacactgttatcagaaataggagagtggatgatagatgcaaaataatacctgtccacaacaaactcttaatgctgtgtttgagctttcatgagtttcccagagagacatagctggaaaattcctattgattttctctaaaatttcaacaagtagctaaagtctggctatgctcacagtctcacatctggttggggtgggctccttacagaacacgctttcacagttaccctaaactctctggggcagggttattcctttgtggaaccagaggcaca

SEQ ID NO: 16903 - DNA, 520 bp, Homo sapiens
  misc_feature (1)...(520): n = a,t,c or g
atttgannccattganacnntttgactgattacgaatttaatacgactcactatagggaatttggccctcgaggccaagaattcggcacgaggaggctgcctctaggcaacacccaggggctcaaagaagacagacgcagagagcatgagctgctggtcacctctctatccccagagcatcgtagatgcttgataaatgtgttaaaaatggatgacagtttcaggaatagatttaggagtaaataagagatgggcttgaaatttttctagaaattctgaaaaataggtgccgagggaagtgcagtgccagtgagctgcagagtttgttcagcctgtgctttctgccagaggtaattgacatttctcctcactacgaatgcaagctcgacctccctcctttcgcccttatctagtcctgcaccaaatactgctgatttttatcttataaacgactcttggatgggtctttctctgaagcttctctgcactggtctaattggggcaacaaccatctttttgc

SEQ ID NO: 16904 - DNA, 378 bp, Homo sapiens
ggggccctcgccgctctgtctcattccctcgcgctctctcgggcaacatggcgggtgtggaggaggtagcggcctccgggagccacctgaatggcgacctggatccagacgacagggaagaaggagctgcctctacggctgaggaagcagccaagaaaaaaagacgaaagaagaagaagagcaaagggccttctgcagcaggggaacaggaacctgataaagaatcaggagcctcagtggatgaagtagcaagacagttggaaagatcagcattggaagataaagaaagagatgaagatgatgaagatggagatggcgatggagatggagcaactggaaagaagaagaaaaagaagaagaagaagagaggacgttagt

SEQ ID NO: 16905 - DNA, 535 bp, Homo sapiens
  misc_feature (1)...(535): n = a,t,c or g
ttggaanccctttgacatgactacgaatttaatacgactcactatagggaatttggccctcgaggccaagaattcggcacgagagactgggaaaccaaaaactttgattttgaggatgtttttgtgaagattccccaagcaattgctcaactgtccaaggaagctggagttgaaaaattcattcatgtttcacatctgaatgcgaatattaaaagctcttctagatatttgagaaataaggctgttggagagaaagtagtgagagatgcatttccggaagccattatcgtaaagccgtcggacatctttggaagagaggatagattccttaattcttttgcaagtatgcatcggtttggtcctataccccttggttccttgggctggaagacagttaaacaaccagtatatgtcgtagatgtatccaaaggaattgttaatgcagttaaggatcctgatgccaatgggaaatcctttgctttcgttggtcccagtcggtacctccttttccacctggtgaagtacatctttgctg

SEQ ID NO: 16906 - DNA, 424 bp, Homo sapiens
  misc_feature (1)...(424): n = a,t,c or g
tttgannaccanctatgacatgattacgaatttaataccgactcactatagggaatttggccctcgaggccaagaattcggcacgagattggaggtgatgcagggacatcactgaattcaaatgactatggttatgggggacaaaaaagacctttagaagatggagatcaaccagatgctaagaaagttgctcctcaaaatgactcttttggaacacagttaccaccgatgcatcagcagcaaagatctgtaatgacagaagaatacaaagttccagatggaatggttggattcataattggcagaggaggtgaacagatctcacgcatacaacaggaatctggatgcaaaatacagatagctcctgacagtggtggccttccagaaaggtcctgtatgttaactggaacacctgaatctgtcc

SEQ ID NO: 16907 - DNA, 440 bp, Homo sapiens
aatttaatacgactcactatagggaatttggccctcgaggccaagaattcggcacgagccacagctcacagtgctcctcccaagccagctccacaatgggagacacagattccagcccctcggagtccccgaaggacgagcaggtccccttctccaaggaggaatgtgcctttcggtcacagctggagacgccagagaccctgctggggagcaccgaagagaagcccctgccccttggagtgcctgatgctgggatgaagcccagttaaccaggccggtgtgggctgtgtcgtagccaaggtgggctgagccctggcaggatgaccctgcgaaggggccctggtccttccaggcccccaccactaggactctgaggctctttctgggccaagttcctctagtgccctccacagccgcagcctccctctgacctgcaggcc

SEQ ID NO: 16908 - DNA, 326 bp, Homo sapiens
ggaagatatgttttagttttcaaaattacagtatgtgacaattaactttgttttaaaaaattttttattttttatattacattagttattataagtaacaacaagtaatttggaaaagagaaatggcctagaaggagatacgaggaaacttaacactggtcatctttggggaataggagtggaagttttcactttctatcttaacattaaaaaaattaattaaaaacagaagggtagttatgtgtctcaaatctgcctttccaattaatagaaagtaacaactactgagaagaaaaatgatatctataaacattggtgatcatcac

SEQ ID NO: 16909 - DNA, 357 bp, Homo sapiens
ctggaaggggcctgtgaagcctccctggcctgctccacctgccatgtgtatgtgagtgaagaccacctggatctcctgcctcctcccgaggagagggaagacgacatgctagacatggcccccctcctccaggagaactcgcggcttgggctgccagattgtgctgacaccggagctggaaggagcggaattcaccctgcccaagatcaccaggaacttctacgtggatggccatgtccccaagccccactgacatgaacacctggaccattccacattgccatggccccagggcccagattgagggaatagccaggtgccagccctgcccagagtgcggacaggcccgggagagac

SEQ ID NO: 16910 - DNA, 1196 bp, Homo sapiens
  misc_feature (1)...(1196): n = a,t,c or g
gggaaaagatggcggctgccgcacaatcccgggttgtccgggtcctgtcaatgtcacgttctgccattactgcaatagccacatctgtgtgtcacggcccaccctgtcgccagcttcatcatgccctcatgcctcatgggaaaggtggacgttcctcagtcagtgggattgtggccactgtgtttggagcaacaggattcctggggcgatatgttgtcaaccaccttggacgcatggggtcacaggtaatcataccctatcggtgtgataaatatgacatcatgcaccttcgtcccatgggtgacctgggccagcttctgtttctggaatgggacgcgagagataaagattctatccgacgagtagtacaacacagcaatgtggtcatcaatcttattggacgagactgggaaaccaaaaactttgattttgaggatgtttttgtgaagattccccaagcaattgctcaactgtccaaggaagctggagttgaaaaattcattcatgtttcacatctgaatgcgaatattaaaagctcttctagatatttgagaaataaggctgttggagagaaagtagtgagagatgcatttccggaagccattatcgtaaagccgtcggacatctttggaagagaggatagattccttaattcttttgcaagtatgcatcggtttggtcctataccccttggttccttgggctggaagacagttaaacaaccagtatatgtcgtagatgtatccaaaggaattgttaatgcagttaaggatcctgatgccaatgggaaatcctttgctttcgttggtcccagtcggtacctccttttccacctggtgaagtacatctttgctgtggctcacagattgttcctcccattccccttgccgctttttgcctatcgatgggtagcaagagtctttgaaataagcccatttgagccctggataacaagggataaagtggagcggatgcacatcacagacatgaaattgcctcacctgcctggcttagaagaccttggtattcaggcaacaccactggaactcaagggcattgaggtgctgcggcgtcatcgcacttaccgctggctgtctgctgaaattgaggatgtgaanccggcaagaccgtcaacanttantgcctcctgaacanctctggtttggggtctttgggtcggccantggnttgacacc

SEQ ID NO: 16911 - DNA, 508 bp, Homo sapiens
  misc_feature (1)...(508): n = a,t,c or g
ttttgaatncccgtatnagaatcnctttgattaccaatttaatacgactcactatagggaatttggccctcgaggccaagaattcggcacgagtttaaacttaactacccctggaattgcctgaaactttagaagtagttttcagtttcatttggcataaaaagataggaatctctaataagcctcccagagttgcagggtgaacagttgagtctctgttgggttcaagagtgtgaggttcgcactgcccatcagcactttttcctcacttctgagccagagcgctgtcagctccgccctnnnnnnnnntgctgagggtaantgntnctgngctnnnngctatatcaggtgtcnacttnannancttngtttaggtacntnnngtnnnatgatcatnnnggnnggncnntatncnntnngantgncgnnttcananancnnannacttggacagcttatnanacaccagggatgngtcncnnanaaaaggctgngngaggacnccgga

SEQ ID NO: 16912 - DNA, 497 bp, Homo sapiens
  misc_feature (1)...(497): n = a,t,c or g
gaccgagaggatggccaggctgacaaagcacacgctcagaaacaagtagaggcggcaggccacctccccaaagagggcgtggtcaaagagggcagagctggagagcatggccaggggcatgagggtcagggcagccagcaggtccaccaggcagaggtggaagacgaagacaaattttcggagggcaggcgtcttggcgatcacggccatcacagcggcattgccagccacagcagtcaagtccagcaggagcatgaagaagagggccacagattccgaagcaacatcccgtagccccacctccgggaccccactggcagtagagggacctggggtttgagggaccctccccaaagtggaagagttccctgatgactgggggatgggtgaggactccatggggccgaaaganggcacccaaggtacctcctgtcacaagcccatcccccatcctatccaacgaccctgggaatgcaaaccaaggccaagnntcctgg

SEQ ID NO: 16913 - DNA, 381 bp, Homo sapiens
gctcagacttaagtctgttcttatatatgagatagattcagtgtattaaattgtagaagtcaatgtaacctttaaaacaaaagagttacccggctagttagtatgctgtcaggagagggtaacttgatttggatatggatggaattggctcccttaactccctctgtacagtgtattatctgtgaacttcaactctgttgctcatgtagaggttgagaagtctcttggcagcaagtttccagttgcaactaacacctgagttggctaattggtatgcccagttctagcactctagtctctggggagtttatgtttaaattcaacttcatcaggtttaaactgaaacataaatgtgcaagaaggaagagagaatggaacctt

SEQ ID NO: 16914 - DNA, 338 bp, Homo sapiens
gagagagctgagttcttgtagagactaacaacttgacgatggggaaagttaccatgtgacctgaactccctgacatgcaccggatgcctggacgctgtcagattcaccaagccaaaaaatagggcatgcacagcagtaagtactccatcattaagtgtaagtggtatacagaagactgggctcaagcatgtcttgaagacacaagtaaatatgagcaagtgactcaaatacccatggctcctaacgatgctaccctgcttcctctctcatcttgcatttactgcctcatgaggagctccctctgacagctgactaaggaacactttaggcctgatttg

SEQ ID NO: 16915 - DNA, 559 bp, Homo sapiens
  misc_feature (1)...(559): n = a,t,c or g
tttggntnccntttgnataccngttatgacatgattacgaatttaatacgactcactatagggaatttggccctcgaggccaagaattcggcacgagtgggagagctactttcaatggtacctagagagtagcaaaatgggggaagactacctcacttccttacaggaggccaacaaacaacttagatatgctaaccgagaactctctagcacttgatcactcttaaagaaatcttcagaattgcttacttcccccttggtgcttccttcacctccatttacacccccactttaccccgcctcctctgaacttcctggacaagatctgttccttccttctcttgcatgctccaggctaccatcttcccctcgtcctcatctgctgctcattcaacagaaggcagcaggaggtctaacctccaagaccctacctcctgatgattccatgacagcccccgtggcagcctctcatcaggaagatgggaaaagggggaccctgcaaggacacccctcatgattgccatttagggaacaatcagtaacaggtaggggaacccca

SEQ ID NO: 16916 - DNA, 366 bp, Homo sapiens
gcttacttccaaggaaaaacatcactttcttatcttttattttcctgagatgttagatgtgaatttagtacttaagacactattttagagaagacaaatagctgtgagatcttcctttggaatttcattgaggactaagaatatttgtctttgtaaagtgtcctattgtgagtggagacatctgtgaaaaagtagcagtgtgctaatacctggaatttttaatgtggacttaagatctctaaagttatataaagacagcacaatggttttatccagtaacatgacactggctaggtttctaggttaagttggtttctctttggattcacagggtattaatgatattctggcggttgtatcgatgaa

SEQ ID NO: 16917 - DNA, 506 bp, Homo sapiens
  misc_feature (1)...(506): n = a,t,c or g
gacncccttnnnnccccttganncccttaacagctatgacatgattacgaatttaatacgactcactatagggaatttggccctcgaggccaagaattcggcacgagaagtctttcaagtgaagctggggtgggctgcctgtggagggacactaactgcactcagcccgtttggtaggggatgaagaagagggactgttgggaagggcggtggcctctgggctggatgctggcaagagggatctgtgacccagatgacgatgtctggtgggaattgctttatagctaagtcagcaatcctcatgtcttaggcctggcagggccagcctaggccattgagtccagctccccttccagggacatggccacgcgagtctgcacacacacctgcccagtgtagtcacggccccagagctgctcaggcagggctcaccgtctttcctgggttctgatggctgttgtgaggcagctcagtaagggacagggcgcagggcagggagggaaggg

SEQ ID NO: 16918 - DNA, 406 bp, Homo sapiens
  misc_feature (1)...(406): n = a,t,c or g
ggctactctggaggctgagacaggagaatcgcttgaacccaggaagtggaggttgcagtgagctgagatcacaccactgcactccagcctgggagagacagagtgagactccatctcgaaaaaaaaaaaannataaaacccantaaccnnggggcaatcaaattntggcanncnttaaatatcagnatncagntggncncgggggntnacccctgnantccnagcnntttggnaggccaaggnggccgnatnanttgaggncagnantttnaaaggatcctggccagcntggcaaaaccccatntgnncttaaaatncaaaaaanttacctggccntggnggtncncacctgnaatcccagntanttggnaggctgaggtggaaaaattgnttgaacctgggaggg

SEQ ID NO: 16919 - DNA, 396 bp, Homo sapiens
gtggcgagctgaggtggaggcaggctgcggcagacggcgacagtggcggcggcgccatggcagggcttgcaggatccctgctgccttggtgatcccgggctgacagccagagagcacagcggctcagctcctggagagtgagggttgaagaaagcggagggcagccgcctgcgcccgctggctcccattaggtcggttcctgcagcggtgcccggcagccttggtgaaggccctgcccggcagagatcatgtgttgcctccagtggctgctgcccgtcctcctcatccccaggcccctcaaccccgccctgtggttcagccactccatgttcatgggcttctacctgctcagcttcctcctggaacggaagccttgcacaatttgtgcctttggtt

SEQ ID NO: 16920 - DNA, 349 bp, Homo sapiens
gaactgggtcaatacagcataatcacatagggccaaatatagcagaaccacaaagtctgtggagaggcagaaaaggagtaggtttgacaaatgagaaaaacccaagtcaacattaaggtgctggtgataaaaaatatcaaccttcctcttgccagctgtgtgaatttacacatgaaagtaggaatgcaaaaaaagaaggatatatctaatattcagcttttgactaccaaaaaaacccaaagaaactcttgagtccacagtgaagcattagtcttgcaagccagcctattgtgataaagaaaggtggtctctaaactataaaagcttcattctcatgtcaggagccaaa

SEQ ID NO: 16921 - DNA, 622 bp, Homo sapiens
gctggaagaggacgaaaaaaataaccgtccgcgacgccgagacaaaccggacccgcaaccaccatgaacagcaaaggtcaatatccaacacagccaacctaccctgtgcagcctcctgggaatccagtataccctcagaccttgcatcttcctcaggctccaccctataccgatgctccacctgcctactcagagctctatcgtccgagctttgtgcacccaggggctgccacagtccccaccatgtcagccgcatttcctggagcctctctgtatcttcccatggcccagtctgtggctgttgggcctttaggttccacaatccccatggcttattatccagtcggtcccatctatccacctggctccacagtgctggtggaaggagggtatgatgcaggtgccagatttggagctggggctactgctggcaacattcctcctccacctcctggatgccctcccaatgctgctcagcttgcagtcatgcagggagccaacgtcctcgtaactcagcggaaggggaacttcttcatgggtgggttcagatggtggctacaccatctggtgaggaaccaaggccacctttgtgccgggaaagacatcacataccttcagcact

SEQ ID NO: 16922 - DNA, 358 bp, Homo sapiens
gggtcctgccggctgctgctgacccgtgactctcccagtgacactgagcagttcatgcacttgagccagatgaactatgggttccaccaaggggccactgctaggaaagagaccctggacctgtgaacatgagttcacctggcacgggctggatttggtaaactggcttggatggagaccactggtgccgaccttgattgcccccaggccctcctgtcaccgagggggctcagccacatcagttgacaggagagtcaactgaagccccctggaatccacagcacaacagtcacagtcaatgccaggctctgtggtaatcttcctcgtaagctatgaaggtctagaaagtacttctcct

SEQ ID NO: 16923 - DNA, 379 bp, Homo sapiens
gttattattatacttacattgtcttatatcttgtaaatacccttgtatgtgtgtttttaaaataaaggcttttaaaggaagcaaaacaaaaatctgaaacttaatcttttctaattttcatccttaattttcttcattccaaccagtatatacacagatcccttgttttatgttttgttttgactgagcttagcaattagacaactgcttacttttgtgttaaatagtttaacaagtcaggatgggctggatgcagtgactcccacctgtaatcccaacacttttggaggccaaggcaggaggatcacttgagctcaaaagtttgggaccagcttgggcaacatagtgaaaccctgtctctatttaaaaaaaaaaaaaa

SEQ ID NO: 16924 - DNA, 1007 bp, Homo sapiens
aacttcccccagcttcccaattcaaactggggggaaaaaaactaaatcattgggagttacttgccaacttggaagttgatatttctttactttttccattctaagactttaagttctctggcatgagtttatctgcaatcataaactaaacaattacctaaacccaccccaccaatcccaaccgtaacaggccactgccaactaattgccaatatttgcccctcccctttaataaaacttttaagaagtcacattattggaaaacttaacttcaacatttggcctactcaagctcttctgaagttctcctgagatgactgaatatgaaccaaagctgcactgtgctgtacttttcagcttcaactgggaatactcttccaaggataaaagcagctccagtccctgaaggtgatcgtgccaacagcacagcggtacactccttctctaacccagattgtcaatagtactatagcatctgaggaaaatcttagaaaaaaacattttctcccccaccctctctcttccctgttaagaccatcccaaaatgcttcaagtaaaaaataacaagtttaaggggttaagcacttttaaagtctgattaagggggtggggggaaaaaagagtaactaccagccatttctccaatggacatctcttccacagacctcaacgtgagaactgctctagtttctataaactgtaaacctgtggtggtctgattatcctgatattggattttcttgttttctgttacaccttgagtcatttgcctttaggattctagacagacctaagggaaaaagaactgaaaacatattttgcccccacccccacaaaaaaaaatactgaaaactcccccccgcctcagttacacatccaaactctacatttacaaaacgaattcagggtgaggaagtaaaaacaggtcatctattcacaaaactgaaatacttcattaccccaactaaacatacaaaccaaatagtctgttagtaaataaatcctac

SEQ ID NO: 16925 - DNA, 472 bp, Homo sapiens
  misc_feature (1)...(472): n = a,t,c or g
ttgtgcctangatttngtttctctttggactgccacgaatttttacgactcactatagggaatttggccctcgaggccaagaattcggcaccaggggaccaccttggtcctctcaggggaatattctattggacaagtactcactgtattcttttctgtattaattggggcttttagtgttggacaggcatctccaagcattgaagcatttgcaaatgcaagaggagcagcttatgaaatcttcaagataattgataataagccaagtattgacagctattcgaagagtgggcacaaaccagataatattaagggaaatttggaattcagaaatgttcacttcagttacccatctcgaaaagaagttaagatcttgaagggcctgaacctgaaggtgcagagtgggcagacggtggccctggttggaaacagtggctgtgggaagagcacaacagtccagctgatgcaaagg

SEQ ID NO: 16926 - DNA, 474 bp, Homo sapiens
  misc_feature (1)...(474): n = a,t,c or g
gngngnnntgtnttntgatatactagatactcttaggacatgnctacgaatttaatacgactcactatagggaatttggccctcgaggccaagaattcggcacgagagtcttgctagctgtataactcatgctctttcccataagtaaagttgagagaataaaacaaataggtttctttatggtgatctttatgttattttctttgcatttctgagagaaatgtctgcatttatgccataatttttatttttaatttttggagacagggtctcactctgtcgcccaggctggagtgcagtgatgcaatctcaactgactgcagcctctacttcctgggcccaggcaattatcccacctcagcctcctgagcagctgggactacaggcacacaccaccacacccagctaatttttgtattttttggtagagacaggatttcaccgtgttgcctggctagtctcaaaactcctggc

SEQ ID NO: 16927 - DNA, 367 bp, Homo sapiens
cacattaaataagcttgttctatctatctatctatctatctatctatctatctatctatcgagggtctcactgtgtcacccaggctggagtgcagtggtacaatccttgctcactgcagcctcgaactcctggacttaagcattcctcccacctcagcctcagtactggtacacgagaagccggtactgcaggcacacaccaccacacccaactaatttttttttaaatttgtatggagatggggtctcgctgtgttgcccaggctggtcttgaactcccatcctcgagtgatcctcctgccttggcctcccaaagtgctaggattacaggtgtgagctaccacatctcgcaagctttttttttttt

SEQ ID NO: 16928 - DNA, 423 bp, Homo sapiens
aattcggcacgagggagcggaaagtgcttgcgctccaggcccgaaagaaaaggaccaaggccaataaggacaaagcccaaaggaaatctgaaactcagcaccgaggctctgctccccactctgagagtgatctaccagagcaggaagaggagattctgggatctgatgatgatgagcaagaagatcctaatgattattgtaaaggaggttatcatcttgtgaaagttggagatctattcaatgggagataccatgtgatccgaaagttaggctggggacacttttcaacagtatggttatcatgggatattcaggggaagaaatttgtggcaatgaaagtagttaaaagtgctgaacattacactgaaacagcactagatgaaatccggttgctgaagtcagttcgcaattcagaccctaatg

SEQ ID NO: 16929 - DNA, 437 bp, Homo sapiens
ggacagctgaggttccttaaggccccagacacaaataaattgaagttactggtctctgtggccaagtggcaaaatggccgtaacatggctatctgtgctcggtgattttcaagttggggaaagctctgctgtcgctcggttgccttctctggaggacgcagggatgatctggcccccatgctgggtggtgggagaggcggtggctcccgttggagacccaggtcttgcctccttgcctggcctcaaggtgtgccctgtggcctgctctgagtggcagacgcatctgcctccagtcaagggccgccttgtgccagccatcaggacatctgaggacccctctcccctagacagtcacctctcagttaatctccagccctctttgtccccatttggcaatgggaagatgttgctgtaaacgcaaggaccctgacaaccgc

SEQ ID NO: 16930 - DNA, 506 bp, Homo sapiens
  misc_feature (1)...(506): n = a,t,c or g
ggtaaatgtcagcttcccattccatgacctgatttacagtgtcattccttggaaacaagctaggacttaacagaaaacctccactatttcagaccaagtccaaagtctggcgttttgtgggtctggggccatgttcatctttaggaatagttttctgtccccactctgagatgttcactgctatgccctcatgggagtttaaggaagaaacttaggacttatgtacagaaagaagggtgaggaaacaatgccatcttcagattttcttttttaattttgtgtttgggcttaggtcaattaaaaaataattatgtaagcccataaagtaaatggatatcaatattttgcatattatctatgttttcctcttctgggttatttgattatttaattcaaaaagaatattggggctgggcatggngtctcatacctataatccagcactctgggaggcaaggtgggcanntcaactgaggccaggatttgagacaccctggctaacacgg

SEQ ID NO: 16931 - DNA, 453 bp, Homo sapiens
  misc_feature (1)...(453): n = a,t,c or g
aacagctatgacatgattacgaatttaatacgactcactatagggaatttggccctcgaggccaagaattcggcacgagcgttctaattaatgggtaaatcaatttacatatacattttatttcttgatgctgaatgaatattattgagttatatgtacatatggattaaatatagcacacttctctgcctagcttgagaaaataaagccaaggcaaatacaaaattgatttctattaagtataaacacaagtgatgcttttccttatttaggcaccagtgacagagaaaaaaaaagtgatgcctttgaattttttgaagacagctttagaaattttcataaactctagaaatgactattgtaggaaatccagaaatacagagaagtacagaannnnnnnnnnnnnnacatgtgccatttattttataaagctgaanngctgctgnatatata

SEQ ID NO: 16932 - DNA, 520 bp, Homo sapiens
  misc_feature (1)...(520): n = a,t,c or g
aacagctatgacatgattactnatttaatacgactcactatagggaatttggccctcgaggccaagaattcggcacgaggggattaggagatcataaatccaggttctagaaactcagaatctgggaccctgaccagcaaatgccttggccttgcctaggactggtattttccacatgtcccagtgaagagcccagggatgaacagacccctctgagaacttgcacttttccaagaaccacgtggagccatcatctcaattcatgtgttcacgttctatcaacaaataccattgagcacccttgcctttgaagttaacaaccttgggagaaactgaggcagtccccgagcaggatttggaaagcaatttcatttaaaaggggctggagggaggggggaggcactcgtgttcatttaatcttttttttttaattatttttttttaagttccacggtacatgtacaggatgtgtttggtacataggtaaacgtgtgccatggggggttgctgcacctttaac

SEQ ID NO: 16933 - DNA, 375 bp, Homo sapiens
  misc_feature (1)...(375): n = a,t,c or g
atttctaattaagtgatttgtttaatgaagaactcttcatgtagagcaattaactgggcctaagaaatttcgaagctttccatgacataaagtggttaaaaaaagggncgnccgntntaaagnanccctnnngggncccaanctnacccgnncntncaacgnnanacctctnnccntanagggagncnnattanaacctagnccctgnccgncntttnanaacgncgnnacnggaaaatctgcnacctnggaatntttggaaagnanccttacttnnggggggnnacatantnggncaanctncctacananattnaanncnntanggaaaatntaaaattttnaagggnanaagggggangnntttggcttagc

SEQ ID NO: 16934 - DNA, 447 bp, Homo sapiens
ggtaggtagtaagtggtaatagtcatgttgtatatactgcaagagcagaatgaagaaggtgcctgggagcacagaaggagctccttcaactgtgcagaggtgaaggagggcttcttgtttgatgtcagtgtagctgagtttgtaaaggtgagtgggtctttagagaggcctactctcacaggaagtagcctctgcaaagcccagaaaggaacaggggcatagtgtttttgggaaaagcaagtacagccgagtgtgggcaggggatggctgacttaaaagcagcattcttactctagtttaacagaaacagccttttagtggcattgggccatatggtaattgaaaggatcaaaattatttacataagtacataaagttctagttggaggataagcagaagtagtaacaatttggaataacctaacctcacatctgtgtaagtagaaa

SEQ ID NO: 16935 - DNA, 462 bp, Homo sapiens
  misc_feature (1)...(462): n = a,t,c or g
gcaggttgaaggatatgcataaacttgcccttgctcagtttctctgctgtccacataccccagtgcactctttgatgcattgctttagaaggggagagtctgggtgtctttgctactgtttctatttccgtaagaaaaatggcccatgaagaaacttaaaaactgcaagtttgaatttctccaggcaggcaaaaatgaggtaaataaagtaaaggacttggctggcaattcccaaagaagcaggctatggagggacgaggtcccgagtaggtaggaaggcttatcgagagaagctgctggttcatgcactggcatcatccgctattgagttatcttgtgtccgctcagccagctaagcacaaattaatctctcatggctgaccaattacgtacagcttttgtgagaaaacaagttaaaagaaatgcattaggtaaagaaagggctaccactntttanggggg

SEQ ID NO: 16936 - DNA, 511 bp, Homo sapiens
  misc_feature (1)...(511): n = a,t,c or g
ttggannncctttgaagacccgntatgacatgattacgaatttaatacgactcactatagggaatttggccctcgaggccaagaattcggcacgagcagatattgcatgatgtgtgatgatgtcactctggcagctaatggaatgtgtacctctgtgttttggagtttaaaaatgttttaatatgctttgtttgtaatttttcatggttctgtaattcagaattgaaagtttttaccagcctgggtaataaagggagacccccatctctacaaaaaataaaaaaattagccgggcatggtggtacgcacttgtagtcccagctacttgggaggctgaggtgggaggattacctgagcctgggaggtcgaggctgcagtaagccaagatcacagcactgcactccagcctgggtgacagagccagacccggtctcaaaaaaaattgttttttaactgctattaacagtaaatattaatagatataactcatataaaagctctctgggatcct

SEQ ID NO: 16937 - DNA, 339 bp, Homo sapiens
ggttcattgtcggaaagaacagcagcctaaatggctaccagtaagtattaggtcacaaaattaacagtggaatgcaacacagcctttaataagatattgaaaatcaaggcccagtgcagtggctaatttaacaccggtaatcccagcactttgggaggccgaagcaggtggatcccctgagctcaagcaattctccctcagcctcctgagtagtcgggaccacaggtttgcaacaccatgtctggctgattttttatattttttgtagagatggagtttcactgtgttgcccagtgtggttttgaactcctggactcaagcagtcctcccacctcggcc

SEQ ID NO: 16938 - DNA, 444 bp, Homo sapiens
  misc_feature (1)...(444): n = a,t,c or g
accatctatgacatgattacgaatttaatacgactcactatagggaatttggccctcgaggccaagaattcggcacgaggggaaggggagtgaaaagtgctgagggactgtatttatagctgagggatttcctgggtgctgtgggtctcttgtctttgccactctgcctcaacactgaaactgtccattccctacttggaggctgcacccaaaacctccctctgccttcatgctctggcctccccctgcaagttaccaccctgggtcttggtgcttgcagcacttccggtgcctggctgccccaggccctctgctccctctgctgcctgggtttaatccctcctctgccactgcccagcatcaggactctgctggttttgcagcctcttggtacctcagttttatgtttgtggaataggaagtgctcacagnactctctgggat

SEQ ID NO: 16939 - DNA, 359 bp, Homo sapiens
gatccccgtggcccagtcaacttgacacataaagttaaccatcacacagtcgtcttacaaaatatacactagaaggcagatatactgtaatatgctccccctatagttcactgaaatacagcagatatttgttgcccatagcagagaaatgcaatctgctaatcaaatacaaaactttgtttttctcaatctgaatttatcagtgtttgagggagtcttatttaactgaaagcttccaagaatttaaactgaggcggattgctcattctgacacttggattcatgtttagttttctctgtccactgcatgcttgcataggcagcaagaggtctcaccatcactcttcatactgcatgac

SEQ ID NO: 16940 - DNA, 455 bp, Homo sapiens
tgacatgattacgaatttaatacgactcactatagggaatttggccctcgaggccaagaattcggcacgagcctggcggccatcgtggctaaacaggtactgctgggccggaaggtggtggtcgtacgctgtgaaggcatcaacatttctggcaatttctacagaaacaagttgaagtacctggctttcctccgcaagcggatgaacaccaacccttcccgaggcccctaccacttccgggcccccagccgcatcttctggcggaccgtgcgaggtatgctgccccacaaaaccaagcgaggccaggccgctctggaccgtctcaaggtgtttgacggcatcccaccgccctacgacaagaaaaagcggatggtggttcctgctgccctcaaggtcgtgcgtctgaagcctacaagaaagtttgcctatctggggcgcctggctcacgaggttgg

SEQ ID NO: 16941 - DNA, 408 bp, Homo sapiens
  misc_feature (1)...(408): n = a,t,c or g
aattcggcacgagccagccagatataaaggtggcagtggctgctctagaacgcctacatagggggctaagaggcagcaatctgattgcagtgagggcataggagccttttcttaaggctgcattcacatatcagagcactatttttacttgggttgtatggttatttgtggatggttgtgaggattgattgatggtggagattgggtggaggggcagtgtgcattgttaccaatgcagccttgatagtcctctagcaggtggaaactagtgagcctcattagggtggaaagagacttatggcatctaaaatcaggagagaccctgatctggcgccaaaccctggggtctgagggctccattgggatgatacattanaataactccatcanccaaaaagcagcttcata

SEQ ID NO: 16942 - DNA, 447 bp, Homo sapiens
ctatgacatgattacgaatttaatacgactcactatagggaatttggccctcgaggccaagaattcggcacgagggggtctctgacctgagggagaacgagactcttttgcttcaaaaacaaattccccttgacccatttctttgtcctccgagcagggaattgtttaggctgagcaaggatgaagttcgtgggggatggggtgcagcgcgctttgacggaaggagggtccgcagcggaggagacccggcagggaggccccccaaccctccagctctcagggcacagggctaacgtgtctcttccccctgctgggtggaagacttgagggcctgaatggtagctattgcaccttctctccctgcacgcagccaaagacaagtggaattcatggacagagaaagaaaccttccttctttccccactttcaggggaagcagcgactccg

SEQ ID NO: 16943 - DNA, 375 bp, Homo sapiens
ctcatttttgatagtttctatgtcttcaacatcactggaatgatcttttctcaatttctgtgaattttggtcttaattctaagctggtgtaagatgtcaatacacaaatacagctgactgacctgttcttcctacctcattgtctaaccttctgtaaatcctatccagtgcattttttcatttcatacattttacatttctaggtttcctttgggctgtttttacaaattccttttctcacatcatgctcaggttttcctgtacttccttgaaaatgtaaagcatatttataatagctcttttaatattcttatttgctaatttcatctttttttttcatttctgggccgtttctattgattgatggttctccaa

SEQ ID NO: 16944 - DNA, 522 bp, Homo sapiens
  misc_feature (1)...(522): n = a,t,c or g
tttnganacccgctatgacatgattacgaatttaatacgactcactatagggaatttggccctcgaggccaagaattcggcacgagttatttttccctttacactgtccaattgtgcttcttacttttttttcatgtatttacaaactctagttaggatcctgattacagcatagttccttgataatattaagatatgtaaggtatcttcattgttggcctcaggctatctttgctatgacttgcatttgtccaacgtcaaaacataggaaacaggtaataaagcttttggtggtatccagccactgtaatgaagacaggaatgtgatttgagctgggaggaataaatttccatcttacttcacttttatattcctttttattatcaggcagcattacccaaagccatgggttttgttttcagaaaagtagaacttagaattatgcttggtttaggattaattaagcggcgcaagcttattccctttagtgagggttaattttagcttggcactgcccgtcg

SEQ ID NO: 16945 - DNA, 306 bp, Homo sapiens
ttttttagtaggggtagggaatatttagggaatttggaaggggttatatagttctttaagaatcaaatagcacatcttcctgaaaatagcacgtagacaaagtttttttggagataaccttaggaatatcgtaactctctgatgccacctccatatgtggtcgacgcggccgcgaattccagatctatgaatcgtagatactgaaaaaccccgcaagttcacttcaactgtgcatcgtgcaccatctcaatttctttcatttatacatcgttttgccttcttttatgtaactatactcctctaagt

SEQ ID NO: 16946 - DNA, 531 bp, Homo sapiens
  misc_feature (1)...(531): n = a,t,c or g
tnnnnnnnnnnnttgganaccgttttgactgnttacgaatttaatacgactcactatagggaatttggccctcgaggccaagaattcggcacgagcaaagatctgcttctggcagctgtcagtgaggactcatctgttacccagatctaccatgcagttgcagctctaagtggctttggccttcccttggcatcccaagaagcactcagtgcccttactgctcgtctcagcaaggaggagactgtgctggcaacagtccaggctctgcagacagcatcccacctgtcccagcaggctgacctgaggagcatcgtggaggagattgaggaccttgttgctcgcctggatgaactcgggggcgtgtatctccagtttgaagaaggactggaaacaacagcgttatttgtggctgccacctacaagctcatggatcatgtggggactgagccatccattaaggaggatcaggtcatccagctgatgaacgcgatcttcacaagaagactttgagtccttttcgaagccttaacg

SEQ ID NO: 16947 - DNA, 266 bp, Homo sapiens
gaaagaatgtcttgattgtggaagatataattgacactggcaaaacaatgcagactttgctttccttggtcaggcagtataatccaaagatggtcaaggtcgcaagcttgctggtgaaaaggaccccacgaagtgttggatataagccagactttgttggatttgaaattccagacaagtttgttgtaggatatgcccttgactataatgaatacttcagggatttgaatcatgtttgtgtcattagtgaaactggaaaagcaaaa

SEQ ID NO: 16948 - DNA, 323 bp, Homo sapiens
ggtactcataacttcattcttagaaacctcacattactctggggatctttgaagaggataatctcctattgaaaagcagattgcattctgttcctgtaacgatggtttgacaccagccttataatgatgtaatgggttttaccttgaaatggcaaggatatttttcagttagaaattagttctgtaatttttattttgaaaaaaaatctttctttagctttttatttttctccttttattgttaaagagcttatactttcctttatttacaaagggaatgtcagtgttggacattcagccccgagaaagaatgttgtgagcct

SEQ ID NO: 16949 - DNA, 514 bp, Homo sapiens
  misc_feature (1)...(514): n = a,t,c or g
atttgaanccnnagctatgacatgattacgaatttaatacgactcactatagggaatttggccctcgaggccaagaattcggcacgaggtaagtcagcccaacaaagagaactggtgtcaggaccatctttacaactccttgggtcggaaagggatcagcgctaaatctcagccttatcacaggtcccagtcatcttcctccgtcttgatcaacaaatcaatggattccatcaactaccctagtgatgtgggaaagcagcagctgctgtctttacacagaagttcaaggtgtgagagtcaccaggacttgctgccagatattgctgactcgcattaacagggcactgaaaaactctcagatctcacactccaagactcacagaaagttgtggtggtcaatagaaatttacccttaaatgcccaaattgcaacacagaattatttttccaatttcaaagagactgatggagatgaagatgactatgtggaaatcaagtcagaagaagatgagtcg

SEQ ID NO: 16950 - DNA, 531 bp, Homo sapiens
ggacctctctagataagattctgctggacgaacaggctcaggggaaacattacttggtctcaaacatctcccatgacacggtcctccaatgccacttcacctgctccgggaagcaggagtcaatgaattccaacgtcagcgtgtaccagcctccaaggcaggtcatcctgacactgcaacccactttggtggctgtgggcaagtccttcaccattgagtgcagggtgcccaccgtggagcccctggacagcctcaccctcttcctgttccgtggcaatgagactctgcactatgagaccttcgggaaggcagcccctgctccgcaggaggccacagccacattcaacagcacggctgacagagaggatggccaccgcaacttctcctgcctggctgtgctggacttgatgtctcgcggtggcaacatctttcacaaacactcagccccgaagatgttggagatctatgagcctgtgtcggacaaccagatgtcatcataatcacggtggtgtcgtgttgctgtcctgttct

SEQ ID NO: 16951 - DNA, 325 bp, Homo sapiens
cgcggccgcgtcgaccagattcgaaggttgtatggttcaaacaaaaaagctgacaggccattttggatctgcctcactggattcacaacagacagtcccctttatgaagagtgtgtgaggatgaatgatggattttctagttacctgttagacataacagaagaagactgctttagtttatttcccttggaaacccttgtgtacctgactcctgactcagaacacgctcttgaagatgttgatctaaacaaagtttacatcctcggtgggcttgtggatgaaagcattcagaagaaggtgacatttcaaaaggcccgggaatact

SEQ ID NO: 16952 - DNA, 443 bp, Homo sapiens
gcggcacgagggtaactttgtaccatacatgaggaataggaaacatggaggtacctggaaagataaaaggattaactcaatgtccttttcttggctcttacaagaattcaacccttgtactaaataaatctcacctcacaccaggcagagagggaaaggtgactcctgagtgagaatgagtgtggacagtggaatggctgggtgtgttatgtagggggctggcatgggatgagggctgagcccctctgccgctcacagcccctgctgcctcctgctctgcaacagaagtgtctgagcccaggcaggcaggtgggcagtgggtggtgccagcttctgacccacagaggaagcctggatgggcctggggagtgaaaggtgcaatattgaggggagtacactcgatcagacaacaacagcccgtggtaagggaacttgggcccgtg

SEQ ID NO: 16953 - DNA, 885 bp, Homo sapiens
gcttgatcccagcaatgtggattccctcttctacgctgcccaggccagccaggccctctcaggatgtgagatctctatttcaaatgagaccaaagatctgcttctggcagctgtcagtgaggactcatctgttacccagatctaccatgcagttgcagctctaagtggctttggccttcccttggcatcccaagaagcactcagtgcccttactgctcgtctcagcaaggaggagactgtgctggcaacagtccaggctctgcagacagcatcccacctgtcccagcaggctgacctgaggagcatcgtggaggagattgaggaccttgttgctcgcctggatgaactcgggggcgtgtatctccagtttgaagaaggactggaaacaacagcgttatttgtggctgccacctacaagctcatggatcatgtggggactgagccatccattaaggaggatcaggtcatccagctgatgaacgcgatcttcagcaagaagaactttgagtccctctccgaagccttcagcgtggcctctgcagctgctgtgctctcgcataatcgctaccacgtgccagttgtggttgtgcctgagggctctgcttccgacactcatgaacaggctatcttgcggttgcaagtcaccaatgttctgtctcagcctctgactcaggccactgttaaactagaacatgctaaatctgttgcttccagagccactgtcctccagaagacatccttcacccctgtaggggatgtttttgaactaaatttcatgaacgtcaaattttccagtggttattatgacttccttgtcgaagttgaaggtgacaaccggtatattgcaaataccgtagagctcagagtcaagatctccactgaagt

SEQ ID NO: 16954 - DNA, 455 bp, Homo sapiens
  misc_feature (1)...(455): n = a,t,c or g
gngnnnnttgantntgataccgtttgactgattacgaatttaatacgactcactatagggaatttggccctcgaggccaagaattcggcacgagctcgtcgggctcggaggaggatccagagacggagtctgggccgcctgtggagcgctgcggggtcctcagtaagtggacaaactacattcatgggtggcaggatcgttgggtagttttgaaaaataatgctctgagttactacaaatctgaagatgaaacagagtatggctgcagaggatccatctgtcttagcaaggctgtcatcacacctcacgattttgatgaatgtcgatttgatattagtgtaaatgatagtgtttggtatcttcgtgctcaggatccagatcatagacagcaatggatagatgccattgaacagcacaagactgaatctggatatggatctgaatccagcttgccg

SEQ ID NO: 16955 - DNA, 365 bp, Homo sapiens
  misc_feature (1)...(365): n = a,t,c or g
gggtaccagagtcaaatctggaaaacagacccatttcaccctggggaaactggctcctccctaccttctgtctaggcccctccctctctttctatgtaagctttatttattttgtgctgtatccttcttttttttaatgtaaagaaatatttatatgtatccatgttattttaaaaataaatttcaacacactgtgtgtactcttctccacctcacttctttcacttaaaaatgaggtggagaaaagtatatatagtgtataaagtatacactgtaaaatatgtagtatttccatctagaaaatcactccataccaatatgcagntatgtgctgcatagcagcattttggcagtgacagtggtcc

SEQ ID NO: 16956 - DNA, 190 bp, Homo sapiens
ggagagctagcaccatgagcttcaataccctgtctgtaacacataggagttggacttgatactctctaaggcttttacagctctggaatattccaaagaagttagtggaagatggggagaggagagttgcctggataagggcagagttggggccctaaagattaggaagtcagaccaggtgtggtggctc

SEQ ID NO: 16957 - DNA, 388 bp, Homo sapiens
atttggccctcgaggccaagaattcggcacgagggagcaagccagcactagtcagctaactaagtgactcaaccaaggccttttttccttgttatctttgcagatacttcattttcttagcgtttctggagattacaacatcctgcggttccgtttctgggaactttactgatttatctcccccctcacacaaataagcattgattcctgcatttctgaagatctcaagatctggactactgttgaaaaaatttccagtgaggctcacttatgtctgtaaagatgggaaaaaaatacaagaacattgttctactaaaaggattagaggtcatcaatgattatcattttagaatggttaagtccttactgagcaacgatttaaaactta

SEQ ID NO: 16958 - DNA, 421 bp, Homo sapiens
  misc_feature (1)...(421): n = a,t,c or g
taatttttgtatttttggtaaaaatgggggtttcnccatgttggtcaggctggccncaaacttctgacctcaaatgatccacccntctgggccncccaaantgctgggattacaggtntaagccactgtgcccggcctaaaganaggccttcctaaaggtcaaggaaccttgactaattgttattagggattaaattgaaaaaactgtccctgaanacaaaganngtcanggaccatctaagacncaaaagtccaataattacatttaaaggtttgccttcaaaagtgtcaacccannancnccngggncccanganttctgngggaaaattaactgttaaccggnccaaanancctttgannaanaaaaattnccaaccctggnggntttaaaaatcttggcnattngcantttgnttat

SEQ ID NO: 16959 - DNA, 961 bp, Homo sapiens
ctatgactgattacgaatttaatacgactcactatagggaatttggccctcgaggccaagaattcggcacgagaggcaggagggttgccagagcctgagaggtcaaggctgcagggagctgagatcacgccactgcactccagcctaggtgacagagcgagaccctgtccaaaagaaaaaaaaagtgaacgtctatttggtgaaattctctaggtctctcgtggtccagttgctcactcaagctgtgggggactctgttctgtgtctatagagtgctggactcttttctcccggcactgagagcttgttcctgtctttctgtccccacagattggccgcgtaatccatgttgctgctgggagcagcaacctcaagagagtgaccttggagctgggggggaagagccccaacatcatcatgtcagatgccgatatggattgggccgtggaacaggcccacttcgccctgttcttcaaccagggccagtgctgctgtgccggctcccggaccttcgtgcaggaggacatctatgatgagtttgtggagcggagcgttgcccgggccaagtctcgggtggtcgggaacccctttgatagcaagaccgagcaggggccgcaggtggatgaaactcagtttaagaagatcctcggctacatcaacacggggaagcaagagggggcgaagctgctgtgtggtgggggcattgctgctgaccgtggttacttcatccagcccactgtgtttggagatgtgcaggatggcatgaccatcgcctgcaggattctttattcagctctgacagtggcttcagcaactaccgtggcatcctgaactggtgtgtggtgatgctgatcttgagcaatgcccggttatttctggagaacctcatcaagtatggcatcctggtggaccccatccaggtggtttctctgttcctgaaggatccctatagctggcccgc

SEQ ID NO: 16960 - DNA, 355 bp, Homo sapiens
gtaagaaattatctgaatgtataaaactccctgctagtagtaaatacacagaaaatcacaggatattatgacactgtaattgtggcatataaactaactaaaacaacttttttattttattttatttttatttatgtatttatttatttattttgagacggagtcttgctctgtcacccaggctggagtgcagtggcacaatctcggctcactgcaagctccgcctcctgggttcacgccattctcctgcctcagcctcccgaatagctgggactacaggcacccaccaccacgcctggctaattttttgtatttttagtagagacagggtttcaccgtgttagccaggatggtc

SEQ ID NO: 16961 - DNA, 327 bp, Homo sapiens
ggaggctgaggtgggaggatttcttgagcccacgaggttgaggctgtagtgaactgtgattgcgccactgcattccaacctgggtgacacagcaagactccgcctcaaaaaaacaaaaaaaaacaaaccaaacgaaaaaccacaaaaagtagaagagtggaagacaaaaacagatataaagaacaaggacaacaattagaaaatagtaactggctgggcacagtggctcatgcctgcaatcccagcactttgggaggtcaagacaagaggatcacttgagtctaggagttcaagatcagcttgggcaacatagtgagaccctgtctt

SEQ ID NO: 16962 - DNA, 530 bp, Homo sapiens
  misc_feature (1)...(530): n = a,t,c or g
aaaccccttgtctgattcgaatttaatacgactcactatagggaatttggccctcgaggccangaattcggcgcgagattttctaaatgcctgcttatatgactttttgctgtattaccttcttgatctaataaacactccaaaatgactcctactaatgagaacgtgactgttgctaaaagtgaggtaataaacttcacaccgttccttgtttttacagatggagaaccacgaatatttaataggtctttgtataaagaagtaaagttaataaggccattgtgcttgcgtcttctctttaacttgtatttcagctcaagaaaaatattttatttgctatcattttctttaatgttgtacttagaaccatatttttgtgtaagaatattgaatttcttacttaagagaaactgtttcaatacaaaattgtaggcttttcatccccgcggccctgattttgacaaaggcagaaaataccatgaaaattaatcatccaatatttacttaaagttaactttttatacttacat

SEQ ID NO: 16963 - DNA, 336 bp, Homo sapiens
  misc_feature (1)...(336): n = a,t,c or g
caattatatttttctttgggccttaaaaaatgcttaattgagacgtagtcacataccttacaaatcgcccgtttagagtgcactgtttaatacagttttttagtaaccatctccacagtcaattatattaaaaagtcaactttttaatcttaccagaattctttaatttttcagttcccctcactgtggttaatatctctcgacttgacaccacttgcttaaggagaacttcagcttctccatccttccctaattggttcttttcataattgcctgttttttgaatataatagtgtctctggtatttctaaagatactgattatatttagnatgtt

SEQ ID NO: 16964 - DNA, 344 bp, Homo sapiens
gggagtggattttcatttaatcacagacatgaagcagtttagtggtgtgtctttttgagaaatcacaaaaagagaataagaggttttagaagtacagggaacctaagacttcacccaattgagttccacagtattttactgtgtaattaaagtgggaaaacacagggaggagaaaaatggcaaaaacagcagcagcggagatgcagcaatctcgccacacacaggtactgagggcccgagggcttcatcacttcccaccagatgctagggaacaccatctgcctttcttatcctgtgttttcatagccaccaacctcggggaaattgtgttctggaccatgtgc

SEQ ID NO: 16965 - DNA, 388 bp, Homo sapiens
atcgtattacacttttgcgaggaaatcatgagagtagacagataacacaggtctatggattttatgatgagtgccaaaccaaatatggaaatgctaatgcctggagatactgtaccaaagtttttgacatgctcacagtagcagctttaatagatgagcagattttgtgtgtccatggtggtttatctcctgatatcaaaacactggatcaaattcgaaccatcgaacggaatcaggaaattcctcataaaggagcattttgtgatctggtttggtcagatcctgaagatgtggatacctgggctatcagtccccgaggagcaggttggctttttggagcaaaggtcacaaatgagtttgttcatatcaacaacttaaaactcatctg

SEQ ID NO: 16966 - DNA, 379 bp, Homo sapiens
gaaaaattaaaaaaaattagccaaacacagtggtgcacacctgtagtgcctgctacttggcaggctaaggcaggagaatcacttgagccagggaaattgaggctgcagtgagtcatggtcacaccactgcactccagccttggtgacagaatgagactctgctctcaaaaacaaaaacaaacaaaagcatgcaacagcatgaaagagaataaaatacctggaaataaatttaagaaaagaacttcaagacccgtacactgaaaactagaaagcattgctaactgaaattaaagacataaatatatgggaagccatcccatgttcatgggtcagaaggcttattaagatggtaatacctgccgggtgtggtggctcacac

SEQ ID NO: 16967 - DNA, 276 bp, Homo sapiens
gcatatgtggagctacaagaacaaaatattcccagagttctttttgattaagtatgggcctagatgtgagtttttaagacccatgatgtatttcccaaatctggaagatgaatactaaaagaaaactcaacttgaagtcatgtataaattcctgtgtgaactaaacttcgtgtaagtaatcaaagctgtacttgaaaagttaacttttagaaaatgcaagtagaaaacttctcattaccccatcctattctttctttctttctttttttttttttt

SEQ ID NO: 16968 - DNA, 425 bp, Homo sapiens
  misc_feature (1)...(425): n = a,t,c or g
gaggngttgaanccnncttnaaccttcttagtgtccctaaatacccacgcgtccgaagaggccgaactagaaacatcaaatgtataagaattattttaaataactggttgctcatcttggttctctgagccaagatgagcaagcaattcccagactttttttttttnnaaacgggncctnattntgncnccnagnntnaannncaggggcncaancncagttnacngncccctnaaactccggggctnaggggatnntcccgtttngncctcntaaggcaanggnatngcnggcgnnaccccttacttccagcccccattncccaaanttttaaaaggtacctcaaagcnaatgaaccanaccaaaggtaaattccntttacncccttatnggcntttcccccctaaagcnggtactaacaaaaa

SEQ ID NO: 16969 - DNA, 325 bp, Homo sapiens
gaatctgtttgacttgaaaatttgttcttcccttcactttatttcttaagcttattgaaattacataagtaagatagtaactttgtgtacccatgaaatgtaaaatatttggaaaatattataatatcttggattcttatctccttagtgacttctcagtcactatgtgctttgtgattctgtttgatctaccatttaccactaagtttctcccagataggaattttgaaacattatataattaaataaatatatcacctaccctgtggtttatttttggtggtcacacttttatttaacaaatatttttggagtgctatatgtc

SEQ ID NO: 16970 - DNA, 306 bp, Homo sapiens
ccttcctcgaggaggacggggatggcctccctgttggggtggtccttgtggccttccttgaggaggagggggatggcctccctgttggggtggtccttgtggctttccctgaggaggtggtggaccttgttgctgctggcctccttgttggggtggtccctgctgagggccatcatcctggttcccatcaccagcagagggttgagattgctgtcctcccaaaggtggtccctgacgctcctcatctatgaactgctcagagtctcctccatctgtgaaaacttccactcttgagtagatacagca

SEQ ID NO: 16971 - DNA, 771 bp, Homo sapiens
gggaaaatcaccggatacaaactacttattcatgggtgactatgtagacagaggatattattcagtggagactgtgactcttcttgtagcattaaaggtgcgttatccagaacgcattacaatattgagaggaaatcacgaaagccgacaaattacccaagtatatggcttttatgatgaatgtctgcgaaagtatgggaatgccaacgtttggaaatattttacagatctctttgattatcttccacttacagctttagtagatggacagatattctgcctccatggtggcctctctccatccatagacacactggatcatataagagccctggatcgtttacaggaagttccacatgagggcccaatgtgtgatctgttatggtcagatccagatgatcgtggtggatggggtatttcaccacgtggtgctggctacacatttggacaagacatttctgaaacctttaaccatgccaatggtctcacactggtttctcgtgcccaccagcttgtaatggagggatacaattggtgtcatgatcggaatgtggttaccattttcagtgcacccaattactgttatcgttgtgggaaccaggctgctatcatggaattagatgacactttaaaatattccttccttcaatttgacccagcgcctcgtcgtggtgagcctcatgttacacggcgcaccccagactacttcctataaatttctcctgggaaacctgcctttgtatgtggaagtatacctggctttttaaaata

SEQ ID NO: 16972 - DNA, 374 bp, Homo sapiens
acagtttattacaacactacatctattgtaatcaaagtgatgctgtttacagacattatcatataaacatttttaacaagaacaaactactacaaaaacaagcatttacttgactttttttccaattgcttgcacatcataatggccaaatgtatataaccagtaataaagttgcaaaagctataactttttaaatcacacaggtttccttcaaataaaacagttaagcaacataaaaaataaaagtagagctactggttaccatttatgcagatttgctttattcagatctattcctgttcattttatccatgaatccttacaggttcagttcaatcacaagaagcaaactgctggacaagcgtcatttttcc

SEQ ID NO: 16973 - DNA, 371 bp, Homo sapiens
ggggaggggtgataatggaaccaggagggtgtggtggtcatggcccagtgagaggatgccaggctgtggccgtgccagactcagtgtgcctggccctggcatttcaggcagggaccactgaggggtgatgggagagatggggctgggtgagtggcatttccacaggcatccagaggggtgcgaaaaactgaggttggggaacagcaggggcagggaacagcctgtggagggtgtggtcatcagtgtcccccaccgacatggcacatccagcgagcccactgtgtccccagcacctgcggtgcagggggctggcaccttcaggggcggcttcgtgcagacgtccacccagtcagtccccacaggtttatcaa

SEQ ID NO: 16974 - DNA, 356 bp, Homo sapiens
  misc_feature (1)...(356): n = a,t,c or g
gaataatcctgacttcatcaagccaagagaaatgatttaatagctattttccattcctagcatatattaatgtaatttttgagcgtctgttacagataaatggtgaccgtaagtttggggagacgtaaaacggttcacttggtagcctgccagtggtgcattggaaacatttgcgttggttatagccagccctggagaggaggaacgttttaattggcagatcccacaatgggtcttctcttccttatgctgtggttttgttaaccattacttttttattccacttttatgttagcgtttttcccttacgaaagaaaggataaaagggagcaggggaaaaataatanaatancaac

SEQ ID NO: 16975 - DNA, 323 bp, Homo sapiens
ggagacatatacattgtgtgtgtctttctatttttttttccaagaaaaaatgaaaatatttatacccttaagtcaataattttaaactgcgggagggtcagcatgctttattgatatctgaacatccctgttctactgatctttttccgtagataagcatgtaaaagatgaatgttcatttttaagtatacacttagagaatatatttcaaataagcttagaaccaaggacctttactaaagtccagtattaagaatgttggaccctgtattcatgtcctatcttattccacaaagcatttgaggtgacccataacaaggcac

SEQ ID NO: 16976 - DNA, 379 bp, Homo sapiens
gcgccctccgacaaaggtggagagacaggggagtcggatgagacggccgctgtgcccggggacccgggggctaccgacaccgatggaatcccagaggaaactgacggagacgcagatgtggacttgaaagaagctgcagcggaggaaggcgagctcgagagtcaggatgtctcagatttaacaacagttgaaagggaagactcatcattacttaatcctgcagccaaaaaactgaaaatagataccaaagaaaagaaagagaaaaagcagaaagtagatgaagatgagattcagaagatgcaaatcctggtttcttctttttctgaggagcagctgaaccgttatgaaatgtatcgccgctcagctttccctaaggcag

SEQ ID NO: 16977 - DNA, 351 bp, Homo sapiens
gatcactggtacacatgcatgcctcacccacacatgcatctctccctgaaacacacatgatcccgggagccaaaagcgtatcttattcacctctgcagctctttgcacaggtcctcaaagtgtggcccctgatcagcagcagtaatatcacctggggacttgctagaactgcaaagtcttgtgttctatcttcaccccagtgaaccagaaactctgggagaggggcccagtggtctgcattttaacaagccctctgtgatactgatgcgtgcaacagttggagaaccactgccttacgacctacttgcaggccactggcttttcactacttctggatagttcagggagtca

SEQ ID NO: 16978 - DNA, 370 bp, Homo sapiens
  misc_feature (1)...(370): n = a,t,c or g
gcagctaggtccctccccagcgcgctgagctcacagcgcaggagccggtcgcagccacgcaggccggtccgacgggaccactgcttccctcctcacatcccaggagacaccaggtggggcgtggcacctcccacacacggctggagggactcccaggatttcccgtccttccgaattcgtggggggtcagaggactgcggggaggcgtttctcatcctcgctggggaaaggactcacctggttcccaaagccagtttgctcttcctctacttcctgccagaggtcgtaggatttctgatgatctgccctgatgtcccaacattcttggggagcctggccttaaagaacaatggaaagaancnatccttag

SEQ ID NO: 16979 - DNA, 356 bp, Homo sapiens
cgcggtgtggtggcagcaggcgcagcccagcctcgaaatgcagaacgacgccggcgagttcgtggacctgtacgtgccgcggaaatgctccgctagcaatcgcatcatcggtgccaaggaccacgcatccatccagatgaacgtggccgaggttgacaaggtcacaggcaggtttaatggccagtttaaaacttatgctatctgcggggccattcgtaggatgggtgagtcagatgattccattctccgattggccaaggccgatggcatcgtctcaaagaacttttgactggagagaatcacagatgtggaatatttgtcataaataaataatgaaaacctaaaaaaaaaaaaaa

SEQ ID NO: 16980 - DNA, 341 bp, Homo sapiens
  misc_feature (1)...(341): n = a,t,c or g
ctttgccagagattgctatcttttaaatcttttaaagatttacagaccatcatgtcattttttaaatgattacatggtatttaccagggtaggactgtatgttaattgtcggggtaggattctgttgccggggtttgcattttagaaataatgctttagctctagtttggggtcaaactgtagtgggaggggttagtggtgaaataaggcagggagattaggtgggtagtgatcaacaccataagacccagacccaggaaaggctacaatgagatangaaggaggtacaattgacatgctgatttaatggnggctgagaaattttggatgctaaagttgct

SEQ ID NO: 16981 - DNA, 546 bp, Homo sapiens
  misc_feature (1)...(546): n = a,t,c or g
ggggaaaaggccgctatggcgaagtgtggcggggcttgtggcacggtgagagtgtggccgtcaagatcttctcctcgagggatgaacagtcctggttccgggagactgagatctataacacagtgttgctcagacacgacaacatcctaggcttcatcgcctcagacatgacctcccgcaactcgagcacgcagctgtggctcatcacgcactancacgagcacggctccctctacgactttctgcagagacagacgctggagccccatctggctctgaggctagctgtgtccgcggcatgcggcctggcgcacctgcacgtggagatcttcggtacacagggcanaccagccattgcccaccgcgacttcaagagccgcaatgtgctggtcaagagcaacctgcagtgttgcatcgccgacctgggcctggctgtgatgcactcacagggcagcgattacctggacatcggcancannccgngagtgggcaccaagcggtacatggacccgaggtgctggacgagcaatccgcacggactgcttt

SEQ ID NO: 16982 - DNA, 351 bp, Homo sapiens
ggggtgatgccaagggaagagaaggccagtgctgggccagaggtcaatgccaccggcagctgccagcatccctctccagttatgtgtccccatgccccctccaggccctgggatgtgtgctctatgcctgcttcatcctgggccgcctctgtgttcctgtctttgccaacatgagccgagagcccttcagcacccgtgccctggtgctctctatcctgcatgccacgttgccaggcatcttcatgctgctgctcatcttctttgccttcctccattgctggctcaacgcctttgccgagatgctacgatttggagacaggatgttctaccgggactggtggaactcaacgt

SEQ ID NO: 16983 - DNA, 450 bp, Homo sapiens
gcgaaccctgatcccttatgtcaataggatgtccaactcaaaagatactgccacattactagaatcccattcaataattaatagtctagttcatcatattgtatgagtgtctcccagggtgaggctgctcagattggcaggcttcctttcattcttgtgaggttgcaaaagcagaagtagtcttagcaaacacagaactttaccatttcatgagtttgatataattgagctaagaagcaatgtcatctcttgctctgagcctcttttgaggtgttaatgtgatattggaatcctctcagttcataatccacttattcatttctttcctctgagctactgtttcttctctcttaataagtacccaaacttttccacctttggaaggagcattacaatcagccctgtgatggctagattgcaggcaacaatactagtctagcaagtacctct

SEQ ID NO: 16984 - DNA, 355 bp, Homo sapiens
gccagaatctctccaaagaaattcctcaaacagaatttcacacagggtattccatggagaatgaggtaggtgcaagtccagtgtggaaagcgccatttagaatgatgatggtgtgagtcccttgtgggtggctttcatggctgcttcccagggcttgcccattgtgagctagggtagcccagtctccatgacccctgctttgggaggatggggtgggtggagggttcatttgctggcttcctggtctgagaccctgtggcaaggggccgtgtatggagaagtgccgttccacccaggtggggagtataggttgttggattcatccatcttgactcaaggaagaagaagccacagg

SEQ ID NO: 16985 - DNA, 58 bp, Homo sapiens
gctgaagttaagaaagccacctttgcctacagatggtgttcacagtgttggtgtggag

SEQ ID NO: 16986 - DNA, 318 bp, Homo sapiens
tggggttttgtttctgttgttgttcaaatgcaaaaaaaagaaaaaaaaagaaaaaaaaaggtgactcacattgttacacatgctttaaaatatgtattcaaatgttattaaccacaatgacgacctgctttgatttaaccaagaagacggctgcggagcctagcagactcaggcctgtgggaatgggatttgttacaaatctaggtttgttactggcttcagaaagctaattaagtgctctgaaaaagacaccgtttcttgaaacaaagatggttgtattcctcactttgatgttgttttgcaagatgtttgtggaaa

SEQ ID NO: 16987 - DNA, 414 bp, Homo sapiens
cccacgcgtccggaaaggttaatgagcatcaattacctgggcagcgtgtaccccagccgggccgtgatcaccaccatgaaggagcgccgggtgggcaggatcgtgtttgtgtcctcccaggcaggacagttgggattattcggtttcacagcctactctgcatccaagtttgccataaggggattggcagaagctttgcagatggaggtgaagccatataatgtctacatcacagttgcttacccaccagacacagacacacctggctttgccgaagaaaacagaacaaagcctttggagactcgacttatttcagagaccacatctgtgtgcaaaccagaacaggtggccaaacaaattgttaaagatgccatacaaggaaatttcaacagttcccttggtcagatgggtaca

SEQ ID NO: 16988 - DNA, 772 bp, Homo sapiens
  misc_feature (1)...(772): n = a,t,c or g
ggcggatggtggttcctgctgccctcaaggtcgtgcgtctgaagcctacaagaaagtttgcctatctggggcgcctggctcacgaggttggctggaagtaccaggcagtgacagccaccctggaggagaagaggaaagagaaagccaagatccactaccggaagaagaaacagctcatgaggctacggaaacaggccgagaagaacgtggagaagaaaattgacaaatacacagaggtcctcaagacccacggactcctggtctgagcccaataaagactgttaattcctcatgcgttgcctgcccttcctccattgttgccctggaatgtacgggacccaggggcagcagcagtccaggtgccacaggcagccctgggacataggaagctgggagcaaggaaagggtcttagtcactgcctcccgaagttgcttgaaagcactcggagaattgtgcaggtgtcatttatctatgaccaataggaagagcaaccagttactatgagtgaaagggagccagaagactggattggagggccctatcttgtgagtggggcatctgttggactttccacctggtcatatactctgcagctgttagaatgtgcaagcacttggggacagcatgagcttgctgttgtacacanggtatttctagaancagaaatagactgggaagatgcacaancaaaggggttaaaggaatcnccaatgcncctaacctgtattttgtaancagaaataaattgcttttaaagaaaaaaaaaaaaaa

SEQ ID NO: 16989 - DNA, 385 bp, Homo sapiens
ggttgagccaccgcacccagccgaaaaatcttatttaagcctgaccttgggagagttactcttatgcttaggatatagaaagctacaaaatacattgtttccatcataacaacaggaaaaagccagatagataagccacaaaaacataacttttcttgagtccagcagagagctgaagtcaaaaggtaaccaagtaatcacataagaacagtctcagctgtagcagggcccagaaagaataggctgccatcacaccagctggtaagaatgtaccagctataatcttaacgtactggtaaaggccaaaggtgcactagatgtcagtctggaattacctgggacttcagacccaaggagaattcgcactcttacaaccttttcacgg

SEQ ID NO: 16990 - DNA, 417 bp, Homo sapiens
  misc_feature (1)...(417): n = a,t,c or g
ggagcatctaatattctacaatggttcctgggcactatccaaagttggtattgattctgatgcatcaactcattatttttcttatcaattgaacagtataaatgcaagactaacagcagaagccatagaacccaggggccttggacctgtgctgatcaaaagctttccgtggcatttcattgatttccctgagatcagccagttcctttagccctttttgtccatctctcattcccaacatctttcatctcttttctctgctccttctgcactccaggattgtaatccttaggtcattagtccatccatccatagttcttctatctggcttgatgctggacctttgggcctgcttgattgtctgcttcgtctcctgaggtggttgctacatacactgnggctcctggaggntcttcc

SEQ ID NO: 16991 - DNA, 315 bp, Homo sapiens
ggcgatggcatgatcttggctcactgtgacctccgcctcctgggttcatgggattctcctgtcttggtctcctgagtggctgagattacaggcgtgcgcaaccatgcccagctaatttttgtatttttagtagaggtgaggtttcaccatgttggccaggctggtcttgaactcctggcctcaagtgatccacccgcctcagcctcccaaagtgctgggtttacatgtgtgagccactgtgcccagccccttcactgccctttgaagactccctccttccactgtagtctgtgacctctgggcttctggagggac

SEQ ID NO: 16992 - DNA, 323 bp, Homo sapiens
  misc_feature (1)...(323): n = a,t,c or g
gagtaagacacttttttatgcatgacagtctctgttttagggtgagaaaaggtatattatggaggaagacagtgtataaacttggcctccatcgagttcttccatctactgactctcaggtagagtggaaagaatacagagtttcctctagtcaaatccatgtttgaatcttaattcgtcatttcctagcctgtatgacctccagcaagtttgagcttctgtgagccttgggttcctcatctttaaaatgagaatgtgatgttgcganaattantgaanatgttggaaggatttagtgnagggnctttngtaggnggnctttt

SEQ ID NO: 16993 - DNA, 415 bp, Homo sapiens
ggttcatgtctgtatcccaagtgcccagaacagtttctggcattgtagataattaagaaatgtttatcaaatggctcagtttcatttgtggttttctctcccttaaaaacaaagaaatagcctgggtgcggtggctcacgtctgtaatcccagcactttgggaggctgaggcaggcagatcacttgaggtcaggagtacgagaccagcctggccaacatagggaaatcctgcctctactaaaaatacaaaaattagctgggtgtgatgatgcatgcctgtagtcccagctacttgggaggctgaggcaggagaatcgcctgaacccaggaggtggaggttgcagtgagcctagattatgctacggcactccagcctgggcaacagattgagattccatctcaaacaaacaaaaac

SEQ ID NO: 16994 - DNA, 381 bp, Homo sapiens
ggtgggaaacacctgcagacacaaaatgagtagtcatcctgtctccctttcaacagggatctgaacaggtgttttgatacttgaaagatgtgcatgtcaagtgagggtttctttctgcgatgttcaactggaactctcccatcagtagttacaattagaaatacctactgatggttagtctgaaggccattctcatggtcacctatacagtgtgtttccctgtgagctagcagacacaatgaccaggaaaaaacctatgaattccattcttaggtttcccagccaattgctcccttctgctttagaagtgactaggtactgagagtacaaacactcccactttataatgaaggcgtcatgtcaccccttcctttacaggtc

SEQ ID NO: 16995 - DNA, 817 bp, Homo sapiens
ggaaagattgaaagtaaaaatatatattacgatataatggcaaatattaacctaatgaaagctgagggaacaatattaacgtcttacaaaattgactttaagtcaaaacagagggtcaacacatattgataaaatgttaaaaactgtactataattgtttgtaagcaaatgtgaaaacacacccaatttagcctttcccaggtggctgccaaagttgggagggggaaggccctggtgcttgatggtcgaggccatctcctgggccgcctggcggccatcgtggctaaacaggtactgctgggccggaaggtggtggtcgtacgctgtgaaggcatcaacatttctggcaatttctacagaaacaagttgaagtacctggctttcctccgcaagcggatgaacaccaacccttcccgaggcccctaccacttccgggcccccagccgcatcttctggcggaccgtgcgaggtatgctgccccacaaaaccaagcgaggccaggccgctctggaccgtctcaaggtgtttgacggcatcccaccgccctacgacaagaaaaagcggatggtggttcctgctgccctcaaggtcgtgcgtctgaagcctacaagaaagtttgcctatctggggcgcctggctcacgaggttggctggaagtaccaggcagtgacagccaccctggaagctcatgaggctacggaaacaggccgagaagaacgtggagaagaaaattgacaaatacacagaggtcctcaagacccacggactcctggtctgagcccaataaagactgttaattcctcaaaaaaaaaaaaaa

SEQ ID NO: 16996 - DNA, 325 bp, Homo sapiens
ggctctgagggcagccttgaactacctttgtatcccagtagttcttctcacagtaccttgcacattgtaggtattcagttaatgcttggttgagtgaatatataaccaaatatcagggttggttttttcatttactgtatctgtctctttgagctagtttgacctcagtgaccttaaagaaattccagaaaagaagaaactatggattatattaagatgactggagggccaggcacggtggctcatgcctgtaatcccagcactttgggaggccaaggtgggcagatcacctgaggttaggagtttaagaccaccctggccaaca

SEQ ID NO: 16997 - DNA, 419 bp, Homo sapiens
gcaagttgcagctgctggcggtggtggccttcgcggtggcgatgctcttcttggaaaaccagatccagaaactggaggagtcccgctcgaagctagaaagggctattgcaagacacgaagtccgagaaattgagcagcgacatacaatggatggccctcggcaagatgccactttagatgaggaagaggacatggtgatcatttataacagagttcccaaaacggcaagcacttcatttaccaatatcgcctatgacctgtgtgcaaagaataaataccatgtccttcatatcaacactaccaaaaataatccagtgatgtcattgcaagatcaggtgcgctttgtaaagaatataacttcctggaaagagatgaaaccaggattttatcatggacacgtttcttacttggattttgca

SEQ ID NO: 16998 - DNA, 508 bp, Homo sapiens
  misc_feature (1)...(508): n = a,t,c or g
tttgatttgcnntaccagntatgacatgattacgaatttaatatcgactcactatagggaatttggccctcgaggccaagaattcggcacgaggatcacttaatattttgtttattttttatcatacaaacatattgttttaatttgcacttgaaaataataggccaggcatggtggctcacgcctaaaatcacagcactttgagaggcagagacgggtggatcgcttgaggccaggagttcgagagcagcctggccaacatggtgaaactccgtctctaccaaaaatacaaaaattagccagatttggtggtgcgcacccatagtcccacctgctcaggaagctgaggcacaaaatcacttgaacctgggagggagaggttgcagtgagctgagatctcattgcttcccagcatgggcaacagaggggaaactgtctcaaaaaaaaaaanaaanatgnaaatgggaannngnnnaanttatnancttgggccntgaggcccccccct

SEQ ID NO: 16999 - DNA, 524 bp, Homo sapiens
  misc_feature (1)...(524): n = a,t,c or g
ggggcctctgagcaccgcttcaggagagcggcctgaggaactccagtgaggaaagcccgtcaagagcccacccaggggtcacaccgtcctgtgggacagagccagaccccacccccctgcccagcctgcctggccgctgccctcccggcgacagggcggagcccctccgtgctctctcactgcccgctccaccatggccaggcgcaaacgcaaacagtgctgggtgccaaggggagaatccatgcggagccgtcgagttccatgcacttcccggccctccgcaacccgggcagctcagctggaaggccgctcccagatcaatcccaagctccccgacagggggccggactgcgacagtgtggcgttcccagcgcggcaacaaaaagtaaccccggcgatgacaggcgcccggcggtaacaaaagtaacaagcggaggcccgtctgnccgccccgggctcccgcanattggggttcantcggaacttctacatgacatggtggagttngaattaataaagcccca

SEQ ID NO: 17000 - DNA, 352 bp, Homo sapiens
gcactttttaaccttgctgacatccaaatagaagataggactatctaagccctaggtttctttttaaattaagaaataataacaattaaagggcaaaaaacactgtatcagcatagcctttctgtatttaagaaacttaagcagccgggcatggtggctcacgcctgtaatcccagcactttgggaggccgaggcggatcataaggtcaggagatcaagaccatcctggctaacacggtgaaaccccgtctctactaaaagtacaaacaattagctgggtgtggtggtgggcgcctgtagtcccagctactcgggaggctgaggcaggagaatcgcttgaacctgagaggcg

SEQ ID NO: 17001 - DNA, 405 bp, Homo sapiens
  misc_feature (1)...(405): n = a,t,c or g
gatatgaaacataaatgaattttgagtttagacttcagtcccatccccaaaatatctcattatgtatatgcaagtcttccaaaatccaaaatggtctaatttccaaaacacttctgctcccaaacattttggatacgggatcctcaacctgaatagccaagaaacatattatagaataatttttattttatttatttatttatttatttagaaacaggatctcactctgttgcccaggctggaatgcagaggcatggtctcagttcattgcaacctccacctcctaggctgaagggatcctcccgcctcagtctcccaagtagctgggactacaggcataagccaccacgcctggctaatgntttattttttgatattttgtaggcatagggttttgccatgttg

SEQ ID NO: 17002 - DNA, 198 bp, Homo sapiens
  misc_feature (1)...(198): n = a,t,c or g
tttgnanatcagctatgacatgattacgaatttaatacgactcactatagggaatttggccctcgaggccaagaattcggcacgagcccgcctcggcctcccaaagtgctgggattacaggtgtgagccaccgtgcccagccacaatttacttatataatgaactgcacaggtacctctgaaactttttttttttttt

SEQ ID NO: 17003 - DNA, 324 bp, Homo sapiens
ggagtttttaatctcttaggcttgtccacagtgagcctccaggaattttccactacagtttaggttttcctacccccgtagtggatcttcaggggtttctacttacaggcttctgctccagtgaattgtgattccttgtattcacctgtccaatttggggggctgtggcttgtgacatttctccaacagatccaaggcagatctctaagaagtgctgatttttcattttattcagctttttactgttaggacggaataacgactttcaagctccttacatgcctattgggaactggacgtccgtttatgaagtgtttgctttgc

SEQ ID NO: 17004 - DNA, 1093 bp, Homo sapiens
gatggaaatgagtgttgagcaggaaattctggtgactggtatcaaggttgtcgatctgctagctccctatgccaagggtggcaaaattgggctttttggtggtgctggagttggcaagactgtactgatcatggagttaatcaacaatgtcgccaaagcccatggtggttactctgtgtttgctggtgttggtgagaggacccgtgaaggcaatgatttataccatgaaatgattgaatctggtgttatcaacttaaaagatgccacctctaaggtagcgctggtatatggtcaaatgaatgaaccacctggtgctcgtgcccgggtagctctgactgggctgactgtggctgaatacttcagagaccaagaaggtcaagatgtactgctatttattgataacatctttcgcttcacccaggctggttcagaggtgtctgcattattgggccgaatcccttctgctgtgggctatcagcctaccctggccactgacatgggtactatgcaggaaagaattaccactaccaagaagggatctatcacctctgtacaggctatctatgtgcctgctgatgacttgactgaccctgcccctgctactacgtttgcccatttggatgctaccactgtactgtcgcgtgccattgctgagctgggcatctatccagctgtggatcctctagactccacctctcgtatcatggatcccaacattgttggcagtgagcattacgatgttgcccgtggggtgcaaaagatcctgcaggactacaaatccctccaggatatcattgccatcctgggtatggatgaactttctgaggaagacaagttgaccgtgtcccgtgcacggaaaatacagcgtttcttgtctcagccattccaggttgctgaggtcttcacaggtcatatggggaagctggtacccctgaaggagaccatcaaaggattccagcagattttggcaggtgaatatgaccatctcccagaacaggccttctatatggtggggacccattgaagaagctgtggcaaaagctgataagctggctgaagagcattcatcgtgaggggtctttgtcctctgtac

SEQ ID NO: 17005 - DNA, 497 bp, Homo sapiens
  misc_feature (1)...(497): n = a,t,c or g
gcggcacgagggaattccgatccaggatgaatttcctgaagaaacaaatccctgccatcacctgcattcagtcacagtggagaggatacaagcagaagaaggcatatcaagatcggttagcttacctgcgctcccacaaagatgaagttgtaaagattcagtccctggcaaggatgcaccaagctcgaaagcgctatcgagatcgcctgcagtacttccgggaccatataaatgacattatcaaaatccaggcttttattcgggcaaacaaagctcgggatgactacaagactctcatcaatgctgaggatcctcctatggttgtggtccgaaaatttgtccacctgctggaccaaagtgaccaggattttcaggaggagcttgaccttatgaagatgcgggaagaggtttcaacctcattcgttccaaccaacagctggagaatggactcaatcccaagggatacaaaattggacngctagtgaaaaataagatta

SEQ ID NO: 17006 - DNA, 419 bp, Homo sapiens
ggtccattcactttagtgctactcaaaagagctgctcccagaaagctctggaggataaaaacagggcttccttatctggggatttgctgttaggctgacagtgaccagctggtgacaagtgtgacgccgggcacagcagtcctgtgaggctggtctggtgtcttgctggttccgtctggtcagaattaaagcagccccccgggaaagttggcctagaatgtagaacttaaaatggcagtcctctttttttctttttggttcacatatatttaatgtaatttaggtacacttttttacatctgtcagatttgaatgaaataactgatgtttttattgaacattgtgttcatgcttttgaagaattaaactgctttttctaaaggtgacgtgggattgtgtgtatgtgaacatgaatgtct

SEQ ID NO: 17007 - DNA, 390 bp, Homo sapiens
gggtatctgtacccctctaagaccgcatggcaagaatacaattttatatttaatagtgatcagcatggatgttggtgcgtcacaaacattgactcagcagtgtctaaacctgggcatttagaacaaggcctcacagaatcttctggaagtgcttcaaactcctttccaaacctagtcgtcagttgttttttgtaaccttcccatgttaggcctgggtggatcccctcttaaggctgtactttagggaaatattttttatcttcatatcactttatctgtcattcattctcctattccctgttggctgcatggggcagattaaaacagactctgattggactaattagaataattacttcaaggctaattgcttacttgctgctatcttta

SEQ ID NO: 17008 - DNA, 331 bp, Homo sapiens
ctcagaagctctggtgaggctgatcaaaaaaaataataattttaactgttttcatgcagacattctccttgcaaattgtcagcatttgaaacatttcatttatagaagtataagtcaatatggcccactccttttctttgtgaacttgaacttgtcacctaaaagcaaattgggctgctttagaaaacaatctcacagtttttcaaaaaactaaatatagagttaccatagaacccatcaattccacttctagatatatacccaaagagaaattaaaatatacatccacacaaaaacttgtatactaatgatcatagcagcatagtccata

SEQ ID NO: 17009 - DNA, 332 bp, Homo sapiens
gtcaatgcatgttgtggctgctggcaaagagttggtttggcctccacagagagaggatgggaaactagggtagaagctacaagggctaagaacttgatgctttttctccagtacttggtacagaatagagcagccaggcccaatgtggaagggtgggcttggtttcctgacaagccaggttagaccaataatggttgaagaggctgccctgggctcagaatgggcagctggtccttgcctgggagaactttgtggaaggaaaaggtaagattccttaagtccaaggagagaaccaatccagggtcaaatttcttttcattccctggatcacg

SEQ ID NO: 17010 - DNA, 512 bp, Homo sapiens
  misc_feature (1)...(512): n = a,t,c or g
ctccaggtgtccacccaggtaaaacaatgccagattctctcctgtctgtttttccctcatggcttccatgttctgaggtcgtctctggagttcctcttcattagtatctttcaccacgaggtgcccaggagcctggggatgctggaaaggggcagcctgtcctgtgtgacatctccaccccactcctccactgcttggcgganaggccgcagaaagcagtgtttgcagaaagcaggtgactagctaatggcaaagggccagctaaaatccagattctttccacgcagtaatgcttcccacccctcgccatttcccaaatttcccaatctgacaccaggaagtagctgtgaatgtccagcagctggggaccaaactggaaaggccaaggagaaagaatgaaaggcctttgggtttggcctgggcggggtcttccgtgacttggggatctttctgggtctggtcctctctttggggttcctgncctctttccttttcaaccnctgggggggagg

SEQ ID NO: 17011 - DNA, 523 bp, Homo sapiens
acagctatgactgattacgaatttaatacgactcactatagggaatttggccctcgaggccaagaattcggcacgagggcaggaaagctccacacacacagcccagcaaacagcagcacgctgctgaaaaaaagactcagaggagagagataaggaaggaaagtagtgatggatctcatcccaaacttggccgtggaaacctggcttctcctggctgtcagcctgatactcctctatctatatggaacccgtacacatggactttttaagaagcttggaattccagggcccacacctctgccttttttgggaaatgctttgtccttccgtaagggctattggacgtttgacatggaatgttataaaaagtatagaaaagtctggggtatttatgactgtcaacagcctatgctggctatcacagatcccgacatgatcaaaacagtgctagtgaaagaatgttattctgtcttcacaaaccggaggcctttcgggccagtgggatttatgaaaaatgccactc

SEQ ID NO: 17012 - DNA, 459 bp, Homo sapiens
  misc_feature (1)...(459): n = a,t,c or g
ccccttgganaccgttatgacatgattacgaatttaatacgactcactatagggaatttggccctcgaggccaagaattcggcacgaggtcagataatcgggacgaaactggcatggaaagagcgagcctagggaggatgccgctgggcagtgtgcatgggggagctgctgccaggctgccctccagtctgctcctgtggttactggctccacagcacctcagagagggcggccctggcttcagaaatgccagccatagtgctcacaaatgcagaagagatggaagcggtgacagaatcctgaaagtttggttattgattgaagttttaaattggtaacttaagcttccttggcacgatacaaaatacctcttaaagacagcaggcttttttatttgtaggtgtgaggaactggctttaacttttttctcctcctagtttgcatgttttccttctctcg

SEQ ID NO: 17013 - DNA, 414 bp, Homo sapiens
ggccagggaaggcctgtgagggacacgcagtctctgcctcctgaggtcatgctgaccgcttgctggcccaagtctaatttattttagtttctatgtctgtgaacaaggccaatgtgcatgaatgatggtctggcatctcgatccatgtttacaaatcaatgagcagaccacctaaatcagtgaactgtgcattttatagatgagaaaaggcaagttgggggaaagagactggagagggtggtggtaattatagaaatgagactttcataactcaagtttccatcccatggcgttttctttaaataagggattcccaatcttcagaagcactagtgcagtataactttggataaacacagttctgtcttatcagcacattgttttgtattcaataggtactcaatgtttaatatg

SEQ ID NO: 17014 - DNA, 344 bp, Homo sapiens
  misc_feature (1)...(344): n = a,t,c or g
cctgtccaaattcttctgcctggntgcagcattccttcttccagggtctggggcaagctcccttctaaagggaaggtcttatgacccacagtcagacaggctgtggaagattagagttctgccttgggttggtggaaaggagggcaggaaaaggtcagcaagagaagagattctgttttctgaggtttaatgtgccccaacattatacaaaagactgtagtaaggccaggcacagtggcttacctctgtaatcccatcactttggaaggccgatgtgggcggatcacttgaggccaggagttcgagaccagcctggccaacatagtgaaatcctgtctctactt

SEQ ID NO: 17015 - DNA, 350 bp, Homo sapiens
  misc_feature (1)...(350): n = a,t,c or g
gcccttttctttctactgtgttcccacttacctccaaagataaccaaactcattcgtttttagtttatccttcctgtatttttatgtgatggatcatcagatacatgtatattttcttatatccccttctttcttactacagataatttttttcatactctgctttatttcacttaataatatggttgtggccgggtgtagtggctcacacctgtaatcccagcactttgggaggccgaggcaggcagatcatgaggtcaagagattaagaccatcctggccaacatggtgaaaccctgtctctactaaaaatacnaaaattagctgggcatggtggcgcacacctgtag

SEQ ID NO: 17016 - DNA, 348 bp, Homo sapiens
cggggtttcaccgtgttagccaggatgatctcgatctcctgaccttgtgatctgcccgcctcagcctcccaaagtgctgggattacaggcatgagccaccgcgcctggccgcaacttggaatttcatagctcccacgcctgccgtttggctgtggtgtgtaacacatgctgtgtgccaggcattgtgctatctgtttcaggtgtcccccaaaggaggagaggtgggtcggcccctcaccacctggcaagggaggccccccccgtgctgcagcctgcactccttgacgtttccttttcttgtttgtagatgaacttgaagcctgctgccttccttggatgtggtaaccg

SEQ ID NO: 17017 - DNA, 344 bp, Homo sapiens
cccatccatgcactcctctctcctggtcactcctcctcagccacctcccagagctggccctcccaaggacatctccagtgatgccttcactgccttagacccacttggggataaagagatcaaggatgtgaaagaaatgtttaaggatttccaactgcggcagccacctgctgtgcccgcgcggaagggagagcagacttcttctgggactttgagtgcctttgccagttatttcaacagcaaggttggcattcctcaggagaatgcagaccatgatgactttgatgctaatcaactattgaacaagatcaatgaaccaccaaagccagctcccgtcgacgcgg

SEQ ID NO: 17018 - DNA, 433 bp, Homo sapiens
  misc_feature (1)...(433): n = a,t,c or g
gagcaattctggtgactacaaatgcattgttttggagaatagttgtaaggtggaaaaagaattaggaactcgacagatagtgagttttaactttaaataacaattcttcttttgttttgttttgtttgagacggggtctcgctctgctgcccaggctggagtgcagtggcaggatcacggtttattgcagccttaacctcctgggctcaagcagttctccctcctcagcctccagagtagctgggactataggcaagtgccaccacgcctgactaatttttaaattttttgtaaagatggggtctcccatcttgcccaggctggccttgaactcttgggctcaagcaagcctcccacctctgcctcccaaagtccaaggattacaggtgtgagccattgccccagccagtataacagtttgtgtgngtgtgtg

SEQ ID NO: 17019 - DNA, 611 bp, Homo sapiens
  misc_feature (1)...(611): n = a,t,c or g
gtagcactgccctggggccgaggcagcttccagaacccagccagcagtccaagtagctggacccacgaggaggaaccaggctactttccccagtactgaggtggtggacatcgtctctgccactcctgacccagccctgaacaaagcacctcaagtgcaaggaccaaagggggccctggcttggagtgggttggcttgctgatggctgctggaggggacgctggctaaagtggggaggccttggcccacctgaggccccaggtgggaacatggtcacccccactctgcataccctcatcaaaaacactctcactatgctgctatggacgacctccagctctcagttacaagtgcaggcgactggaggcaggactcttgggtccctgggaaaaanggtactaagggcccgggtccaggattctgggaggnttcanttacgctnggcnaactgaagaactgggtatnaaggttgggccgggcttgaaggttgnnccccctggtgggaaaanaaaggggacccattttccaannntgcaaaaaccccttggngggaggaaaatttacccnaaaccttggcctaaccttgtaaaaaanttaacccaaaaaaaaaa

SEQ ID NO: 17020 - DNA, 514 bp, Homo sapiens
  misc_feature (1)...(514): n = a,t,c or g
tttgganatttgaanaccgttatgacatgattacgaatttaatacgactcactatagggaatttggccctcgaggccaagaattcggcacgagttttctctgggccttgtcctccgcctttatctgatgctgcagatgtaattctgtgttccgcttgtttgcttcatgttgtgttatgaacatgtccccctcaaatctccctgggagccttccagcgatcagccccctttgactgtgtggctctggccttggggaagagctgagggtctcctgccctaacggatggtttcagggtgtgaaggtcaaaggcctcatcctcatcagcccccagaaccctctgggtgatgtatactcccctgaagagctacaggagtacctggtatttgccaagaggtgaggcacccacactggccccgacagagcgtctgggcagcctggggttccaatgcgggtttagtgcaggtttttctactctcttgaccccactgtgggctgctacttgcttgggcccttc

SEQ ID NO: 17021 - DNA, 432 bp, Homo sapiens
  misc_feature (1)...(432): n = a,t,c or g
ttgagnaccagttatgacatgattacgaatttaataccgactcactatagggaatttggccctcgaggccaagaattcggcacgagtccagaatgaagaagaaaagaaaaaagctgagaaaaagttcattgatatagcagctgctaaagaagtcctctctgatccagaaatgagaaagaagtttgacgacggagaagatcctttggatgcagagagccagcaaggaggcggcggcaaccctttccacagaagctggaactcatggcaagggttcaatcccttcagctcaggcggaccatttagatttaaattccacttcaattaaaccaactgtttttctgctcttcttaatttttttaaagattaaaaacaaagaaatcttgttccgggaccctaatgaaaaaaaatttcaaatcttttcagtttgccatg
